United States Patent Application Publication US 2015/0376612 A1 - sequence listing, part 10

SEQ ID NO: 23851 - DNA, 1089 bp, Homo sapiens
aagcaggggtgcattgttaccatatgacatggcaaaaagggattacctgctaatgccatttggtttagtgatgccttgttacataaactactctggaggagttcaaatatccctcaggcgaacgcttccatccccaggttggtaacactatagctgagtattgttttatttgccatttttcaaaagagggagaaacatacccaagccattatccagcctaccaataatacatttcaagaaaacaaccgcaactcccaatcctttcttctgagggcaggatgttgtagggctattgttccttctcaggccactcttcaacctacagaaactggtctgggctacagtcagattacagggggtatcaggaggcctttgagagtcaggaagaaagtcttacagacagaagcccagctctagcaaagagggaaagatcactgcctttgaagctggatacatatgtggcctttaatttgagtgctggttggttgtcgttgggcaaatgactgaaactccttgatgcttattttctttatcttaaaaacataaaaaataaatgaggataagatgatgatgaccatcatagggttgttttaacgctgggatgcagtgatgtgtgtgcaagctcctggcacagcaacttaataccagtctcctctgtcctgtcttgcatctgctgaggatgaagaaggagagcagttgagtgtggccctgcctggctgggggcccttcctctatagttatcttctttataagccatttatagtcttggtataattttaaggaaaaaaaatcaaggcgctactttgcatttaaaattcatttttgaaacatactggcagcaaacgccacactattgcagttagggaagacaggagagcaaatgtcaggtcttggcaaagtggggtggggaattttttgagtgtgacatttgaataaagaaatctaaactaggaaaaaaaaaagttttccccgatcttatcatggtacaatgaagagttgtataaaaactgtttgtccctgctgcatgtttacttacccatgggcaggatatctcacgggccaaaagttcaaactactgctagctcccaa

SEQ ID NO: 23852 - DNA, 1033 bp, Homo sapiens
tgcattctgagggcattaaaccgcagtgaatatacaaaatttgcttttcattgtaaaactgaattttgggcttgcccaaactcatacatggcgaaatcaaattcattttccatggacctggagatcagcgtgaagcaaggtttctaaagagaagtgtcagttgcattatggattcatcatcatttgcttagcgaagacatcagttataacaagagattatattttcctgatctctagactactaagggaaggatattaaaatgtgagacaagtgattttaaagtttttaaggcttgatatgacctttccatgcaggaaaagtgggacaaagaaagaattgtggaggcagatatatgttctggtaccctctcacaccccactttcagacttcttttcccaggctttcactcctacctccacccctttgtcccacccactccaaatcaaggcctttttctgtcctgtttggaaagaactcaataagctgattcatgtgaggatgttaatgggtgagaacagctaatatacagtctcttctagagatactgactttgttcagatcattcctttaacttaaactaaaaagtctcgtcagtcaacaggtgtttgctgaacccagtcctgtactacatcaagggtaatacagagaggcaagataggatagtaagatacatgcaaagaacaaaggcatgaatctctcctagtggactttcaggactctcagggagcccaggaagatcaggaaggacacagtgccttctgtcaaaggcatcagaggagcccaggcctgctaatggtggcatttaaaggtatggctaaggatccagtaagcgatcccagagtgatttccctgtggcttgactggcactgctcttgcagtctgcacatccgggagggcggggtttgaggggccaggctgtgggtcaggtggaggggaggaatcagtttaggcagagccttagaaggaaggcccctgtggtggtcacaaagtggtaactgccaagcacatctgaaccaggaagaccccatcaga

SEQ ID NO: 23853 - DNA, 1103 bp, Homo sapiens
actgttgtcacaacaagcacactgtcctcacagctcccgtcagggtgtcctctgtgcagtggtgcctgctgccaggcggaggcagacattcagatggttggcagtatgcgtttccagaaaagtccacccaatgcctttgcaccatccctggcaaatgcctatctgtgccagtcccatctgttttcactccacattcatgcaagctgtcccacccccccccctttccagtttgctctgaaaacgagtccgaagccgaagctgaccagcagatggacaacttgtacctgaaagccttggagggtttcattgccgtggtgacccaagatggcgacatgatctttctgtcagaaaacatcagcaagttcatgggacttacacaggtgacaccctcctctatctctttcaaaagaagaaatgtttccatttgggggtagaaatgagtggaaggtgctagccacaatcccacttgacctctccctgcaaatgcccacggtgaccctcgctgacctcaggccacacgcctcaggccacgctcccacccccaagcattgggtttggctttgctcatgtccatcctggtagacagctctctactgactcattaacagaccaagtctctgtcatcatcagtagtccccgattacatctttctgtctgtggacctgacactggactgggattatgagaaaacccaattcagtctcctccctgcctccaaatctggaaggtggctcagcttactcttggagtcttttacttcactgttaggaataatgatgcctaaccttgtttttgaaacaggtggagctaacaggacatagtatctttgacttcactcatccctgcgaccatgaggagattcgtgagaacctgagtctcaaaaatggtatccttaattgtgtttacttccttcttgcccccactgggtgggaatctgcctcccctttgtctacgggtataagggagatagctcatggcccttgtgatgcaggaaaaatggatgtccttaaaaaatttaagtatgtagcctgtgagatgagattggggcattgagaggatccagtactcagaaatatctcctgctggccctgcatggtgcctgg

SEQ ID NO: 23854 - DNA, 1031 bp, Homo sapiens
agtatattgtgcctggagttgatagaaattccactagaatgccagatcctagaaccttttcaaccaaggtgtgcaacagctttgcgcattgtaattcccatagtccctattgtgggatccatggttccaagcccagtgctccctgccgtaaatgccctgttgtatcagatggttttctgtcttaagcagagcccgtatccccattgatagaagagaaatagcttagagttccatgcagaatttgacagacaagtagggtatgtaggcttcagttggttctactttcagagagttaagatggaatgaggcagctcatggcactacaggtcagttgccttctctccaaaatgttcactcatgcatgtgggcactcattgtatttgaataacagcaacagtgcctccctcagtttggaacctctagtccacttgctcactcatggtccctgccttaaccccagtcaagttcaaagccataggcatcatttgtccgactgacatattagggcatctaccagtcaaagggtgattgttgtagatgacctttggccttctagagcaggctgctttccacttgacctctgctgctattagcagacaaagagagagaatgggagagagagtgtattggacttcagtccccatcatgtgcactgcctggggacatcccagcacactcagagcaccactgccaaagggaacacttcccctctgttggccaagcccatgggtggtccaggagcagctgtcacattttgactgccaagcattttggagtggaagttgaccgaggcatcttccttctcactaggggccttgcgtgtgttttgggggtgaggggttggcttcctgcctgggcctctgtggagcttctcctttcttgcccagccttcaggacttcagtgtaggctctgcagcaaccccattgtctgctcaaggagggactggagagatgggattttccctcctgctactgcactgtttggagcgatgggaagtggaaagagctctccctctctgtccagacaggcc

SEQ ID NO: 23855 - DNA, 1045 bp, Homo sapiens
tatcatctaccccttctattctgtttttgaaatgtgattctatttttaaagtgccttttcctgttgtctggatgttctttttttctttagcatcttctaagcggtttaggttttgttttgttttgtttgagacaggctctcactctgttgcccaggctggagtgcagtggtgtgatctaggctcactgcaacctccacctcccaggttcaagtgatcctcccacctcagcttcctgagtagttgggactatagctgcatgccaccacttctggctagttttttgtttgtttgtttctttggtttctttttgttgttgttgttgttgttgtttggtagagaggaagttttgccatgttgtccaagctggtcttgaactcctgtgctcaagtgatccacctgcctcggcctctcaaagttttggaattataggcatgagccactgtacctgtctagtttgttttttgatggtatatcatctctgatttctctgaggatattaatgatagtgtttcaaattttttgtctctctgtgtaatctctaattttgatctctttcaggtagttcctcaaatgtctatctgtgtttacaagagtggcattgagcacatgagaaagcatgtatgggcagggctggttgactctgagcttccctgttggtcagggtttctcagcttcagtactgttgacattgaaggctggattgtttgttgtgggggggctgtcttgtgcactgtaggttgtttagcagcatccccagccttttccccctagatgccagcagcatccctcctccattgatggcaaacagaaatgtctccagatattgccagatgttctcctggggcaacaccagtcctcacttaccccacccccagttgagaaccactgttgtagggtgatctgttggggtctttttattggggaacctgtagggttagtaggtattggtcttcccccttgggctagtcatataaaccaggaaagaatcttctactcttctgcccgagggattcatcctgggaggcgagtgaaagaagcagagtg

SEQ ID NO: 23856 - DNA, 1109 bp, Homo sapiens
tcagtataacatcctggcagtgatataaaggagaaataaaaaggaaagtaattcatcataaaactatttatttcagtgttaaattcctaaactcccaaggctgactactccagaaatcataatgaagtaatcaggcctgcacctattaggtaaaatgaccacgaatgcaacagttacaaatattggctaacatagttattttttattagtgactcagatactaacagcaatgtagccagtggcatgtggttttctgtgatggtaagtaaatcctgtgatgtttgttttttctttttcttcttttttttttttctttgagacagggtgtcgttctgtcacccaggctggagtgcagtggcatgatctcagctcactgcagcctcaatctcccaggctcaagtgatcttcccacctcagcctgccaagtagctgggactataggcacacaccatcacacctggctcattttttatttttgtagagatcgtgttttgccatgttgcccacactggtcttgaactcctggactcaagcaatccacctgtctcagcctcgcagagtgctgtgattacaggcataagccactgcacccagcctcctgtgatgtttcaaacaaaataaagttcaatctttctccttcaatgtggactgaaattaccttcctagaaaattcattaaagtctgagggccgtggctcatgcctataatcccaacattttagggggctgaggcaggataattgcttgagcccaggagttcgatactagcccaggcaacagagcaagacccctgtctctacaaaaaaaaaataaaataaaaaaatttctgactagctgggcatggtggcatatgcccgtagtatcaactactcgggaggctgaggtggaggctagagcccaggaggtcaaggctgtagcaatctgtgatcatgctactgcactccagcctgggtgacggagtaaaaccctgctcaaaaaagaaaaagtttaaaatatgcactaaagttatgccaaaaaactttatttttttatatatgcagcaggatcaggtcctagattcatgcgattataaaaggtgttccatggtgagcaggtctatgcaaacctacc

SEQ ID NO: 23857 - DNA, 1104 bp, Homo sapiens
ggcgctggagtggtgtccaggcacattgtgggcactgctgcacattcaagtgcattgccttatttttaacatatagatacttaatgagagagctttgtaaatgtttataaggtgttttacaaatagatgttatttgaatctcatccttccctcctttatttattgcagttagcactgttctgggcacatagtaggtgcttagtaatgtttgttaagcatttctatattcacttgctccagcttacacttttattccctcctattgttgtatatgactgtctttttatatgtttatatcttgaattcccaactaaactgcaagctccagagggctatagtctcaataaatctttgctgattgcttttaaataatacatgatagcataccagctaacaaagcatggcacaaggtaaatcgtccaatgtgagtgtttttatttaagaaatgttttggatatgtattttaaaatagacatacacatcccaaaaacatatattttaaacagagatcactaaggtaggagggaacacccaggtccacatgaaggggacaaagaatagtgcagaagtaaggctcatgggcactgctggctgagctgcacacagaaaggggtctccagctgatggccattggctacatttctctgtggcattggaagagcttttgtttcctctcagagcgcatttctttagttttttgtttgcagattcttatcaggtggtaagtgtgtgtttttttttttttttttttttttttttgagacagggtctcactctgtcacccaggcatgttcatggctcactgcaggcccaacctcttgagctcaactgatccacccacctgagcctcctgagtagctgggactgcaggcatgtgccaccatgcccagctaatttttgtatttttagtagagacaggatttcaccacattgggaagactggtcttgaactcctggactcaagcaatctccccacctcggcctcccaaagtgctgggattacaggtgtgagccaccgcacctggccatgtgtgatatttttaaagtaaggttgtcattatcacatatcgaggactcttcaacaagggacagcctgaacactaa

SEQ ID NO: 23858 - DNA, 1514 bp, Homo sapiens
tagatgttaattatgttgatttaatcatttcactcgtgtgtgtgtgtgtatatgtatatatagagagaaaatattgctttgtaccttatataaaattataatttgtccatttataatatttaataataaaagtaaattattagggacgtacttagagctacaaagatgctgaattgtttataatggcaaaaattccctgcatctattaaaacttcatactatctgttaagatttcatatttattatgtagctaaagggaaaaaagtagttgcaaaacagtatgatctcatttctagactcatcagcatttggcacagttgcgtccttcctgaaactttcttcagttggactctcttggtttttctcccctctcattggactctgctccatctctttacctccttggtccctggttggagggccccagtgatgagcactcagctttgtggatgtcttcttctatagctacactccctaggcctaaatgagcttctgtcagtcttgtagcttgcacagtctacaaccaaagattcctggatttccatctccagcctggacctctttcctaaattctcaatttggttatccagctgtttactcaacaagtccatctacatggctgagtatctcaaaattaacatgtctaagatatgattcttcttttaccctccaagcctgtcctcccagttactcaggtcagaagccctcagctgggtgcagtggctcacacctgtaatcccagcactttgggagcccgaggcgggcagaattacctgaggttgggagttggagaccaccctgaccaacatggagaaaccccatctctactaatacaaaattagctgggtgtggtggcacatgcctgtaatcccagctagtcaggaatctgaggcagaaccgcttgaacccagaaggcagaggttgtgatgagccaagatcgaaccatagtactccagcctgggcaacaagagtgaaactgtctcaaaaaaaaaaaaaagccctgaagtcgtacttgaccttgctctttctcccataccacacatctagccttcggcacaacataccttcagaacatatccagaatccagacacttttttctaactcttccctctatcacctggttcagacctcctccatctctggcctgctttactggaatagcttccaactcacctttctgcttctgtctatgccccatggtcatctgttctcaacacagcagccagagtaagtcttaaaaatgtaagcgcaatcatgtcactgctctgctcagaatcctccagtgggtccccagctcagactaaacgccaaagtccgcacagtggcctacaagcctctgttccctctctgccttactcattgttccccaggcctcctggtctcctttgttgttccctcaaagttctacctgagaacctttgtacttttgttgttccctctgcctggaatgttcttccctatggacatgattcattctttcactcttttcaggtctctgctcaaataccacatc

SEQ ID NO: 23859 - DNA, 1050 bp, Homo sapiens
taatgatgtgtttatgtcatgccaattgtataaacatgatcttatatatttgtgattttttttctccctcccagataggagcatgctgctatgtggaatgttcagctttaacccagaagggattgaagactgtttttgatgaggctatcatagccattttaactccaaagaaacacactgtaaaaaaaagaataggatcaagatgtataaactgttgtttaattacgtgagaaacatcttcagtggccaaggaaactgtccatttctctcagaaagcaaatgaaatgctacagctatacccagaccttttataggtaatgaagcagttcaaaacttgaaagaaaacaaaacctgtcctcagaattctataaagtgtattaagaatgttccttaaaggtttaagaagcagtaagcagcatctgaagccacaatctattataaatactttatttcaactagaaggtacaatctctcaggggtttcatagtttaaaaagctacaatcacatcatgttgtaactacgtaaaaaacagagctgtaaatggaactgcttggctttgaccatacacatttctgcccagcccttacagaatctgcacaaagaaatatctccctttgctccagttaattgttcttgtatgtaagttgctttctattccagtatatccagagtggtgaaataacaaggccagccacgtagccaaaggtcgctccaagcgtacaggagatgggccatacctgaggagagaatgtatgagatcaaaaaagaacaaatgttttattattacttgagcacaagtgtaacctaaatatttctatattaaagcttaatgtgctttcttaaagaatgccaaaagtgtaataaggtcataactgcatttatcatgaacactaaaaatgtacacattttagttaatgtgcattaaactgtaacaaggcttctggcaattgtagatttagtttgacgctccccaaagtgcatgagacacatgctaaaattacaaattaaaattttgggtcagactttgccataatgatagactcaattta

SEQ ID NO: 23860 - DNA, 1077 bp, Homo sapiens
tcagctgatccaagctgtaaggtgtggcggaggacacatgaattttaccaggacatgatctaggcaagccaaatacagataaacttggtcaggttcagatttaaaaaatgaaaaaggataatggcagcacgcatgttggtgatgatagccaccagtgtacctgtctcttaagattcactctagtatgaactgattatatctacacctggtgcagctgtcacctttggatttccctacacctctcttccgtgttgaatgtcctgtttctttatcactatgtctttctttttcttagtttccttaggtttgtttctttttcttagtttccttaggtttgttttgaggcagggtcttgctctgtcgcccaggctggagtgcagtggtgcaatcacagctcactgcagccttgacttccctgggctcaagcattcctcctgcctcagcctcccaagtagctggaacaacagacatgcgccaccacactcgagtaattttttttatttttttgtagagacagggtctcgctatgttgcccaatacagtcttgaactcctgggctcaagtgatcctcccacctcagcttcccaaacactccattgttttcctggagcacatcctccagtaaattcctgatcaaggatacatggaaggtaaaattttgagaccttggatttctagaatttgtctttattctactctcatgtttaatcgatagtttggtaagttatcaaattcaaaataaaaagcacttgccttcagaatgttgaaggcattgctctattatcttttagatcccagtgtcgctgttgaaagaagccattgtgatttcagatcctttattgctcccaccaccctggaaacttgtagcatctttcattcatcctcagtatttcatgatgacttgctttagggtgagtctattttcatccaatatactggatactcaataggcccttttagtctagacaccaatgtcctttaagaaaattttcttaaagtagtatgtgactattttctcccctccaaattttctgttctctttccaaaactccttttattcagatgtcacacaagttt

SEQ ID NO: 23861 - DNA, 1045 bp, Homo sapiens
agggattaaaattagaaacaagctatagctcgaaagcaatgttactgtactagtaatagtcttgctattgttttagatctcaggcaggcatgctgttggtggtacttcagatgataaatacctgggccagctattgagtccaaagtgatgctagcagggctaagaaagccacatgtagccatcacaagttttcacagttttttttttttcactgatgcagaattttagtgtttgaagagtgaccaatttctaatattcttttggttaactctcataataaggattatgaagttaccacaatttattggacatttattgcattcatgacatacttttaggaatttcataggtactctcttcaagtctattacataatctaatcatgtgaataaattagttaaatatggttttagaaggcatgtcatgttaaaatataaccaaccattgctcattttttcattaggttggagttttctttatacatttaaagataattatgccattgtgaatggactgttattcatatttaaaattcatggttatgtgaactgagtaggtgtagactgtacaaattactttcttagtttcagtgcagttgttagagaatgaaagagggaaaatatgaattatttgcattgtccatcttaacaaattcttcatctgagtcagccagctatcctactttcaaggggagtggggagggcttttgaatctggttagagcagaagtaatcttgaaagggtaattaggctggattgttgactcatgttaatattggataaatttgcatcttagtgacctgaaaattagttgcctgcctttacatgtaggtgaaaaattgtagggaatgatttcagagagaccatactgtattatgaaatataatatagcaagaatatattttcacagattcatatgctgcttaacaccaaaattaaatttaccttactctgatgagctttcatacagtaatctttttatcaaagctagtaagaggaagcagtgatgaagataatttttttaaaattgtatttgaaatgggctt

SEQ ID NO: 23862 - DNA, 1069 bp, Homo sapiens
tcagatttttttttttttaatatttgcattatgtttactagttgggcatccctaatgtggaaattcgaaatgttccagtgaacatttcctttgagcattatgtaggcactcaaaaagtttcagagtttggaccattttgaatttcagatttttggatttagggatgctcaacctgtactcacatagcttcttgaaaggaaatttaagaaaagtacactcacctatattaagaacttatttttctagcaagtaatttatcacctctcccaatcttagcttctgaaatgtaaactaagaaagttatgaagaacattatccaggtgttaaatcttaaaagtagatccaagagtggaattagagaaatacagtggcctttcacaataaaagactagattttaagagtctcttaattatttggtgagagacacaggacagtacaatctgtgaatttctattcttttgaactatggagattttatcatgactggacaatgagaagaaatgttatagctgtagcttgatggttttgcttttataaaattcttctggtattgaagagaaaaagattattaatgggtaaagtaagaaaaattaactccattcctactgggtgacttttattatcagatagcaatctgataactgattattattagtttggtgacaataattatttttggatgcttggttgctaataatttgcctgatgcctagaaaattctgatttggggtctgtattctagtgggcatatagcccaaattagcaatcagattcttctactaaaattatctgatcaagctttcagataattcatgcatttacatagaatacatatcagtggtttaaacagaatttcacagacgctttcccattgaagctgattgtttggcaaaatggtgagtcatgctttactggccaactcacacaccagttgttgatataatcagttacctgagccaagatcaaagcagcagaatagaagatagtaccttggctctgatacctttctgtcctttctaaaaaaaaaaaaaattgggatgtaaatttccatccctctcctatgtgctt

SEQ ID NO: 23863 - DNA, 1036 bp, Homo sapiens
tttacccactatgcttcaaacaattatgatgcaaactgtttaatagtaagtcttaattcatttcagatttcagagaatgtcttaagaattttggggatattaatgtagcactacatccttatcaaagaatattgagaattctgctttaaactaccagttcatctttgagactgtttaaacctgcttttctttatctgcaaaagaagtctcaattttaagccatgtttatgggaaatgactataccttaaactgtgtagaagttcttttagggggagacaggaaagggaaagtttgtgttggaagaatagcatttctttgattacatatttttgtagctgacactacatttacattgtttaaattgaacataaaattgtacctgatcaaaaacatgtctagctatggagtatgagactatttaaataactcagtattatacattaggatttttcttttatttaattggagaggagtatgatcagaattagttgtaactgttgtgctatgttagaccttaaataactggattccatttgtggaatgctgtgcttattttaaaaattctaatattaaaagaaaaatcacagatctttgaggttagctaattgagttgcttgtagaggaaggactacctgggctggctagagacagagggttgtttatcctctttaacatttcccatgaaagactctgcacaaatctctttcgattgtttatttacctttttaaccatttgaaatttaattttttcctgagagtttctttgtcttggtctttagaaggattgaagagcggccagtcagaattcccatttttaaagaaagggtctctgtatatgtaaaaacaaacatttgatcaccttcattctccagatggcataattccaactatattatctcaatattcctaaattataataccgttaactgttgttttgctgtactttttcttcccagtttttaaagggtggaggaggtagccagacacggagccctttgagttttttttttttctctgatgcttgaaatcctggga

SEQ ID NO: 23864 - DNA, 1058 bp, Homo sapiens
tcatgccgccaccgctgatctgacactgacaggaggcatagctcaggttggtaatgctcactcgcccacccagtgctcacttcctgctgtgcagctgacccacactagttggggggtgagggcccctgtaagaaataagggagataacaataaaaaactaaagacatactgggaacgataagtttttggatttttttggttttatatttgagtggaggaaagctgattagctggcatccagcaaagagtctagtctgtgaagcgtgcccttgagcaggctggctagggtcatcaaacaacaactttagttacttatagattctgatgacctggagattttaaccgtggagtatttgtgccaggctgatactataatgttgcattaggcctataccatttcctcctcagaatttctcagcacttactcatggttgattatttccttgagcgtttttataatttttgatgacgagttcatttttagtggggctttgtctatgggagtcctatgtggcctgggctgaggctatgtttcctcaaagagctttgatgtttgcttctatctgcctgctatacatttttagttatttttttaacttgtgggttcctggtttatataggtagtattagactaaactccagacctgagtgcgggcagagtgtaattataaatgctcagggaaaatttttttttccccagtcaagggggcaaggccaagatatacagctttactgtgtttctctgtgcatctctgcaaattttgtttctggttcatatgtacttcaatccctgaaggtgtgagaggtagaaaccactcagagtttctcccattctctcactcaacaacaaaaaacacggaagacatctctaccaaaatgtggggaggggcggggggctcttcccacactggaggaagcacatcaattctgcagcagacaccagctgggaggcctccaattcaattcaattctgatgccatctacctagagataacctcagaaaccgcaggttgagggttcagttttacaaaacagccctctctttcccaccagtcgca

SEQ ID NO: 23865 - DNA, 1041 bp, Homo sapiens
agactttggactggaattttgaattaatgctgaaatgagttaaggctttgggggactgttgggaatgcatgattggttttgaaatgtgaggacatgagatttgggaggggtcatggcagaatgatatggtttggctatgtccccacctaaatcccatcttgaattcccatgtattgtgggagggacctggtgggagatagttgaatcatggggatggatctttcccatgctgttgtgatagtgaataagcctcatgagatctgatggttttaaaaacggaagtctacctgcacaagctctttctttgcctgctgccatccatgtaagacatgacttgttcctccttgccttctgccatgattgtgagacctccccagccatgtggaactataagtccagtaagcctctttttcttcccagtctcgggtatgtctttatcagcagcatgaagtccagctaatacagtgcttgaacatgtaatatctcaaatctgtaatgtactttttttttttttaaggagcaaagaatctgcagagtgttgtgcttagtaaaatgaattttgaatcttttgtaaaagatcttcttctggttcgtcagtatagagttgaagtttataagaatagagctggaaataaggcatccaaggagaatgattggtatttggcatataaggtaattatcttcctttttaatttacttatttttttaagagtagaaaaataaaaatgtgaagaatttaattgtgttttagtattttaagtagattgtgatagtagaatggtttgagacactttaatagcaattagcatgtggtttttaaaaagttgcagtttggctggtcgcagtggctcatgcttgtaatcccagtattttgggaggctgaggcaggtaggttgcctgagcccaggagttcaagaccagcctgcccaacgtggtaaagccccatctctactgaagataaaaaaatttaaaaaaattagctggggctattggcacacacctgtggtcccagctaatcaagaggatgaggttagaggatca

SEQ ID NO: 23866 - DNA, 1050 bp, Homo sapiens
ttttgttgcccaggctggagtacaatggcgcgatcttggctcaccacatcctctgcctcccaggttcaagtgatcctcctgccttggcctcctgagtagctgggattacaggcatgtgccaccacgcctggctcatcttttttgtatttttagtagagatggggtttctctatgttggtcaggctggtctcaaactcctgaacctcaggtgatccgcccgcctcgggcttccaaagcgctgagattgcaggcatgagccactgtgtctggcctatttttatagtttatgtacttggaattatataatatattctgcctagcttctttcattcaatatttgtaagatttatccatattattgagtgtagttgtggatttttgcatttatatttcatagcacgagcatgtcagaatttatccattttacttcccttctgcccgccactgctactctccccattttacctttttttttgtttttttgagatggagtctcagaatttcgctctgtcgcccaggctggagtgctgtggcacggtctcagctcactgcaacttctgcctctgggttcagctgcacgccaccatgcctggctaatttttgtattttcagtagaggggattttgctatgttggccaggctggtcttgaactcctgacctcaggtgatccacccaccttggcctgccagagtgctgtgattacaggcgtgaaccaccgtgcccgacccccattctaattttgatggacatttgggtaattttcatttttggctgttataaatactgctgcaattacagttaattttcacagtttttttttttttttttttttttttttttttttgaggtgagtttcgctcttgttgctcaggctggagtgcagtggtgcgatctcagcccactgcaaccttcaccttctggattcaagcaattctcctttctcatctcctaagtagctggggtttacaggcatgtgccaccatgcccagctaatttttgtattttaatttcacagttctggaggctgggaagttcagaattaaggcact

SEQ ID NO: 23867 - DNA, 1029 bp, Homo sapiens
acgttgaaataccacagactaggaagaaaaagatccactccttatacaggatttgtttgtttcttcttttttcttcatttttgtagagatgaggtctcactatgttgcccaggctggtctctcttttttttttgagcccgagtttcactcttgacgcccaggctggagtgcagtggtgtgattttggctcaccgcaacctctgcctcccgggttcaagcgattctcctgcctcagccttcctgagtagctgggattacaggcatgcgccaccacgtccggctaattttgtatttttagtagagatgggtttctccatgtgggtcaggctgctctcgaactcccggcctcggatgatccacttgcctcggcctcccacagtgctgggattacaggcgtgagccactgagcccagccatgctggtctcaagcaatccacacccacctcagcttccaaaagtgctggcattacaggtgtgagcccccgtgcccagcctgtttcttataattattcctctttctcaactctgtctgctgtggtacctcatgcttcctagtttaagccttcttgggagttctcaggagaaatctgttatctcccttactaagcatttgggattgatgttccttccaggttactataaaaccaagttttttttggttcttttttttttttcttttaaaagaaatgagattttgtcatggttagcctggtttcaaactcccaagctcaagtaatccaccttcctttgcctcccaaagtgctaggattacaggcatgaaccactacacccgatctgtactgttcctctttccattcactaaaacctacttgcaactatgagcatatgttattgccatctagaaatgagtttctagggacttgttcctttttgtactttatttaaacagtcgaattagaaattattattatcattatttattttttgagatggagtcttgctctgttgcccaggttggagtgcagtggcgtgatctcggctcactgcaacctccacctcctgggttta

SEQ ID NO: 23868 - DNA, 1039 bp, Homo sapiens
ttgagtaggattgataagtatactatgttatgccaacagtaactgtgatgcttctaaaattgtgatttttaaattggcattgtcacagaaacagcagagtagttgtttttttctttaagcttcttttagccagaaacataaactgaaactgtaattattactgcaatcgtatgttgaatagacttgtgaaactagcaatttattaggcttttaatgatatctggaccaaaggctgagggagctgtgctgtgtgtatgttgctttgtgctttgttttttagaagcttgtcgtttctttgccattttacttctttctttttttttgagacggagtcttgctctgtcccccaggctggagtgcagtggcgcagtttccgctcactgcaagctccgcctcctgggttcactccattctcctgcttcagcctcccaagtagctgggactacaggcgcccaccaccacgcccggctaattttctgtattttttagtagagatggggtttcaccatgttacccaggatggtcttgatcttctgaccttgtgatccgcccgcctcggcctcccaaagtgctgggattacaggcttgagccaccacgcctggcccattacccattacttgtttcttaatgttacattctctttccctctttttttttttttgttttttgagatggagtttcgctcttgttgcccaggctggagtgcaacggtgccattttggcccactgcaacctctgcctcccaggttcaaatgattctccagcctcagcctcccaagtagctaggattacaggcacctgccaccacgcccagctaatttttgtatttttagtagagatggggctttgccatgttggccaggctggtcttgaactgctgacctcaggtgatctgtctgcctcagcctcccaaagtgctgggattacaggtgtgagccactgcacccagtccttaatgctactttataggtgaaaattgtgaaataacttaaatttcattttaattaaagttaatttttgggaaattaacgaaaggtt

SEQ ID NO: 23869 - DNA, 1089 bp, Homo sapiens
ctgcccaccgtggcttcccaaaatgctgggattataggcgtgagccaccgcacctagcctagattcaggctgcttctttttttttttttttttgagacagagtcttgctcttgttgcccaggctggagtgccatggcatgatctcagtgcaccacaatctctgcttcccaggtttaagcgattctcctgcctcagcctcccaagtagatgggatcacaggcatgagccaccatgcctggctaattttgtattttttgtacagacggggtttctccatgttggtcaggccagtctcgaactccctacctcaggtgatctgcctgcctcggcctctcaaagtgctgggattacaggtgtgagccactgcgcccagcagattcaagctttttaaatggaattttgagctgatttagttgagacttacgtgcttagttgataaattttaattttatactaaaatattttacattaattcaagttaatttatttcagattgaatttagtggaagcttttgtagaagatgcagaattgaggcagactttacaagaagatttacttcgtcgattcccagatcttaaccgacttgccaagaagtttcaaagacaagcagcaaacttacaagattgttaccgactctatcagggtataaatcaactacctaatgttatacaggctctggaaaaacatgaaggtaacaagtgattttgtttttttgttttccttcaactcatacaatatatacttggcaatgtgctgtcctcataaagttggtggtggtgactcactcttaggacacattcagatttcttttttttttttttttgagaaggagtcttgctccgttgccaaggctagagtgcagtggcacaatctcagctcactgcaacctctgcctcctgggttcaagcgattctcctgcctcagcttcctgagtggctgggattacaggcatgtgccaccatgcccggctaatttttgtacttttagttttaccatgttggccaggttcgtctggaactcccaatctcaggtgacccacctgcctcggcctcccaaagtgctgggagtacaggcgtgagccacagagc

SEQ ID NO: 23870 - DNA, 1034 bp, Homo sapiens
ccaaaacaagtgccatctccagtaatttaagagtctatggtgatcaagagtagttctcttcctgctagaagaggggtgggagagaacaccttcacaaagggaaatttatattctgccttcatgcagaaagggggcgagcagagagttcctacgtatactgtttcttcattatcttcctctcaaaagaatacttaggctaaagtggcatgatttggggtgacattctgatcctcttcagtgacaatccttgatatttttccttctttctctccaggtaaacagtgttaacatcctggtatgcttcccccaattccattatactaactctgtattgtgggttaaagattttttactttgatcagcagtatttgaaacatacctgttatactagatgtactctgactgtaaaatagtggtcagtgttacttctttaatgatgctgtgggattaaaggattttattataaatgctgggaagagcctggatttgaggaaggtaagcagtgcagttaggtggatgtagactagaagaggtcatttgttctcatttcattgttgcccctatgacatgcccgtttctttcttttttttctttttttttttgagacggcgtcttgctctgtcgcccaggctggagtgcagtggcgcaatctcacctcactgcaagctctgccccccgggttcatgccattcttctgcgtcagcctcccgagtagctggaactacaggcgcctgccaccatgcccagctaattttttgtattttcagtagacacggggtttcaccatgttggccagggtggtctcaatctcctcacctcatgatctgcccgcctcggcctcccaaagtgctgggattacaggcgtaagccactgcacccagcctacgtgcccatttcttaaagtagaaaatttagtagttgatgatgtcagggaagaaaagctttttctctgccttacgttaagtagttgggggcaaattaaattaataaaagacagattagtgagagaaaaggctgtaagaatttggacttta

SEQ ID NO: 23871 - DNA, 1031 bp, Homo sapiens
catagtgagaccctcgtctctaaaaatatgaaaaataaaaaaaaaattttttaaatgtgtgatatgtttagatggaaatgaaacaatttgtcactgtctaacatgacttttagaaaagatattttaattactaatgggacattcacatgtgtttcagcaaggtgaaaaaattattcaggagttcctgtccaaggtgaaacaaatgccctttactgaaatgtcagaagaaaacatcacaataaagttaaaacagctaaaagctgaagtaatagcaaagaataatagctttgtaaatgaaatcatttcacgaataaaagttactacgtgaaaaatcccagtaatggaatgaaggtaatattgataagctattgtctgtaatagttttatattgttttatattaaccctttttccatagtgttaactgtcagtgcccatgggctatcaacttaataagatatttagtaatattttactttgaggacattttcaaagatttttattttgaaaaatgagagctgtaactgaggactgtttgcaattgacataggcaataataagtgatgtgctgaattttataaataaaatcatgtagtttgtggaatttgagatgcattgtagttcttcgcagtgtgacttcaaatattttggaagaaacaaatagctcagagacctcgtaaaatatcttaaactggagggctccatggagatcattgcgagtgactcccccagaatgtccatctgttgacaggagccaggctggctgcatacgaattagctaaggagcttattatatatccagagtcctaccgtgagcctccatcccgtctgccattctcccatccctggtctatgataagacttagaaatctggattttaacaaaacgtttcagattgagaaccttgatttagtctacttctcctattttacaataaagagatgaagcggttaagaattagctaatcctacgcaaagtgagggaaaaaggacagtctttttaataaatgcggcgggctggtggggtatccata

SEQ ID NO: 23872 - DNA, 1033 bp, Homo sapiens
ggcagggcgggcccctcaccgccagcgtgccagccccgcccctacccaccagtgtgccagccccgcccttccccacgtcgccgcgcgcccgggggcggggcctggcgcgcaccgcccgcgcacggcgaggcgcctgttgattggccactggggcccgggttcctccggcggagcgcgcctccccccagatttcccgccagcaggagccgcgcggtagatgcggtgcttttaggagctccgtccgacagaacggttgggccttgccggctgtcggtatgtcgcgacagagcaccctgtacagcttcttccccaagtctccggcgctgagtgatgccaacaaggcctcggccagggcctcacgcgaaggcggccgtgccgccgctgcccccggggcctctccttccccaggcggggatgcggcctggagcgaggctgggcctgggcccaggcccttggcgcgctccgcgtcaccgcccaaggcgaagaacctcaacggagggctgcggagatcggtagcgcctgctgcccccaccaggtagcggggtgggggtggggtcgaaggcgggggcatagcggcggggcgcttggaacccggcgaggggaggctcgcacagggggttgggggggtgcacggcctggccctgggctcggaggaggcggggccgcagagttggcttgaatgagtgcaggggtcgagtctggagcatttgggggtgtagcttgtaaacagggtcggaggagagaggctgtgcaggaagagggctgcaggggagacgcggagagttcgggccttttggagggaggagacgcgtcccgccaggtgggggtgctgggctaaggaaggggcgacgcgcgcagctccgggtggggagggggcctgggaggtgggagcactgggggtggggcgagaaggggaaggcgcccggcccacttggtgggcggggcggggggcggggtggcgggaaggaggaatgcctgcgggaggccgaacggggagagtccggtggtgtggggtgcgaaaggaggttcctcg

SEQ ID NO: 23873 - DNA, 1033 bp, Homo sapiens
tactgtattttacacatgacaaagttctaaggtaacagcccttttctaagactaaagttacagtcctccctttgtatctgagggggattggttgcaggacccccctgtgaatacccaaatccttggatgtccaagtcccttatgagatgtagtatttgcatataacctatacacatcttcccctgtactttatctctagattacgtacaatacctaatagaatgtaaatgctttgaaattagttgttcagctgtattttaaattttgtattttttttcctttttttttgagacagagtcttgctctgttgcccaggctggagtacagtacagtgatcacagctcactgcacctttaacctcccaggctcaagctgtcctgcctcggcctccccaagtgttgggattacaggtgtgagccatcatacctggtcactgttttttattggttttaaatttttgatttaaaatttttaatctaggttggttgaatctggactggaacccaaggatatgtttgttgagcatactgtatttactttggaatacaactagaatgcttaacttgtatgttaaaaatactttatttggccaggcgcggtggctcacgcctgtaatcccagcactttgagaggccaaggcgggtgaatcatttgaggtcaggagtttaagacgagcctggccaacatggcaaaaccctgactctacaaaaaaaaggtaaaaataagccaggtgtgatggcgtgtgcctgtagtcttggctattcaggaggctgagacacaagaatcgcttgaaccggggaggcacgttacgccctcagttgttgacttgagtttttccgtagtttgtagggggagggtaatagagtattaggtagcttttggaatacataggagtgtaactggaaaaagattccaagcaagtctaatgaattagataatttacctaattagtaaattatgtaatcagtatgctttataataatattgtgagttagatcctgtttctgatatgtacataccatattgtataggt

SEQ ID NO: 23874 - DNA, 2025 bp, Homo sapiens
atattaagagaatttacagtagtacagatggggttatcccatccacaacttatgatggggttacataaactaaaaacgtgtttaatacacctaccccaccgaatattgtagcttgggcgtagcctaacctatctcagacgtgctcagaacacttaaatgttagcctaaagttgggcaagatcatctaacacaaagcctattttataataaggaattgcctatctcatgtaattcatcgaatactgtactaaaaatgaaaaacagtggctgcacgggtaccattataaagtcaaaaaatcataagttgaactgtcttacattatggttttccaaattttgatttgtttttaaatactctttccttgcctggcaggtaggcacaacttacgtaacagataagagtgaagaagataatgaaattgagagtgaagaggaagtacagcctaagacacaaggatctaggcgaagtagccgccaaataaaaaaacgaagggtcatatcagattctgagagtgacattggtggctctgatgtggaatttaagccagacactaaggaggaaggaagcagtgatgaaataagcagtggagtgggggatagtgagagtgaaggcctgaacagccctgtcaaagttgctcgaaagcggaagagaatggtgactggaaatggctctcttaaaaggaaaagctctaggaaggaaacgccctcagccaccaaacaagcaactagcatttcatcagaaaccaagaatactttgagagctttctctgcccctcaaaattctgaatcccaagcccacgttagtggaggtggtgatgacagtagtcgccctactgtttggtatcatgaaactttagaatggcttaaggaggaaaagagaagagatgagcacaggaggaggcctgatcaccccgattttgatgcatctacactctatgtgcctgaggatttcctcaattcttgtactcctgggatgaggaagtggtggcagattaagtctcagaactttgatcttgtcatctgttacaaggtggggaaattttatgagctgtaccacatggatgctcttattggagtcagtgaactggggctggtattcatgaaaggcaactgggcccattctggctttcctgaaattgcatttggccgttattcagattccctggtgcagaagggctataaagtagcacgagtggaacagactgagactccagaaatgatggaggcacgatgtagaaagatggcacatatatccaagtatgatagagtggtgaggagggagatctgtaggatcattaccaagggtacacagacttacagtgtgctggaaggtgatccctctgagaactacagtaagtatcttcttagcctcaaagaaaaagaggaagattcttctggccatactcgtgcatatggtgtgtgctttgttgatacttcactgggaaagtttttcataggtcagttttcagatgatcgccattgttcgagatttaggactctagtggcacactatcccccagtacaagttttatttgaaaaaggaaatctctcaaaggaaactaaaacaattctaaagagttcattgtcctgttctcttcaggaaggtctgatacccggctcccagttttgggatgcatccaaaactttgagaactctccttgaggaagaatattttagggaaaagctaagtgatggcattggggtgatgttaccccaggtgcttaaaggtatgacttcagagtctgattccattgggttgacaccaggagagaaaagtgaattggccctctctgctctaggtggttgtgtcttctacctcaaaaaatgccttattgatcaggagcttttatcaatggctaattttgaagaatatattcccttggattctgacacagtcagcactacaagatctggtgctatcttcaccaaagcctatcaacgaatggtgctagatgcagtgacattaaacaacttggagatttttctgaatggaacaaatggttctactgaaggaaccctactaga

SEQ ID NO: 23875 - DNA, 1046 bp, Homo sapiens
tgcacagttcacaatagggtttgagctcctgtgagaatctaatgcatgggctgatcggacaggaggcagagctcaggtggtaatgcttctcaacttccactctcctcctgctctgtgacctgtttcctaagaggccatggacctgtaccggtctccagcttgggggttggggacccctaaactaaaagatttgggaaatttttatggaaaagtttgccattgaagtgtgctttgaaaaaagagaacaggttttagaagggtaacatatgccaaagggcaatagtatattctgctgggagtttggggcagtaggcatattctctgttggtgaggaatgtacgagagcagggtggaaaagcagagtgatccagaatagaagtgtgatgaatatcatgcttggacttcagttttgggcttcagttgtttggacttcagttttgagagcaaaccagtgagagtttttaagccaggagcatgatggagtttctctgtatttgacttgtgacagtgtgaatgatagggcaatatattaccttaaacaatatctgaattcatttgccaaaggaatgttacagttagtagtaccatgcaaacagagatagtttcagtgaagatgtgggatttgaacactttgtaatcattgccctccttatgtctaaatccactgacttcttttctgtcttactcaacctaaaactgcattatatgacatgattagctctgggaattcatcttttctttgatttgtataacactgtgcttaattctttgtttacctgtgtggactctccatctttttcttttgccacttgccatttaaactttagtgttcactattttgtcttttttgttgatttagtattttcttaatctcattaattcccatggcttaatatgtcgtctgtgatcttatgacttctagatctttctcctaaagcccagacgtaaatttgcaactaattattagatctggaggtatctcaaattcagtgtgtccgaaattggactttattcctctctcttctccaaggatctatttgggtctc

SEQ ID NO: 23876 - DNA, 1044 bp, Homo sapiens
aattttaccagttttgcagagggcaagcaggtccacagagctcctcacgctgacatggcagaagcagaactctgtgatatttgggtaagagtgttttagcgatgttcagcaaataatgtgtagggaatgaaaaatgcattatataataacaaggtaaacattcacaaagactttcgttttacaaagaatcatgacagacttaatcctgcttaacaactgaattttgtttctcaaccattaaaaaatatttgtggacataggagatgcaaatcatttagatgtgcttatgtgtatcaccattatgtctgaatgtatctgccacgattttaagaggcattatttctagcacattacaaccaatcttcattctctatcttcccaaaagtagagggatacaatgggcagtccatttttcaggaaaatgcttagatttgtgattttgatttcctaggtacagagccagatggactccttcggacaaactacagttctgtgttaacaaatgttggtgctgctctgcatggatttcatgacgttatgaaaggtaggccttgaaaaagaacgtaagcttaaaacctttgccccactttcttcgatctgcctgaataagatttaaacaaacactgccaagggtaatagaccccagataaaggcttattagcatttggcttatgttgagtgcacagctcactgccttctgcttttcccatctgttttatttctggaggtaaacaaagtgctgaagagaaatccttgtgtacagtccttgtgtacagtactttagccagaaatacgttacactgactttaggcaggtgtgtgaattgtacaaaaccagacatgctattcagaggccttttgcaaaatacgttgcgcttcttagagcccaagcacaaaggaattgaggaaaccaaggcttcaagtccccagaaggaatacactaactttccaccatcctgtgcattttaatattttaaatgccttttaaagtcctgtcttgttgggcatagccttaagaaatgaaagtctggttttgcattttggt

SEQ ID NO: 23877 - DNA, 1050 bp, Homo sapiens
ctatatttgtaatttttaaattgagatttatagaattaaatttaaatggaagttacatattcaagatactatgttatatcttctgttagaatatgaaatattcaaagttaaaatatggaatctagaaatccgaacatggatattttgagaacagtggcagaaatcaatgaggtaaagagctcatgaaagtcacctacagaataaatgagtatcagtcttggttttcaggaagaatagaaattgtctagaaaaggacatgtcagaaatttgttctgactatttatactggtgtcctctttttattataaaccattgcctaggtattctcaaataaataaatgtggactttggggcaggtgttgaaatttcatttccatttccattctcaacatctttaaactttgctgcaaaaactattagatatatattttagatatattgttggaaaacaaaatctatttccttgtcatactttgtttagattgcatccttcttcagcaacaatttggactacttcattgcttcactgagctatggacctaaggcagcgagtggattcattagtcctctttcagctgaatgcatgctacagtataagaaaaaagctgctgcctatatgaagtctttgagaaaggtttgttagctgctgttaatatttaaatcagaggaaacatcaggagtcattctagagaatggcaagagtttttctgcagtttatattgttgactttttatacgatattggggtacaggttgttggtgggtgttgggggagggctgtggggaagaggaggtgacaggacccagactttacctgagaagcagcgttgcctatattcgtaggccatgttggactcatgtcccaagtgcctgatagagcgcctggggtgaggtagccagccaaacagtaaatattgaacttcagagactcttaaacttgtagaaacagaaaaaaaagaaatatgtgtatgacttttttctgaataagaatatgcagttgttgcaaaaaaaaagaaaaaaaaaagagagaagatactgcagtatattaaga

SEQ ID NO: 23878 - DNA, 1050 bp, Homo sapiens
gcttactgcttgccttactgaggtgctggaattggtaacactggcatatatatttctttataaattaataattttaaaacgtggaatgcttcatgaattttcaggtcatttttgagcagggaccatgctaatttctgtatcgttccaattttagtacatgtgctgctgaagaagcacaatgctggtatatttgagttgttaatgtcagttgctgaaagttttggattatctttttatttgaacattttcaatggaaaacgctattcttacatatgtaagtgaaaaaaatttctagggagggacacgaaaaatctttagtactgaacactattgggccatgagtgataatgaccttagttgggtttggtgactttagaagttgctatttaaatcaactagttagtgtaggggtggaaaggacctgataccttttctctccatcatgagggtcacagccagcactcctataacaaaagacaggttaactgctaacagcagatttctgccgaaaataacctggagtcttgccttgcacacagtgcacaatagaaataaaaagagatggagttttctgctttccttgatgtttctactttcagcctttctttttacccccatgccctttaagtgaccttaagggaactaattgtgtggctgtgtatgtgtgtgtgtctttgtgtcttttctgtcttcttcctcttgggtgttgggagcaagtatgtgcccatttcagtgttaattgattaacaaaggaagctcatcctacagggagattactttggttcagtcactttgaggcagaaaaagtaacctcagatagaaacttttcttttttttttttttttttttttgagacggagtctcgctctgtggcccaggctggagtgcagtggtgcgatctccactcactgcaagctccgcttcccgggttcacgccattctcctgcctcaggcttccaagtagctgggactacaggcgcctgccaccatgcccggctaattttttgtatttttagtagagacggggtttcactttgttagccaggatgg

SEQ ID NO: 23879 - DNA, 1103 bp, Homo sapiens
aaccatttggaaataaagattttattttatttgaattctactggaaataaaagagtttatgttaaaaaggatgtaattcacttctctccactgatgcagtttgacagttccccattggtatgaatcagttaggttttattgtggtctcaaaacatcattaaggcagggcacaacatcattaaggcagggcacggggttcatgcctataatcccagcattttgggaggccggggcgggcagatcacttgaggtcaggagttcgagaccagcctggccaacctgatgaaaccccgtctctattaaaaatacaaaagctagctgggccaggtggcgggaacctgtaattcccagctacttgggaggttgaggcggaagaatcgtttgaacctgggaggcggaggttgcagtgagccgagattacaccactgcactccatcctgggcgacacagcaagactctgtctaaataaataaataaataaataaataaataaataaataaataattgataggcaagtgttgtgactgtgacttccattcaaaaagtaagtccaaaaaaaaaaaaaaacaacaaaagtaagtccataaattctgagcttgtttggccctgttgcttagaaaaacaatgtactgtgctcagataaaaatcttcagtctcttcctcttcctgagaatttttaatagtgcatttaatatcctgtaagtcaaccttatactgtttacagaaaagttgcctttctgccttgtccagcttttgcactatctcatgaaatattgttagactggatggtttgccacgggtacaagagtctgcccagcagcccgaggagaggctggggttgtaatgaaggccacgggggcctggacctaaggagcaggtggtctggatggtgagatgaaggctacatccccagacagccacagaaagcagccactgatcacctggacaggtcagatgagttggaaatatcaatacatgaagtgtgggaccagtggagagcaaggaaggcagaggtggttaagaagcaaaatgatacaaataaataaaaaaggaaaaggccaggcacagtggctcatgcctgtgaagtgctaggtgtggtgat

SEQ ID NO: 23880 - DNA, 1064 bp, Homo sapiens
agggcatggtgcagctgtgggcctggcttggggcaggacatttctgggattacagggccctgccccaagcttctccgttgagggggtagggagggcaatgcagagagtgagagggtgccagggcaggctataagctaatttgcctcttgagaagtagggtaataataaggttggagcagagaggaaatctttgtcctaaggcagtgcttctcaaacttttgtgggcccaggaatcaccttgttaaaatgtggattttgactgagcaagtgggatctggaatactgtgtttctaacaagtgctgatgtgacgccaatgcatctggcccaaggaatacgcttagaatagcaggatcccagaatgcatctctatttttctatatgacttttagatcagttgtgtatttagagaacataaagtttttaaaaagctctttaaaattttatccttttcaagattgtctcggaaaactttgcattatttgaaaagatacttcgaaaatggaaactgaatgaatagcactggagtgcagtggcgaggtctcagctcactgcaacctctacctcccaggctcaagccatcctcccacctcagcctcccaagtagctgggaccacagcacgtgccatcacacctggttaattttttgtatttttggtagagatgaggttttgccgtgttgctcaggctggtctcgaacttctcagctcaggcaacccacccgccttggccttccgagtgctgggattataggtataagctacctaccgcacctggcaagaacatataaactagtctactatgttctaattataaaacttttttttaaattttttttccttcctgggaatttgagggatcaggattgaccttttttactggggaaatcacctgtgatttctggaaaggtggggagggctgctggtcccttaatgtcccttctaaccagcttgtcaatgcttagtattcctttgacagtgggcaggtctttcattttgcaacaaaggtttgcctgaggcactagctcacagacttcattcatactaaggtgtgaatgacagcagag

SEQ ID NO: 23881 - DNA, 1064 bp, Homo sapiens; identical to SEQ ID NO: 23880

SEQ ID NO: 23882 - DNA, 1064 bp, Homo sapiens; identical to SEQ ID NO: 23880

SEQ ID NO: 23883 - DNA, 1064 bp, Homo sapiens; identical to SEQ ID NO: 23880

SEQ ID NO: 23884 - DNA, 1035 bp, Homo sapiens
aagccagaaaacttgaaaggaaaaaggcttttaccatttttaaagaaaagcaggtagaaaggttttgtttctgacattttttgtaccactaagtcttcaatttgggtttagttcttcaattttcatcgtaaaatttccccaaataattttttcttataaagtgtgagtatcaaatcagatcatgtgtagtataatttttaactccgaatgtgtaacattcacagtccctttattagcaaaattatagtaattaaataatactggctttataattgaatagcactttgcaaaataatatgtctggctcatctatattgctatagaatactactgccccagtgctgtatgcatatgaactggttaatcctcacaacagcccttataaggttcaggttatcctcattatccacatttttagatgaagaaactgaggctcagagagataagcaatttgtaaccctagccttaaccactttgccataacaagacagaagaatgcctgcagtaagtgtaaatgaacttactgtatcctcactgcagacagaggactaaaaagagtaatggggtttgcaatctttctgggtgtgtgtgtatgagaatgaagttatcacttgcctccagtgatcaggttgttaagagcacctcagaggccactgttgtcctacccttcctgtaagtggtagagatggctaatgagcatctgttggttaactgattgatgatttctcaaggctttttacagccttagaattctattagtcactctacaagaaacaggttgtatggaacgaaaggtaatttatcttttaagaattaagtgaaatcctttaaactcttgtttttgtgcctaaagctatattctgatggaaatgctctttctctagctatgtcagtggtacagtaatttaatctggttcttgaaattactctttatctcatacatttatttaagtaaagatagccacattagatatggagatgctatgaacaatgcaacagaatcatggaatgtttgtaaagctgctgcagtgatta

SEQ ID NO: 23885 - DNA, 1035 bp, Homo sapiens; identical to SEQ ID NO: 23884

SEQ ID NO: 23886 - DNA, 1035 bp, Homo sapiens; identical to SEQ ID NO: 23884

SEQ ID NO: 23887 - DNA, 1035 bp, Homo sapiens; identical to SEQ ID NO: 23884

SEQ ID NO: 23888 - DNA, 1021 bp, Homo sapiens
gaattaaactgacataagacagattaacaggagaaaagcataccaattttattaatatttttacacggacgtggcagtcttcaaaagggaaatgaagaccctaggaagacagtaggccgtgaagcttatatacattttcacgcaaagaacaataaattatggggatgtgacaagacaaaggggcttgggcttggggcattaaattgtaggacagtgcctaggaaatacatgggggaaattaacgaaagacagggtcgttttggtagtttgttgtggaagtccatttcggcatcaactcctagtctctggtgataagaatgttctcttcctagtacagggaaggcacctttttcatggaaaattttatgatctgtttttaggtagaaatgaggaggtcagagagcctatgttagtttgttttgcatcgctgtaaaggaatacctgagactcagtaatttataaagaaaagaggtttaattggctcacagtttggcaagctgctcaagcatggaaccagcatttgcttggcttctggcgaggcctcaggaagtttttactcatggcagaaggtgaagcgggagcaggcatgtcacatggtgagaaagaagcaggagcgagaggaggagcttccaggctcagctctgcatgaatgaacagagtgagaactcactcattatcgcagggacagcatgaagacattcatgagggatctgcccccatgacccaaacacctcccactaggctcatctctaacactggaggtcacaatgcaacataaaatttggaggggaaacacatccataccatatcagagcccttctgcatgagctgtttctcaagtgccttcagattaaaataatcaatatgccaaaacagcatattttgggatggcacgaatcccttcagccccctttttttttgggaatagagtcttgctcttgttgcccaggctggagtgcagtggtgccatctcagttcactgcaacctccacctcccaggttcaagtgattcttgtgcctc

SEQ ID NO: 23889 - DNA, 1047 bp, Homo sapiens
acaaatttttaatgcagctggtccaagtggaagaaatacagaatatctttttgaacttgcaaattctattaggaaccttgtgccagaagaagcagatgagcatcttttcgctttggaaaaattagtaaaggaacgtttagaagggaaacagaacctcaattgcatataatttagtcttcagagaattaacttcagtgcacaatgacaatatgatttggaaatacgtttacttaaagatcttatttttaatgtagtgaggatattatttaaacttttattttaactggaaatgtcctgaaacacatatttaaaatattgggatacagtgaaagaaaaattcaaattttaataacataaagatttcctaactttatgttattgaacacttactcactagaagtgagttctttagaaaaatacagtgaaggactcagttcagtcttgtttttatcagagtgataatcatcctgtttcacatcccaatactattttgaaattctaaacaattaaaccaaaattccaataaatataaggttatgccttcaatatattcctatacaattctgtaaccatggtttaaaatacacaagcttaaaataacatgcttagaaatacacaataatatgaacagtatttcagccttaattgtgaatttccttgttattcaagtattaaatgaaatcttttgagtttttagccaaaaattggcatttttaaaatacgaaaatttccttggaattataatgtactgtacctcttcttttttaaataaaggcattttactatatggaaaataactcactaaagcataaattacattatacaaatcatgatcactaatgatgtagtctgtcattcactttgtattaatcttataccaaaactgaaaaagatgggctgatactacaaattaatggcacatataatgaaaatttagtttttaaaacagcttttggaattctttgtctgtcactatctcaatttgtgtgtgtgtgtgtgtatatacatatatatacatataaaattttttttttctttgcagcctgc

SEQ ID NO: 23890 - DNA, 1055 bp, Homo sapiens
tcacctggccaaaaaatttgtgtatttttgatgtgtacattaactagagttaataattatgatattctttgcttattgatgtttagcactcagttttgtttttgtgttaatattttccttctgaagtatcacctctgtcgttatgtttaattattcattactttatagagttcagagatttcaccaaattaaaccacaaatcagtctaattttctgtctacttctgttgttgatgtagaatatattttactcagattttcccaagcactactatttgaccaactccatggtttatagcatgtcatatacattgacaggttctaccaacaagtgtattttatagcctctaccagaatagaagttctctcatcctctaaccaacctaattcctccagacccacgtcaaacattaggagttcctctcatgccaagatattttttaagttccttaacttttaaagtaccccagcacctctgattagtttcactatattaaaatttgactttatgtcaaatctctaataaaatttgactttgtcagatctctaataaaatttgactttgtgtcaaatcgctaatttcctcttccactgaaaataccttgttatgtaaagtaagttttttatactatctaattctgtacattcagaatttattatattttgttttcttaaagtaaaacctgttttatacaatcagaatcctgattttagtggatccgaatttttagaaaaattataaaagataaactttttctccgtaattcctgttaccaaaaagtaaagtttgctaaaaatatattttgtggtcccaataagtgactcactatttcagcagagttttcagatagaattgctatttggcttattttattgggaaagcagcctttcctaaactaatgaaagactattatttgcatcaagaattgtcttcccttttttgctgtggttccaaacaagcagtttctttttacatttgaagcattttggagaccattttgaaaggaattacaaatgttatgtctcatagcaaatcgttggcacaattgaataaat

SEQ ID NO: 23891 - DNA, 1069 bp, Homo sapiens
aatgaattttctactctactatataaactaccatcctatttttattagaataattttccttaaaaatgaaaatggatgttctgtccagaagaagtagtaataaagggtcatgcttctattcttgccacctcttccccttatctcagctgcaggtttcactatgcagcattattgtttttcttcattaaccttaatagaggtctcatgtattcccaggttattagtttagtctgttagaccttcactcctttgaagtaatggctatatttgcctcatttttaatacgcagcacctaaagtaatgccaaaatatagtaggctctgtgtgtggaaaaaggtatacaataaagttcagagacttttcaaaaaataagacagcatcttgacagtccttgttcttcctaatattgggaggaagagagaataaggtcattgctttctggagtaaccgtccagtgactcatacaagctgaagtagaagcaaaagaaccatagctggttaacggtaactgcagcaagtgaaaaaggggacatagtatccaccatatatttattggaaacccatatactgtctaatttttataaatcattcattcatttataatcggtgcactcactttttaaattcaggtctacattcatttctttgccagtcaatacccatttaaccaccagatcctaattttttaacctctttaataataattacccttttctctacatccaaccctgtcactcccttactttagattctcttcatctctcacctgggttactgtaactcctaacttgactctcttcctctagatttgtccctgctattccttcttccttgccactgctgaagtaatacttaaaaatatcatcacagcacatctttgcctaaatcctataaaatgatgtccaaacctctcagcatttagttttctaccatatagcacctgcttctctctttagatttaaatatcatacccccacatctttggttttacctcttcctcaagtctatatgcatatatacacacatagtcacagaacacacagataaacacataaatcacaaattatta

SEQ ID NO: 23892 - DNA, 1031 bp, Homo sapiens
tccagtcccagtaggaatattccaaacccagtcatttcttctcatcgttactctaacatgcagtggaaaggctatcaggccagcatgtgcctgctggcaccatcgactattgtgatctactgtgagccaatacttaaataagaagacatatctttcaataacaaaaagtcagattggtagacaattctttttttttttttttttttttttcacagacaaggattcccaggctcaagcaatcttcctgcctcggccttccaaagtgctaggattataggcatgagccaccatgccctgcctgacaaatcttgagtcagatattagtaaaacaaagaatatatttgcccagttcttttagggcatagtcctgctaaaatgcacctaatgtgtgtatttagggtacttatcataatggacatctgtaattgcttttggctgcccagcatctgaacccacttgctagattcgggacatctcccattatctaggtcttggtgggaagtaggctctgacctctaactttagaagcctaagggatgagattcaccctctactaactcccctgacagccttgtgacccagatttagccactatgtactttgtgtcttgagtaagcaatgccaagatgaagggatgataagtgatattggatctgtggtagctctagtattagcagtttggcattgaggctgtgtttattgtgagtagtggctgcctacagtggccattatgtcaaatactagagatgtcctatgttggtggtggcagcagcatctccaccagactgttcctgccactcctactcccttggtcccagccaattgtttgagaatgttttcatcatttctcatcacttctgtgagttacataaacccttttcttttcttttcttttttttttttttttgagatggagtcttgctctgttgcccaggctgagtgcaatggtgtgatctcggctcactgcaacctctacctcctgggttcaagcaattctcctgcctcagcctccggagtagctgggtctacag

SEQ ID NO: 23893 - DNA, 1039 bp, Homo sapiens
catcctgagcagaggcttggcattggcagagtttcctggaagggtttgtagagtggttgctttgtcttgatgtttgaatgtatgactttacatgtggaagtactattttgacgtggaaggattttactactgctaacatagacatgattagtggaaatcattcagtgtggattttgtcgaaataattttaagcttttctttttaatagcatattcttatagaacattttaaagcctaattttttttacgtgcaatgacatgatgctcctttaattatgttgcatcgtaactagtatcttcattataattgggctttatttaatggcagccgtagtttctttcactacattattggaaatgcaaaccattcttccagaaggaaggggctaactacccctgttagaagagtgaactttgtaggtctgtggaagtgagtaaagcatctcatgggtttttcttgtaaattttcagtctttgctttttctcagggcatcttttctttgcaaaagacctagtttagtactctgatttttccggtagcacttgtaattatatttaaatttttattgtgtgggaataacatcatctatttttttctactcagtggttaaaggaaattacaccaattagatatacctgtgtttctatttttaaacatctctggagaaggcattttcataatgtcctttgctatcatagtgaggttcacggaccttcaacattagaatcgcctggaagcttgttgcaaatgcagattcttaggccccactctgaactcagccaatcggaatcaacattttaacaagacctttaagtgagttgtatgcacattaaatgaagaaactctattctgttccttcagcaaagggacctcaatatcaaaagtttccttcttgaattttcctttcttttgctgaagtatcagcacatttttttccttgatggtggtgacaaaagtgaggctctcactgtaaattatttgtttaatacaaaattattttataaagctgttctttaattcttggtggaagagtcctat

SEQ ID NO: 23894 - DNA, 1051 bp, Homo sapiens
ccaaggacctttcggaggtcccttgcacccctgagagtcagtgactctctgttttcaccttggactgccgtgatgtctgactcatactgtagtcttcttcctaaaatcctcttctttttattttttatttttggcagtgtgttgaattctcctctagtttcattcagtgagtgctatttcttgcttcattataaaaggtggtgtgtcacaggtcctgtgtgatcacacaggctaagtgtaagctttgagaatgatctcttggaccctttttctcagatttcagtgttgtgcattattatctcatcgtggtggcttctttgtgatttagtttcccctcctcccttcaccataaaaaaagtcttatctcctgatgtatttttggctgcagaataactccagatggtacattttgtgtagggaaaaaaaataacagaatttttcacactcttctgtgaattattttttgactttcaattataatgaagttattaatcttacaaaggctcgctttgtaaagagactaatctgaataaacttgcttgtatacaataagtgccatggcaaaaattaagagtacagttattatcagagactaaaataacaatttaattttctagaaatagaaaattaagaaaaataacttttaatgctgggatttgacattaagaaatgaatgacaaaaatgggaccaaataaaatgctgtaattggccagacatggtagctcatgcctgtaatcccagcacttggggaggctgaggtggaaggatcacttgagctcaggagttcaagactagcctaggcaaaacctggtctgtatttaaaaaaaaaaaaaaaaaaaaaaaaccaggcatggtggtgtgtgcctacagtcccacctactcaggaggtagaggcaggaggatcacttgagcccaggaagttgaggctatagtgagccatgatcatgccactgtgctccaacctgggcaacagagtgagaccctgtctcaaaaaaaaaaaaaatagtaaatggtataactgaaagtaccttgaaaaaatatggcaatatg

SEQ ID NO: 23895 - DNA, 1045 bp, Homo sapiens
aaagtctccaaaaccatactcaaggattgaaggtcacattttctctttcgaccattctacacttaggtagaaaaaaatttcattaccaactagataataggatttgagctgttgtggttgacattcttgatgaaggactgatcagaaattcttggtcatcttatgtaagaataacttcttggagtaaatatgttcctgaagagctgccatttaaagtaaacttttgaatatcatatcttaaatgctttgtaatcataaacatttaaattctgtggttcaagtaatcatttttaagtaatttacttctaatttctctctcttttttttttggagacaaggctgtcacccaggctggagtgcagtggtgcaaacacacttcactgcagtctcaacctccttggctcaagcagtccttctgcctcagcctcttggtgtggctgggaccacagatgcatgctgccatacctagctaacttttcttttctttttattttttggtagagacgaggtctcgccgtgttgcccaggctggtcttgaacttctaggctcaggcagtcctccaccttgcctcccaaagtgctgggattacagtcatgagccactgcacccagtttgtttctctcttttttaaatccaaatttttctattaggctttgcaaataggcccttaaagaaataggcagcatggctggtaaacaaattttgttctttagatgtttccagagaaataatgtggtattttaagagcttttaacaagagacctcaagataattatttttaggatataccataatttaaaaaataacttctgaatatgagagtaatacattaaagaatattcctgtaatcctagagctaagccatgctataattctggtccagtttacggtttgcgctcacatatacactcacatttttataccctttgtttttatgggttgtattcatgctaaaaaattgttttgaaaacactttttatggctgtataaagtaggtgtaccctatttctaaagtaggtgtgccctattactggacatttagtt

SEQ ID NO: 23896 - DNA, 1076 bp, Homo sapiens
cctgtgccctttactaagctgctttcagggtttatgtatctaaggaaatagggtgaggtaaactacttgttactaattctcacccagttgacagatacttcctattattaggttatctgtgaattgtaaaaaactttttttttttttttttttttttgagacggagtcttgctctgtcgtccaggctggagtgcagtggtgcaatctcggctcactgcaagctccacctcctggcttcatgccattctgctgcctcagcctctcaagtagctgggactacaggcgcccgccaccaccccagctaattttttgtatttttcgtagagacggggtttcgccgtgttatccaggacggtctcgatctcctgacctcatgatctgcccgcctcggcctcccaaagtgctgagattacaggcatgagccaccgcgcccggcttaaaaaacatttttaaaataacttttactttacgtgtcttcatcttattcaccctcaggaattgcttttaattcaatgcagtataataagaaatatatttggtctttgttctgggttcctggcatagagctcctaaaaccaatggagtctgccgagtgatgggagtgtcttttgttacccataaggtgtcccttttctgacacctgagtttgtgctaattccatgactttgggtggggatagtctcccatccctagctagcctcaggatgatgctgtgcacccaagactgagcagttagagaattggaactttcagcatcatccactcatctgtggggggagttggtgtaggtagggtggggtgccctgagaggacatggaagccccacctcaccccagtaccttgccctgtgcacttttccatttggccgttcctgagttgtaacctttataataaattggtaaacataaaggggaaattgttttcctgagttctgtgagttgttctagcatattattgaacctgagggggttcttgggaacccctgaatttacagcctgcggcctgggacttggaactggcatctgatatgggggcagtcttgtgggaccaagccctttatcctatgggatttaaca

SEQ ID NO: 23897 - DNA, 2032 bp, Homo sapiens
acagtggctgctgtggacctggaggcattacttatatttccgatgggccatgcgcctcattcattggaaccctctgcttagtatctgctcctccttgactcagctcacatgtggctttggtatactgtcattccaaccccagctcttgcctatcctttgccttttgtcctcattgctaaatgactgaatatccttgtttcctgtagttcaaatgtctgtaaggttgggtacagagatggggttttgattgacccggaagatccttttataccagatcatggccaaccggatacttagagtggataccttcagaagaggtgtccccaaacattggtgaggagctggaagccatatgtacagaacacatcagctccatccatccatagctcagaggcatctgactggcagttggaggatactgttggcatgcctaatgcagaagaattgtggtggggtggaggaaggcattttatagtaggacttttggggaaagagactggagtatcttggatgatcaagggaagggctaaatagccaatctgaagaaagggtgaagggcccctaggacaacagaaattaaggcttttcatctctccatctcttgttgttagtgaccttgtgtaagtgggcttctgtctctgccccttgtaggtagtcttctagatgacaggaaacatggctgccatctgctcctgggcttcactctctaccacctttcattttttctggttccagttggaaatattaggggtgtttgggagaaaggctgtaatttaccaggctttactcaaatgtctagagcagtgaactggagtatggagtgtggagggacataagagcatggcagctctccctggaaccacatggaactgtttcccccaaaggggaaagtttgctgggaagatgacagtaagtaacaatgaatgtttacgacacattttcagatagactgatgttcttgattcagagataaagacattttataaaatgcaaggtgatgtttaccattggttggttacttaaaaaaaaggagcccaataatggacagtttcatttaagatttttgaataaacaaaattaacaaagagaaacaaacattagcgtttcagtctttagaatatgcctttaacatggtgtttcatttgcattgaagttattgtcttgtgaatatgtgtggttgataacttggaaacagtctatcccaagcttgcatctttggattctcaagaaccaagcatcactcttagagcatgacaggtgcttagtactagagtgccattctagattctttagcagtacagtgatataagtactctattaacactttgttccttactcacatgtaacctcttttggggaatagacaatgtgtataaaacaagcaatgaattaatatgaaagtgttgtgatacttcctgaaaacctgaatcttagccttttcatcctctggttgagaaatacatctgttttctacaattcttatttcttctgtatttttattagttaatcttcaagggaatttgcagagctctgaattttgacctctttgctgcaagcctgtgaattttcagaactctcagataatgacatcattgactgatgggtacctgttattgggtgaggctgataagaattttgccattcaggtttaaatttctgcagacgccttagactttttgaacatgtatgtgaagtcgccttattagtcacaagattgtgtctttaggcatcctaagaaacagatggactgaagtcggagatgccgggccatttgcgggttctcagcccttccctgtgttacatgtttacctattggttcactctaagtttgcaggaaacccaagctctccccactgcctccactctgagctccagccctggccaggagccctcttgcctgtatggttcacagtaacctttcctcttcaagaaacttccttggcccttgctattctgtaccccatgttctctgtgtcttattagtgtcatgtgtgtacttaggtgggtgtatccatagtctccctccagctga

SEQ ID NO: 23898 - DNA, 1049 bp, Homo sapiens
agcaccacctgtttggcaaagccagggcctctggaccggggcattcttttgtctgtgcagggaagctttgcatgtgtagataacagacacggtaagaatgcagggataaggtttggctggggtagaagattcaataaactacattcattccccaggaccttgggtgcttgtttccagtgtaacttgccgtttttctcctcagcagtgatctcaggtgttttgtattcaggtctgatatgaccagttaggcaagaaacaggaaaaggatataaatggaaaccagctttgccctgttatttcagattcggctgtatacttagatggttttatgggtgtggggggaatggggggaaggtgtaaagagagggagaaagaaccatccatatctttcatggaacagagataataattcctatggatagaaaaatatcttttgtcctctctttttttttcttgttattttgagtcctgaactatcaaatctgacagccccacctcaaataaacattggcttttctaaaatataggacttctgtaacttgtttcatagtaagtattgtgttctggttatctctgaggtgtcactgctataaaatgtgattctgagtatgcctttcccagtgcataatgggctgagttaaagagaagggaagggaggggtatcagtacatcccagagggaggactggtcctgccactgagaaatgccctttgccaaaaatccagaggagtggtcacccttgttcccagcctaagttctgtgattccacatgaaacgcaacatcgtgcagctgatagcttccttggtgaagtaagagatggccaaaagtgggatagaattaatttttgaaatttctcctatgaggagataaagcctagcaattatagccacgaggactgtactataatagtatctttgtagacatgtatctcacttaatttataaattaattgagataatttataaattatctcaacctctgtgaggttggtcccattattatgccaactttttaggcacagagaaccaaggttaaaaattggcagagc

SEQ ID NO: 23899 - DNA, 1036 bp, Homo sapiens
tgttccctaattgtatgtacacacacacacacacacacacacacacatacacacacacacacacacacacacatatctataaataaagggcttctggaagctggctgcctattactgtgtacctgatactcagtgggtatttgtgaactcccaggaggatagtgtgttagtgtgtttgcgtgtatctctgtattccttcttagggatggcatacaaataaatgtttcatgaataaagggatgaatgagtaggtaaagtaatataagcagtaatgcatatgttttaaagtgatttagctggttttccttccaggggcctcttccctgagaaaagagccacttaataaatgatgtcttgaatgaaagaatacatcatgaaaataattttgtccatgatgtggctaaactaaaactccaggaagggcttaggctgggcctatctactttttttgataaaatgaagtttaatatgaccctagtgacaacctcccctcatccccttaaagctcaaatttagggaactcttgtggttggactctcacatactccctaggactctgctgggtgctggggaatttactaaactttggtgaggagaagaggagaggagagggaagccacggtactaaggtacttagggagacagaaacagttcccctagaaattagacatcacattgtctttttcccccctttcttttgaatgagatggggcaagaatatttggaccaggataaagttttaagatgcatttacactaatgtaatcaggttacatagcaaaaaaatgttaaaaatgtaccctgggaaattgaaatctatccattcttctaggtgtggcagcttattcagatttttatgttgtgtgaccataaaacgaacacagcttttctaaccgcgagtgtctttgtttacagagataacagtgtgagtaatgctttgctagaagccaggcagttaaatcacactctgagcaaatagaggctgggcttcagaaacttagatagcacacgaatgtgcaaacttggtcttttaaact

SEQ ID NO: 23900 - DNA, 1027 bp, Homo sapiens
ttgtgtgatgtgttatttccattttgaagatgaggaaactgaggcacaaaggaagctgtgcccaaggacacttaactagtaaatggagccaggattccaacccacgcagtgcgctttgggactcaatttttaaccatcttgctgtgctgcctgttgagcatttttcacctggtgcttttgtagatcccacattaggattttgttaggaccctgggcaaccttgatttagtgaaagcagttgttgagaggtagaaattcctgatccttttttcaatcttaaaggatttgctgagactctcactcttcattggtgatggtaacaaggagcagcatggtgaatgccatgtaaaattcaagccttgccttatcttggaggactttattcccttttctttgatggtactttggagattccagactataaaggactcagctgacagtacagactctcttgatctgtattttcccagtatatgaaattatttgtaatgtacccgtgagaacctggaataaactgtactggcactgaagtagaatcttggatttaaaagtacagtgttcactgctgcatcgttgagcatttgctacacagagaataaccttggagcaatgttcaaaggtgatggcattacccagaaacatggagttaggccaggaaaccacatctgaagttcagattattggagattgctgatttttcttgactttaaatattttcgactggttgagtgtttgttggtgtttttgggctaagtgttagccttttgttctgtgatgtccctgtgtgaataaaatggataatccctgtttccggttagctgctgctgctgctgctgctgccaagtataagtgaagacttccagctgcgatttgcattgtgttttcaggccaccttttgagtttccccatagcagatataaaaactgtttctaagagttcatccttacgtgttcagccttacttgtatcctaaaaccacaaacttgattttgttcccattcattatgatctatatttggcatcagtga

SEQ ID NO: 23901 - DNA, 1070 bp, Homo sapiens
gtgcctgagagcagggactccttgaaggtgcaagatgaattacactcctcccaggtgtcaggcaggggagagaagcaccctccatttagaaatatggaggattagccaggcatagtggcgggcgcctgtagtcccagctactctggaggctgaggcaggagaatggcgtgaatccaggaggcggagcttgcagtgagccgagatcatgccactgcactccagcctgggtgacagagcaagactccgtctcaaaaaaaaaaaaaaaaagaaatatggaggattctttctgatgagggcttctgcactgaattacgtaaaactcccatttcggaattatcaggaattaaggtggcaggataccttaagagatttaattcagtgtggtccatttaggttggggggaatcttactgagcattaaggcttgaaccccatttcatatcagttggagccaaaggtccttgctaatgtagaactctctgtagagtggtgggggctatcaagtcaaactgctgggactgtgcttgcttcgtgactgtgggcaaataactgaatttttctaggcttgaatttgctcttatacaaaatatgtttggtggtaagagtacctacttcacagagtagttgtgagaattgagttttaatgaagtgcttagaagagtacctggccctagtaaacactcagtaaaccctgactataggggtggacatggaagaagataatttaattcctccgtcatctaggaccatgctggagcccttcccacttgcgtagctgaagcactggtggatgaacccccatttgcctctgatcttattcctgccgctgcttggtgatgtcccctggactcagttgtcagctctgaagctttgaccccttgactcacctctggtcagttggtcccacagtgctttgcttgatcctctctgttgccatctgttcccatgcggtataattacctgttaataaggctggtgtcagtaaactgtaaactctttctgcttctgcgtctatccttatttcctactgcttagtagagcaatttaaaacctttttaagaatggatttgc

SEQ ID NO: 23902 - DNA, 1050 bp, Homo sapiens
ggtatagggcaggactgcaaaggaccctgttgtcatctgcatcctgctgcctcttcagcagggatgggagaaaagaaaggggagcaaaggatgttctgctggcagtgtgcctgggagctcacatgtttaaggactggacagttcctacacagatgctccttgacttatgagattatatcccagtaaacccatcgtaaagtcaaaaaattgtaagttgaaccatcagtaatcagtgttctttctcaaagacatgaccgcagttaaggggcgctaagtagaggtgtccttggaggtcagttttgctgaccttcctctggctggggtcttgtggccctgctagcatgtgcctgctcctgccagttctgtggtcaatggtaaaacaagttcttctctgcttgcagatgagcgtgaagccgtgcagaagaagaccttcaccaagtgggtcaattcccaccttgcccgtgtgtcctgccggatcacagacctgtacactgaccttcgagatggacggatgctcatcaagctgctggaggtcctctctggagagaggctggtgagtggagaccttaggaagtgccgtgtgttgtaggtggaaaatatttttgaaaaatcaagtgtgacttgtctcctgttgaattctgcacttaatggttgatagttttgaggagaatcttgagaagtgagttgagcgcttcagggagagccttagtgtcacattctgagcgtggatgatgttcttgagctgtaataaagccactttgttctggtaatttgcaaggttgccacctttggtcagaaagaacttggctggggttcctgccaagaacagggcatggtgctggaatttgaagggccaggcttgggcgctggcttctagatgaacctgtgtcccacatgcgatgatggaatgttttctaaatttgtgtctttctggttgtctagaaaatctgagctgccatcttaaggtggcaagcattgaattcagtggccactgatgttttcttccctgcacgctttttattttgggagtggagggagaagctggtgttt

SEQ ID NO: 23903 - DNA, 1086 bp, Homo sapiens
gctatgaatttttagatcttgggaactttgaagtttgtatgaccaacatgtttctatggatagctctgtgagatcatgatcacctcttgaaattaatttcttgtaattactgcttcctaaacttgcccaggtattgtgctttaaaacatgtgagaagcctactctgaagcagatagaacacacgttgtgggagtgtgtggtgtacttgagttttagtctcaattcccactcctctcgtatagtaccaccaggaggtcatctcaccttgctgtatcttgtttattcttgttattctgtggcttgctggtttttgagttgcatccaggtctggaatgaaccatcccttagttcatctggcacagccagtcgccatcagcatggggtccctgtgatgtggcattgaacttcttcaacctgcgtgaatgtgtttgggccccatcaccaccctccccctcccacaccctggaccccatgttcatgtggaagcacacacacattccattgagatttgtagagagagaatagagttgtggaatgtctcatacatgtttcctgtttgtggggaggagattctgagaggaccactttttctaccgcattcatttgaatgtaagtcagacaagtgattatttgagatcaagctttcaggataaagtctgaaagaacattggttatgtcctgctggttggagcctgggaaggtaccgacagtccccatctattcattattctcttccttaacttctcataataccatccacactgtcgcctccaccctcttggagggagacttatgagaatggctgctgcagttagaagtttctgtcccccttgatctgcagttcccatcatgaagacactttgtttgtgatggaaacagcacatgtagctggaccactcactatctcactgctcaggtgcacgaactgacaagaaatgagaagaaaaggcccctgaacagcaaaaatgtcagaagcccctgcacctttcttagaggcagttaatccccatccctcaaatttgaacagttttgaaccaggagcttcgttcaatccagaaaccacctggatgtgagaagaaaaggggc

SEQ ID NO: 23904 - DNA, 1031 bp, Homo sapiens
aagtagctggcattacaggcacgtgccaccacgcccggctaatttttgtatttttagtagagacagggtttcacaatgttggccaggctagtctcgaactcctgacctcaagtgatctgcccgcctcggcctcccaaagtgctgggattacaagcatgagctactgtgcccgggtggattttttattttccttcttttcattccgtttctctgtaggacaactttgggtttgaccttcctgcagttgaggccgccacaaaaaagcacgaggccattgagacagacattgccgcatacgaggagcgtgtgcaggctgtggtagccgtggccagggagctcgaggccgagaattaccacgacatcaagcgcatcacagcgaggaaggacaatgtcatccggctctgggaatacctactggaactgctcagggcccggagacagcggctcgagatgaacctggggctgcagaagatattccaggaaatgctctacattatggactggatggatgaaatgaaggtaaaacctgaccgaaaggaaggacgacagagctgatccaaccagggctctcttttctgtgactcattcactaaacccctacgtacagctgtgtgccttgtctaactgcccacatgtacagctagagaggagccacatcacccatgggaagattgctagctcaggaattaaatgagacgtgaagtgtgaaaaagttgtagagaccagttcagtagccagagctctgtttctgtgacttagatatattccagtgtagggaatcaatcacattgtggttttctttatttttaagttttcagggttaaactaacttaccgtttcattgatctgtgagtgagtggtactactttgggcaggggtcccggagaggtggtatggggagaagggaggagtggtaggtgccatggacagaggagaggtcaggaaccaggcagccagagttctgattgtgagtgcctgagttgcctaatcctctttgagccctctttcttggtctttaaatggagattgta

SEQ ID NO: 23905 - DNA, 1030 bp, Homo sapiens
cggctctttgatgcaaacaaggccgaacttttcacccagagctgtgcagatctagacaaatggctgcacggcctggagagtcagattcagtctgatgactatggcaaagacctgaccagtgtcaatatcctgctgaaaaagcaacaggcaagtggacaagccatcatggacttgggtgtatttctgttttacagccatagtccttagagtcttttctcacccactgcattatcaggagtccaccttccatgggaaggcatttttaacccaaaatattacttgctctaacagcatcgtagaacatttccagaatagaaagacacttgtccaaactagaaagacacagtattaggagtattgggtgttggctgtctgtgtatgggattgataattttcttagttaatgggtattatcaccgtttaacagttaaataaatgttcatctcattcaattctgcattttacacgaaagaaatattctcatactttgttgtttaacatcgtgatttgtgacagttatctgagttgttcaaggcactttataggtaataaaaataactgtttatattatatcaccgtagagggctttaagggcaaatgaatttacctcagatttacttgaaaacagttccattgatgttgaaaagcaagtcagtggcaaaatgtttgagtggctcccatggctggctttgcggtgtggccaagtcccaggcccagcagttctgcttagagccagtcactgcaaaagatagtctgtgctgagcgctgaggctgcttctctgccctcagatgctggagaatcagatggaagtgcggaagaaggagatcgaagagctccaaagccaagcccaggccctgagtcaggaagggaagagcaccgacgaggtagacagcaagcgcctcaccgtgcagaccaagttcatggagttgctggagcccttgaacgagaggaagcataacctgctggcctccaaagagatccatcagttcaacagggatgtggaggacgagatcgtgagtcgacccctac

SEQ ID NO: 23906 - DNA, 1062 bp, Homo sapiens
tcactgctgtctaggctagttcccatcctgtgtatctttttgtgtctgaataaggagaccgtattagctgctctttgatatggccatcctgaatctttgacagctaactcatcaaggtgcgattgcggcacctcttgctgcttctctactttctagaagagagtctttctgacttgcatttcaaagtaaaagtttgaacagaaaaccattgctttttctggcacccacctagcaaccattttgaattattcaggcacacacacaaaaacaaaagcagccatattctacagtttggttacctggctggtactgaactgtgctgtcactgtgctttggctccagtggcccagcctaagctcagggagtgattcagacctgaaagaccatcagtttctttcaaggccatcagtttctttcaaattaattgtgtgttttaaaacctacacattttttgaaaagcttgatctcctaacggaggcatcgtttgtctaattttagggatgtatcatctgttgaactcttaatgaataatcatcaaggcatcaaagctgaaattgatgcacgtaatgacagtttcacaacctgcattgaacttgggaaatccctgttggcgagaaaacactatgcatctgaggaggtaggttgctactttgctttggagctgcagctggcgtcaagatgtaaaatgactttgttttatatgtttgtgtgtgtcagagatactgtgtttacattcttatacacacacacatatgttttaaaactcctttcctgtgcgtctagaataatgcaattatgcaagactctaggcccaggctggtaaatctctggcacagaagacaatttttgagggctacaaaatggactccgcatcctccccaatcagtactctttctaggtgacgccaatgtccattgactatgccctagatcagtttgctgttgagtgcatggttggtgattctggttaggatggtggtaataaagaggtaaattattaggtgcgtgtgtggccccctgcatgggaatgggcatcctctccaagaggtcagggctttgtccg

SEQ ID NO: 23907 - DNA, 1037 bp, Homo sapiens
tgttgataacataataaaaactaacatctattaaaattttgctgtgaatgaggcattgttctaagtggttttttaatgtatttctgtgtttattccccaaagtgaccctgtgaattagattctatttttaattctcattttataagggaatatgtgagctaatacagggtttataatgtacagtattaggaatagcatttcataattggtatgagcactaacagcgcaattctagcattgcttaccatgctttgccattctctgttggagttctgggctctgtccttatgttctaactccatctatgcatgttatgggggtttactagaaaccaaatgcaagggccttttctgagaggtttgacggcacactctgttgggcccagagccctcagaaatcccactttttgaccattctttgcaggaggatttggtctgtatgttttgagaattgtggggcagtttcattcagctcagcaaaacccacattacacactgaaccgggcaccagcttgtacaccagggacacagtgatatgcacagtccctgccttgaaaagccagtaagtccctagtgcagaggtggcatcttcttcatgtagtcatgttgggggctaccgaggtgctgaaagcagatagctagccagctccttgggacaccaacgctgcccacagtccattttttacctcaatgatcccaggctttgctgcatgaaatgaagtgaaaatcagtgttaactatagcagaaagcctggttctaacctaccttctcataactatgttggaactagtgttccatttcctcacaggtggaagaacagaatgaaacagagcaaaagccttggtccccaccatctgtagtgttcccatatccttccctccctctaaaccccccaaaataaaacacacaactaccgcccaaaagagggcgagttaagaatgcctgcccatctggctacgtgtagattgtgaattcctgcaggtctctgaaggcttagctcatgaagtggggccgagtgaacagagcgttcactgtag

SEQ ID NO: 23908 - DNA, 1048 bp, Homo sapiens
atttgtccacagtcacataggtatgtaggtggcagaagtagaatgtagacagtgccctttctcatcctgtgtgcacacacacaggatgctcagaacttccatatgattaaatgcatggagtgaactgcccagattttaggccagtgattttgtggtgatgcgttttttgagagttctaagtaacttcacacagagggcagcaattattctctacttccaaagggctaattattttgctatggtaagagttccatggcaacctctaatgctgcctttatgtggtggagcggggcatagggcattcctgtagtcgtatttttctgtctagagtctatttaaaacacttggaagtttcagatttaaaaagaattaaattatgtgaaaaggttgcacgtaataaaattgagtgatgatgttctcccaccctttcttactgtttcctctttctcctcttcttcctttcccttcctccttttcccctcttccctaacagggatacttcaaaaggagaacaagtttcccaaaacggtttgccagctgaacagggatctccacgggttagttaccgctctcaaacctaccaaaactacaaaaactttaatagcagacggacagccagtgaccagccatggtctggactgtgaagttcactaccatttgtcaagaatcaccctttccaaatcctctgggttttgactttttggcttccacttcacccaaaatgttaaaatttttacttaattcatagccttccttggtttcatatttgtttgcatttaattcatgtttgagtctcttaactgatggatgcccacttgccttaaagcagcatacttattttttgtttatttattgtgagctttttactttattaagattttacagcgaaacccttacatgagtaattgaaatgaaattaaatgagattacagcataatgaagaagaaaactagaatctaacaggtatgacacattcagttattctaacagggcacagtactgtgctatatgtagccgcctttacagatgttattaacctatagtagtt

SEQ ID NO: 23909 - DNA, 1652 bp, Homo sapiens
gattcattgttcattttctcaagactttttgtggaattctctgataaaggaagcttttaggatggtatctatcaggccaccagcaggaattgaaaatgttttcacaaaaatccttttccttagaaataaaagctggtgacagagatggtttccttgtaccgataaaaacaaaaccaaatccatattatacatcaaaaccttgtgagacattcacttgctcttttgccatatttagatgtgtcagtggaatcagaaacctgttttgatatgtgttctctatgagttaagtctgatttgtctttttatttcatgatgcatgtcttttttttcttttgtcaggataacgtcatatagcatcttgtttgtttttccttatctctatgtacatatctatctacttctgactgtagatgggtatatagatagatgccaagcttcttatgttctgggggtagtatgcatcattattgggtctctgccttaaaacacatcaaaattcattttagacaaaaaaacttctgctttgtctttggtcattagggagctctaatgtgtgtttgtggctccaagttacattttgtgtttcattgatctatatgtatatatgtgatgttttcatatatatatgtgtgtgtgtttaaattttgtatcatcaggactgacacccaatttgacactttttgtatctagaagaccctccaaaaaaggaaccacataagcacacaagaaaagagtgctatgatgttcttagcatttgctatcatgcctatttttatctagatttttaaatgtagcttgtcataacaaaattttaattacaattggcttgtatgagaagaaaaagtatttttattgttttgagtgatgacgcagagactcagtgaacttgaaaatagcattgcttcgtgcactttgaataccaatcaggtgttttctgtgctactagttgtcacgttgcattcatgttcacctcctgatttaagtatctcgggtgtgcccagccactaaagcactctggactaatcgctaaagagaagcaacgtggggggtggggttgcgagggatgtgttcacatgtacccatcatttgatcatagcactgtgattgcttttgatgtgtgtctctagtggtgtgctgtctgttggcatgcttaaagcacatgtccattaaaattcattttgttccttttattttccttgttttcttggttagtgattcatttgcataaacattaatgatctctgcatactggtttggggttttctctttccttctaactctaaagaaaaaatttttgctgcagaattatcctcagaagaggcttccctggccttcatctaccttgcagtctgaccaagtatgataaattttagccgttttcaaggaaacatctctctacccaggtcattgctgtcactagcagctttcaagtcaaacctgcagcactaaatttttttttatcctggtttctctacatactaaccccatgtctctctggactcacacctggctcaggccttccagaccaaactcatacttcctcctcaccagaagtttccgaatctcacactagagaagatttgtcacctttaaagtccactcacattattttgactcagggttttgttttttgtctatttcccctcctgcaa

SEQ ID NO: 23910 - DNA, 1050 bp, Homo sapiens
ccttgtcttactctgggggaatgccatgtagctctgatagagttgtctatcggtctgtttgtgaatgccctttcgcttaaacttccagcccttctggtggcatccttggttgtaaggtggctgctgtataacgtccactctctttcatatttaatatgtgtgattgttactgttgtctttttgttttaaagtaaccataagaggagatgatctgagttatatttattgatcagaggaatagagtgcagtaaaactcatactggcatttcgcttttctcatttccctgtaaatgggcgggtattaatccattcccaccttctaatgtccttgatgtccagctggctttgtgggtgtgcaatggttttactgtactgcctcgatctgtgccaggcatttatacacagccacatgtgcgagtcaggtagagcgtatgtggtcacccccatggctcacggagttagctgaatggcctctccgctgtccctagatggcagaaacggtggacacaagcgaaatggtcaacggcgctacagaacaaaggacgagctctaaagagtccagccccatcccctccccgacctctgatcgtaaagccaagactgccctcccagcccagagtgccgccaccttaccagccagaacccaggagacaccttcggcccagatggaaggcttcctcaatcggaaacacgagtgggaggcccacaataagaaagcctcaagcaggtaacagcagcagaggctgccacagtaagatgggaagtcagcctgtgaagggataaggcgggccactcttgaattggaagagaagtatgtgctcatgtagttttattcctttggtagcttcctggacattgcattcttcttgggctgacgctggaaagcaggagtagaatgctggttattcactgagagaagaagagttgagtttggatgggagtagctagaaggggctttagtagttcatctagagaaggaatttgctagattgagactgaagagtcttctttactttaagtgattgatttcatttaggactccttgtgggt

SEQ ID NO: 23911 - DNA, 1052 bp, Homo sapiens
aattttgtgaggctgtgttggaaataacccgcctctagtgctgttggtatgcaaggcagcggtgcttaatcaatatttcctgtgctcaccagaggcaaaatgtaccaatatcctgacaccattctctctccatttacttctggtggttaccctgactcttgactcttagaagtgcccgagatggggctaacctttattaaacagatcgcatattatgatcttgctgcagccacagtgcagctccacattaactctacagaccaaaccatttgtatctggcatcacttactaacacacgacatgcggcttttctgcatcaactgctatgacggttaagaatgtcagtatacaagaaggaatagaaaactgatactgttttaaataatctgtaatttcaattttttttttttgctgaaatacattatattgtacgtttgagataattctagtacaaagtataataaaactagatgtataataaaccctttaaatcattggtaagtgtacaagtggtggaactgaagcatttactggacaaagtaatgttactctaatggttacttgctcgtgcgttgccacactgtgttataatttgcttcatttccttgctatttgatacatagtgtgcatttctctgtcactgtaactattgtaatgacaaattttcatcttactgcacaatcaaaatgacattgataggaatgaactccagaggctgggcctgaacagggaggtggtcgctcaggcctggtgctcagtcgtacgacctgtacctctcaacttttgccctatctgttaaatatatgctatgtcattaaatgcttttaaatctagcacggtgactagttgttgttcttcctctgctgcgtgtgcatgcccagtagggaaactgcaaagggagaaatgacaaacaagaaacattttacaaccagtctgggctcacttttgcattttttatgcatgtctggtgcacaagctttgaaaactacagcaaacagtaataaatgtgactgttttgtagttatacattcaggctttatcttttatttatg

SEQ ID NO: 23912 - DNA, 1068 bp, Homo sapiens
tggcggccgcacaccggcggcggcggcttgtctgcggcggctgcagcggatgatggtggcggccggcccgctgggctgtgcctgtgtgtcgccgcggaaatcagcgccctgcgccgcgcgctgagcccctgcaggtccgccgcagccccagcctcggcgaggacggccccggcgcgcgggggggcggggggcgcgcggggtcggcttatcatggcggatcggacggcgccccgctgccagctccggctggagtgggtgtacgggtaccggggtcaccagtgccgcaacaacctgtactacacggcaggcaaggaggtggtctactttgtggctggggtcggggtggtttacaacacccgcgagcacagccaaaaattcttcctgggacacaacgacgacattatcaggtaagggggtggccaggggcggcggggaggggttgcgtgtggaggctgggaaggtgggaagcggttgacctggggtcggatccgggagccccgtggaatagaggattctctctggagccgcatggaattactgaagggctgctgattctagggccagggcagaaacagtgtggggagtgtaggtgaggagggagagatgtcttttcgctgtatccctccggaattctggcttttaaatctccaaggagttgagtgttctgatgctttcttgctgttctttcctgctacaagtggaaggagcctgggtaactatgaaacacttcttccttccctaaccaggtgcacggtaggaccaataacctgaagtgtgggcatcatctttgggaggctcctcagtgggtttctcagtaagcaagaggattaaaaaagatctaaaagaaattttactactggtaatttggaatcttcatctcagatgctttggacctgggaaatttctgcagtgggtggggagtttgttctctaatatttcacttggcagtgttttaatgcccaaagcatatttatacactaaatggatgcttccacagcatcattgaggttattaaaggctggcagctgctggatcacaaaatcctaccagccagcccacacaatgacc

SEQ ID NO: 23913 - DNA, 1029 bp, Homo sapiens
gatagccagagaaagaccaaggtcattgtaattctcatccaggtcattaatgcctcatgggttttggtaccatatgccctagatttcccaggacagtcacaaatattccattcagttattgttgtggatacttgttcttgtgacatcatgaatctaatttttaattcagaaatatgagtccaggctcactcctgtcatcccagcactttgggaggctgaggtgggaggatcgtttgagcctgggagttaaggaccagcctgggcagcatagggagaccccattgctacaaaaaattaaaaaatttagccaggcatggtggcgtgtgcctatggtctcagctacttgggagcctggaaggtcaagactgcaatgtgctgtgatcacaccattgcactccagcctgggtgacagggcaagaccctgtcaaaaaaaatatatatatatatgactgtgttttgttttggaaaatgtggttgccacataatgggtcactgcttgaaaacattgcgctgaactatactatcttataaagaattgtatcagtcccaccaaccccatcaatcagtcatttggatgacactgtgataggtgaaaaactgttcacatggcagcagccctaattaggcaacactatcctgcagcctctcctatcctcaaggtgtggatctgaacacctttttgaagcactgtgaaattgttttccacaacagccacaccattttagcatcccaccagcaatgtatgagagatccaattcctccacatcgtcaagatttactactgtctgtcttttttttactattgccaggctgctgggtgtgaaatgatatctcattgtggttttaattttcatttccttcatgactaatgatattgatgatcttttcataaacttactagccatttgtatatcttctttggataaatgtctattcaaatctattacccatttttaatcagtttgtctttttattgttgagttctaagagtttttttacatattctgggtatgagtcccttatatatta

SEQ ID NO: 23914 - DNA, 1033 bp, Homo sapiens
agatacataacattttggtaaatatgtaaagtgtaagtaataattaaagatttttagaacttcaccaaatgtcaccactgtgttggtgggtaaaatgctacacttgtttttctaattagaacaccctatgcagtgacctgagagtccaagggcttcatgttttcagagcgggtcacttcaccttttcagccatgacagaagcaaatctagccgaggataccctttcttttcatgccaagtgtgctttctgcataataaggtaaaaggtctgctagactgatgttcaggtggtggcaacatactactataggacaagatcctgaaattcaaaatagtgggagttaataatgggacattttgtgaaatgactaaaaacaaactcattaacttatatattctttggtaaccttacttatcactaggctaggagaaaattagtatgcatgtctgaaacccacataaagaatgaacttaattcttgcttaagactaaaatggcaataaaaagtggtaattgtaagggaaattggaactttaagtaaacttatttgaggctctttgttttattttatttgggccctaagcaaaaattactgtactaattagcatgattgatttcatcccatgttatttatccttaagatatgaaattatgaaaaaaactttgagatacatgtgaaaaaatgttaaacagttcttgtttctactagtatactcattttaatcttctttatttataactacattatacaaatttatctaggatttttactttatattaatacttggattacagaactgagtcattattacttatcctaattttgtgcttggttaaattttgttacaatttataggtttagaaactttcactttaaaatgtgcaaggtattccagtaattctggggaaaatgggttccttatagtgaagattattacaaaaattataatgggtaaaattgtttattaattctggcaagacaccaaaaagaaattatagtagttgacagaaaactcagaaaaaataaactgta

SEQ ID NO: 23915 - DNA, 1050 bp, Homo sapiens
cagtgacaagaacacttgtaaacagtttatttacattcaatggattatatttaatcattttatagttaatttgcgtaaatctctctctgtggaatgtccacgaaaatgtttttggttggtgacaagcaacatggtagagatgcagagagtcgtgaggcccggattgtagcccaagatctgttatcctctttctgtgtgatcttgggcaagccattatctcctctgagttggttttctcatctgtgaagaagacagattacaacatctctgaagctttacatcttaaagttctaaaacttttctgtttaatagttaaatatatataaattttctactcaaagttttttttttagaaaataaatgggattttggcttctatataagtaacaattatacaagacattgtaaatcccaatctatgatttataggttctaattgaaatacttctcatgttcatgtctgcatagtgccaacacatgtggataatgatgactttgcataagattttgtctgtatgagtttcagctttcagtggaaagctgggtagttaagaaccacactatccaagaagctgggaaatgacttattttgattaatcaaaatacaatgtacagataagctggttgagatacccgaatctgacaggacatttaaaataaactggcaaagatttatatgagccagtctggctgcagtgtgcacctggtgggttgtctggaagctttgatgaattagtagtgatgtcagaagacttcactataattctaggctagaatattgccatagggatgcagcagaggacatctggtttcacttcaatttatccatcagagccaacaatttgagtgctacagggacaagccctagagaagcagattttaataccatgcacctgatctatgatgggttcttatttttgagaatggatgggtatgtttaagtacatttttaaaaattgtagtacaaaagtaatacatgctcactgtaagacattgaaaactactgaagcatatacatttaaaatatcctcacccccagccaccccaact

SEQ ID NO: 23916 - DNA, 1039 bp, Homo sapiens
attcctaaagaaggctctgaagtttgtgctaaatatagaaagagaaggaggaagagagaagggggagaggagagagaaaaaagagttttctgtctgggatgaggagaaagttgtacccccctcccaaactggggctgaactataattctgaccctcaaaagtcagctacgtttccaaatgaggattaccatcatggccattttatcactctgtgcgagatgctgacaccatgcactaagttttgggtcccatgtatttctttttattgtggaagagaaaaaactaaaatataattagaagtgcattgttaggccgggcgcagtagctcacacctgtaatcccagcactttgggaggccgagacgggcaggtcacaaggtcaggagatcgagaccatcctggctatcacggtgaaaccccatctctactaaaaaaatacaaaaaaaattagctgcgtgtggtggcgggtgcctgtaatcccagctactcgggaggctgaggcaggagaatggcatgaacctgggcggtggaggttgcagtgagccgagattgtgccactgcattccagcctgggtgacagagcaagactccatctcaaaaaaaaaaaagaaagaaagaaaagaagtgaattgttaaattaataaatatatcaaatatataaaataactttccttacactctttacaattatgatagtaagaatgaactaacactttacactttcacctgagaaatgacagagcttcagaatttgatttctttaactgtagagtattaatgaaatccaagatggtattttgaatgaaagaaccaacaggaagaaaaagccattttggtgacagtctcatgaacttgtcagtggtagaactagggaagataatacaaaagttttgacatctcagttgcttgccaccctatctgacatggcactagcttgttcttttagaatataggaaggaggggctgggtgcagtggctcacgcctataatcccagcactttgggaggccaaggtgggcagatcacctgaggtcaggagtt

SEQ ID NO: 23917 - DNA, 1029 bp, Homo sapiens
tatccatgtgcaggtttctgtgtggacataagttttcagcttatttaggcaaatatcaaggaatgtaattgctggtcgtatggtaagaatatgcttagttttgtgagaaattgccaaactgtctttcaaaatagctgtatcattttgcattcccaccagcaattaacaagagttcttagcactccacagactagccagcatttggcatcaaacaccatttattttaaaagttcatctttctcttgctatttatgtaaaaccttgtctttgttatacactacatttttatattcatttgtgtctgtttcaagattttctgttttgccatttgtcagtcaactcatacacaggtactatactgttttaattatggagcctttatagattgttttaatacctaggagagctactctctgcactctgcttttctgtttccgttttcctggtcattcctgctggcttattcttccatgagagctttaaaatcaaattgtctaactccagattaaacacacacacaccccgtggtctttttattggaactaagttgaatttataaactaagggataactgctatctttaggattgagttttcctttccaagaacatgggatatagttctgttttttaaagtctgcctttttaatcttacttatcaggtctttttttctctcttcacttttatgttacatgtatctcgttgagtttatgccttgttatttttattgtttataaatagagtcctctcctccattatatttttcaaccagtcactgtatatacaaaggttattgatttggtattcaattttatatactgtacctttactaaaatgtcttatttgtagtcattttaaaatttcctttttaattttttagacatatatcctttgcaaatatgaatagttttagctcttccattccagctcttgtgccttttaaaatctcctctagttgcattagtttatatgttcaatacgatgttaaatggtagtggtaattatcctgactctattgggaatgccatta

SEQ ID NO: 23918 - DNA, 1044 bp, Homo sapiens
tactaggagggtacatatatactatgtttatttagtatgaaacaacagaaaagcaggcatttcaccatttacctggatgtttctaaatggaaagatgtttggcatcatataaacaaaaccaataagcaatgagttcatgttttgctttgcaaatgaatgatttagcatcgtgtaggtctagctgtagattcaagtttaaatgaaaaaattatttcgggtgatgattttggttcaaggaagctcaaagtgtgtttattcctatttgtgcttttttgtggtactcttggactgaatatgtagcaccaggctaaagaagggctagccaaacagcataagtagagtttatgttgccccttttcctctcccacaggggcacatggaaggagaagtgtgggggttggcagctcaccctctcctgcccatctgtgcaacagtgagcgatgataaaacacttcgcatctgggaactatctgcccagcaccgtatgctggcagtacggaaactcaaaaaaggtacataacaccaccttacacatctgtcagagtatttacaagtaacagaatgtgtcatatttattcactcagttaatatttactgagggcacgtgttatatgcccataaatatgctgggcaatgagaattttatattggttgctacagtcataactaagcacatgtagaattatgccagaaggctggcctaatccagctccatttttcacttcattttccttgcactgcacagatatttgccacctgggggcaatatgtccttcctcttctcattgagagctgtgggagtcaattgaaattcatcagcttttaaagaatgctatttattttgtaacagtctccagaacttattttatgacttgaaaacaaacatcaattatatagaaatataatacttaagaaatgagtaaatatgtcttgaacacctaaatgcactagaactatgaggtgtactgagaggtacaaattcagcaaacatttattaagtagcttctgtgtggcaggcacaggggatcccatgatgaatggtcc

SEQ ID NO: 23919 - DNA, 1033 bp, Homo sapiens
ccaccatgcccggccgagtctgttttttttcactgactaaaaatacaaattccaataatgaagtaacaggcactataatgaaccaattttctagggtgctattttactactgttatttgttagtgttatctgactggtgtctttgcttaatcctagaaaccctcatgactcagttttccacattgctcttagcacaagaacataaaaatctctgtacgatcatgttgagcaggtcagaaaaacctaaaataataaatctgttatgtagaccaaaaatgcaaaatcaaatctcatcatggggaaacactggacaaatccaaatcaaggtacattctacaaaatagctgtccaatatgcttcaaaaatgtcaaggtcaaaaacaaaaattgaagaactgttccagattaaatggagctagagagatatgacaacatggatatattataatccatgatcctggactggggaaaaaaagtatactgttgggacaacggacaaaatgtgaatatggactgtgtattagataagagcattgtacaaataagtgttaaatttcctgagtttgattagttctgtagttttataagatagtatccttttgcttagcagatgtacatatttagaggcaaatgggcactatatctcaaacattttcaaatggtccagggaaaaaacatcacgtgtgcatggagcaggacaaaaatgaggcaaataggacaaaatgtaaacaactggtgaattaggtaaaagatatataggagttcctggtttttctcttgcaatttttctggaaatttaaaactattatcaaaattaaaagttaataaaaaaacacaaaatctacgtggggaggaaaaaaaacagatgaggtgatttaatcaattttaaatatactcagtctttactctggctatgatatatgctagaaacaatatttttaaatatttaatatttaaatgtaaattttcttcttatggtagacttctctgccagccccacaacaaagtcaacagctctttccatgacactgtta

SEQ ID NO: 23920 - DNA, 1052 bp, Homo sapiens
gtctcatgtacatttatttcaagtttgaaagacttcagctgacttgagattttagagtatatggctgggtgcagtggctcacgcctgtaatcacagcactttgggaggctgaggcgggcagaccatgaggtcaggagatcgagaccatcccagctaacacagtgaaaccccgtctctactaaaaatacaaaaaaattagctgggcgtggtggcgggcacctgtagtcccagctacttgggaggctgaggcaggagaatggcgtgaacccgggaggtggagcttgcagtgagctgagatcgcgccactgcactccagcctgggtgacagagtgagaccctgtctcaaaaaaaaaaaaagagtataaacttcctgatttgtatttgacatctcaaagaaaggagaccagaattcaatgatactttggatttcacagagttcaattttctgcccagccattatgtttatgaagttgagtatttttgaatggtcatagttgtggttactgttgagaggtgtccatcctttttctggcttaagattgttaggacctttgtaggaagcagtggttctttttttttttttttttgagacggagtctcgctctgttgctcaggctggagtgcagtggcatgatctcggcttactgcatgctctgccttgcgggtttacaccattctcctgcctcagccttctgagtagctgggactacaggcacctgccaccactccgggctaattttttgtatttttagtagagatggggtttcaccatgttagccaggatggtctcgatctcctgacctcgtgatccgcccgccttggcctcccaacgtggccggaagcagtggttcttaagctttagcaagcattggaaatggttggagggcttgctgaagcacatatggctgcctcccagtttctgatttaataggtctggggtaccgataatttgcatttttaacaatgatatggtttggctgtgtccccacccaaatctcatcttgaattcccacgtgttgtgggagggacccagtgggaggtaattgaatttt

SEQ ID NO: 23921 - DNA, 1051 bp, Homo sapiens
gtcccagtgctttcagaggctgaggcaggaggatcgcttaagcccagcctcagacttctgtttgaggctgcagtgagctatgatagtaccactgcgtgccagcctgggcaacagagcaagaccctgtctcaaaattaaaaaaaaaaaaagaaaaagaaaagaaagaatgttgcctgactaagatccaggggtgaataccttagattaatgttgattatactcaaaactgcagactatttgaaaatagttcttaatgatgagaaaaagtcaaaggctctctggattcttttttatctttttggtgccttattaaagaatttagagaaattgcaaatgagagtattattttgatggtttttaagtacttcatactgttgtgttattcttagtactttcagttttcctcaggaagattattaggagaataataattttatatcttttgactgagcaaaaatgcacttaagattaatggattagttagatgtcagttttctgattgtgatattgtactactatagttttgtaagatgttaccacttggggaagctgggtaaagagtatatagcagatttctgcattatttcttacaattgcacttacctcaaaataaaacatttaatttaaaaaaatgtatataaacatcaggaggattagagtaataaagctacttaagagtagacccaaaatcctacagtcatatgtggataaagaaatggaaggtaaaaattaagaagcattctgctaatgttgtggaatgtaataattacagatgcaaacagaacaattattaccagtccacctgcttcgcaggaagataaaagtaataaagtaaattaaaccaatattttaagttactttttattttcttgggctcaagttgctacttccctggtttataattattagaccaacatctgaatagaagcttcaagggcagagatcgttttattcatctttgtatccccccaaagtgcttaacaccatggttttattacacatagtaagcagcgcccttttcaataacatctgttataatataaatgaagac

SEQ ID NO: 23922 - DNA, 1039 bp, Homo sapiens
aagagatatttgtagttaaaagtgtggggtttttggtggggcttattctgtaaaataggaaaaggcttaaaagatgatagttaaaaatggccgggaatggtggctcacgtctgtaatcccggcactttggtaggccgaggggggcagatgacttgaggtcaggagtttgagaccagcctgccgacatggtgaaaccccatctctactaaaaattagctgggtgtggtggtgggcagctgtaatcccagctactctggaggctgaggcaggagaatcgcttgaagctgggaggcagaggttgcagtgagcccagatcgtgccactgcactccagcctgggcgacagaaagagactctgtctcaaaaaaaaaaaaaaatatatatatatataaaataaaagatgatagttaaaaagataatagcttaggatgttacagtgatagatctgaaggtaacttgtacttaaggaacgagaacagtgagaaatatatgtttttaatggagttgatactatttcatgtggtctttggttttgaacaggtgtattacctgactgcttaaccgatggctctgatgtggtcagtgaccttgaacacgaagagatgaaaatcctgagggaagttcttaggtaccattctttaattgttttttaaatgaatcattattaatattatatgatctgtacatatgctttttgcccaacaaatatgaactaataaaattgctaaattctctactgaaaaccatcaaaatgatctatcaatttatgactgtggatatatttcttagtgacagaaaaagttattttcaggtaacttataccagatcagtccaaatgaaagggtctttttacacccgcatcataggaataggaaagtagccaccaatgggaaaaagttgcagtagacctagcctgatctctggagagaggtataatgacttgagctaaacagcttactccttggcttctggatctcactatggaggtggcatattctaggtgtcacatggtaggaggctgggcatccagattccacaga

SEQ ID NO: 23923 - DNA, 1047 bp, Homo sapiens
tgacattttatcaagaggggtataatggctcttatcaagaggggtgtaattgatcactctaaagagggtgattgaagtccttattaatgggatttgccattcaaatttgggttcaggatttcaaatctgttgatctttattcagctagggttcattcagagttctagaagaaatgggtagacctgtattttgtgttactaactgtattatgctgtatgcctatgtatgtctttcccagttgactgtaagccactttagagcaaggcttgattatcttccatctttgtgtctaatgtgccttttattgtaagcttaggttagcatgttgcttagttgaatatttgttctttgaccaaaaaaggaaatttatctttttatcttatttttgtatatttcagaaaatcaaaagaggaatatgaccaggaagaagaaaggaagaggaaaaaacaggtgcctacagaacatataacagaagtattttattgctgttatctcttattaagtttacacctagatcttactattaaaatttatacttatgtggaactacataattttaagtacaatgtaaatattgaccaataatattaatatatcaataattctatgtatgtcgtgcattactgctggccaccatattatatagtactatatatacttaactgtatatagtacaaacaccacatagtactaattaatcttacaggacatgcatataagcaagagtagtcattttttttggcaagtttaagcatttgtttttaactttttatacttttttctccttctttatttttgtcctggtaactcacagaacaacattttttttttttttttgagattgagtctcattctgtcacccaggctggagtgcagtggtgtgatcttggctcactgcaacctctgcctccggggttcaagcgattctcctgcctcagcctccagagtagctgggattacaagcgtgcgccatcacgcctggctaatttttgtatttttagtagagacggggtttcaccacgttgatcaggctggtcttaaactcct

SEQ ID NO: 23924 - DNA, 1035 bp, Homo sapiens
gtagaatgaaacttttttgaagttctgggaaactgatttgcaaatcactttcatgtatgttgtttacttgtgtatgttaagcctaaacctaggcagtgcagcctagtagtgaagaggaagctactggagcctgactgattagatccaaatgcttgcattctcatttatcagctacaggacctccaagaccttgggaaattacttaacctcttcaagctttggcttcgtcatttctaaaatggggataacagtcctacttcacaggattttagtcaggattagatgtcataatgcatctaaaaatttctacttattattattactgctagctataggagagaatgctctggcttaatccaaataactttctattcattttaacatatagttggtgtcttgagaatgttctttcctgcctaaattatttaatctttatgtccatgttcttcctaaaggcctctgagtcagctgtgggctgtgtgtgtgtttggtgtgattaagattagaaaatggaaaatatattgtggatccctctacttaagatggctgactaggccaggggcggtggctcgtgccaatcccagcagcactttaggaggaccgacgggacaagtgcttgatcccaggagttcgagagtagcctgggcaacaaaaggaaacgccatctctacaagaaattaaaaaaaaaaaagccaggcctggtgttgcgtgcctgccgtcctagctactcccgaggctgaggcgggaggatcacttgagctcgggaggttgaggctgcagtaactcgagatctcgccactgcactccagcttctgcgacagagcgagaccgtgtcaaaaaaaaaaaaaaaaaaaaaggctgactagaaacagctagtgtgcgccactctcacaaacagaagaaagtggtaagtagacactacctcttttttttttgttgtttgtttttgagacggagtctcgctctgtcgcctagactggagtgcagtggcgcaatctcggctcactgcaagctccgcctcccgggttcacgcca

SEQ ID NO: 23925 - DNA, 1113 bp, Homo sapiens
aatccttaagagttaggatccagctactgagagaatcacttgttatttagtgttagagagagtgttaaaaaacaatgaggtggaggtgggaggcaatgatgttagcacatacatctaacagaaaagttatttctggcccattctctctctctccctcacaaacttttggtgaggaagtagtactacatgttaataaagttatattattgactagtttcactcataaagtaaacttcagattatcctttgacattagaaattaatatttataggatgttggagccaccagaaatcctagattcttactttttttaggtgaaattttaaacaaagtgaaatacatatattgtgagtatataatttgatgagttttggccaagagtatgtccacgtaaccaatacttaaataaagatttagaacatttccatcacccccaaaagttaccttttaccctcttacagtgaatctctaaaccatttaggtggccactattcttatttatatcacatacattagttttacctgttcttgagcttaaagtaaacagaaccatacagtatttacttgtgtatctggattctttcactgaacataatggttttgagattaagccatgttgttgcatgtattatctgttcattttttaaaaaatattttttctattcaaatgtgtaccaatttgtttatatacggttttgttgatgggacttgggttctttctagtttttggctgttctgaataaagtcatggacatacaagtctttttgtggatattgtattttcatttcttctggatgagtacctaggaatagaattgcaagtcatagggtaggtgtgtattgaactttataaaaaactgccaaatagcttctgaaagtggttatatcatcttacactcccatcataagtgtttgaaaattccagttgttccacatccctcatacacatttggtatggtaaggcttttttattttagccattctagtgggtatataacagtgtcctaaagattttgtttgcatttctctgatgaataatgaagttgcatatcagccatttgtggtcttttttagtgaagtgtctgttcatggattttgccttttttgattag

SEQ ID NO: 23926 - DNA, 1028 bp, Homo sapiens
ctgatttacctttttatttccttgtaactgctattcaaggagtgttccctagacaagcatcatcatatcacctgggagggtgctagacaggcagaatctcagtctcagatgtatgccaactgaaattaaggctgttggggcagagataatttgataaaggtttattgaaagccaaatttgactataaacccaggaagacacagcaacaaattcgggcatgttccgaagtctattacaagttggaatgtttttataggcaagtgtaggagagggaggggtactcctcacatcgcagttttttttttttttttttttttttttcattggaaggtacaaaacagtggttacaatcaatggtacaaatgaaaacatacaggctaaaatgtgttacctgcaagtcaatcagtaaaacttcatgattcagaaacaaattggtgtccattttaatgtcagtagattatgtattaatcagtatgtcaactattgagaaactcacgataagatttaagggacttacaataagattctttactcagaaacaagacataagccatgaatcataaggccttctccaggttgttgatttggaggcctgccaaatgtgacctgtaggttatcatttactaaatcagaatctgcattttaacatgcatgtttgaaaaatgtgtgtttatagcacatttatttttctgttcattttatttattgcttcttccaaagtttttccagtctgcttattttatgctatcaaatagacataagatatcactggagttaatggctaatccttttgcttcatgaaaatagatgatcatttaagtcccccaagtatgaagcttctaagttagaaattctccagttacttgtacagtctaagtttctttgaatatggaaatttgtttctaatcattaaaaaaccttttattacataatttccaaaaaatacctattgtttttatgtggcatatgtcttatggttgtgagtgttggattatgctttttattatatactgcatatatatatatac

SEQ ID NO: 23927 - DNA, 1032 bp, Homo sapiens
ctattttgtatgctgtctttttaacctgtttcccccaacatgtgtgcacacagacactacattataaactgctttcaggcagtcactcacagtgcttaatatggccttgcatgttatagttcttaaaaaatgatgtgttaaattaactctagaactgttctattatgattttcccaataaataggttgtatgagacaaaaaaattccatgctctatcctatatgtgacctgcgtgtaaggcactgtactttcagatttagataaattcttttgtatcttttggggagtttgaagggataaaagtatgtgtttattctcttttcaagtatatttttaaaatacaagaagctgtgtacttaatccatagattgtagaatttattgtgaagagtctactctgttaaagcatagtatggagaggggactaaaaaatggacattgtgttaagacaaatcagttttctctttctaataaaacagttcttctgagtagtatttaattgaagtagacctaatagcaagtataaacgtttgtggggaaaagcatggtgtttactataaaatggattgacttatgtatgtatgcatgtaacatgcataagaaatcaacttttcaaagaatgtaagcacaacgttaacagaaaataaattattgggatttcttttaatccaagtctgtgaaaggtttgattaagggttttgtacatagtcagaagcttttgttatggtttctgggcaggggtattttatgtttgaggtcgggaattttctatccacataattagtcatgaggtttaatgtacattttttttttgtatcaggcagacaatgtcttcaaagagacagcagtgctgcaaaggagcaagaaaagaaggccaaagttgacacacagagaggcaaaacagtgtaggaaaaatcaacacgttttgcaaaatcaatcattgaaaatgtgtcagcattcaggagactgtctttaatttgcaatccaagtgaaatagagtatttaaatatgagaggcagtattattgagccca

SEQ ID NO: 23928 - DNA, 1079 bp, Homo sapiens
aaaaccaccaaatatggctagtcctatatataatttattaatagtgtttgaaaaaagaaaaaaagtgtgtcattttatatttacccttttgtgccagagacttttatatactttatcttattttgtcctttgaatagcctgttaaaataggtgatattatttttattccatagatgagagaataagctcagatgtcagtactttgttgaaatggtctctaaatgctttaaatttaaaaaaatgagcaaacagtaatcttgaagtaaaggactgccactgggggactgaatggctgattgaatcatgatacatccatatcatgtcatatgtagcccattaaagaagtccattagagctatactagttgccttagaaggattttgatgagatactattgaaaaaagtaagatggagaaaatacttataatatgatcacatttttgtaaaacaaattcctaagtgtgtgtgtttgtgtatgcatgcatagatatagaataggggctgatgtggatatataaatgaagggaaggaaagaaggtatggaaggtgccaaacagaacagaaaaggaagaagtgcacttaaagacatgtttataaatgtatagagacggtatatatgatcttatcaagaaacaaacaaatataaaattcatgtggctgggcacggtggctcatgcctgtaatcccagcactttgagaggctaaggcaggcggatcatgaggtcaagaggtcgagaccatcctggccaacatggtgaaaccccgtctctactaaaaatacaaaaattagctgggtgtggtggtgcatgcctgcagtcccagctacttgggaggctgaggcaggagaatcgcttgaacctgggaggtggaggttgcagtgagctgagattgcaccactgcactccagcctggtgacagagcgggactctgtctcaaaaaaaaaatcaagtgtgtacaataatttgttcaaggccatatggcaagaaagtcatggagtcaaaatgaattgcattcagtactatctaatttagaaagattttttcattatgtaaaacagtgtgaatggttcagtacagcat

SEQ ID NO: 23929 - DNA, 1034 bp, Homo sapiens
gtaaaccagcagtgtaaacaagagcagggcatgtatgagtagttgagaatggtgaataggagtatgactagacaaaagatagtagggatgacaagtttttttggggcacagtctaagttggtctggtgtccaatgagactggggcctaataaaaaggagcgtctatacaggagcttaaatgggctgtaccttgtagcattctgaggacaggcctgaattctgagaagcgaaagtggtaaaagtattgtccagtcctttttaagttggtggctgagcttggtgaggtgtgtttttaaaagacctttagtccgttctacttttcttgaagacggaggaccataagggatataaaggtttcactgaatactgagagcctgaaaaactgcttggctgatttgactaataaaggctggtctgttatcagactgtatagaggtgggaaggctaaactgaggaattatgtctgacagaagggaagaaatgactgtggtggccttctcagaccctgtaggaaaggccattacttattcagtgaaagcgtctatttagactaagagctattttagtttcctgactcgggacatgttgagtaaagctaatttgcccgtcctgggtgggggcaaatcctggagcttgatgtgtagggaagggagggggcctgaataatccctgaggagtagtagaatagcagatggaacactgagaagttatttccttgaggatagatttccacgatggaaaggaaatgagaggttctgagaggcgggctagtggctcgtactatagcatagcctgcctttgctggtgtgtggcgattaggcctggtggaactgccatcaataaaccaagtgtgttcagggtgagggacaggaaagaaggaaatatggggaaatggggtgaatatcaggtggatcagagagatacagtcatgggggtcaggtgtggtatcaggaataatgtgggaggccagattgaagtccgggccagaaacaatggtagttgtgggacttaaagagtgagttcagctgaaggag

SEQ ID NO: 23930 - DNA, 1047 bp, Homo sapiens
cacaaatgagaaaaatgtttttaaggctagtaagggaaaacatcttatgtcttcatgacattttgccagggaaaaattgtatacattaaaatttcaaataactggcattcagttaattggcattcttgattaattttcattaaaagtaaaaataacacctgtatttatttttaaaatttaaattgtacagaagggacaaaaatgaaaagtaaaagtttctctccactcgccactggaaatcacttaggtcatttattttacctgccctctttctttcccttctgcgctcctgctatctctctctttttctgtctccctcccgttttgttctattcaattgtattgtgaggtggtaaaattatttattttctaacttatcaatcttaggctactcatatgatggcctactgtgaagggcacatccattttacaccatcaccaccttccatatcctccaacttttctgcattctgatttgtgttaagttttataacatatacattctactctgtagccatagtgaagccttcctctacttttaaaaaccacaggacaattctacacattttaacccagtaaaacagtattatgttgtgtaaatgttattcaatgaagagccaagcattttggttggactttggcaaagtaaagataatactatctcactaaacttccaactgctgcaaaaggaattccaaacttccaggttcagtggaaatatatatttaaaattcagaagtcttttttttttaatttccagaatgtgtgtctatttatttatttatttatttatttattttcaaaggcagcctattctttttaatggataccaaattctttcaaattctttctgaagatactagttataattttaaaagctttccttgctgaatgatatcttttcggcattaactcttctgttctatgaattcttctaggctcttttcttttgtgctcttggtgtctctcaaatatgatcttggagctgtgttttctgcgtagctgtgtaggtaagcagcagcgggtggagtgtttgccaggtttttc

SEQ ID NO: 23931 - DNA, 1043 bp, Homo sapiens
tttgtatttttagtagagatggggtttagtcatgttggacaggctggtcttgaactcctggcctcaagtgatctgcccctcctctgcctctcaaagtgatagaattataggcattagccattagccactacacctggcctgaaggttgataattatatttaacaatataagtatgccttgccatttggaaaaattagaacgtacagtcaagcaaaatgaaaaaataaaagtaatctgtaattcctgatatttttaggtatatttaaacttccggactcctctgtgtactgtaatgtatattttgtttgacactagtttctgtgttagcctgaaacaaaggcttgtagaagatggtttatctgggaagcaatcccagggatttcattaatattgctgttgtaaagtgcattgctttttttaaattgattatttttcaatgtttgctaagtatatgttagaattacaatcgatttttaaaattgtatctgaaaatcttgttaaacttagtagcttttttgtagaatctttagaattttctatgtatacaattaagttttctgaataaagattattttactcattcctttctaattttagcctttttatttccttttcttgtcttattgcactatagaagacctccagtaaaatgaaatggtgagagtagaaacttctgtcttatttccaatttcggagtatgtatttccaatacatactattaaatatgatgttagttgtggttttttttgttgatacccttcatcagattgagatagttctctctctagttttctaagagttttttttaattattatcatgaatggatgttacattttgtcattttatcattttatccactgcatatgatatggggcagaggaaccccaaaattgaggcttagcctgagaagggttcatggtttcacccaggaaggaattcaggggtgagccggaggtgttagatggcaactttgtattttgttttgttttgtttggagatggagtctggctctgtcatccatgctggagtgcagtgacacaat

SEQ ID NO: 23932 - DNA, 1037 bp, Homo sapiens
gtgtggtggcacgtgcctgtaatcccagctactcgggaagctgaggcaggagaatcacttgaacccaggaggcagaggttgtggtgagctgagatggcaccactgcactccagcctgggcgacagagcaagactccgtctcaaaaaaaaattttttttttctgtcagcaataaagcagttttactttttttgtcattcctatattcactggagagtagcacttgtaatttctgtcaataacttttccttggcattcacagcttggttaactgattggcacaaggggcatagctttcggactatcataactttcaacatgcctttttcactgagcttaatcttttctagtttttgatttaaagtgagagacatacgactctttcttttacttgaacacttagaggccattaagggttcttaactggcctaatttaagtattgttgtgtctccaggagtagggagacctgaggagagggagagagatgggtaatgaccagttggtggagcattcagaacatatacatttaccaagttcaccgtcttatatgggctcagtttgtggtgccccaaaacaattacaatagtaacatcaaagatcactaatcacaaatcaccataacagatataataataatgaaaaagtttgaaatattgtgagaattactaaaatgtgacacagagacatgaagtgagagcttatgctcttggaaaaatggtgctgaaagattttctcaactcaaggttgccgcaaaccttcagtttgtaaaaaactcagtatctgtgaagtgtaataaagcaaaacacaacaaaacgaggtatgcctttatattttatttcattttatttttttagacaggggcttgctgtatctcccagaccggaatgcagtggtgcaattatagctcactgcagcctcaaccttctgggcccaagcgatccttccactctagcctcccgagtagctagaactacaggcatatgccactacacccggctaattttattttattttattttattttattttatttattta

SEQ ID NO: 23933 - DNA, 1029 bp, Homo sapiens
cccaggatggtctcgaactcctgagctcaggtgatctgcctgcctcagcttcccagagtactgggattacaggcatgagccaccatgctcggcctttttttcctttaataccaaatacccagaacattcactctgtagaaggttagaacaatctaataattataaagtttcatgtagtacctgaagtgagatcatgtgtaagttaatttgccttattcatgtcagggaatggccaaatcctgtgctgctgaagcaaccagaagaaagcaatttgaatttgcctgtctgggatcctcgggtatgtgatttattatggagtttctttaaagcttttaaggaagaggacatttcactaaattacagtctagttaaagatagttcctcttgtctctgttcttccttctatataactatagtccccttcctccttctgctgtggtttttgttttgttttttgtgcagatgattaggatcactaatgctgatccaaatgttatgtcattaaaaatcgcccatgtaagatgagtgggtgtcttatggacagtgtcataatccagtgtggaaaaaatgtctcaaaagtaattggatacttggctgggcatgatggttcacgcctgtaatcccagctctttgggaggccgaggcgggtggatcacctgcggtcaggagttcaagaccagcctggccaacgtggtgaaaccccctctctactgaaaatataaaaaattagccgggcgtggtggtgcacacctgtagttccagctactctggaggctgaggcacgagaatcacctgaaccccagaggcacaggttgcagtgagccgagactgtgccactgcactccagcctgggtgacgagttgagacttcgtctcaaaaaaaaaaagtaattggttactaataataaagtactaaagtataataaaagatttactttgcaatacaatttaaagcaaattcattgttccagggtagcataattctcccatatcttgcattttaatttgcttttagagtgagtgctcattc

SEQ ID NO: 23934 - DNA, 1025 bp, Homo sapiens
ccttcagtatggttttactcagacaaatgatctgggaccaaatttgcattctacagctcccaaacctattgagaaaaataaggaagatataggcagttcaatctaggactaaaatctcattttcattaatcacaagagataatttgcttaagtgaccttcagaattgaaaccagtctttatattgtcatttgcattttgaaatcctaaaatcgttcccttctttcagcaaagtctctctgatgtcaatcgaagctcgggcggacttcaatccaaaagattgtctctggatagcagttgtctggatagctccagagacactgataatggaacaccttttaattctccagcgtccaagtctgatagcccttctgtaggagaaacagaaaggtctgtctttatttcaaatgtgtccttttggttttctgttcagtttatttgaggataatgtgaacttttctatacctctgctactgccttttaaaattgttaaaagatttcattttactggctgctggtcaatttcttgcttagaaataactcgtggtaatcctgtgggaaacggtataggcttatgagcatatgggactagataggtacacagaaatgtacacatttgttgcttaaatttttctcttcttactgggtcctctgcatttttcccccttttagttcaatgaaatgttaaagtacaggcctgagccaacagttgtggccaggcacggtggctcaggcctgtaatcctagcactttgagaggtcacggcaggcgaactgctggagcccaggagttccaagaccagcctgggtaacatggcaaaaccctgtctatacaaaaaaatacaaaaattaattggccgggcacagttgctcacgcctgtaatcccaacactttgggaggccaaggcgggcagatcacctgaggtcaggagttcgagaccagcctggccaacatggcaaaaccacatctctactaaaaatgcaaaaattaacagggtgtggtggcatgtgcctgtattcccagctac

SEQ ID NO: 23935 - DNA, 1063 bp, Homo sapiens
acactcctgccacttctaccctttctcttatccctctgcttttcacctctgactgtaaaaagaagtagcagttccgaaagcaagagttccctatgaacacggaaggaaatattcattgcatacttgagtgtttaggagctagagggtttgggagaaaaactccccaagttttgtgactgactttctagctgggcctttataatatatatgatgtgcttttccttttttgtttcctctttctttctaatagagactacccagtaaagaactaccagattcatcatctccagttccagcaaacaacatccgtgtcatcaaaaattccattcgactgacccttaatcggtaaaagcagtgcctcctcacttaagtgaacaagcaatcatttagtggcatagatgcagccacttgttttttaaatagaagtggctgtcatacgtgaaataaggtgaaagtgacagccttcagtctaataaccttgaagtggtttttgaactgtcaaactttgacctgtagatgctgtagcattctctcactgattgctacatacacttctctgaggatcacctgctgtcaaattgccatctacagtattacagctttgcatttgggggttttactgccttaactttcaatgcttgttatgggaaccagttcttagccacttggacactgataacaagtcctgaactccttttttgttttgttttttgtgtttttctttttttgtcttatgttgtaatcattgtatagagctaaaaaaattgaaaacaaacaaaaaaattgtcttgtattttccaaatgttaatacatttactttagcattgaagccactttgaaacctgagataaatgaatgtgaggtatcttttctgctttcctcatttgtgtagatgtactgtctgttctgttgatttaaattatttttttccagattggcacatgaaatatttaaacttttttgtgtgcctttctgtccaaatgttgcatagttaccagggaagattagtccagtgattacataagagttgggcaccataaattctctatattttgcctcccat

SEQ ID NO: 23936 - DNA, 1034 bp, Homo sapiens
tggcgcaatcttggctcattgcaacctccacctcccaggtgcaagcgattctcctacctcagcctcccaagtagctgggactacaggcgcccgccaccatgtgggcctggctaatttttgtagagatggggtttcaacatgttggccaggctggtctcaaactcctgacctccagtgatgcacccgcctcggcctcccaaagttctgggattacaggcgtgagccaccgtgcccagcccctattttttctgaaataatttttcggatatacttttatatttgaaattagttgaacataagatgatcatcaagcttgctataagttttaagctattgctacatttgaacaaagacccacgtacttatcttagaaagtacttaggatatctttgagattaatggtgctacatcactctacagtactatgtaaaatgaatggagctgctgttcctttctagctagctgtttgtgtagttcatattaatttaccctgccttttatttggattgtctgatttcttagttgtacacatgaacctcattatttgcctggaataagtaatcaaataaaattgctttgataaataggtgatgattgagtgatgttatttgggactaactcaaaagtaccagaagtcttaacttttcagtgacaaccaattttgtcatttaccactcagactctttttggtagataatggtatctactacccacttagtatgaatgcaaagctcagacctaatgtgcatcacacagaatcatttattaaacgtttatcagcaagcggtggcacaacagtttatacagtctgctctataaccttaatggagtgtcccagctttctgtcccttttggtggtctgaccaccctttcatgaaaaggccacttgaggtgtctatgtcaagcactaggggcaaaattctgtcacccttctgatcaggatcaggcaatcagtcctccgtactaataatggctggacacaggatcaagctgtgggtactatgcatacaagtacaggttacagggctcgttac

SEQ ID NO: 23937 - DNA, 1058 bp, Homo sapiens
tttttttttttttttttgagactgagtctcgctctctcaccaggctggagtgcagtggcgcgatctctgctcactgcaacctctgtcttctgggttcaagtgattctcttgcctcagcctcccaagtagctgggactacaggcacgtgccacaatgcccagctaatttttgtatttttagtagagacggggtttcaacatgttggacaggatggttttgatctcttgacctcgtgatctgcctgcctcggcctcccaatgtgctgggattactgatgtgatctcctttttttttcaaggcttaacatgtaatttaacaagttgatgctgcattgctgctccatttctcagaaaaacttcaaatttaaagtatcagcaacaaatcaaacatagtacatcaattaaatatgcacagcataactactatctaagataggcaaggctaagagctactctcagaccttcagcatacagcaactctgtttccaagattgtactaggcctatcaagaaaagttgtgaacagcaacatcatagacacaaaacggccattcctggttgtccttatccaagaaaaagattgaggcaagttaacacaagatttttaaaaaagatacactgaaatgaaagtctctaagagaaaatgtcttccttaggacaagaagggataatatatcggatataaaagaactatacgtacattgtttgtgacctctgtggacatttgcctgaattctcacctgggagtgaatggagcagtggggcgaaggtcattggaggaggttgtgttttgtggtgtatgtggcagtgtctctggggttggggagtgtatggataagaaagcaaatgaaacaggatggagaaaaaaagaacgatcaagattaatgggtctctaactggattcatttcactgtagttcccccaggtcttcaacagtcacatttgagacctcagtaatgcaccacagagaactcatcagttaaacaatataccacacagaactggtttgttaaataccactcctcccttgccctcttcctccaaaatactccctacagta

SEQ ID NO: 23938 - DNA, 1034 bp, Homo sapiens
ttattaaactaattcttggaaatttttgtgccaataatggccaaagtggagaggagaaaaataatagtaataatttatttattttatgagcaccttttgtatgccagacagtgtgcgggtgctttatacatagtattatttaatcctcaccgtaactccaaaggttaggtattgttttccttacagtatagctgagaccattggagccataggttgcacactgctagaagtggtaaagctgggtaagaatctgtagctgactctttctagtcattttgttggtggcatacttcattggaatgttactgtctctccttttatctgtcacattaatctttttgaatctgtttaatctgaggatctctggagtggtagtgctgctacacacattatgtagtcctcactctttgccaggtagcactttccatatatcctcagaagtatgtaagctagctactattattatctttgttttacagatgaggaaattgaggcacagagattaactaatctgaaccagataatgccataagtagtagaactgcgatgcaaacttggacagtctgactccagagtctgcacacttaaccactccactattctggccttctacaaggtacatctttggttggtaggaagctgtgattttagtgtgctaaatgtttttctgtttttgtttccttttaatgttcattcaaatacatgtaggataactttatgttgtctaccagctgatgtcctctaccagtgtcttatgtaaacaatgacatagtactaattataattaacatttattgagagcgtaccacattcacgacccctgtgctgtgttttaaatattccacataaccctcagcacaatctaaatactattatttatgcagcatctcatttgtgagatacttatatcatcttcaaagtgctttcacaaaataatccctttatttctttccacgctgtcagtcagaggtatgaccatcacctacttgtgttgctgcatttcagcaaggttcgatgacttgccttggctagca

SEQ ID NO: 23939 - DNA, 1111 bp, Homo sapiens
gtctcaaaaaaaagaaaagaaaaaacatgctgccttccctttatcttctctccaagttttacgtaatttttcttaacatctcgaatcctccaatgaaaaagctggttctttagcaattttgtgtccattttaattagtaaaggagaaaattctacaatgtttcttttcaacagtttgattgaggtataagttatatgttacaaaattcacccattttaagtgtacatgtagatgagttttggcacacagatgtgtaaccaccaccaaaataaaaatctagaacatcatttcaaaaagttccttcgtccccctttgtactcagttccctttctccagttctgctctcaggcaaccatgaatctgttttgtcaaaacaatttacctttcttagggtttcatatgaatggaatcatgagtagttttttgttcctggcttctttcacttagtatgaggtttttgagattcatccatattattgcatgtgtcagtagtttattcctttttattgcagagtagtattccattgtatggctataccatactttgtttatccattcccaatttcatgggcatatgggtgctttcctcttgttggctgttgtgaataatgctgctgtgaacatttgcatacaagtctgtgtggacatgtgttttcatttttcttgagtagatacttaggagtgaaattactagatcatatggtaagtgtatgtttcactttataagaaactgccaaattgttttgcaaagtggccgttttgcatctctacaagcagtggagcagtcccaccactgtgcattcccaccagtagtgtatgagagttccagttgctgcacattcacatcaatacttggtattattggtctttttaattttagccattctagtgggtagatagtgttaagcaacttttcatgtttttactgaccatttatatatcttttttatgaagtgtttgtttaaatctttggcccatttttattggatcatttgccttattattgaattgtaagatttctttgtatatactttagatctaagtcttttttgtcagccatatgtttctcaatatttcccctagtctatgccttgccttttaattttctttt

SEQ ID NO: 23940 - DNA, 1057 bp, Homo sapiens
gcctgccgaggccacctgacggcggtgtcgcgtctacactgccggttggactctcaggcacccgctactcagcgccctgcttcccggcgccgggaatcacgagcccgccagcaccgcgggacttgcagcgccctccgcccttcgcaggcggcccagacagccccgtcccgccctagcgttaggagacgcgcagcggaaccccggcggccccagcccctccccgcccgcgcgtccccgcgtccccgcgtccccgcgcgacccgcctcccagatcccggctggggctcccgggcgcgccgcggcagggcggggcggggccgggggcggggccttctggcagtttctgggagctgcgaacgcgccgccccggggctcggcggccggaaacgctggcttcggagccttaggcgccgcggcctttccttgttttccgcccagtccacgccgccatggccaagtggggccaggggaacccccactggatcgtggaggagcgggaggacgggaccaacgtgaacaactggcgctggcgcggctggcggcggcctccttccgggatctggggagggccgggccgcgggagccggggctgccctggggtctgtgcggggccgcggggccagggggtcagggggccgccccccctcagctgctggacgcagggctcggccttcgcctctcggctcgggagagtccttgagtacggagaccggctaggagggttgcagctgcctctttttgaaagttgggttgggccccaagagtgacttccgacagacctttccactcccaccgtctgtggcctgagggccttcccttctcctcccgcccacccctctggatgtttcggggagttagaagggagctggattgagagactgtgttaggggcgggggtatggaacgtagtggaaagggcagaaatttggatctcagttcgcgcccaccccgcaggcgcctcccgcgagccgggccctctgtgagtgagacaagctccccttcctttacgcgcctcacctggcgcgtggggagaggtcggcagccctccgccgcagaacc

SEQ ID NO: 23941 - DNA, 1032 bp, Homo sapiens
caggcaaagagtaccctgggacaagaagaggaatatgggtgcacttgccccacactcctctcaggacggcggactgctgactcctcatgccctctccttggccatggcctgcctgacctttcttccgtggctgctcagggggccctggagtggtggaaccctgtgagggcagctgagctattcagtgaggtagggcagtttttcataaaatcaatttttttttcttttttgagacaaggctcactgcagccttgacctcccagcaatcctcccacctcagccttccaagtaactgggaccacaggtgtgcgccaccatgcccagataattttattttgtagagacagtgtctccctgttgcccaggatggtctttaaactcctgggctcaatccatcctcaccacagcctttcaaagtgctgagattataggcatgtgccacagtgcctggcccagttgttactttgtattataattgaagaacccattttgctcattttaggcatcgttaaagaatctggagtgaagcacaagggattgattgaaatacccaatctttctgaggaaaatgaagtagatgacactgaggtatgtgatcaagtttctatttcttttgttcttttttcagtcaagcttctgctacagacattgggcatttcaaatagtgttgatcagactgtgtggttcctgtgtggtagttcgggtgccttgtggagggcctgtttgccgagaaggattgccgtactgtgggggcagcgtgttgtgtggagctggagtggtacaggaaagagagtaagccccaggaagccctgagctcccccgaggaccaggcaaggggcctgggcagctggctgcaccctccttagcctcctcatctgtgaaaaggggttaatttctcttccaggggtgttgtcacgttagatgtgacagtgtgtgcactgtaaactgctcaggcagcttgcatggcttgatgaatgtgactctccctcttctcctgcacctttgccgtttccctttaatggtgaaaagtct

SEQ ID NO: 23942 - DNA, 1039 bp, Homo sapiens
ccctgctaattttttttttttttttgagacgagatttcactacattccccagtgtggtcttgaactcctgggctccagtgatccttttgcctcagcctccccagcatctgggattacatgtgcaagccactgtgcccagcatgtatggaccttatttggatgcctggatttttgaagacactaaggagttattggatttttaatttgttattatggtattatgcttaacattattttaaaagagcatccctatcttttagagatacatagggaaatatttacaaatgaaattatgtgatatctggaatttgagtctagttaatcctgggtggagaatgtgggtaggggagacaaagacaccaagatagcctatgaattgaaaattgttaaggctgcttgatgagttcttggagattgaccctatcaatctgcttcttttacataagtacaacaagtcaaaatttaaaaaattaatagaagcaggacggtggccacggacatcagaatccactaaggactgtgtaacaactcacctgctgacaaaattaatagaaaagagaaagacagcattgctcctggccttcaatatatcagactcagagctaatgccaaaattccaagaagcatttttaaaagcaacacaaatctggtgttgaatgtctacatcttgacagtttgaggcttgaaggagcagttgttcctcatggacggtggggagccacaggcagagctgactttagaagctcagggcgttttgtcctggttgcatccagacgatccagacagcagggacaggaagtaatgacaacaaagacttattccatttgagtattgtcctgtagtacttggatttccaagaagaaacttggattcagggcaatcctttttgcccaagcctttttaatttttggctctcgttccagcgctctcacaataatgagcagcacaattcatgagagtaaactggatttttattgaatgaaagtaaagaacacaactattcaatgtagaccagagctctccagtagaactttcaatg

SEQ ID NO: 23943 - DNA, 1014 bp, Homo sapiens
ttatcagttcattggtggagatgcccttactgggcaagtgttcttctgaaaacattttatctgaattacatgtccgagataactgtttccagttcaataattatttgaattactgcagtcctaaagaatgtctagtgataaaccttatcaaagcaggagatgtgtgaaggacacagaatgactttcagaaagtccttggaaactgttcttatctcacaagcatgggcctcctcttctttgggcgttcccggctctattttgtcggggtctagcaaaagttaatttcatcttgctatctgcaactttcacagagaggtgcccttcttatacctagaagaaaggaacatctctcactctgaagacacatagacaccaagaagagtctcagcaaatgggccttaatacatttcccctagtttattaccattatatcatactcttttgccctatcatatttctccacgactctcctctctccatcaaacctagcataacaatattcaggttcaactgtttcttcaggtctacacttccttatgaaagctcttgtgtcatatacaacttaaatttgtaaggccaggtgcactggctcacacctgtaatcccagcactttgggagcccaaggcaggaggatcacttgagcccaggagttcaagaccagcctaaacaacataatgagacctggtctttacaaaaaattagttgggtatggtggtgcatgtctgtagtcccagcttttctggaggctaaggtgggaggatcacctgagcctgggaggacaaggctgtagtgagctagtgagctgtgattgtaccactggactccagcctgggtgacagagccagaccctgtctcaaaaaaaaaaaaagtatgcttttcttttgttcacctgttttttatcataagggactcagccataaacctaagatggggggagggaaagatatttttcctcccctacaaccttttctgtgtaattatgcccagatttatgaaaagtccaggtgactgct

SEQ ID NO: 23944 - DNA, 1130 bp, Homo sapiens
agtggtgcaatcaccgcttactgcagccttgacctcctgggctcaagcaaccctcccacctttgcctcccaagtagctgggactacaagtgtgcaccataacctagctaataaatcaacaatattaaactatttttttcttttttctatgtcctgcaggcattaactccaaaaacacatacatttaaaaaatatttaagttagttttctatatttttgagagtttcgggactacttaatttatgtaagtgcttattttctctaagcccattatttagaatggagctcttttattaattgggtaataccatctggaggtaggaaaatatcacatgtgcataatatatatacacatatacagacaaaagcagagaatattatgactttcactctaaaaatttagtctttagtcaggcataaatacagtgatacagaattcactagtttaaatataagagtctgttcttgtctttgcctcactttatttttttatctgaaatatttttctagtggatagaacaaattgctcaatatgagggctaaaactttttaccaatatttgcagaggagacttttaagactttgttttgtcttgttgtatttatggaggatgtagactaaattctgttcccatttatcatttttagccccaggtggttgctttcaaggtccctgagtccccttcaagatctccctagggaaggagcagaatgcctaaaattccagtgactacagggacttgaggaggtggagtctgaagggatgggtctcagaggagccagcttgggagatatttaggttttctcacagaagccattgaagtgctgggcacggtgtctttgcacctataattccagttactcaggaggtggaggcaggaggatcacttgagtccaaacccagaagttcgagaccagcctgggcagcatagcaagaccctgtctcttaaagcaaaaatttaaaaatgaagccattgaagttctaaattatgcttagtaaagttatgccaataagaaaggaagggaaagagctagtgctgccgtggcagagcatatagtcagcagggttttgacaaggaagggtttcagttgactgagaaattcccatgagaagagcagggtgaagtgtaga

SEQ ID NO: 23945 - DNA, 1043 bp, Homo sapiens
gatactggcctccgtccacacacacacttcttagtctaaagaaaacagcctagtcttcttagaatatcatttaaaggctgggtgcaatggctcatgcctcttatgctaacactttgagaggccaaggcaggcagatcacttgagcccaggagttcaagaccagcctgggcaacatggtgaaaccctatctctacaaaaaattaaaaaaaattagcagggcatggtggtgcacacctgtagtcccagctgcttggtagactgaagtgggaggattgcctgggcccaggagtttgaggctgcagtgagctgtgatcatgccactgcactccagcctgggtgacaagagtgagaccctgtctccaaaaaaagaaaaaaaaaagaaaaatgaaggtatcttttggctgtgtggctctgttcatgtaattctttaaaaacgctgacttcaggctgggcatggtggctcacgcctataataccagcactttgggaggccaaggcagaacgattgtttgagttgagaacaggaggtcaagatcagcctgggcaacacaggaagaccccatctctacaaaaaatttttaaaattacctgagcatggtggcatgcacctgtagtctcagctacttgggaggctgagataggaggatcactggagcctgggaggggagattgaggctgcagtgagccatgattgtacctctgcactccagcctgggcgtcagagcatgacctatctcaaaaaaaaaaaaaagtctgactttatgtggaggtaagatcatgggtagcaggcccatacgcatcttttcaggtacttccgtcttcccaacacatgtatattgatgaaaggtggattcttattttccctgcttaggtcacatggcacatggctacccagggggaagtcactgttcattggaattagggtaatttagggaaggtataaattgacagctgataccacagggaataagtgaggagcagttcaccaaaggaattaggcatgctggacaaacaaaaccaatatgatacaaaggtacttttgt

SEQ ID NO: 23946 - DNA, 1065 bp, Homo sapiens
ccctgggctcaaccaattggcctaacatatattgggcagttgcattacctgtctccctccttattactgcagtaatcagctatgcacacttatttgaaattagcatgattaatagccctccacttgactccattcatacaatcacagatagctgtggtaaaaatcagcagcagaaaaataccaaggagaggctctctcaacattaagagatattcctattagtgaagtaaactaaatatatttttcttgtagccaaagtacgttataccaaaaactgaatttgatgtagacttttcttttttttgagacagagtctcactcttctgcccaggctggagtgcagtggcatgatctcggctcactgcaacctctgcctcccaggttcaagtgattcttgtgcctcatcctccctagtagctgggattacaggcatgtttcaccacccctggctaatttgtttatttttagtagagatggggtctcgctttgtcgcccagactggtctcaaattcctgagctctaacgatccacccgcctcagcctcacaaagtgctgggattacaggcgtgcatcaccacacccagccaagacataacaatttatattaaaattttgaaataacaaaattacagagatggagaacagattcatggttgccagggattagggatgtagaacaggaagggtgtgagtacaaacaggtaccataaaggatcctttgataatgggactgttatgtatcttgactgtcgttgttacagtcatctacacgtgataaaactgtatagagctacatacacacataagcagatacaaatggcaaaatctgaataagctttgtggactgtaccaatgtcattcattttcctagttgtgatatggtaccacagttatgcaaaatgttaccactgggatagtctaaatacaaggtaagtggaatctttcatatatttttaaaggcattagttgttatttttattcattcttttaaaattgacatataattcaaataccataatattcgcccttttaagtgtacaattcggtggggtttttttttttagc

SEQ ID NO: 23947 - DNA, 1049 bp, Homo sapiens
atgcctataatcccagcactttgggaggctgaggtgggaggatcaccttaggttgggagtttgagcccagcctgagcaacgtaaccagtccctgtttctacattttaaaatctcaaagtttttcaaatgaaatagaagagaacttgagagtgaatgacatggaactgcacacaatgcgtcacacatgtaaatagagttttgtgtatgtatgtgtatactaaacacagtataaaaatgtatttgttataatttaggcaaatcggtttgccaagcactgtatgtgccattgtaagcaaggaagttgaactctcctgaggttatttagtaataggtatttctagcttcagcatgtctcaaacagtcacttacatagtgcttgctgtgagccacgcgctattttaaaagctttccatataacatcatatactcacaaccatcctttgaagtgggcttgattcccattttatatatggagaagttgagacagggactatcccacttgcccatgatcacaaagctagaaaggaagggccaagatttgaacctaggcagtgcaagtgtagagtctttgctgtaaaccactattcctggggagacaggtaaaataaattgtatgtgcaaatgcaaattgataagtaattgatacaatactccacccctttattccagatatgagaaatgagtgttggacgtcgaagaataaagttgttgggtatcctgatgatggcaaatgtcttcatttattttattatggaagtctccaaaagcagtagccaagaaaaaaatggaaaaggggaagtaataatacccaaagagaagttctggaagatatctacccctcccgaggcatactggaaccgagagcaagagaagctgaaccggcagtacaaccccatcctgagcatgctgaccaaccagacgggggaggcgggcaggctctccaatataagccatctgaactactgcgaacctgacctgagggtcacgtcggtggttacgggttttaacaacttgccggacagatttaaagactttctgctgtatttgag

SEQ ID NO: 23948 - DNA, 1079 bp, Homo sapiens
caattaataagcttgatttaacatattatatattataattatacacaattataatatgctgttattattatatattttgtaacaaatagagaatactttttattttcaaacattcaaggaacattcctgataattgaccatgtatcatcaagaaatgtgaattgcttgattgtatcatcaagcaatcaaaaaaattgaaacaaattacaaaaacaaattacagggactccattacaccatgatacaataaagctaaaagagaacaatcagtagaatagccaaaaaacaaacaaacaacaagcaaacaaaaaaacccacgcctactctcttagaaaactaaaaacaccctttaaataactcttgggttaaatagataatcaaaactaaagttacaaattacttagaaaattaatgacaatgagaacactttatatcagaattggtgggaggcaattaaagaccaattgaaagacaattagtcgtttcaaaagcttttcacaaaagggcaagaattggaaacaactgtacaaaataactgcacaaaacaactgaagatggagaaaaagacgactcttagagatgtcagaaaaagtcgtctctaaaaagttattttgatctcactctctccaaaatcaaacaaaaaaatgttaaggaaaatatgtagaaaacccagtcttctacaaaactagaaaatgtgcacaacctcaaacctcaatcatgaagaatgcttggcatctacgatgaaatcaggatcaatctgaaggctcagcactcagtgattatttggctatttggagaagtaaacatttgtgggtggagttaatggggaggaggtggggcttaagattttgaggtcttaggccctgtgcattttattcccccctgagacagggactcactctgtcacccaggctggagtccagtggcaaaattatggctcactgctgcctcaaattcctggactcaagctaacctcccacctcagcctcctgagtagctgggactataggcatgtgacaacatgccttgctaattttcttatttttgtaacgatgggatgctcctatgttgtctaggct

SEQ ID NO: 23949 - DNA, 1049 bp, Homo sapiens
gggctgctgcttcgccgtcccagccccgcagccttttgtgtctttccacttctcccctggcccgctgcgctctcgctctagagaaggcagagactgccttgggtgtggcagccaggagtggacggttgcgggctgggaggctggccgggtttcctccccgtcgcggacctggaggaagggctgggtgcggcgggaaggccccggagggagagctgagcctgggttggtagcatggtgaggaatagcggcctcaggggcagagatgtccgtttctttgtgcaccgaaagctctgagaaggacatcccgataccagtgaacttctagatttggaatgagcttcttaccgagcatctcacattccaaagtgcatctgattcggaagtcctcgtggttctaccttcggaaggtgggggtggggtgggctgcctgggtgcagagggctgagccaggctggtgggaactcctcagcgtccagcacctgtggggctgcagcaagcttttgctgctaggctctaaacgaagcctgtaattaaggccttagtttaactgggtgcgctctcacttttatctgtggcctggcctgagcggttgcctccagcagcctcagctaccctcactgctttgccgctgaacccaggaacggctattccactgcaagggagctaagaccttcatttgttgcaccaacgttttcctcatggcttatgtctctagcctcagagaaatcagagattagagcccagatctggggtcagaaaaagacccgggtgttagatctgactttgctactagctgggtggcagaagatgggggaacacttcgctcctttctacctgtttcctccccttgttaaatgcggaggctaatgacacttactgcagatggggaagctaacagcacttactgcagagggtgttgtgaggaatcactcagcaaattcttgtaaagggccaaggttagaactcaagccttttaaaatcccatctcttagtctgggcggatcccaggaaggtgtcaagtccagctgatgggcataggtgtgtccgtg

SEQ ID NO: 23950 - DNA, 1026 bp, Homo sapiens
ttaaatgagttaatacatttaaaatgcttggaacagtgtcagggacatagtgcctaatagatgccattattatgtacagaggtcgcagagggaaaaacaattctttaagggtagaggatgagttgttgggatggcttcctgggatctgagctgggttttgaaagattcatagttgttgtccaggaagccaagggagaagacgtaaaagacattctagactgaagcaacaacctatgcagaaacatgggaggcttacctagcatgggatgtgctggaaattcaagtagtatagtttgatattaatggggtttaaagtgtaggattggggggcatgcagtgagatatgaggtttgagagtcaggcaggactgaaagcatgttaagttatgtgctgttaataaatgatttggggattattctgtaggtgataggaacatagtaaaagattatgagcagaagagacattaggtttgctattggaaaatcaccaggacaacagtgtagactgaggatcatagtaaaaaggtgactggaagcagcaatattagggtagctgttttaataaataaggggagacaaaaggttaggactaggcagtggcaaagggaatggagagaattaactggaggaacactcagaacacaaaatgggtaggatttggtggtcatttcagttggggatctgagcaagatggggatgagggagaagaaaagggctagattgacatccaagcttttgtgttggaaatttggatgtatttgaccaagctggagaaggtcgtgattataggtgtttcttaacttggcagtatactgggagcatcaacgttaagatggttaaattttaatctttttcttaagggaaatagaacattatcaggtgattcctcagttagaaaatcagtttcttcctcacagtttgcagccttcctggaattttatttccctagagcttttaagttattaatttttaaataacaatttaagttattgctaatgtgtctaaaggtaaaagctacagcgaaaat

SEQ ID NO: 23951 - DNA, 1027 bp, Homo sapiens
tatagtcaattcaacagatgcagaaaggaacatttgacaaaattcaatgccaagtttcttagcaaagtttcaatagaagagaatttatttattttgataaaggacattcatgaacagctacagctaacatcatatttaatggtgaaacattgaatacttttcccctaagattgggaacaaggcaaggatgtttgctcttaccattcaacattatatttgaagttctaccaaactcacaggatataagatcaatatagaaaaatctactgtatttttatatatgaacaacaaacatttggaaaatgaaatttaaaaaatttcatttacagtagaggtaaataaaaaacagactaagaaataaatttgacataagatgtgaaaaacctctgactaaaaagtataatacattactgaaagtaattaaagaagaccttaataaatggagagataacctgtgttcatagattagaagatacagtattgttaagatatcatttttcctcaaatcaatctgtaaatccaactcaatgccagtcataatcctagcaggtgttttttaaaaataaagaaattcaaaagtgattctaaagtatatttggggatgcaaagtaaccaaaagaatattgagaaagaactgaattataatagtaatgctacctgacatgaaaatttactataaagctgtagtaatcaagatagtgtcaaattggcataggataaatagatcaacagaacaaaacaaagtcctgaaatatacccaagcttggccaattaatttcaacaaagttgtcagcataatccagtgggggaaaaggtcttttcaataaatgatgctgaacaactggatgtttgtatggaaaaaatgaacctcaacccccacctctccacatacattaattcagtgtgttcattataattaatagcaaacattaattcaagatagatcatagacctaaatacaaaactgtaaaatgatgaagcttctgaaaaaaagcaaaacaaaaacctagaaacctgtgtttctgac

SEQ ID NO: 23952 - DNA, 1147 bp, Homo sapiens
aataacaaaggatcagtgaactgtggaacaacttcagtggcctaacgtgtgtaaagaagtgaagagaaggtaagaggacagaaaaagtatttgaagaagtaaacaccaaaagttttagaaataaaaaaatttaaaaatataaacaaacctacaggtcaaagaagccaaatgaaactcaagcacaagaaaaatgaagaaagtcatagcaaagcttgttaacaaaaacaactcaagccagaagacaatgaggtgatattcttaaaggactgaaggaaaagtataacaacaaaaacctgtcaacataattttctattcccagcactccaaaaaagcaaaatgatactacttgaaaatttggatttacacgaaggaaaaaagcacatgaaatgacaaatatattagtatatataaaatacttgtcttatttttaaaaatctctctggtagataattgtttaaggcttcaataatgtattctgggttttataacatatagaagtaaaacgttatgatggttgtgtaaaggctgagtagcagaatgaaaggatactgttttaagcttcttatacataatgttacttgaagacacttttttcagagttgacaattgtttatatagaaaagcataaggaatctttaaaatgggtactaaaactaaaaagtaaatttagcaaggttacaggctacaatattaatatataaattcaattgtgtttctctgtagtcacaatgaacaatcagaaatcaatattgaaaaaaataccatttatagaagcatccaaaacaaaaaactcagggataaatttgaacaaagatgtgcaatatgtatataccgaaaacaacagaacgttgctgagagaaattaaagagtgaaatcaatgggaaaaaatacaatggccatggattcaaagatataagttattttcagtcaatttataaattcagtgccatcccaatcaaaattttagcatgctttttaaaaaaataatttgtcagctgtttataaaatgtatgtggaaatgaaagggacttagaataatcaaaacaactttgaaaaagagcaaaatttgaggatttatactatctgattttaaaactcattaaccaagacagtgtggtattagtttactaatagactgtaggtgact

SEQ ID NO: 23953 - DNA, 1032 bp, Homo sapiens
cataatggtaaggggttcaattcaataagaaggcttagctatcctaaataatatgcacccaacactggagcacccagattcataaaacaagttcttagggacctacaaagagataactatgcaataataattggagccttcaacaccccactgacaatattagacagatcatccaggcagaaaactaataaagatattcagaacctaaacttgtcacttgactaaatggacctaacagacatctacagaacactgtgaccaacaacagaatgtacattattttcatctgcacatggtacatactccaaaatcaaccacatgctcagtcataacacaattctcaaaaaattcaatataactgaaatcatactaactataccttcagaccacagcacaataaaaacagaaatcaatactaagaccatctctcaaaaccatgttggaaattaacctgctcctgaatgacttttgggtaaacaaataaggcagaaatcaagaaattctttgaaacaaatgaaaacaaaaatacaacataccagaatctctgggacacagctaaagcagtattaagaggacagcttgtaacaccaagtgcccacattaaaaagttagaaaggtctcaaattaacaacgttataccacacctagaggaactagggaatcaagaacaaaccaaccgaaagctagcagaagatgacaaatcttcagccaaaatcagagctgaagtctatgaaatcgaggcttgaaaaacagtacaaaaaaattaatgaacccaaaagttggttttttgaaagaataaataagattgacagactgctcgttaggctagtaaaagagaagattcaaataaataccagaaatgacaaaggagacattaccaccaaccccatagaaataggaaaaacattcagagactattacaaatccctctatgcacagaaaacctacaagatatgagtaaattactggaaacacaacctcccaagactgaaccaggaagaaattgaaaccctgaacagaccaataataagg

SEQ ID NO: 23954 - DNA, 1032 bp, Homo sapiens
acatggtgttttcagtcctttgttgttatgagcaatgctgcaatgaataaccttgtacatatattatttcatatatgttggataaattttctgaagtgagtcaaagtataaatgactgtaattttgatagtcattgtcaaaaggccttccaaaggggttgtaccatttgcaatcagatctaattctatgacttaaaaaatactgtctctttagttatgtgtttcaaatttgtatctctagttcccactttttcctgagctctgcctactcagcatttctcctggtgcaaaattgaactatatttttcttccaaacttcttctcaacatttctcttgctgcaaaattgaaatgtattttccttccaaacttgctgtttcccctgtttttcctatctcctagaaaatggcattgcctttcatgcagttgctcaggaagaaaacttaagagccatttttttctcctgtttcctataaactacctatcctagttcaaatagatctttatttgatggtggaaatgttctgtatctgcattaatgtagtatccacaagctacacgtgactgttgatcacctaaagcatggctagtttctctaaagagctgaattttacagagtgaaaaataaatctaaaggccctgaggctagaatgactgagcatgaggaccagaatactaatggaacaaaaaaggcggtgagcggaaagaaacaagtttggagagagaggagatgaccaggtcacacagggcctcaaaggtcacggtaattttattctgcaggttatgggaagccattggtgggttctgattcgcgggagtgacataatctgattaataatattaaaaatcattccagcaagacttccagttccaaaagatacttgggagatctttctactgcaaaacagtaagatactgcataaaataaagatttttattgaattgtcaggcacagttattgttttctttaaataacagaaaacctgaggggtgagccgtgagctctcctgaaagacagagttaaccaagagcag

SEQ ID NO: 23955 - DNA, 1069 bp, Homo sapiens
cacaaaaatggaaagtcatcccaacctcatggatcagatgaatatcattaaaatgaccatgtagcccaaagcgatctacagattaaatgcaatatctatcaaaataccaattacattcttcacagaaatagaaaataaaaaacagaatttatatgaacccacaaaagacctcaaatagctaaagcaatcatgagcaaaaataaccaagctggacgtataacactaccagacctcaaagtgtatgacaaaactattcttaccaaaacagcatggtactagcataaaagcagacacatagaccaatgaaatagaatagagaacccagaaattaattcacatatccacagtgaactgatttgtgacaaagacaccaaggacactcattggggaaagatagtctcttcaattaattgtgctgggaaaactggatattctggaactagactgccacctctcaaaatggatcaaagacttaaatgtaagacctgaagcattgaaactactagtagaagacatagtggaaacacttcaagacctcaaacgcataggcagcaaaagcataaataaacaaatgggattacatcaaaccaaaaagcttctgcacagcaaagaaaacagcagagtgaaaagacaacctacagaatggaagaaaatatttgcaaactactcattcgatggaggattaatacccagaatataaaagaaactgaaacatcccaatagccaaaaaacaattgaactcaaatatgggcaaatgacctgaacagatatttctcaatagaagacatacaaatgaccaaaaaatatattttttacatgtccaacattactaatcatgagggaaatgcaaatcaaaatcacaaagagatatctctttccagttaagatggctattatcaaaaagacaaaaacaacaacaacaaaaaaacaaatgctggagaggatgcagagaaaaggaaactcttagatactgttggtgggaatgcaagccactatagccgctatggagaacactatggaggtctcacaaaaaataaatagaactaccatatgatccagcagtcctcct

SEQ ID NO: 23956 - DNA, 1070 bp, Homo sapiens
atatagaatatatattagcctcatacctaatgagaatatgttctaataaaattataattaaatttaatccagttttagacagtaaagatgtatttccctcatgtcaagatttatatatttgttccacagtttctagtcaacattaatattctctataggtaatctcatgaagctacaatcttattcataatctctattatttcagcagattgtctaacctttcattagtttacaaatgtagattacccgttttttttttggcttctaattctgtatctttgcttttaagcatcgattgttatctagacaagaagaacttaaggaaagagcaagagttctgcttgagcaagcaagaagagatgcagccttaaaggcggggaataagcacaataccaacacagccaccccattctgcaacaggcagctaagtgatgtgaggagcattggttaaaaaagaccataagttgttcattgtaatcatggggaggagggaagtaatttgcttgtatttctgctatgttatttttctacggactgtacattgtgaatacttggtgcacttactgaactgataaagataaattcatacttgtaggaccatttgatcattattcctacagagcagtgttagtgatgaggaaaagtaagatctgggaatataatttccacatatacatgaataatctgttttttgttaatttatattttataactgtagttgtactctaagattgtattttgtcaatggaagttaattttgttggaaatgtttgaatataatactgatgtctattatttattgaatacctactaagtatttcaggaacaataattttgttttacttaactccatggagactgaggccaataggcaaggtaacttgtacaaggtcacagagtcaataaatggtgaatccaggatttgaacctgagccttattagattccagagtcagtccactttcctatcatatactgccatccttgtactaaaccacatttttatatatatttttgtgtagtgcttcacagataataatgaatgtataataacaggagcccttaaaattt

SEQ ID NO: 23957 - DNA, 1051 bp, Homo sapiens
tagttaatatttcagtgactgacttctaaattaaggtagttatttttatattagcagcttacaatttatgacagtagatatatatgtacacttcctatgttaaagccctttagttttacttttaaaagggaaaatgtgatcttgatctttttcaatacaaaaatgtaatctcagctatttaaaaaagtatagtttctcagtgtattagaagaacttatagaaaattagtacctcggtggcatgaatgctggttcagtcaatgtcacttctcttcattaaaatctaaatactcaaaatttttccatttctggagggtttacttatggttgttacttatattcctgaaatgctatatatgatcataaaagatttgctctgtgaatgagtaagagaaaagggatgtgcagaagatataaaaaaagaaaaagcatttgtatgatcaaagtacagagtagtctaattttactctcagtgatttattttctctccatgatgaccaacattaactgatcacagatacagacttatcttgttattataacaatgtaacttctattgctgagctagttcattccatgaataaagtagatggatttttatgatccaactcatagatactgagttagtacaaaattcaaaatgaaaccaagacattaaaaatgtagggatcatgtaactattttatactatgtgtatctttctctgatttacttttatctcattttctcatttcttatcctacaagttgcattctgaactttattataattacgaatttggtccatatgattttttaaaaatgtttttaatgattatacctagacttataagtttggtaagatataaattctgttagtgaatagtcactagtcaccatttcagaccatgtaggtattatcagataatgaacatgtttatggtgctatataagtattaattaaataacaaaaactctattgaccaccaatggtaaacgtaattgaattagcagagcagtaaaataaatgtagacaaaataaatatagacaagcgcatatgagaaagcttgtgt

SEQ ID NO: 23958 - DNA, 1031 bp, Homo sapiens
taaaatacaggtttctcagtattgtttcacatgtaaagcaaaaagccttttaatgcaacacctttttcctttttaccaggtgattttgttattgatctctaatctgcccctttagctgtattaaatgcttaaagtgttctgcttttccatgtagccttgatgctagctatttgtgtctataaattcattaacattaaaacaggatctatatagactattagagtctatgagttagaaaatggcatattacatacttgtttagggcataaataacaacataaatttaagattatctgcataaatgttataaaaatatgttcgttgataatatgttatgagattttaattatgtatttataaggaacatatttttcacaatctctcttttctttagcaatcactgtacacttaccaggagaataagagtagtcaactccatttcttaccatatccatccatacctagaaagaagaaaaaaccaaaactgggtacatttttatatataaagatatttgaacacggctgggcacaggctcacgcctgtaatcccagtactttgggaggccgaagcaggtggatcacctgaggtcgggagttcaagaccagcctgaccaacatggagaaaccccgtctctactaaagatacaaaaattagccgagtgtggtggcgcatgcctgtaatcccagctactcgggaggctgaggcaggagaatcgcttgagcccgggaggtggaggttacagtgagccgagatcacgccattgcactccaaccggggcaacaagagtgaaactctgtctcaaaaaaaaaagatatttgagcttagagttaaattaattctgtacaactaataaataaccaggaaaggaaggaaaagatgttgatataataactctttccgaattttatatgaggaaaaattttgccagtgtttctcacatttaacacatatatttgatgtttctatatactgttctttaaatgttctcttatcctgaaaaattatatttttgtacattgtacttggttca

SEQ ID NO: 23959 - DNA, 1043 bp, Homo sapiens
taggcccagtgaaggtaatagagccatttcgataagcacatctaccactatcaggattaaaggtcatccttgagaggacatgtttgttataacatccatagcaacagtttcctaaaggtatttagaagacagttcagatgtagcaacttcttggacgttgtgggtctttgctggaggtacatgtatcacaaaagtaaagctttgctggagctttttaaaagatacatagaaccaggtgtattggtagataacttcccctccatttcctggcctgcattccttatcttcaggggcttgactctaaaaggttctccattaggtcaggcattgctatatgtaggtgtccacttgttgtttcctcctaattatctcagttaattaaaattgtgtagagaatttatgaccagaactcaagcaaaaccttgtatttttttgagaaagttcatcaggtagggcaatgacattagaaaaatgggtgatgaaataacctgcaaatcctaggaacatttaaatatctttgaggaggggtgcgggctgtcccattctgggttggatcctttcccatagttggagagaacattacttataagagtcaccaccaggctctcaaagatacaattttagggattggtccagtggtagtactcttgcaggcaattcacctgtgcctggacagagactcatatgcagttgaggctaaagagagaaagcagtttcatctctctatatatatgtttactcctaatattacagaccaacctttgtaatgtgcctatagcattttatggacttaagaacatcaccagttagttttagtaacagacacttttaacagtgtctggaaggcttcctcacttacaattctactgtttaagtttagcttctttaaaacttctaccatcagacttgtggggatttagcacaacaggattccctcaactcccaacctttaaaaaacaagacactggcgtggccatagatcaggaatgtgggagcaagggcctctggcttagatattaaatacactgtttgtttatcatgtc

SEQ ID NO: 23960 - DNA, 1089 bp, Homo sapiens
tgaataaaaggagccaaatacaaaagaatataggtatgaatccatttaagtttgaaaaaaggcaaattagtctataatgttacaaatctggacagctgggctgagattatagcatcttgaagtgggtataggaaggcttctggggtcctggtaacatatgttacttggtcaggatactgtttacaaggatgtgttcactttgtgaaattcattgagtcacatgcttatgttttgtgcacttttctgtatgcatgttagacttcaataaaaagtttaaaaaattaccaaattgttcagattatcatcatccagcttttcctttggcgcctcttgcttttaactatggtggcagtatttatgtctgatgcttttttacagactttcccatgtaaatggaactactcttttgctatctcacataatttggctccttgcttgcatcaaagaaccactttgaaagccaaaaatttaataactttcagctttgggataagtttaagagaataattgaattaaattgagggaatttgaaagaaaattagctttccccagcatgatgtgggctgcaaaaaagaactaggtagagaccatgatgaggaaacaagaaattctttgttaattccattcggaattatgagtgagaatcacccagttttctgcagcaaaactggagtagaacattcatgtaatagggcaacctcttgaaagttactgatgttatttaatagtatctttgtcaaaacatagtaatctaggtcaaaggctgaggcctgagacaaggctgagaaaagggaagtcacagggtatcagtgaaaatatatttgctagaaatgacgcagggctcaaagtgggtacactaagctttctggctaggaattatccgctggccacagtaacctcatcagagaatacacaggaagtgagatgcattttggtgaattggggagtttcttcattttgctgaaattttgtgataatctcttcacattctctttcactcttactaattttaaatagctttaaaatgcaaagatggccctcattatatctgataccctggaataaaaggcagggtacaggacaactaag

SEQ ID NO: 23961 - DNA, 1029 bp, Homo sapiens
acctatgttcacactataacattgtgaaagtcagcaggactctcccaccctcctgcttttcaactgcaatgttgcagaagagcagaaagaaccatacatggacttttctttctctgtttcatcttcagacattcaaacactaagcctcatactaccattaataagatggaattacctacctgggaaagtaatttccccaaagacacagaagaaaactgctgaggtggaattaactgttcattaggtggccacaaccccttcactaaggactgtgatactgtgaacatgtttttaagtagctactaaaattgactgcattattctaaccatataggtgaccttatgggaagttaaacttaatagatagtgatcttcactctcttcagccccccttttcttatcctagtttgctgttcattgaagtagtatctgttcatactttataccctaaccttccttcattcaacaaatactttttgtggaaatgcaaatccatatcaaagacagactgttctcaagagcgcttcatggcctaatacagagcaacagaaatgtaaatagaaaaccacaggctattaaagtctttagaggaaaattctgtgatgatatttataaatactcactacgtactgttcttagtgctttgtgtgttaactcttttaatccttaaaactactctgtttgttaggtaattgctattattatctccattttactatggggaaataatacagaaaggttaagtaacttgtcctagagcatgcagttaatgagttgtggagccaggacttgaacacagaaagtctggctccagagtccatctctttaattactactctctactgcttctctagccccctgttttagaaaattggtgtatcctttttgtttccttcacgtgattcaccaatggattccctggcctaaaatagtaccaagtacatgataggaacttaatgatgttttgtttaatgaatgaattaaatgagaaaacagttcatcagtggatttataaggtaatatcattag

SEQ ID NO: 23962 - DNA, 1104 bp, Homo sapiens
gagtaaggaaatctgcttccccgctgaagcaggcactccgacttccagcaagcctgattaatatacactaaaatccttttctaaggtattcatttattcagtttcttgacccatggatactgaattattctttcatgtcagatactgtacttagctttccatgaactgaaatcaaatatacagctattaacaataagagcaagctatagcatgtcactcagtttaatgtttttttcatatactgttaaaattgagtagtggtgattcctctcactgtgtctgttagcaaaccaatgctggttttatagcatccttctttctgaaagtggcatagtgctagatacctgacctcctaaaataatcatcatgactaattaatgggaattacatgcatgtacataccaaataaaaactatgtgaaaagactttcttgtgtctaaatgaaatagcctacactaacagatgctgtccttgctatttggtagcctataattcttgtgctgttggatatcacccccatgatgggtgtcctggacggtgtcctaatggaactgcaagactgtgcccttcccctcctgaaaggtgggttggggagtagagaagggattttatggtatttgatttcttacaaaatacaggttttaggtttttgttaaaggctctcaattagaaattatttcataagaggatttttttattttgaactaccactgtttattaactacttatgtataccaaggataaataagggtaagaaatgagcaacaatcaatgtcaggtaaaggactatccttttttccccaatgtgtgtgtgtatataatttattataccagttaagtgtaatattgcacaagggttatacacctgaaattgtctacacacacacacattatagacaacgtaggaattgtctacattgtgttgttatggagtctgcttaactggtaatagtagcatcctgtaatggaaaactttctcagttttgaaggatgtccttcatagctatacattgctctggaagttggttggttcctcttacacggtccccatcccatctaccaatcatcaggttgagacatagtgtaaattgtccttaccatatg

SEQ ID NO: 23963 - DNA, 1027 bp, Homo sapiens
attgaaagtttttatgattgaaattaatctggaaaggaagattcagctcttcccactagacactatgttattatgcctctagtattagagacctacaaatagtatatttctaaatgaagcaatggttttcagtgttgttgttctttattataactgtgctaaagtcagtcatttttgaagttttttttttttagattcaaggggtttaaaattcaagtgttgagtttttattagaattatctattaattaaaatctggatttttatttactttagaatcagactttaaaacgatatacctctaaatataagttcaaacaaggttgttgcttactgaaagatcagttccagtttaaatctcttatttgcattattttcaaacagaataagacctggaagtttgttgaaggtctccctattaatgatttctcacgtgagaagatggatcttactgcaaaggaactgacagaagaaaaagaaagtgcttttgaatttctttcctctgcctgactagacaatgatgttactaaatgcttcaaagctgaagaatctaaatgtcgtctttgactcaagtaccaaataataataatgctatacttaaattacttgtgaaaaacaacacattttaaagattacgtgcttcttggtacaggtttgtgaatgacagtttatcgtcatgctgttagtgtgcattctaaataaatatatattcaaatgaaagtgactcagactctgtttctagctaatatttagtgtctattcaggaagcaaacttgcggacaggcgcagtgactgacacctgtaatcccagcactttgggaagcttgagatgggtggatcacctgaggtccggagtttgagaccagcctgggcaaatagtgacaccccatctctactaaaaatacaaaaattagccaggcgtggtggcacaggtctgaaatcccagctacttgggaggatgaggtaggagaataggttgtcccggggggcggaagttgcagtgagccaagattgcgccactgcactcc

SEQ ID NO: 23964 - DNA, 1041 bp, Homo sapiens
aactggaaactaagttgtgaacaaacttggcaaggtacagatcatggtagatagttttaaaaagatctttttaaaaatctcattccactttctgcagaaaaactagattgacatcctagagggctgaatgttgtttagagcgtgttcttcagtagattgccaattaactttctttcacttatcccccagaggatgttagctatttggccaattcttttccaccagtgagaagagaacatgagtggcctggcctcctctggactttttgccaggagcctcatgcggtttgccccacctcacctatggagtttccctcctgtctgtttagttgcagtagaggtcttagaacactgaattttattcatgttttgggaaagagagaaacagggtgattagaattgaaagcacaaagatcgcactggtgactgactaaagtgattcagtcagagtaacattgaggctgtatccagtagtatgtgatgttccctgtgttgtctctgaacactagccatctttgcttgagtaaatgtctttgtgcattctcctgggggagctaagtagggaaagtggaaggcaggcctaaaacttgtctctgtgactaggtgtgtccagtgtgactttagctgttgctaagcaattttctaacacatatccccttggcttgttgaactaaaccaagctctgtgggactgcttggttaggtgcctggtagagggtgtggacagtgtcaccaagagagaacacctctgctgataatagggtgatttatgtgatggaaagctgtgcttaccaccaaatttaacatgtaataagctttagacagaaagtgtcctggcttcctggaatcaaatgactagtacctttgtgcacacccctgtgtcttttgaggggtggtggtggtaggggctgggtatgtcaggaaacatcagtgaaagacctcccctggaggcttccaacagtaacgttatcttgaccacttgaaatatttctcccgtcttcatacgctgttacttctttttttcctttccacagttattctga

SEQ ID NO: 23965 - DNA, 1049 bp, Homo sapiens
cctttctcattgctttttaaaattttattcatttgtttattgcattttccagtgggtcaggccttcagggtctgaggtcttggcttttccctaacaggctgtaaaattcatttttcttctcccacccttttcagatagttccattttgtgggcacattaaaggtggcatgagaccaggcaagaaggtgttagtgatgggcatcgtagacctcaacccagagaggtaaggcagagtctttgtcaggacagaactatcaggctgtggctgagccctgcccacttctgttgtggtttagcactcctcttcctctccttgtggacagtgttgctagttgccagtgccaagaaagtaccatgttcccatgaaacgaatatgtatgaatcccagccatcatttctccagacagctatttatatcagagattataaatataggcccacattttctctttgacccttagggaggccagaggatttttttttttttttttaatggttttgaaacatggtgccaggagcaagaactatcaagatgaataagaacccaacttaacattatttcccctggtcaatttctgtggctgtttttgagaattccgaagtggaattctctaattttagtcattttcaacaccaaagttttcaccagagcttgctttaggtaacaaaataagctggtttgacttacttctccataatctaacctctcttgaagagtagtggcctcttaaaaatggacaaacccagaggaggaagaagaaatataagcacttgggtcattttgaaatgtttttatatccaacccttaatcagtgggatgattttcttttcagctttgcaatcagcttgacctgtggggactcagaagaccctcctgccgatgtggcaatcgaactcaaagctgtgttcacagatcggcagctactcagaaattcttgtatatctggggagaggggtgaagaacagtcagcaatcccttactttccattcattccagaccagccattcagggtgagtacctcgagtgcctcggctccagccactggcag

SEQ ID NO: 23966 - DNA, 1033 bp, Homo sapiens
tcttccttccacctcctattccgaggattttatttggtggaggggagacacagagtttatctttgatgctacacttaattgttgctttcagttaacctcttagacattaaaatatatgctaaactctagggacaacaaatgtttcaacattattatgttaatataattaacacagtcacgtacattttatatgctttaccagtttaaatgttggcttttttagtagtcatttttaacacttcgcagaggtatatttgtttaaacaaagtatctgtggtagtctcctaaattttgttcataaagatatttcacatggattaaaagacagatcttgtgtaaaacatctagcccagtaaatggcacctagcagatattcattagctctagttgttcctccgtggattaaattagatatatcagttgatcttcaaagtacacatatatttttaaatcttcaaaaacctctggaaaaaaatccactacaattcacataatatgtagggcatttaagttttaatgtttgctgatcttttgacctagagactgttaaaaaataatcccgtatcacaacaaggataatatgtccttaatagccttgatacatcttgccgaatccagttttcgttatgaaaattgtatagtgtgggtgaatcatatcataaaacatcattttacattttcatttgttctgcttacatttagtgaaaaactagttcagaaatgtagtgacatttgagtaccaaataatgttttattttgtgtgaaatctaaagtgctttcctcagcaggcaaagtctttgaatagcttctcattaagggattgccccttctctcccaacccttcccccaaatctcataaaaggaggccgctaagtatttagatattttttaatcatcataaattatttaaataaaatgtttatattctaatttaatgttacctacactttgtagattaaaaaataaaggtttttccctctattcttagcactttcaattcctttttaagtagaatagtgaacctttctagccg

SEQ ID NO: 23967 - DNA, 1047 bp, Homo sapiens
aaaggaaaaaaacttgttaatctaaatatatgcatttatatatgttatttatatataacttgatctgctgatcttacagggcatttttttaaagaaataataagtaaaaatttcagaagctctaagacattcttccttagaattttgctttgctgttaacgcccggcaactcatgaactttttttctcaagttatttgctggtaccaggagagtgtaggattaaaaatttttttttttactctgaatattattcaaagtgtaacttaagtttaaaatatttaaactgttctttttaatgttattgttgtcatcattgctataaatctgtattacatgagaaatacacaaagttatatgtattttaatgcagtcagatgggggagattttttaaatcaatttttgcaataaatctaaccctctgagcttccttttgaattactctaacaagatatttgaactaatgactaccagattcagacatgagactacagaaattaaccctgtagacaagaattttcattttgttcaaaagtagtacttttactcaccttttctgaaaatcttttaccctccccacctctaacctgaagaaagagctatgtggtatatgtttatgattagtccttagtcatgatttttttttttttttttttttgagacgcagtcttgttctgtcacccaggctggagtgcagtggcgtgatctcggctcactgcaagctccgccttccgggttcatgccattctcctgccccagcctcctgagtagctgggactacaggcgcccaccaccatgcccggctaattttttgtatttttagtagagacggggtttcaccgttttagccaggacggtcttgatctcctgactttgtgatctgcccgcctcggcctcccaaagtgctgggattacaggcgtgagccaccgcgcctggccagtcatgatatatttaaactaaccagatcatttaccatgtttgagactttgtggtagcttctaaatctttttctgtggaagaaaatagagaaaaaataaggaggtgagg

SEQ ID NO: 23968 - DNA, 1068 bp, Homo sapiens
aaatcaatcaaggacccagaggctcaaggacacttggaagggtgcctctgacccgtggctctatcttccatggccactttgatcccacgtaataacttgccacagacacactcctcctaggctttagttgaatcattaattcattaaacaatgatttatttggcaacagccaggtgcccttcccaggtgctggactccagtagtgctcaatacagtcaaagccctgctcttacaaagctcatgttctagtggagggaatcatgtaataaataagtatatgtcagccagtgataggcaccaagaagaacattaaagcagggcaaatagataggaagagtgtgtttgtgtgtgtgtgtgtgtgtctgtggtgatgggtactattttagcagggtggccagggaggtcttctgatcaggtgagggaggagctatggggagatgtgggggaaaagtgatgtaggcagcaggaacagaatctgcaaaatcccagggagactggccaggatgcaactctggttgcttgtagtcccctagccccattcaatgctaagtctgcctaggtgtgcagccagcataccttgctccaaacccacctgccaccagcctcctctacagaaagggagtcatttcattggaaaaattattgtaattgtcctcaaatctgagagttggttcgaaagctggaactgcctgacctcaaacaccacactttagaattgcagacctgctaaaaccagctctcttaattgttaaaacaattttcttactgatttaagaaattgaataataaatgtgcatagtttgggggtacatgtgataatgtaatacattaatataatttgcaaagatcaaatcagtgtacttgggatgtccatcaccttaaacatttgtcttttctttgtggtagaaatattacaattattctagctattttgaaatgtacagtaaattattgtaaaatatagtcaccctactgaactatcaaacactaagtgtatttcttctatcaacctgtacatttgtatccattaatcaacttctctttgtcccctttcccccctacacctcc

SEQ ID NO: 23969 - DNA, 1033 bp, Homo sapiens
ggggacatgagcctgagcagaaagggtgaagaagagccatgggacacagagttgacccagccagggggaaagcccagctctctttaaaccagctaagccattccagtctcctgtgaagccaaaagggaccaggaaccgtgcaaaggaaactggaaacttttccccgctgggtagagcatgttgctgatactcttctgttttcaagggaaacaatcacattgtttgattccaaatggtaaatgaacactcactattcttcaggcttcagtaaatctttttttcttccttcatatatatatacacaacacacacacacatatgtatatctatacacacatgtgtgttgtgtatatgcatgtgtgtgtgtgcgtgtgtgtatagttttagctccaagccaagcaagtttgtgtttggatagaggggaacttaactattaactacaagttgtatgtctgtggtatcttgattttcccatttctaaagatgaatttcacaaagccataaagcgtgaaattagagctggacttaagactcattggccgaccatcctgtgtcctggcctggccctgcagtaagaagcgtgtctgggtctggagaagggtgcttccgagagtgtgcaggtggcccttccccttggaggcgagaagagagaatgtgctgtctatcttcctggttttcagtccacagagtcggtagaccaggggttacgtgactggggaaaatctcacatctccttgtctgaaaacatttcccctgctgttctctttctaacatgttgtggtaaatctgttcagatactgctcatctgactgttttgtacatgtgacaattgccttaaaacctagcacagtcctcagaaatgaataccgtgtttccactggaatctgcagttcctttattcccttcttgtgtgttgaagcggcacttgctgatggaggagctgttgctcttctaggagatgggctttgggtgactaaagggatttgttttccttgctccattcatcaggcacgagcccctaagtcagggcagg

SEQ ID NO: 23970 - DNA, 1085 bp, Homo sapiens
tatctcctgttcctcaagagtgactggtgactttttaaggaccagggattataggccaagaggctgctgcccagaggtccaggccaggggaattctggcaaggagagccctgccgtgtttctgacttggtgattaaaggctttaggggtaccctgaagagacttgggaaaggagtgtccagggctttgggctcctgggggctctgaacctaaatcctcttcagacccaagggacatgtcagaaccttggagccctgtagtaggcagcactgtccctggttaaggagaattccttgggcttctctgactgccaggcagcttctcctagtgggagtcacatggggcagggaatcctaccaggttctgtgactgcaggcaaatcaccagatctttcaggccctcagtatcattgggaggtgaccggaatgatctgttctgcccagctcttacattcttttctgttctgcttgccaaggcctttcctgggaatggctttgatcttctcggtgtcattgtagccttggctgctgcagggtccccttgtggggctgcaccctgtgaggaggctctgagcgggactgggagagaacagaggctgggccccacctgcctgggagcaaggggcagtgggaggctctggcacctgtgagtcagagattcggtgaggcaggaagcgaatcataaacagacacagaaatggcctttcacggggatgagtccggtgcttattattagaattcctgttgttcgttaagctcttaccatgtgctttgcacacatgggtgtatttaatccttaccttctgaggagctggtgctatgaggggaggaaagtgaggctcgaagtcatacatctggaaggtggcaaagttaggggctggcctcaggtttgtctggctccaaaacccatgtccttcaacactgtgctgtcctgcttccctcgggggtgagttcttcatcaagcagataaaaaattcagtgaagaagctgagatgaaccagtcattctgctagtgttcagttaccactggcgtgtgaactgagcaggatggggtctggggcgacctcctgggtttggacgtgtcctg

SEQ ID NO: 23971 - DNA, 1284 bp, Homo sapiens
aaaagatggtaagtgaggttacacacatgctctgtttgttttccacttttgcttgatgggacagtagttgttgttttgtgtccctttagtattggggagggggggttatttccatatttttattttaagtactttgatttttaacctttttcattgcttcaatttgatagcaactaattaagtcctatactttcctgattgcgtacaatggaccaaacaagaactaattactaacatagttttgaattgttttccttgtttttcttgtagatgaatgttataattaaaatggaatgtgttgtgcataatattagaaaccagatggctttatataggatatgtgtgatccaaaaaattcaagtgaagttgttacatttgaataaattcactttattgaccagtattaaattgaacattgactgtcatagcctgtatatatatttgcatctagtgtggtatcatatgtgtacttaataaactgagtaaaattttaatatgtaaataaaccatagatagaaaaagagaattctttccatatcatccttactgatgagcagatttcacaacgttatctgaggataaataagaaaaaggtaaagcttttctataaacaacagatttcccccccaaacattgtacagtgtgtttttctttataactataagcttgctggtcttatctcagacatttaactcttcattgtatttttctgtgatagtctaagtgcttctgtagtagatacttttcaagtttgtttttaatattgtttgtaagaatctctgacaaaaatcaggcacttctaatatatattttaactagtaatagtaactttgtgaagttttcttttgaataaacaaaaacatttaaaagaggaaatttatcctaaataaaagatcataacatttgtgtttatattctaatgagattaagaaaagggtgtgcttgctgggcacggtggcttgtgcctgtactcccagcactttgggaggcccaggcgggtggatcacgaggtcacgagttcaagaccagcctgacgaacatggtgaagccccatctctactaaaaatagaaaaatcagccaggtgtggtggtgtgtgcctgtaattccagctactcaggaagctgaggcaggagaatcgcttgaacccgggaggcagaggttgcagtgagccgagatcacgccactgcattccagcctgggcaagagtgagactccatctcaaaaaaaagaaaagaaaaggaaagagtgcgcttgtagagaacagtgtaggcttattttaacag

SEQ ID NO: 23972 - DNA, 1052 bp, Homo sapiens
tcttatatggggagaaaaaagtgtaaataatttaaaaatgatacatttgcatctcataaaaattaaaacttctgcttttttactaataccattaaataaataaaaagataaatgagatatggcagaaaacagtcaaaatactatgataaagtatgtatatatagaatataaaaaaactcttacaattcaatagtaagagcacgaaaggtaaagaaaaattagcaaaacatttgaacagacacttaccagagaagatacatgaataactaacatgaatatgaaaagatactctacatcattagtcatcagggaaatacaaacccacaataggataccagcacaagtccataaaaatgaccaaaattaaaaagactgacaataccaagtcctggtgagggcatagagcaagtagtataagaatttttgaaaaaaagagtggtggtttcttataaaaataaacatattcttatgttgtgacccctaaatttccacttatggatatttatcgaagagatatccacacaaacacttgaaatcttcgcagtggtttcacttaggatagcctaaaactggtaacaactcaaatgtccatcaactggccaatggacaaacaaatcataacataagtaaacaaatcactgtataactaaatgaatgcattttacatgcataaactgtatctcaatcaagttggtaaaaacatggagataatatctaccttaactctgttgaaaaggtggaatgaaaaaagtcggaaccattagcatgctttgaaacaaaatgtgtgtaatccgtgcacacttaccagaccccagagatgatgtggggcttaagagaaattaggtaaaacctaaagaataaaatcagaggcagaaaaagaagactttgaaattgaatctagatttccctagaagttttgaattttaaaaaaaaacccaaaaaacccaacctataaatatgtaacttgtggcaagtggccattttcataagccctgttgcacagcggtaggggcatcagagtctgagtgaaatggagctgtctgacccacacg

SEQ ID NO: 23973 - DNA, 1009 bp, Homo sapiens
agcaacatctgttttccgttcaatagtacaagaaggctctgcatggggctgagtgtacacagtccatgtgaatctattgttattctcattccttttttgtgcctatgcctggtccatttgccatgtaccatccggcaaacagctgacacatactagctattatggacccaggcctaattgtgaggtcttaaaagctctgccatgtttgtcttctaggatgaatcagaggcccctataaaccacagtgttatagaccaccactctcattttgcatttccagagtagcagactgttgtgccagagggtttgttgatgttgaaaatatagtcagaatcagtggcggcattttgttttcctctttgcctggaatgtttttgttttccttagtaataaagcatgcaattacttacagaataactatttgtagatattattttagcttggaagcagaaactggcaaattataaatgtgccaatgcagctctgagctggaaccatggttgaagggggatgggaaaggtggcatggttatgtgctccagccctccatggctttgtcattatgccatgggatcctaccaataagggttcacagatgcctcttatttgggtttctgatttgtgcccccacagccctcttggaacagagatcatgatgacacggcatctactcgttcaggaggaaccccaggcccttccagcggtggccacacgtcacacagtggggacaacagcagtgagcaaggtaggagagatgttattctcttttgctacttgtttcatttttaaggattgaaaaatcagaaatgtctagtgagttactaagtatacagtttttcctagaagataaaccccctttaacttgagaatcagctcatcttattttattctctgaccctgctcttctgtgctattccagctgcttaactgtctgtcacctggccagcttcataaaacagggtagtgaattgactcagggcaagattagagaagtagcttagaagtttgaa

SEQ ID NO: 23974 - DNA, 1049 bp, Homo sapiens
gtagctgggactacaggtgtgcacaaccagacccagctaatttttacattttttgtagagacagggttttaccatgttgcccatggtgatcttatactccaggctcaaatgatcctcctgccttggcctccaaaagtgctggtattataggcataagccacaactccctgccatcactttttttttttttttttttttttaggatgaagtcatttcaaaatttgctttcaaggaaaattttctgtaatatataccaagtgatgaattatttgaaatttattttaatgcctaaggccaaaataatacatgagttttgatattactttgcatcatcattgtcaactagtgattggttcatttcacaagctgctttaaagagaattttagtggctgggtgcagtgtctcacacccagcactttgggaggccgaggaggttggatggcttgagctcaggagtttgagatcagcctgggcaacatagtgaaaccttgtctctacaaaaaaaacaaaacgacaaaaactagctaggcatggtgatgcataactgtagtcctcggaggctgaagtgggaggatcactcgagccagggaggtggaggttgctaagctgtgatagtgccactacactccagcctgggcaacagagtgagactctgtctcaaaaaaaaaaaaaagaaagaaaagaaaagaaaattgtatatgtaattaccttcctcaactgtggtagacaatttcagttctttctaaagtaatttggcaaatacccccaacactgttagagaaggaaaacttttcatgtggctgattgatggacttcttatgatttgaccaaatttcaatattatgtttatcaagtgggtagagaagagaggtgctcccttttcccctcctgtctattctcctcctgccgctgttctctacctcccctacccgcagacacactgatgatgtattgcaatcttggaactgttggatcctggaggaggttaagaaactagaaaaaggtgccaaaaacatgatttcataaggtttgacttgagaatgaatca

SEQ ID NO: 23975 - DNA, 1059 bp, Homo sapiens
gtaagacatcagaaagtatatgtgagatcaataataattccgaacatggagccaaactaactcagcaacaagacattagaaaggacagtaagacatcagaaagtatatgtgagatcaataataattccgaacatggagccaaaaacatgtttgctatatctaaacaaggaagtaatttggtacaatcaaagcatttgaatccaggcagcatttcagtgcagacatctttgacaaatagctcacaaatagataagccaatgaagatggagaaaggggaaatgtatggaaattctccaagatttttaggtgccacaaatttgactatgtattctaagatctcaaactgtcagataaataatctgcatgtgtcttatactaacactgatgttccaatacaagtgaatagttccaaattggttcttccaggaagttcaagtttgaatgtaacttcagatcatatgaatacagaaattactacttataagaagaaattgagtactaatcagccatgccataagactgtaacagatgaagctcagagcaaccttaacacaacagttggattttcaaagtttacatttacaaggatgaaaaattctcagattctttctcagtttaatcaaaattgtataactggaagtatgtctgataccaaaattacacagggtgtggagaaaaagaaaggtgtcaacccattactggaggaagctgttggacagcaatctttggtgaaactttctgaatctttgaaacaatcttcaaaaggtatgtatgaaatatgaaatagttttctttgaaaagcatcttaaaaagtagtaaaataattatttgttgtttttgagtgtgagtaatgtataaggtaaaactattctatgactagttaattttaagaattaactagaattcttaaaatgatacttggaaataattatacggcattatacagagtagttggtttatttttcaaaatattacattgaattctttcccagcacttaatacaatgactggcatatagtaggtactcagtaaatattttttgaataacttattctttct

SEQ ID NO: 23976 - DNA, 1798 bp, Homo sapiens
tcaagatcagcctggacaacataatgggactccatctctacaaaaagtaaattaaaaaaaaaattagctaggcatggtggtacatgcctgtaatcccagctactcggaggctgaggtgggaacctcacttgagcctgggagattgaggcagcagtgagccatgactgcaccattttactccagcctgagtgacagagtgagaccctgtctgtattagtctgttctcacactgctaataaagacataaccaaaactggataatttatgaaggaaagaagcttaatagactcacagttccacatggctggggaggcctcataatcatggtggaaggcgaatgaggcgcaaagtcaaacgtcttacatggcatcaggcaagagagcttgtgcaggggaactcccatttataaaaccatcagatctcgtgagacttatttactaccctgagaacagtatgggagaaaccaccccatgattcagttatctccacctagtcccacccttgacatgtgggattgttacaatacaaggtgagatttgggtggggacacagccaaactatactatatcactctttaaaaaaaaaaaaggtgatgtctcatgagtcttgtatttttttattgtgtttagtgcaataccgtaaaccttgattaacacaccatgggaccatgggacctatgtgaaataccactagtgatactggaagttctcccaaaaagcagagaaaaataatggcagaaaaaaaaaagaaaagaaaaattacaagaaaaagttgaattccttgatatatacagtagattaaggtctgcagctgtgttgcctgccatttcaaaataaatgaatacagcatatggacgattgtaaaaaaaggaaaaggaaattcatgaagctttcactgcagctatgccagcaggtgggaaaaccttgtgctttttgtaaaacacctttttatcttgtattgaaaatgcaatttttatgtggatagaggcttgctataagaaaaacatacctatagactctaatatgattcaagaaaaagcaaagccattatgtgacaacttaaagcaaagggagggtaaaagatctaaagctcgagaatttaatgccaacaaagaatggtttaataattttaaaaagatgtttggcttttaaaatgtcaaggtaacagaaaatgcagtgtctgctgcccaagcagcagcagatgaattcccagatgtcattaagataatcattgaggagaaaggatgtctgtctgaacaggttttttaatgtagatcaaagtgccctactctggaaaaaaaaaatgccacaaaggacagttattagtaaggaagagaagtgagcactgggatttaaggcaggaaaggatagccagttctactgttttgtgcaaatgcagttgggtttatgattagtactgcccttatctacaaaggtgctaacccctgagacttggagggaaaagataaccaccagctgccattcttttggttgtacaaagagaaggtgtagacatgaaaatcctttttctgaattggttctgtcaatgctttgtccctgaagtcaggaagtaccttgccagtaagagactgccttttagaattcttttgaacaatgcctctggccacccagagccccatgagttgagtaacgaaggtgctgaagtggtctactttcccccaaacacagcatctctaattcagccactagatgagggaatcataaggacttttaaggctcattatacacagtactctatggaaaagattgtcagtgttatggaagagaacctccctaga

SEQ ID NO: 23977 - DNA, 1027 bp, Homo sapiens
gtcatgaaagccatcaagcctgaagcagtaaattcctgctgaaggaaactgtccagatgatatgcatgacttcacaggttttatgacaaagccaatcaaataaattatggaagagattgtggatatggccaaaaagtcaggggtgaaggatttcaaggtatagatattggagaaattcaagagctaataaacactaattaacacaagacaacttgatggagatgaatgcttctgagccagtgccagcaatgaggaagacatgtagaagcagcagtgccagttaccaaaccaacactaaacactgtggcagaagggttacgtttattcaagactgcttttcttttacaacatggacctttctatgatacagaccctgaaactaaacaaatggtggaataagattggaactgtataaaaactttttttttaaagaaatggaaagcaaaaaagttaggcaagttatcatgtattttcataaagttacaccaagtatgtctgcctttcttgccttcccttctacctcctttaccttttacacctttgccaccctgagatagcatgagcagctcttcctattcctcctcctcctcagcctactcaaggtgaagacaatgaagatgaagacctatatgatgatccacttccatttaatgaataatacatatattttctcttccttacgattttctgaataacatgctcttttctctagcttattataagaatatactgtaaaatacatataacatgcaaaatatgtgttaatcaatcatttataattgattaaagcttccagtcaacagtaggctattggtagttaagttttgggggagtcaaggttggttcccctaacccccatattgttaaagtatcctgtaagtttattgaatttgtttatcagttttaagtgttcttttggtggagtctttaggtttttctagatgtaagatcatgttatctacaagcagggatgattcaacttcctcctttccatttagatgccctttctttttcctttttttttttt

SEQ ID NO: 23978 - DNA, 1046 bp, Homo sapiens
cagctttgtgtttggggctccatttgtttccagatggtcatgacaactctatgagagctctttctttgaatagtttctccacttggtttaaatcttatccttaaccaataccaagaattgacaaatatcttcagggaagaaagcagcctgtgattgtcagcttacaaaggaaggactgtcattattaaatctctggaattttagataatctaaaattttcattgctctcacaattctgtcataaaagtgatttttacagcctatcaggcttttttttcctgttgttaaaaagagtattctcctaccatgaggtcctacattcttttcagaagcaaaataaaaataatgcctattcttcagaagaataaaaacaaaatacaaagccttgcttaggatagtaatgtcaaaaattgctgtcttcttgtcatcagtctttttaaaataggtcagagaaggggctagtcaagagaaacaactccaaaaccaattagcttacatgtgctaataaaaactttcatgtctgtagatacgtgtagatgtatacgtatagatatggtgctttcttcacctactgaactgctttgtgtcctgattctggttgcagataaaaacttacatttttttctcttgttaattttaattacagttcagagagacttttagagaatgttagatatgattgattactctgcctactgctttaaaaataaggggatgtaaactaagaaagattaaatgagctgtgtaagaccccaaagctggtgagataaaaccaaatctcttccctcctcgagaccagaatttctccatggcattgcctgactccacgactgttagtcttggctttctaaagtatcactggggggttgtcttttcagccaaatgtcaaaataatattttggagttttaaaaataatatttggagttttcaaagtacctctagataaggaactttgaagaaatcataaattttccaggtcagcaaaataatagaaatccttacaaactgtctgttgtcacatgatcattattgagcaaaaaacata

SEQ ID NO: 23979 - DNA, 1036 bp, Homo sapiens
tgcagttcattcttttttattgccaaataatattccattccttcacttcatccgttcatcatcagtcaatagacattttgatgtttttggctattgtgaataatgcagttattaatattcatgtacaaattaataagtgtacatatattttaattctcttgggtatatatgtaaaaatgaaatttctgggtcatataattctatatttaactagttgaggaaatgccaattttttttccttaatgccaaaatggctgcaccattttacattcttgccatcactgtattatgaagattctagtttctctacatcctcatcaatggttgttagtctcctttttaaaaaaaaaatagctattctagtgcatataaagtggtatctcattgaggttttgatttgcatttcccctgctttttctttgtttaagtagggtcttgctctgttgcccaggctggtcttgaactactggcctcgagcaatcatcctgccatggcctcccaaagtgctgggagtacaggcatgaggcattgtgcccactctgcatttcccattggctaatggtgttaagtatgtttgtatgtgattactggccatttgtatatctcctttggagaaatgtctattccaatcactcgtgcatttaaaaatagggttatttgtcatcttgttgttgaagaattctctctatattttattttactttcacttaaaaaatttttttttgagacagggcctcactctatcacccaggttcaagtacagtggcatgatcatagttccctgcagcctcaaaaggattgtcccacctcagcttcctgagtagccgggagtacaggcacatgccaccacatacgcaactaatttttaatttttttatagacataggggcttgctatgttgtccaggctagtctgaaactcctggcctaaagtggtccttctgacttggtctcccaaaatgctgggattacaggtgtgagccactgtgcctggttctatatattttggatactagacccctattagatatatgatt

SEQ ID NO: 23980 - DNA, 1034 bp, Homo sapiens
aagggcagatttgttaaaaaaaaaaaaaagtatcttctttgccaatcaaatgtgtcccctcaaagtagacctctagagcctggctactcaaagtctgatccagagaccagcagcatcacatcacattttctttttctggaggatctaaggggagaatcattttctcacctttcccagcttctagaggcttccagcattgcctgatggcccctttcttccatctttctgaactttgttttgtactcacactttctacttctacagtcaaatctcttcttacctccttcttataagggcacacttggataatccagcatggcatccccatctcaatatccttgacttaatcgcatctgcaaagtacttttaccatattgtgaaataataagaaatatataagtgtgtgtgtgtgtgtgtgtatgtatagatagataaatagatagatacctagacagatagataggtacatagatacctagatagatacatagatagagatatttgtctctgaccctggttcctgacatagagctcctaaacttttctaattccctaagtggtacgggtactagcagcatcatttgttctaacatttggtctttgagtccagttcctgacacagagctcttaaatttcttggtattttctgggtgataagagtgtcttttattcaaatgaaacaactcttgatgaggccttggatagctttaggataggggcttgtcatcagaaagacaaggccatgattagaagcttagcacttttaattcccaaccttcattctctggggagggcagaagagctagagattgagttagtaatagatcaagcctacatgatgaagcctccaagaaaaaaaaatttccctcaagtatgggttttggagagctctggggttggtaaacacatccatgtaccagaagtgtggtgcaccccagctccacaggaatagaagctcctgcactcagagcccttccagacctcatcctatatacctctttatgtcctttattataaaagaaaatggcaaacac

SEQ ID NO: 23981 - DNA, 1069 bp, Homo sapiens
gaggttacagtgagccgagattgcaccactgcactccagcctggtaacagagcaagactccatctcaaaaaaaaaaaaagagtgtataaatgtataataaagaacaagattgtatgagtcaggtgtaaatgccataggatttcagagcagggaaggataagtgaaggcaagaagagtcaggagagcttcatggagagataacacctgagtgatttgaaacgtagtaattacaggtgaagaagtgggacgaggccatgccctaaagagacaccaacccgaaccagggatggatatatctctgagcatagtttgttcatgggctctcccagaccatgactttgttgttgtttttccttcttgttttgcatccatttctggggcctttcaatttggggacatttctcaagttggcaactatctttgtaggatgtacgctctacacccttgatcttgaacacccaagatgtggcagtgcggcccagttgatgctcatccctgttaaccctgatcaggatttgctttgtactggctgctgggttggaaagtcacaatctttgaagaaaagaaaatgacctaaagttagacacaaggttccaaattcaacattaaataaatgaagacccctgtttttttctcctgatttatatgaaaaacagcctgactgcagtagcaacaaggttcaataactttgagcggatccatgtcatatcactgtttagagaaatgccatttgaatgaaacctgaaattcaacaaactgagacctgaaacatcaaagcgaaaacaactgctctataactgcaggataatggaggaattaagaatacaggatattgagtcgaaaatctttatttcacatcccagccccttgactttccagggtgatcctggacaggtttacctggagtctgtttcagaacctgtctcgcatttttatagtaaagattaagtatataaggggcttgaggtacataatagtctgttcaaaaaatgacagctgtgtattaggttattgacctaactttccttgccaagtaaaagtctaatgccctgccccattagattcactg

SEQ ID NO: 23982 - DNA, 1050 bp, Homo sapiens
tttccaaagcctctgacttctggttgaattagcagaagtatagtatctgaaactaaggaggtgatgggacctctcaacttggtgaagttaaaatctccgttcgaatattgtgttcagtaccaaggacactccaagggagaacatagagaaactgagtgtatgagaaatactaccaaatacggtatgttatgtagaatatagaattggggctctttagcctggggcatacttagcatagagacaatattcaaagggctgcgctgaaacacatgcagctatacctttagagccctaattctacagattatttgttgtatagatccaaggggtagaataggctcaaaggaacagtttctggcttcgtttttaaaaaggcctttttaattagctgcattgggtgggaatgagctcgctattatagttgcagtcaagcacaggcagcaggacaacttggcagaataatgtaatcaccattcatgcctcagagtggggattggaatagaaaagctttcagactccttatgctgctgagaggctgtgactgtagacctaaaagtatgttaggaaaggagtaaactaaatactaccagtcctatacagtatcacaaataagtttggttcttacatcttgaaaatgaatctaagagagctctgttggtgatactggagacaacttctcttagtgcagttcagattggccaacctccacctaatacaagtgggatcatatttcagaccagagtacttcaaactcctgagaataatctgttttcaagtaatctcaaaacacaccctgtaatttacaaacaacacattagtcccaaatcagtctcctctatttattagccagtctccatagagccatacataactcaaggtattttttttacaatgtcccagtatttttattattatgattactattattattattttaacaggatggcttgtggttttacatacaatcattagagacggtaaaagaccacaggaatatcagagtgcggaactcagatctcaaatattgtttatgaactgaaataaaagtag

SEQ ID NO: 23983 - DNA, 1027 bp, Homo sapiens
tcttcactgagtctcagttttccttacctgcaaaagggggtaacagttcctacaaggctgttttaccgaggctcactgaattaaatgagagaatgcatagatagcactgagcacggtggttagctgttgttaagtaagttagcattggacacagccgtaaaaatgcaggcgtttcaagagtgacctcgggaaatgacactgcccagaagaattgggcagaattgcagctgtcctccacctgggtcttctattctgaatctttccctcctccagtccatactctccagtgtcaacagcatttgctttccaagaagcaaatctgatcacgatgccccagtgtcactgggttaaagccactaagggttcccctgggctcaggatagaagccacactcctcagcctggcttgtgtgtcctcccacagtggggaccccacctcctttccacccgcactcatgctgtgctcccagcatgtggacctccactgcccctgccctaccccagggacttgtgcttgcctttttgtgcgggaatgctgacacctccttggccctgctctgcagagtgtcacctcctcggtgaagtgctagttcccagacactcggctcttcagcacttggctacttgctgagaacaatagcccgctggtctgctgggagctatggaaccaaactgcccacgtttaaattctggcttctccacgtggctgtcagcaagtttgtccatctctccttgccttggtatttttagtgagatgagaaagagaatattattgaattcacaagattgttaatgagaattaaatgagttagcgtaaggaaagcatgttagtacatagaacactgcttggcacacagtaaatgctcagtgaatgtccgctgtgctaacaacaatgttattaccatcattgtcattattcttattccaccaaaatgtaagctctttaagaataaagactgcctattttgttcactacctgacacaaaaggtacaggatatacagctgttgagtaacacgttgaccactg

SEQ ID NO: 23984 - DNA, 1026 bp, Homo sapiens
cagctttccacatattgcttgcaagccgcccaccacagcaccacaggccctgatgtgaggccgtccgctcacgtttccttctctccaattcttttctaggggcgctgcatcaacttcaccagggtcaagaacaaccagccagccaagtacccactcaacaacgcctaccacacctcctcgccgcctcctgcccccatctacactcccccacctcctgcgccccactgccctcccccgccccccagcgcccctacccctcccatcccgtccccaccttccacccttccccctcctccccaggctccacctcccaacagggcacctcctccctcccgccctcctccaaggccttctgtctagagcccaaagttcctgctctgggctctctcagaaacttcaggagatgttagaacaagtctttccagttagagaagaggagtggtgataaagcccactgaccttcacacattctaaaaattggttggcaatgccagtataccaacaatcatgatcagctgaaagaaacagatattttaaattgccagaaaacaaatgatgaggcaactacagtcagatttatagccagccatctatcacctctagaaggttccagagacagtgaaactgcaagatgctctcaacaggattatgtctcatggagaccagtaagaaaatcatttatctgaaggtgaaatgcagagttggataagaaatacattgctgggtttctaaaatgctgccttcctgcctctactccacctccatccctggactttggacccttggcctaggagcctaaggaccttcacccctgtgcaccacccaagaaagaggaaaactttgcctacaactttggaaatgctggggtccctggtgtggtaagaaactcaacatcagacgggtatgcagaaggatgttcttctgggatttgcaggtacataaaaaatgtatggcatcttttccttgcaaattcttccagtttccaagtgagaaggggagcaggtgtttactgatggaaaaggtatg

SEQ ID NO: 23985 - DNA, 1048 bp, Homo sapiens
tcacacctgtaatcccagcactttgggaggctgggatgggtgggtcacttgagatcaggagtttgagacaagcctggtcaacatggtgaaactctgtctctattaaaaatacaaaaatgagctgggcatagtgacacacacctgtaattccagctacttgggaggctgaggcgggagaaccgcttgaacccaggaggcagaggttgcaatgagccgagaaacaacccaaatgtccatctactgatgaatggataaacaaacaattgtgatgtgtctatttaatgcaatatttctcagcagtaaaaatgaataagctaccgatacatgtaacagcatagataaatctcaaaagcagtgtgctaaggacagaaaccaggcatcaaagactacccactgtataaatccatttatatgatattttagaaaaggcaaaactatagtgatatttctagtttcctgggcttgggagtggaggtaagaactttttggaatgaaggaaatgttctacaccttgatcgtggtggtggttgtatgactgtatacatttgtcaagaagaattaaactgaacacttaagatgagtgagtttgtagtatgtacattgtacctcaataaagccaattaagaaaataagaaatggttctgatatatggttttttgggttttgtttgtttgggcagctgacctaaaatagaacctgaaaacagattggggaattcagaaagagaaataggacttgaagggtgtgggggatggtgtcaggacaatgatttctggttttggaagtgttaaggaggttgagttaatgagggcacagagagagaaaagagacatagagaaatatggggcatgatgggggggtctctactgcagcaaaaaggaaaaaggagagcaagaaattgagaaaacagtttttatacataggatttttgtatgtgttgcctattttgtctcaatttatttttatttttttctcttcattctcttggtctctccttttcctggggggtcttagacaccatgtgtaactattgcgtgcttccaaagtt

SEQ ID NO: 23986 - DNA, 1050 bp, Homo sapiens
cggcacatcggagtctgattattatagggtccatgacttgagttggctggtggcgcagtctcagcattttgtcatgactttgaccagctggagactttggtgccaaggaggaaggcttctcaaccatttaccggcagaagtgacccccggggcaatgcaagtcttctgagctgacagagcagagtgggtcctgcataactcgtgctttacatggaactgggcatctgctctctcctgctgacagtgggaaggatagataaggtgtccctctccaagttatccattctcctgcccaccagtccatgacaccccaccacccccttccactccctactgtttgccctttaattttttgttttgttttgttttgagacgaggtctcactcctgtagcccaggctggagtgcagtggctggatacagttcactctgcctcccaggctcaggtgtttcacccacctcaacctcctgagtagctgagactacaggtgcatgccaccacgtgcctatagtctcagctattcaggaggtaactggtaactctattgataaccaaaccctagatttttttttttgagatggagtcttgctctgttgcccaggctggagcgcagtgatatgatctctgctcactgcaacctccgccttctgggttcaagagattctcctgcctcagcctcccgagtagctgggactacaggcgtgtgccaacacgcctggctaatttttgtatttttagtagagatggggttttaacatgttggtcaggctggtcttgaactcctgacctcaggtgatccacctgccttagcctcccaaagtgctgggattacaggcatgagccaccgtgcccagcggccaaaccctaggtttttagttgccagggaattctcagacacaggtggaagagcaagtaggagaggaagtggacagggataagaaaacggataaccccatgacccaagagctgctgactctccagagccctatcaggccaaggccatcctcattcagctcatgtcagatttctgttgattgaagatagagacac

SEQ ID NO: 23987 - DNA, 1051 bp, Homo sapiens
ataagtaaatcaataattaaaaaatcataggactgtatgatcagtataataatttgatatatatgtgcagactgccatggagtaacagaagaggtgcacctaactctatcattagtggtcacagaaggcttcctggaggaggaaggtttatattgagccagggctggagaagaagggcttatgcacagttgtggagatgagaaagctaagccaaagcacactgaaggaatggcatgtctgttacagcaggcaagtcccagaggtggagatggaggttccttagaaactaagtccattctgtaggtgtatgggagacagggcagatgagtattgagggacaggtcctagagggtccaaggatcccatgtaaggaactgctggcctggaatataaatccctacttccctttgcatctgttccagtgcctggcaaagttatgtaataaatgttttcagataaaatgaaagtgctgggtaccaggaaggaaatcaaggcagagatttagccttggagaaacatgactccttgcttccctgcttaccctgtccagacctccaatattcatcttcgacatggtctccttccctgattgacataatctgggtcaggggcctctcctacacactcctgacactttctgtgatttccccagcatgggaatgggaatgttcacaccttattatatctgatcacatacctgcctcctctcttcagctttgagctccactgagggcagggacgatgcagccccctctggctagcacagtgctgctgagcacatactcggcccttgctagaagtgtgcagtatgaatggacaatttcccatggcctagaaaatttagtccaccctctaggcctggcctgccacaaaaatgatccagttttgaaaattacttctgtagctcttgctccgttcatggtgtccttaaactcccactcaactccaagctaactagtcttttccaaataagtcttaacgttcataatcatagcaggagctttgcttttactgtttactctgcttggaaaattctttccctattgaaatc

SEQ ID NO: 23988 - DNA, 1067 bp, Homo sapiens
gacaaagaatctaaggtacttgttcaaaagtggtggcaccagcagatcttagcattccaaggaatggtctggaggggccgtctggcccaaattcttcccttcagactggactgtacgtcctccagccaaatcagaatgacagccattcactcccccttagagacctccagagggtgatacgtatgaagtgcctttaaaaaatgcctgactttttgccctaagaatataactaaaaatgcacagaggttcagatctcacagtgtttattcagcattgtctacattagctaaaaatgcccaagagtagcagattgtctaaacaaaatattatacacttacacaatgaactattatgtagtcattaaaacttatattaaagagtatttttttcttttatttagcctttttttttgagacagggtctcactctgttgcccaggctggaatgcaatggccccatcatagctcactgcaacctcgacctcctgggcttcagcaacccacccactgcagccttctgagtagctgggaccacaggtgtgcgccaccacacccagctaatttttgtattttttgtagagatggggtttcgccatgctgcccaggctggtctcaaactcctgggcccaagcaatctgcccacctccgcctcccgaagtgctgggattacagatgtgagccactacacctggccaagaatactattaaaatatttattaaatggtttggtatatgtaagtgaaaaagacaagccataaaatagtatgctatgatcccatttttaaaaaattaacacagttaataacacagtattttttaaataaatgaaaataatttgtgcatgtgggggaaaatgaggaaggatatttacagaaatgttgtcaatgattcttatttctgggtgattagactgcagtggagttcctcgccttgccccttctttttacttatttgttttttcctaagccttctgtggtcaacatgtgttacctttatagaaagaaaacaaccacaataagagctttgtgggaagtgttcagagcaggagattctaaaccttaggagtct

SEQ ID NO: 23989 - DNA, 1047 bp, Homo sapiens
aatagtagtctctagatgatggaataatggttgatttttgtgttcttttttgtctttattttctacactgaataagtattaccttcgtaataaaaaataacaaaaaaaatttaaagctaagaaaaatccagccaagcttgaaaaagttggcttagatgactttgaactgtgtgtttcattttaaaatctatttatctaactttgcttccctatcgaacagggtgacacatctggagactacaggaaagtactgcttgttctctgtggaggagatgattaaaataaaaatcccagaaggacaggaggattctcaacactttgaatttttttaacttcatttttctacactgctattatcattatctcagaatgcttatttccaattaaaacgcctacagctgcctcctagaatatagactgtctgtattattattcacctataattagtcattatgatgctttaaagctgtacttgcatttcaaagcttataagatataaatggagattttaaagtagaaataaatatgtattccatgtttttaaaagattactttctactttgtgtttcacagacattgaatatattaaattattccatattttcttttcagtgaaaaattttttaaatggaagactgttctaaaatcacttttttccctaatccaatttttagagtggctagtagtttcttcatttgaaattgtaagcatccggtcagtaagaatgcccatccagttttctatatttcatagtcaaagccttgaaagcatctacaaatctctttttttaggttttgtccatagcatcagttgatccttactaagtttttcatgggagacttccttcatcacatcttatgttgaaatcactttctgtagtcaaagtataccaaaaccaatttatctgaactaaattctaaagtatggttatacaaaccatatacatctggttaccaaacataaatgctgaacattccatattattatagttaatgtcttaatccagcttgcaagtgaatggaaaaaaaaataagcttcaaactaggt

SEQ ID NO: 23990 - DNA, 1040 bp, Homo sapiens
aaaatgaaatgtataaatatgacatttattataaatcatttaaaatgcctaaccaaaagcaatttattacaaccgagggagtcatgatgtctgcataaaatgaatgcaggccatttctgtgtagatatcttagtatgactataatgtggaaaaaacgtacttgtctaaggtcatttacagatttcattaatgacttgactattaagcagatggcttatgattaccaattaatttcattcatgggttcaaataaacatgcatgcctactatttaaatttctcttaattttgaaagaattgtgtataaatcacatatatgtattttaatctactggcagaatgacagatttgttcattgaagagaagtgtgttgagcactgtgtcaaactagacacagaaagccaaaggtaacttaagacgtaatccttactttcaaaaagttcacaacatagtatgtatgtgtggagaggggagggagggttgatatacaaacccaaaggtaaagtaagagctgttcaatattataggtatgataataaacatcctgtagcatttagtgaatggataaagaagggagtggtcagttcatcctggtggtgtcacatacgaaagttacattttcacacagagtcttgaaagtgtgtttgtattgcaaagtaagaagaggggaaggaagagcatttcagacagagagaacagagtaaactaagatctagtgatgtgaaataatggaggattcaagactctaacagaaacatggctcccacataaacataagaaggattgcagaagaggggggcagaagccagatcatgaaaatacatctatacattgctaagaagtttagcatacacagtacctttggaatattttaatcaggggaaagacgaagttatgttttagaaagaatacttcagtaacaatgtgacagatgaattgaaggaaagatgagtacagcattagagacaaaaacttgttgcattcgtccaagggaggaaagtagggtagtagcaataagcttggaggggaaaaagtggatac

SEQ ID NO: 23991 - DNA, 1032 bp, Homo sapiens
gattgcacaaaccaaaatgtatgtctgatgctcttgtttttctatgaagattttacagagtcattttcaatagttttaaaattataaataagatgcatacttaggaaataggatagaaaaatcacctgtgatccctcactcgttatattttggcatatgtctgtctgtctttttttttttgagacagagtcttgctctgtcacccaggctggaagtgcagtggtgcgatcttggctcagtgcaacctccacctcccagattcaagcaattctcctgcctcagcctcccgagtagctgggactacaggtgcatgccaccacacccagctaatattttgtatttttagtacagatggagtttgccatgttggccaggctggtcttgaacttctgtcctcgagtgatctgcctgcctcggcctcccaatgtgctaggattacaggcatgagccaccacacctgccatatatttttgtatatttcttttaagttttcttaattatttgacttttcagatctatatggatcaggactacaagaaacaacagaaatttagaaagttttctacacaattatacttaaggattgctattgaatttggctgatggaataagtatggccacatgttgtccagcaagaaactttaaaacattttttttggttctataaattcttacagaagtaaatgagccagtctcttctacagccgtgacgaaaaggcttcatgagttagaatcaccagatttctatgagacaatccagaattagatttttatatcttgttcatgtgacagaacacttgtaaaaacaaaatggtattctcagcacaccccctgaaattggcacatttaattcaacatatgaactggaaccaatgttgttatttttaaactcaagagatataaatccactgtcacacacctgttgtataaataagtgaagttaactattaattttttaatgaatttactgctttcttgtttgctttgctgactctaggcaggtgccaagggaatacaaaaaatatatgagat

SEQ ID NO: 23992 - DNA, 1031 bp, Homo sapiens
agtaagatttccggaagcaagggaatacatgggtcatattcaaggaactgaaagatggttggaagagttcagtataactagagccagggcatgagggctgtggatggagtttgggagatttactttgggagttgtctccgtgttttatataggttatagatgttgtcgaaaaaatagaaaatatgagtcagctgaaacaacaatcatacatgtaccactcagatacattgctgagtttttccttcacctgtatcatttttgcaaaattggatcacagtaggttagctattttgtaacctgcttttttttttaatggtgaaaaacatatatatttagaatttgccagctggattcaacttagatgatcccaattttttggcagcctctaaaagcagcatgctcaggagccagctgaacatgggctttcttctctccatcagccctgatcacggtgttgatcttggccacattggtgtcatagagctcctccacagcctgtttgatcttatgctttttgacctcgacatccacaatgaacacaagtgcattgttgtcctctgtcttcttcatggccaagtcagtggcctgggagaacttgttggtcgcatagtggtcaggcctgggggagaggcaaaatggggtcacctggcctgggcccagtagaagaaaggcttggtcctctttcagagcccaaggccaggtgagcctaggtgcatcagacagtgaggtagtaattgtaacctttttttttttttttcactttgttgtacatagctttttttggtcaataaatatatattcacagcatcatttttatgaacggcataatattagttgttttggctataccgtaacttagataattcctctttattggataaagttgtttctcattttttttcattactataggaaatatacatatatctttgtccatttttatgatatttttaaagcataaattccaagaagtagaattcttgttgcatggtgcatacaattttctaatggccaaattgccctccaaagct

SEQ ID NO: 23993 - DNA, 1046 bp, Homo sapiens
ctgtcactcaggctggagtgcaatggtacaatcttggctcactgcagcttccacctcctgggcccaacctttccacgcacctcagcctcacaagtagctgagactacaggctcgcaccaccatgcccagctaacttttttgtatttttttatagagacgaggttttgccacgttgcctgggcttgtctggaattcctaggctcaagtgatccacctgcctccgcctcccaaagtgctgggattacaggcatgagccaccaggcccaaacagtttttacatttttgtcatttgtcttttcaaccttcaaaacaatctatctttttcttttatgatttcttttttttggtgttatccttaggcctccatcttactaggattatataaatagtcatctatatattcttctgttctttttatggcttaattttttactttggagtatttgacgatatatctgaaatgtactggatgtatcaatgtatttgaaatgccttattgtacatgaaatacttataaacttgctttcatttctggactttttgttttattgatttctttgttatgaagacaaggcattgttttaattaggctaactttaaaatgcattttaatatttagttacgcaaaaccaccttcatttttctttttttcaaaaatctctcagttctttgtgcatgattattctcctgtatgggatgtaggatcattttatcaagtttccttgcaaaaattcctatggggattttaatttatatgattaaatatgtagagtagtttgtggaccattgatgtcttcctttctggaatatggtattttctacatttacgtaggtcttcccttatgtctgtctctaaaatttgtagtttttcccatattgttcctgtgtatttcctggaagtataacacttagtattttacatttctttttttttttttgaaacggagtcttgttctgtcgccaggctggaatgcagtggcgtgatctcagctcactgcaacctccacctcccgggttcaagcgattcccctgcctcagcctcccaa

SEQ ID NO: 23994 - DNA, 1133 bp, Homo sapiens
gatttgctgtacccaacggccatcagtaattgaagccaagtagccaggcacagtggcacctgcctgtagtcccagctactcaggaggctgaggcgggaggatgaggcaggaagatctcttgagcccaggagttcaaggccagcttgggcaatatagaaagaccctatctcatttttaaaaataattaattaattttgtaaaaggaaataaatttttttaaaaattgaagcccagtgagaagtttatgtatttctagacattgtatctgttgacaaaatatgtaagtatttgatagaaatttttgcaataatgaaaataactaccattattgagtacttaatagatagctggctttgcaaaaccccctgtgtattatctcttgtaatcctcctttaagtcaggtactcttactgtccccatcttacagtgaggaagctgcatttgacaaggtcacacagctaatgggtgggagtttggagagtggagttgtggatctcagactcaggacactatctcctttggttcactcagttcaacagtttggttttttgtttttattttatctaattgtcattgaatctacaaatctgtcttataggaacaagtggtgatgaacttggacagcaggcttctgatcttccctttatatatctgctgtaacttcttgtatatatcaccagaaaaaaagaattgaaaataatcgtcacccagaaaatccagaaaactgaagatttcatcagttggaaacagtagcactttgaaaactttttaggccagctttaatttaatggccctactgatattcacatcgaaggtgactaacaatgacaaaggccttatgaactgtacagacaatacagaagattattcttatcctcattgcatttctatgcatatgcgtaagaacattttaaagccaagaaaatatctgtcaaaccatttctgttagaacgatgtcaattcatgcttttaatttagcatcaatagaaaattgctgtaggtaaatctcacatttatctgcaacaaaatatagatttaatttttagcttaaactttgtttctaccttatgttagtggacctcagttatccatctgtaaatttctttttatttggctaaaataatctaaaagaa

SEQ ID NO: 23995 - DNA, 1050 bp, Homo sapiens
ggtctccctgtgttgcccaggctggtcttgaattcctaggctcaagcaatcctcctgcctctgctttccaaagtgctggaattagtagcgtgagccaccaagccccacctggctctgagtcttaataaccatcaattgctgtttaagtcagcttttttgtatatttgtgtgtggttgttagaaacttttaatttacatttttctgccttccagaaagctttctagccctagttgtactgaatgcaactgatgattaagcagtaaactacattaaaaaatttttttgttaacaatcaaggccttggcagaacctttttcctcactttgctatacggaatgactcgtggttctgtggagctcacctcatgtatatctgtgctgattgatacaaagttgatatgtctgtctgtttctaacatctttgcttataaatattagatctccaagacgacatagatccacatctccttccccttctcgactgaaagaaagaagagatgaggaaaagaaagaaacaaaagaaacaaagagcaaagaacggcagattactggtaatgttattagataaataactgtaggaaaagtacagtgatgataaaattataaaagtttaatcttgaacatttaaatgttaagccttttatagtattcattgcatatggttttgagttttttttggtttttttttttttgagatagagtttcattcttgtcactcagactggagtgcaatggcacaatcttggctcactgcaacctccgcctcctgggtttaagcaattcttgtgcctcagcgtcccagagtagttgggattacaggcacccgccactatgcccggctaatttttgtatttttagtagagacgggttctcaccatgttagccaggctggtctcaaactcctgacctcaggtgatcctcccgcctcggcctcccaaagtgctgggattatagacgtgaaccaccgtgcccagcctgagattttgttttaattgcaccctagcaagttgctggttatctatggtgctcctgatatagaacgatagttaa

SEQ ID NO: 23996 - DNA, 1008 bp, Homo sapiens
aggctggagtgcagtggtgtgatcttggctcactgcaacctccgcctcccgggttcaagcgattcccctgcctaagcctcccaagcagctgggattacaggcacacaccacaatgcctggcaaattttcctatttttgtagagatgaggtttcaccatattggccaggctggtctcgaactcctgacctcaagtaattcacccaccttggcctcccaaagtgctgggattacaggcgtgagccaccacacccagccaaatttttgtattagtagaaacagggtttcactgtgttggcccagctggtctcaaactcctaacctcaagtgatccacccgcctttgcctcccaaagtgctgggattacaagcatgagccaccacgcctgagctttctgcagagcgctttcatcaatgtccttctctcttgtcctccctgcagaagaaatcgacgttgacgtggagagcacggactatctcacaggtgatctggactggagcagcagcagtgtgagcgactctgacgagcggggcagcatgcagagcctcggcagtgatgagggctattccagcaccagcatcaagagaataaagctgcaggacagtcacaaggcgtgtcttggtctctaagagagtgggcactgcggctgtctccttgaaggttctccctgttggttctgattaggtaacgtattggacctgcccacaactcccttgcacgtaaacttcagtgtcccaccttgaccaaaatcagctttgtaactgttttcaaggaggtgcttaggattgtgggtttctgattgcatccactagcttctctttttctcgccataaaaatttgtctctgagagactatacattccaatcaatttgaagcatccaagaattcttagaccgaataagcaatgtccacatctcagcaatccccctctttgctctcctcgtgtcctctcccagacctttcttccagttttctggcttactgtgttacttgcctaggaggaatgtcca

SEQ ID NO: 23997 - DNA, 1034 bp, Homo sapiens
cagtgaatcatgatcatgccactgtactccagcctgggcaacagagaccatcttaaaaaaaaaaaatccttccattgaatagaaacttcaaagtccttcatcagatcatggcattagctactttagcaaaatagtgtaaactttggttctgagtaaaaatgacttcttccctaccacagttgtgaatgttaatatgctgataaaactgccaagatatatttgataggtaggggattaaactcatggtttgtcaaaagagtgtttttttctagttttattcttaacagatatgttgaggtattcatatttgtttccttttgtggttttaatgaagacaatttgtaaagtaatactgttatgtatatgctaaatgttggtaaatactaattaatttccatcatttgtagacttgttttgcaatgggatatatttttacttataataccaatttaggctgggcgcagtggctcacgcctgtaatcccagcactttgggaggccaaggcaaacggatcacgaggtcaggagatcaagaccatcctggccaacatggtgaaaccccatctctactgaatacacaaaaattggctggacatggtggcgcatgtctgtaatcccagctactgtaatctcagctacttgggaggctgaggcaggagaattgcctcaaccgggaggcggaggttgcagtgagccaagatcgcaccactgcactccagcctggcaacagagcgagactctgtctcagaaaaaaaaaacaaaaaccagtttaggctgggtatggtggctcaccagcactttgggaggctgaggcaggtggatctcttgaggtcgggagtttgagaccagcctggccaacatggtgaaaccctgtctttactaaaaatacaaaaattagccaggcatggtggcgtgtgccagtaatcccagctacttgggaggctgaggcgcgagaatcgcttgaaccctggagatggaggttgcagtgagcagagatcgcaccactgcactccagcctgggcaagagtgagactg

SEQ ID NO: 23998 - DNA, 1134 bp, Homo sapiens
agcagcgaatgggaccgaagcggtccccgtttctccgcctctcgggccagtcccctagttctaggcccattcggaacggctactgtggcgggggcagaaatggagtgcgggatgctgagagcctggactccgtcccgtgaccctcaaggcaagtgcggagaaaagcgtcttgcgcgctccgcggggacaggacgtggagggagcagcgtcggcaaccgcgggaggaaaaggccccggctctgcagggcggccggggtgcttcctcgcctcctgcctagccgcgtttcccgtccccggcaatcgggacccgcacggattgcccaggggagacggcgcgggacgcggagggtggcgtgcgcggcgctagcccgctgtgcttcactctctcggttcccacttcctcgcggcgcctgggcccagccggctctcggcgccgccttcccgcggcctggcctttcacgtccttctctttctccctcggccctcgtcctcctctcgtctttcccggccattcctctcagccgaacgcgccttcccagcaccttcttcctgcaagctcctccatctggactgcgaccgattacccagctcttcccggcctcctctccgcgaggccgaggctccccaggtccccagcgccagcctttcgcaatgccaagggctccgctttccctcgatctgggcctcgcccggcgagatgagaggagaaaggggactccggggtcttgccctcagcccgaccccaggccgcggccagagcctgaagtccgctgcctcctccatccctaagccctgggaccgggagacccagcgccagaagaggccactggcggtaatggctcccccaggctccttcctgggctccctcctcccggcttcctcctgctgcctctttccagcctcttcacacgcgccgctcgggagagccactgggcctctggaggctaccggcccgagcggatttctttggcctccgcctggggaaggcgaacaggctggaagctggccctgggtcgttccagcgaggggattatgtttgatctgagctcggctaccctcaagctgactgggacaccctgggccagttgggcactacctctctgcggctgctgggtgtgggtggcactggggact

SEQ ID NO: 23999 - DNA, 1079 bp, Homo sapiens
ttggcccctgaatgaacattccttccataggccttcaatacactttgcccttgacctcagagaacacatcctcccaaagagcctttggaaggaaaccactaaaaggtaaaagggaggcatttgcccttgctgtcctatgtcaatgttgggttggggcctccccaggacctgtcctttcttggggaggcctcaccccttctgggtcctttctgcctccctttcattctgcactcctccacctaagggcataccacaggggggtggggggcaggtttgttgagggagtcctttggcacagggagtaggaggagagcttgggcaccagagttaagcaaaattggtttagattactgaccttatagccctttaaacctgaaccagtttctttgtttctctttgcttgtttccttatcttacaaagggacccatagcccttatcttaaaggacttgccaagaatcagaggtgatgtctataaaattgcaaacacccagtaggatcttcataaatatttgttgacagaaggaagggtgtagctctgaggtgacccacgaaccacttttgatgggtggggcagtggaccttcgttgtctgaggcctctcccaagtcacccctttccccctccttctggctctgggcccggggcctgggctgtactggaggtgagcacctaggggttaagaagccactaatggtaaaggaaaattagcaccatcttgcagaccacacagtgcagccctccccaatctccttggtgggaccctttttgggccagtgactcaagcctctgcgaatacagggtggagagccaaagaggccaaacgtggtgcgtctcctgcctcaaaatgaagactcctacatgtcacacatgggcacggaccagagctgctgagatgataggccgggcgcataacaggcaccccgcacatcgcaccgcggacgcagcgatcctcccatttgtaccctaaggcctgagaaggccgctccacacctccgcgtgcacagtccctagaccagtgagggcggggacggggaaatccttttgttttatattggaaaccttacgccaaaggcaggca

SEQ ID NO: 24000 - DNA, 1632 bp, Homo sapiens
ctcctactatccctaacaagctgtcctgcctccgtttccctatcagtggcatggacgtacctaacctcctcagaggaaggctggaccacagcacggctgtacctaacctcctcgagggctagactctccccaccctcgactctcacaggatcttcttttaacgggaaagaggaggaggtggcaagtcaatgccaactaaattttctagggatcttgatggcctccaaaggcctttggaatatctcagtctcagcaacatgggtggtaagtgaagtgggccccaccaaaggtaagtgggctgtgggctattttgtagcccctgggaaactggcagacactgacagtatcttgagtcctggggttgggaattcttgagccataaagagccctgcaaaggtacaagatcactctcttatcctccctccaccaaccagccccactccctcagcctcccaccccacctcctagctgagcaaactggaagtctcggtgcccctttgacccctcttgtcccagaccccacacctgccagcgcccatgtctgtagctccctcccaccccactgctaccttgtgatggcgatggccttgggctcccagcctggcaccctcctatcctgtctccatcctccagcccttcagacctgacccttgcatcaaatttgcccagggctctccagtgccctcagcttacaggtcttttcttttttttttttttttttgagacggagtctcactctgtcccccaggctggagtgcagtggcgcaatctcggctcactgcaagctccgccctccaggttcacgctattctcctgcctcagcctcccgagtagctgggactacaggcacccgctaccacgcccagctgattatttgttttttagcagagacggggtttccccgtgttagccaggatggtctcgatctcttgacctggtgatccgcccgcctcggcctcccaaagtgctgggattacaggcgtgagccaccgtgcccagctgcttacaggtcttttctatgagggtgcctgcaagcctttccactcactctcatcactctcccttccctgtgtagaaaccaacacctgaaatagtgtctgcatggggctgccatttgagatctctgggcacttgcatgtcattttttaaaaatgtgatcagtaatgtatgtttattaacaaattaaattacgagatgtcaccgccagtttcactgctataattttaaagcagtgatgagcacaaatactattttgagatacctgcaacgactgtaatgtggtatgaaaatatctgtgatttctgatggtaacaaagtcacaggtaccgtggaaatgctaattctaccgtggtttgttccttacattcagaactagaggaaacactaaatttgcgtaaacgttaatgaatgtaaaaatgtaactttcccattcaagatcacagaagccctgagttctctctgtagactctgagataggttctaggcaaagaacccttctcacaattagttggacaagaggatagagtatgtagaaaggaatgacaaagaatgggggattgtgtctgtgcattttataatagacacacaataattgtacatattcctgaggtacacagtgatgttttgatacat

SEQ ID NO: 24001 - DNA, 1197 bp, Homo sapiens
tccaagtagctgggactacaggtgtgcaccaccacacctggcaatatatatatatatatatatagcattttcagtagaaacggggtttcaccatgttgcccaggctggtctcaaactcctgatctcaagtgatccgcccacctcggcctcccaaattgctgggattacaggcatgagccaccacacccagcctgagttctgtatatattctggatattagcctgatttttaaaatccttgatccctggaaggactgcgtgagtcaattctagtcccatgccactggtatcgaaggacgcctgagcagagggaagcactttgcgagtgtgtttacccctagtccacagaggcagaaacagatatgctgtccaggatcccgaggcagcccagtcattattacatctttattgaggttttacaaagtgccaggcaccatgctaatggatctgcatatgttatctcatttcctccctgcagcagccgtgggaagtaggtgttattattatccacattttaaagacgaggaaactaaacctcattacttatgacttacgtatttaatgagttactgaaatcgtaaagtaacttccacaaggtcaggcagctactaagcttcagagtttcagctgtaacctggtcttgcaactctgaagtgggtgcaactgcctcccaaacagaattcaaactttcacttcccagccccttgagttcatttccacaagtgtctggacactagaggggagagaacagtttgggactgggtcagggagggccggaggaggagaagggactttgcctccagtctcactgtcacgtggctgctctcccctcctgccagtttgcccagtatgcggagatcgtccacttcaccctcccagatgggactcagaggagcgggcaggtgcttgaggtggctggcaccaaggcgattgttcaggtgagtggggtcaatgggacattggctagttaaatcaatgaattaacccataaagttcccacactatctacaaactctgaaggcaggaaatggtctatttccctgagagcacagaaagtgcccagaatgggtagccccattccctccagcaggccccttagtggagaaactccctcttgttcccacaggtgtttgaagggacatcagggatcgatgccaggaagaccacttgcgaatttacaggggacatcctacgaact

SEQ ID NO: 24002 - DNA, 1058 bp, Homo sapiens
aaattttgatgatgagcagatttggcaacaactggaattgcaaaatgaaccaattttacaatactttcagaatgcagttagtgaaacaattaatgatgaagatatcagtcttctcccagagagtgaagaacaggaacgtgaagaggatggttcagagatagaggctgatgacaaggaggacctagaagatttagaggaggaggaagtgtccgacatgggtaatgatgatcctgaaatgggtgagagagctgaaaactcaagcaaatctgatctgaggaaaagccccgttttcagtgatgaggattctgaccttgactttgatatcagcaaattggaacagcagagcaaggtgcaaaacaaaggacagggaaaaccaagagaaaagtccatagtagatgataaattcttcaaactctctgaaatggaggcctatttagaaaacatagaaaaagaagaggaacgaaaagatgataatgatgaggaggaggaagatattgatttttttgaagatattgattctgatgaagatgaagggggactgtttggaagtaaaaaacttaaggtaaagttttgagagaagagagagcactttcctcctcaaattagcttttcttctgtttttctaggagagatttaattgtagttagaagatttagtgataagaaatattgtgctctatcttatcagttataaatgaatctgtacttccattcaatttatgttccagttggtcttataattttgtggtagtgttattagttgccattttcacctaataattatttagttattagtttggttattagttattagcttgtagtgttattaagtcagaaagtaatatatacatacaatatacatgcaaatctatatgcatgtgttaatatatttttctatccctaattaatagtttttaatatctttttattttagtcaggtaaaagttccagaaatctgaaatacaaagatttttttgatccagttgaaagtgatgaagacataacaaatgttcatgatgatgagctggattcaaacaaagaagatgatgaaattgctga

SEQ ID NO: 24003 - DNA, 1081 bp, Homo sapiens
agaaataaattgtaggttttgttatgttctacctgcactttatgtttcaggcttgggatgatgtagtacgtaaagaaaaacctaaagaggatgcatatgaatataaaaagcgtttaaccttagaccatgagaagagtaaattgagccttgctgaaatttatgaacaggagtacatcaaactcaaccaggtgaggaagcctgtaaggccaagccattattattaaagaaatagaagtagagaactaggctttttgtgactgttgaaatcgtgaaacagaaatcttgagctctttggctacctcatgtaagtatgagacagagcatgctaggaatagaagggttctaatattcccgctggatgtgaggggttgaggggggttgctttgcaattagactttggtcacctgatacttttacaactcattaactttctagcaattatggtggtgctacaactttaaaagcatttctcattgatattttgaagtaactgatatattttacatgattatgaattcattctgatttttaggtctgttttttctttcacttaactaaaatctctgggctgggtatggtggctcacatctgtaatcccagcactttgggaggctgaggcgggcggattgcttgaggtcaggagttttagacctgcctggccaacatagtgaaaccccatctctactaaaaatacgaaaaaattagacgggcgtggtggcatgtgcctgtaatcctagttacttgggaggccgaggcaggggaattgcttgaaccagggaagtggaggttgcagtgagcccagatcgcgccactgctctccagcctgggcgacagagtgagactccatctcaaaaaaagaaagaaagaaaggaagaaatcgctggttaaataataggacaaggtcctattcctaggaatattatatgctgatataataatcgaattattccttcacatttgatttattgggaatgtgggtacttagggatcagatggcatttttcttctgcaaaagccatttacgattcccaccagattttgttaatgaatgcccctcagttagcaacagcaaattgccctg

SEQ ID NO: 24004 - DNA, 1085 bp, Homo sapiens
tagtttgaagggaaaggagtgcctgtttcttaccccataaggactaggaaaagggattgctggcttgagaaagaggtgctgtaagttatcctctgcggccagaattctgaggattggaagattatggattttttaaaaaatgaaggcatatagaggaatggtagactactgtaattattcttaataggatgttgggaaatacaaatgctgacctattttattcagtaattaggggaagcttaagtactttaaatgcacccttttaaaattgccagtgttactgtgaattgtcttgtaaaaccaaaaagcacccccaatttagcctttctgtagatcttttacatatgcttaaaggatttgggtcgggattcttagtgtctttgtatttaattttgtgtcttcgaggaaggggagctatgaaatgtagtacttccataccttttgcctctggggacgttttttggtggcaaggaaaacttatttagtgctgatttacgggaatagaatggtttaaggaatttgttggagattgctcgtttaaaaaatgccttgggttcattatgatttggtaaattgtacggtattgctatatttcatccaaaataattttccatttcagggtaaacatttgaatgtacattgacacttctatttcctaaataataagttttgacctttcttattttgttttcggtcatcagttttgaaggattattttttcccaaatttgcttaggtttgctttcatccacaaccacgtgcccaggttctaaatttggaatggtgctaatagtgtcaaatgtgcaattctgggtaggtatatgtgggtggatgggatggcttataggttgtattaaaattttattttttttctccgttgaaatgtcagccccaccagaaactattaatattatgacattatctccttcaagaaatggatgtgatgataaaatgctttagtaattttgaatattataatattatgaccactaacattaaatgctgtgatttttaaaaatggctttcaattagaaggttttgataacttgagtctttctgtcatctctcagtaatgtgccattacta

SEQ ID NO: 24005 - DNA, 1031 bp, Homo sapiens
ttaccagtttacatagacaccatggcatatgaggctgcttagttcttccacatcttcaccaccactagatattaacaatctttctcatttttgccaacctgaggagtgaacaatatcttattgctgtttgataacgaatacatttgaggatcttttctctgttggctatttgcatttcttttcagacttgcttgttgatatcctaagcctgtttttttttttttttttttttgttttttgtttttttaggtacagtgaaattgaattttttcccttttggggtacagtgccttgtattttaacacatgtatagatttgtgtaaccacaaccattgtcaggattaaaaaaaaaattccatcacttcaaaaaactccctcgtgctaaccctttataatcccactctccccccaactataacttggcaactcctgagccgttctccatcactatagttttacatttttgagaatgtcatataaatgaaatcatatagtatatcacttcttgagactggactcttggactcagcataatgtcttcagattcagccacattattgcatgaatcagtagttcattcttttgattgctgagtagtgttccattgtaccaaagtttgtttatccatttgctcattgaaggacatttgggttgtttccagtttgggtttattattatttattatttaaataaatcagctatggacatttgtgtacaggcttttgtgtgagcataagtttttatttttctaggatactcaagagttggcttatacagtaaatgcatgtttaactttataagaaagtgccaaactattttctagagtgactataccttttttctgagatggagtctcgctctcttgcccaggctagagtgcagtggcatgatctcggctcactgcaacctccgcctcccaggttcaagcaattcctctgcctcagcctcctgagtagttgggattacaggtgcgtgccaccatgcccagctaatttttgtatttttagtagagttggggtttcaccatgttg

SEQ ID NO: 24006 - DNA, 1705 bp, Homo sapiens
gcggctccgcacaaaatggcggcgggcagacggcgggggcgggaggaggttgggggacccccgggatgggaagggaagctgtgctgtgctgccctgctccgtcgtttattcacttcgctacccgggagggcccgtccgggtactcgtgaaggaccctgcctcgagaagagctgcctgacgccgttgcactgggccgaggatcgtgaagagccctttggcgaggccgaggcggccccttccccagcagcgcccggcctgccgaggctgcgctgggcctgacagccgaggaagcggtggtgagggaatgccgagcagggaggaagcgttcccgtcgggcccgaagaggcggtggagtttgagccgagccctctgaccagcgacattgtgcaagaagcgtggagagaagagcgtgtttgtgtttggggttggggagggggtgtcgggatgaaggagggaatgttaggatccagcggcttttccgggctggtgttctgtgctgcgtagtgcaggtatgaaaccaaagaaaatatcacctctgtgggagactgaggactcataaatggttgtgatacctaacagtatttccaaatttctcagaggaattgtgaaaacagaacgttagtgaattgtttttgtgtgattcttagcttgggccccgttctcttaaaggaagggggaatgtatatatcacagactggaatccttgagaacgtttgaaatagatcttttgttgtttgaggtaattgttaatgagggatacttcagtattacaaaatcatggattgagctatagagtgaaggctacctgaagctaatttttcttaatcttaaaatttgtccttaggcgaagtttggggccaggaccagaaattgtagtagtttaaaggagtcccgatgaaaaacttgtcaccaggatccagcgatttatgttcaagtactttttccaacgagctctggaattttgcacaaaaaattttctgctttttcccctcatttgttgtaaaggattattttttcagggatgttgtgcttgctggttcagatttacaattaaaaattgataacctggagaaaaggattgaccaaaaaaaggtgaatttaaggaagttttcggagaaaaacaaacatgtaaatgacattcaaatagctttaaattttgttaatgattagacatttgagacttagtggacttatgttgctgtcttttaaaaaagtttgacagcattttatattttattttgtactccatattctgtaatatgtacttctaaataattacagggcgtcccagcatgttatacattaaaatatgctgggccattccttccttggggatttatttgtcttggaaccaagaaagggtaaatataacagttggaagaaatcacaaaatcttattcgtttttattaactagttttcataatgtgtttatggtcacatatttattgtatattggttgtatttgttttgtaatccttttttgcattttgttttggagggtgtatacggcaggtactctaggttaaaaaggtttaggtactgtagtttaaaaaagtcatcactttgtacttgactatcttagggtttttcttgggtgctcttaagtaggtgatctccggaaattttgtttttatgtaagtggaagaaaatgagacaagtagtttagtggaaagagaataggctttgcagtcggaagatctggat

SEQ ID NO: 24007 - DNA, 1072 bp, Homo sapiens
gatgaaacaggcttggattaaccagcttgctccgggtaacattgttagcaagcagtgggaccagagttatttcacaggatgaaataggcttggattaaccagcttgctcagggtaacattgttagcaagcagcaggaccagagttaaaacactgaatgtagggtctaagttcttaaagactgtgctgcactacctctctaaagctgaattagtagtgctaaattttacttaaggagttaactaattttgcatgaagtcattcactggcacccctcctagcagggtgggtatcttcagatcagtggaaatttccccaaagattagattattatggattgcataataggctgactaacagtcaatagttaggaagtgaacatgatgtagaaaagaagggccaaatccaaaaatgtgtttaaggctgatgctctttattatactgcaggttttctgcctcttgccatattgcctatagttttttttttttttttgactttgtataaagtaagaagatcacatagtccaatgttggacatgaaatgttgtgccattaactatatttgaatgaatttaagtgacaggtggtgggggagttccctgtctcctgcatatatggttttttcccgaaaagtttgacattaagttgcatatattgtggtcctttatctctaaatacttcagtgtgtatttcctaaaaatattttctttcacagtcatagttaccaacttcaatgaatttcacgtttataaaatccttttttatttttttgaggaagtgtctggctctgtcacctaggctggagtccagtgagtgatctcggctcactgcaatctctgcctcctgggctcaagcgatcctcccaagtggctgggagtactggctcaggcgcgcaccaccatgcctggctacgttttatattttttgtagagatgggattttgccatgttgcccaggctggtctcgaactcctgagctcaagcattccacctgtctcggcctcccaaagtagtaagattacgtgcatgagccaatgcgcagcctataaaattattcagtctactatttgtattc

SEQ ID NO: 24008 - DNA, 1027 bp, Homo sapiens
tgttataatactgacaaacgttactgaaatttgttttttttctgttagattgttggcactttggctataggaacgcaactgtattttatttggctttgaaactaaaaagtagcctggtgactgtcatgttaggctctcagaagatatttaatacattgagtgaataattctgagcttactcctttccactaaaaacaaaaaggggaaaaagaagggtctgttaggatgtatctcctcaccccaccccacagtggcatgcaggatttagatggaaacttgtaagaaggaaatttgtgacctactgtcattcccaattaaatgttcctgcctgccaataagtaaaacagaaacaacaaaaatcagtgtttagcaaaattgagatgtatggaagtgatcgagtagaaggcattaggcatgtagcagtgtaggagagccagtagctaaaaattaaatggaatagaagagagattagattgtctcctaaccatgtgaattgaggccttaaaaatgtagattctgacacccctaaatagaatttcttaacctttttgggtcatagacctttttgacaagtagatgacagactcttatagtttgaatttgaattttctgctttctgctcccctctccccaccaaaaaaactcacgttttcctgttgtatcacaccatctcctgttaaaattaacagcttgccgccaggcgcggtggctcatgcctgtaatcctggcactttgggaggctgaggcgggtggatcacaaggtcaggagatcgagaccatcctgggtaacatggtgaaaccccgtctctactaaaaataaaaataatcagccgggtgtggtggcacgcacctgtagtcccagctactcaggagggcgagacaggagaattgcttgaacctgggaagcggaggttgcagtgagccaagatcacgccactgcactccagcttgggcgacagagcgagactccgtctcaaaaaaaataaaaataaaataacagcttgccctctacttttagtatccaaat

SEQ ID NO: 24009 - DNA, 1047 bp, Homo sapiens
tcctatcttttttgtatggattctgattctggtcattaaaagcctttacgtagtagtgtccctttttctgagggagatacgttctaaggacctgccagtggatgctgaaaatacagatgtactatagtttatttgaccagtttccagtctctctgcaagcttttataattgcagaagcatgaaaagggaagttttcaagagatttctaactatatattgtatcattttggttaccctaatttcatgagatactagctccatcttaaaaagtagagtgttagctatatgaaggagagatctgttctggctgtaatatctttggtcagtaattattttgtatgaataaaggctgaatttgaacttattctctagatttattgctaagaaaactttctcaaaatttcttgggagtacttaacatttaaaaaactgtcttgaatggcctgatacttaatcttgtaattttattcccttgaattgattgagaaggacatacataaaagttaagtgacaaagtagaagtgctgttggtggggcacctaagttaaatttgaaaaaataaggcttcagaattatgtaattgcaaaaggaaactataataccttataaatagaaagcttgaagtataaataacaagcatccttttagttaaaacattttatttggagtggatatgaatggtagaagacaaactttgctaaatgattaaaaatgtagctaacctttttaattaaaagtgaaaattgtgcaaatgaaatatgagtatacagtagtctccccttatccatggctatactttctgcagttagttacctgtagtcaaccaccatccaaaaataggtgagtatggtatgagaatgacattttgagagcaaccacattcataaaactttcattatgctatattttaattatttttaattgttaatctcttactgtagctgatttataaattaaatgttatcacaggtatggatatataggaaaaaacacagtatatataggatttagtaccatctatggtttcaggcatccattggggatctt

SEQ ID NO: 24010 - DNA, 1050 bp, Homo sapiens
ttgtagaagaccactcttagagtactctagtattctggagaatacagtttgtcaggggcagttgtcttaaccttctataaatgtgtacttgaatcattgtaatgcaatgttgggcacattaggaaatacacagtacatttttgcctttaaggaattttaaatggagattgttccaaatgatacttattcacaattccatttagtaattagatcactctgattgaaatttgttcttttgctgttttattttgggggagaaacattatttgaaagagcttgtgcttatgaagttataagaggagtcttcaccaaatggaataagtggttcagaaagcattgtaataactacatgataaactgcttacataagcaatgcgtatcttttaggattgggtgaagacagttgtttttggaagatattttattatgtagaaggtaggcacaatttcatatgattcatgattgtttaaaaagaccgtgagtttgttacaaatgaactttttaacagaatgtaggtatcattgtttggtaagcttgtgtctgcagcttgtatctggtgaatcaaaagcctgtgtatttgatgtgtttttgtgtttcattctaatttgaaaattaacctgtgcatgttactaatgagtactttggatgtgaccagatagtttaacaaatacttgaggatcttttgagtaggagtagggtttatatgcctgggggataagacttagccatgaacataaaccttcaactgacattaggttgttgaaaaagaccatgtgtgtgtgagtgcaaaaacataagatagtaagaatccaaaaatggtgcaagcaataaataaaggttattgaatgccgggcgacgtggctcataccccagcactttgggaggtcaaggcaagtggatcacttgagatcaggagtttgagaccagcctggccgacatgacgaaaccccatctctactaaaaatacaaaaaattagccaggtagcatggtggcacatgcctgtaatcccagctactcgggaggctgaggcaggagaatggcttgaaccc

SEQ ID NO: 24011 - DNA, 1083 bp, Homo sapiens
atgccgttgcctcacatggttcaacaccaccttatactttattaaatcaggctttcttgaaaatagccatgtcgagacccaggtttaatcctcgaggagactttccacttcaaaggccacgagcacctaacccttctgggatgaggcctccaggaccatttatgaggcctggatctatgggtctcccaagattttacccagcagggagagcacgtggaattccacacagatttgctggccatgaatcttatcagaacatggggccacagagaatgaatgttcaggtaactcaacacagaactgatccaagattgaccaaagaaaaactggattttcatgaagcacaacagaagaaggggaagcctcatggtagccggtgggatgatgagcctcatatatctgcatcagtggcagtgaaacagagttctgtaacacaggttacagagcagagtcccaaagtacagagccgctatacaaaagagagtgcctcaagtatcttagcaagttttggattatctaatgaagacctagaagaacttagtcgctatcctgatgaacaactaactcctgaaaatatgccattaattttgagggatataagaatgcgaaaaatggggcgccgattacctaatttaccttctcagagcagaaataaagaaacacttggtagtgaagcagtttcaagtaatgtgatcgattatgggcatgcaagcaaatatggctacacagaagatccacttgaagtacgtatttatgatcctgaaattccaactgatgaggtcgagaatgaatttcagtcacagcagaacatttctgcatctgttcccaatccaaatgtgatatgtaattctatgtttcctgttgaagacgtatttcgccaaatggacttccccggtgagtcctccaataatcggtcctttttctcagttgagagtggaaccaagatgtcaggcttacacatttcaggaggacagtcagtccttgaacccataaaatccgtcaaccaatccattaaccaaacagttagccagacaatgagtcaatctctgattcctccatctatgaaccagcaacctttttcgt

SEQ ID NO: 24012 - DNA, 1064 bp, Homo sapiens
ctgtgtaacgtagaatgtagtcatttgaaggtgagtgtttttaaaaaaagatcactgtataatgatgctcagcgccagttttctctaaattctgatatgtatgctgcttgttaactaggcgttaaggaaatggcagaaggtaattttaattgcaacctcaatacatagttgtaatcttaagtagccctggccttagtactgaattgaattttaggcttactgtattcctatgaccgggcacaccatattttagtagtgtgtccatttattttgaacttttagttatcccacttacgcaacataaaatttatgtaacataagctgcgtacttacaagacaatgtcacatggaatcacctttctctaaaaggatctgttagtataaaaatacaaagagatggtataacccatttgtaatgcacacatttaagagacagtatattatagccttgcacatatacacctgtcttgggataaagacaattaatgttgatttaaatatttcctgactttatgtagactagtgatttttagtattttttgagaagaagctttctaaaataacttcatagcaaaaataagtcaaggtgcagtaattattctgggaccagctgtggactcagaaaatagtgtaaaatgatagaaatttgtagagaaaaatctttaaaaaataaagatgatttaggtagtttgatagtatagttagaaggaagtattttgcagaggcagtgaagtgtactataatgtagaacatactgttcagtcgtaatcattggtagatttgagcaggaatttccaagtaaattttatttacttacgtatggttggcaatcactgtttcttctatttactaatgtgatttatagatttagattgtaaagggtcagaagagaatatactaacatgggaaaaagctttgattcaaggccatggcctggaattggttgtatacttaggcttaaaaatctgtgtgttaacgctcttgttcttttcttccagtgctgcctttcgattttcttttcattatttactcactaggttttcgtcaacatgaatctgataatt

SEQ ID NO: 24013 - DNA, 1050 bp, Homo sapiens
aatttaggttcttcttttaagctcaacattaaaatgtgtggaagaaggtactatagtgctacacatttcactaattttgttttgggaattacagttggtttttataaaaatatttatgttaatatgggaatttactttttttgccattactttcagtggcaaaaactgcagttacttttgcaccaacctaacatatgaattgataaatatttttacaatttaatttctaatatggtaaatatcagtaaatataacacaaatctttgtagtcttcaataagtgtaaagcaatctcaaaaccaaaagtttgaggatcactggtataagggaataaaggaacttcatgtaaaagccttctgagtgcataaaatctagatttttgtattgtctgtgtgctccctgtttagcttgagaatagcactatgtgattatgtcatgagatggctcctaccttaatttttttccaattgaaattatatttatatctttttactagatagaaaaaaagcattagaagatgtagtacaacgatctgggcatgggacagaatttaataaacagaagcatcttgaagctgctgataagggacattcaccagcacaaaagcctaaaactagcagtggaacaaaaccatcagttaaacctacaagcgctacaaagagtgattcaaatctaggaggacattctattcgttgtaaatcaaagaatcttgaagatgacactttgtcagaatgtaaacaggtgtctgataaagctgtttctctccagcgaaaggtaattctttaattaataattatttttagagataaggtttcactctgtcatcctcgctggactgcagtggtgcaacaagcatggctcactgcagcctcgatctcctgggctcaagtgatcctcctgcctcatcttcccaagtagctggcaccacaggcgtgtgccaccatgcctggctaattttttaatttttgtagagatggggtcttgccatgttgctcaggctggtctcgaactactaggttcaggcagtccttccacgtcagcttccctaagt

SEQ ID NO: 24014 - DNA, 1573 bp, Homo sapiens
ctgttgttttagtttaacttttttgtttaagtatggcacacatatagaaataggcatagaaacataaatgttagctcaacacattatatgtgcattaattcaagtatgttgaaattaaaacttcctcatacatgtatggtgctatatacagtattaaataacgacgactaggagaaaatacttgccatatataacacaaaaatagcaaacatctgtgaatctggtacctaggtcacaaaagagaacatttgacagtatctggaagtcccttgcttgcttcttcccaattcttacaccctcccttcttctcacaagtaaacactaacttgatttctaatgccatagttgagttttgcctgttttcaactttacataaacaaaatcgtatagtgtacattctttgggcctttacttccttagaagtatcaagttttgtaactttaatttttctagatcatttctgtgcttcagttcatatgatcgtagataatatctatagaattactttaaattaccctttaaggatgagctttctgttaagtaaaaagctatatgtatatctcacctgtaaggttttctttgtgtatgtgtgtgttttttaaaatagggtgttgagaaaatatttttatatcttaaaaaaaattattgtatttttaatttttgtgggtacatagtaggtatatatatttatgaggtacatgagatgtttagatgcaggcatgcagtgtgtaataatcacattatggaaaatgggatatctgtcccctccaacatttattctttgtgtatcaaataatccagttatactcttataattgtttaaaaatgtaacattaaattattttttactatagtcactctgttgcgctagctaatactgggtcttactcattctgtttttttttggtacccattaattatcccctcctctaccccctgttacccttcccagcctcataaccatccttcgactttctgtctccatgagttcagttgttttagagcccacaaattgtgggattttttagataccacaaataagtgggaacatgtgatctttgtctttctgtgcctggcttatttcacttaatataatgacttccagtttcatccatgttattttaaataactgaatctcattcatttttatggctgaagagtactccattgtgttatgtaccacattttctttatctattcatgtgttgatggacacttagtttgcttccagatcttagctaatgtgaacagtgctgcaagaaacatgggagtacagatacctcttcaatatactgatttcttttcttttgggtatatatacccagcagtgggattgctggattgtatggttgatcctatttttagtttcttaggacccttcaaaatgttctccatagtgatcgtactaatttacgttcccaccaacaatatactgagggttcccttttctccacatcctggccagcatttgtttttgcctgtcttttggataaaagccattttaaccggggtaagatggtatctcattgtagttttgatttgcatttctgtgatgatcagtgatgttgagtac

SEQ ID NO: 24015 - DNA, 1702 bp, Homo sapiens
ctgtcacgagtatctgctagagatattctttagtcagccaatcatatggcattgaaagtgagatacttgggaatttttttaagtttaaggtctaaattttggaaagctaaaatacttccttgcaatataaatgtagaaagaaaaaggagcctataaacaggactgagaaagtgacaggtgagaaaggaagggtacttgataattttttgagatccgctcagattgaagagtgacaggaagagttaattagagcagttttaaggataaatttgattataagcacagggaggaagcaagagtgtaatttgatcatgaatggaaacattcgagctcttacccagtactaattaaaaagaaaaatagtaattactgagtagctattatatgcccatgatagggggcactttgtagaggcttaggatgtatcagtggaccaaataggcatggctgtccccagacagtttacatttttaacttgaggtgacaaatattaaatataaaataaacattaaataatatgagttttagaaaatgagaagttctgtgacacaaagctaaagcagaaccagggtaaaggtgatgcaggattagtttgttttaaagttagaatttagtgtacaaaataaggtaaaaatgacttattaagtagacagacctactaacataatctgtaccagaagagagaaaacaaagaaaagaagcctcacatttgtgggtatgatatttatgctggacacatgggcacatagtatatttatgttattttgtttaatctttcaaaccgttctttgagttgtagttaatgtttggctgggtgcgatggcttatgcctacaatcccagcactttgggagtttgaggcgggtgcatcacctgaggtcaggagttcaagaccagcctggccaacatggtgaaaccccgtctctactaaaatacaaagattagctgtgtgtggtggtagtagtcccagctactcaggaggccgaggcacgagagtctcttgaacctgggaggcagaggttgcagtgagccaagatcgtgccactgcactccagcctgggtgacaagagcgagactccacctcaaaaaaatatattgttctcattttctagaagagatagattcagaaaggttaaatgagtcagggccacatggaggagttagaatttgaacgcaaaactttatgattccaaagcgttgcatatactaaattacctccctcaagaatgaaaacttcttgattttcttggatcactacttttctccagcctttctagttttcctaataatcttttcctcttctcatgtcatgcttttcttcctgggtggtttttttttttttttttttttcttcttttattgagatggagtttcactctgttgcctagtttggagtacagtggcatgatcttggctcactgcaacccgtgcctcccaggttcaagtgattctgcctcagcctcccgagtagctgggattacgggtatgcgacactatgcctggctaatttttctttttttttttctttttctttttttttttttttttttagtagagatggggtttcaccttgttggccaggctggtctcaaactcctaaacttaagtgatgcacccacctcggcctcccaaagtgctgggattacaggtgtgagccaccatgcctggccctcttcctgggtgatttctttcctgtcagtctt

SEQ ID NO: 24016 - DNA, 1043 bp, Homo sapiens
gggggaacaggctaatacatcaaatactgacaaagacactacacacctatcagaatggctaaaataaaaaatactgatagcaccaaatgctgatgagtatgtagagaaactcatacattgtgtgcaagagcaattgtgaaatagtacagccattctagaaaagagtatgacagtttaacttaacaaaactaaacacatgcttaccatatgacatcacttacactcttgggcactcatcccagagaaatgaaaacttagctcatacaagggcctatacacgagtatttatgggtactttgtttataattgccccaaactggaaacaacccaaatgttcttcagtggatgaatggctattttaaaaagttttatattataaaatttcatgtatatcacattgaaatgaaattacagagagagaacagattagtgatagtcagggttggtgggagggaggtggctattgctataaatgggttttagaagagatcattatgaaggaaccattctgtatcttggctggtggtagtcacactgatctacacctatgataaaatttcagagctaagtacacattacatgtaaaatgagtgaaatctgggtgttggtagattgtatcaattgtgtcagttttctgtctgtgatactgtactacagttatgcaaagtgttaaccattggagggaaactgggtgaagggtatatggggtctctccttttttcatacaactccatgtgaatttacaattatctcaaaagtgaaagttaaatattttttaattgctgacagctttcataaaactatagaattatatgtaggaatattaatgttaaattttagtgtaaaattttaacatatagtgtctgcgagcactttgaataatggactatgcacaagagagggtcgtattggaagtataaagatggttcaaaatgaggaaatctgttaattcaatactaccatattaaaaaaagaacatatgatcctttccataaatactgaaagggatattaacttcaacatccatttctagcatttaaaaa

SEQ ID NO: 24017 - DNA, 1031 bp, Homo sapiens
gacgcaaaccttcttggaagtcctgggaggttttgcaaagcttcgggagagaataaaggctgaaggcagctaaattctcttaccctgaggctaagggcaagtagtaggtaacaaaggagtgtaaaggaatttatctagataagtttatttacttttgccgacctttgatcatccgacctttgatcatccgacctttgatcatctgacctttgatcatctgacctttgatcatccgacctttgatcatctgacctttgatcatccgcgtgcaggactgctccctacaggcgggggcaacaactacccacagattgtgttggctccaggcctttgtcattaaatctgtactaaataaatacaagcagctccagcttattggggctgcgttctctcttcggcgtctctaaggccgagcagtttcctagctgcgctcacgcaaaatacctgtgtctgcgtacttttttcatccgtcgctcggccagagtcggtggatcagactcagcagctggtgcccctcgtgaggaacactgcaagggatcacgacggaacccccgaaaatgaaggcgaagagactgtgcagtcagtaagtcattggtgcccactcgggatatccaagttcaggggaattctcagactagagtttcatcatgagacaacagctgtccgcacaacagaaacagtatataaaagtattgaaacaactgcttaaagctagcagagcctcggtttcacaggctcagttaagggtcctaaggcaaactgttgtttcccataatccatggttcccagcagaaggcatgctggacctagagctctgggaataagtggggagaaatcttaaacaataccataaacaagggcaacgggtcccagtaacatctttaaccttatgggccttagttagggctgctttggccctgctgtacacagaagatcccaagaagggaagggagaaggaaccatcacctaccttaccgccgcctcctcttccctcagccctgccattactgggtaaagataccaaagaggaa

SEQ ID NO: 24018 - DNA, 1411 bp, Homo sapiens
tccccctaaatctaaaatagctcagttactattcttaccgtactgggtccccaatgcccagggaaagaggaagggaagttttggaagcacgggagccgtaggagtgtattggaaccagttaatcactgatcagagacccatgattaccttaaaaatcggaaataagaattttactggcttataggatacaggggtgaatatttcgattattagttatcaaaactggtcagaaacttggccttgggtcactcagaaacaaaaaattgtcagcactggctaagtgcacacagccaagcagagcacacaccccctaacgttgtgatttggagggaaaaaacagttagcaactctaaacatgactgtccctgttaacctttggggacgggaccgattagcccaatgggggctgcaaacccctttctaataatggccactgttgttattcttcccctacccctgacgtggttctctcaagatccaatttgggtagcacagtggcctttaaagggagggaaataacagtgagcccatgagttagttcagcaattaaaagccagccatatagaaccatcaagcagcccttagaatttgcccattttcatcattcccaaaaggtctgggaaatggggacttgcatgacttacgggctatcagtggcagtttgcaacctatggggccccttcaacggggctcccttcccctgtggcaattcttcaagataggcctatagtcgatattgacttaaaagactgctttaatactattccccttgcagaacagggcagagaacaatttacatttaccatactagctatcagtaatgaaagggcagcttgccaatttcattggaaagtacttcctcaaggaatgctgaacagtcctaccatgtgtcagcatcatgtaaatcaggctttgctccccagtagaaaaaaatttcctaattgcaagattattcattttgtagatgatattttactagcagacccaacagagccaatacttttgagtttatatgcctctgtcgttaagatgttaatcatagcacctgaaaaagtacagatgtcctcaccttggaaatatcttaggtacatactaacttcctggtcagtaagacctcaaaaggttaaattaaatactagcaacttacataccttaaatgattatcaaaaattactgggtgatattaactggcatccccccaccttgggcataactactgataaattacagaacctgttttctatcctaaaaggcagtgctgccctagactcacccaggtatttaacccccgcagcaaaaagggaaattgaggaaatagaccaagttatttctcagagacaactagatagcatagatccacgatattcagttcagttgtttgtttttcctgctaaacactcctctacaggat

SEQ ID NO: 24019 - DNA, 1085 bp, Homo sapiens
tactgaatcagtacaaatagctgcttttgtagataacttggccagaaatgtgtctaatgaacttctcttacagcagggtacaaatcaaaaggttcttgcacatctgcaagccctcgaggctgccttggaacatgtaggggagtgacaagatgcgctggcattctgacagcaattaaactgtgactgggagcataagcatatctgtgtcacctctctaccatggaaccaatcaatacatagttgggatgaggtgaaacaacacctcggggtgaccttacatgataatttaacagcagacgtaaagcaacttaaaactaaaattctagaatccctaaacgccatagatctacatgtccaacaaacagttatatggaaggatgtgcaagaacatctctcctggatagaccctcactccttgattggaaaaaaatattactaattatactcatgtttgtcttatgttatttactaattctaggatgcaaagccggaatacgagcagtaatcgctacgcctgacaaacctgctgctgtgcacatctgtactcttcaatcaacaaaacctgatgcaaaaaacaaaagggggagatgtaggagatcagtcagggtggtgggaaaagttataaggagagacgcaaaccttcttggaagtccaggaggttttgcaaagcttcgggagagaataaaggctgaaggcagctaaattctcttaccctgacgctaagggcaagaagtaggtaacaaaggagtgtaaaggaatttatctagacgagttttatttacttttgcagacctttgatcatcctattgcgcgcaggactgctcccaaggcggtgggggtgacaattacctacagattgtgttggctccaggcctttgtcattaaatctgtactgaataaatacaagcggctccagcttatcagggctgcattctctctttggtgtctctaaggccgaacagtcccctagccgcactcatgcaaaatacctgtgtctgtgtacttttttcatccgtcgctcagcctgagtctgcaggtcagacttggcaggattttgacttgatatattgtgtgtgtttggaaat

SEQ ID NO: 24020 - DNA, 1348 bp, Homo sapiens
gtccttggaattagtaattttgcttctagttgatccacacattcagaaatttatttaacttgcatgaatgctattttaagtacaggttgagtatcccttatccaaaatggttgggagcagaagtgttttagattttggattttttttcagattttggaatatttgcatatatataatgaaatatctgggggatgggagccaagtctaaacgtgaaattcatttatgtttcatatacaccttatatacatagcctgaaggcaattttatacagtgttttaaataattttgtgcatgaaacagttttttttaagtacttacatgggaatttccctcttgtggtgtcatgtcagcagcactcggggtttcaggttttggaacatttcagattttggattttcagtttagggatgtttgacctataccccagtagggaggtaaatatcttatttcagtgatttcttttttctgaagaaattatcatcattgctagatttagaaaatggcctatgtccccaaagatgatagcattttatgttttgaataaaacacagcctattattcttacatctttttctctgtgaggttctttggagattgttgatactagttaagtaaaccagttttgactgcatcttttgtgatttagggaaatcagcaagttctgtaaaatctgtggtaacggtagctgttaaaggtaataaagcttcaatcaaaacaggtaagactattggggaggagagattttattgtttattctttatttatgttttaaattcgtataataatttttagcatctaatacttgaagagtttagtagatatttccttgatatttaaaacctgacccattttgttggaattttatctttggcagataggcagatatatttttgtgcatgtaaacaatcacatatatataaagctatataactgtacatttttgacagctttgtaatcacaggttgctctgtcgtttccctccataaatggtttaatctttgtttccttcgctttttttagagttgtcaattcatattgccctctccagtttgtacagtttcttagatgcttgttacttttaaaaaggatgttaggagaattcattttttttcataaagaaatggaacactatttaaaataaatttagcaccttgcaactagagcaatctttttagtagtacctttcctaacagactaattctaaagaatctttgcagaaattacacagtattatttttgcgtgtgtgtgattacaatgttggtctgccacatgaaggttaaacatgtggctcatttgacggcatcaccaaaaagttgtatcttgatttaaatttgcttttaatctta

SEQ ID NO: 24021 - DNA, 1027 bp, Homo sapiens
tgacgtttgaagtagtttgtttatacttgcaagtctgtttttgagaaaaagtaacataagatttttcttgttaccttaatttctgttttaaaaggcatatatagaaataaatagaaaagctgctgagtctatggtaaaattttatacctgcttcccagtattgatggatggaaatcaactctcaataagtatggctcctgaaaacatgaatataaaagatgaggtaaatcagaccaccatttttactagctcttactaagtttttaaatcagatttgttacagtctgttatgttttctagttttccactttggttcacatttttctcacagacactgagaaagcttcttcctgtccctccaacaatcacccagtcacccatcccactgtttgagagttactttcatagtgagggaatcctattcttcatgtatgttgggatggaaaaaaggttgcattttgtctaaagacaggtttctctcttatctttctgccattatctgtcatctaaactagaattctggaagttatctttaattttttttctctcatttcttaaatttagttccttgtaaatcttgtttaactcagtgagcttgttccctcttcctcatcccatataccattgctttatctcttaaaaactcttactggtccaggtatggtggctcacgctggtgatcccagcactttgagaggctgaggtgggaggactgtgtgagcccaggacttcaggacccaagaccagcctgggcaacaaagtgagaccccatgcctacaaaacttaaaataattagctgggcctgaaggcgcacacccgtggtcccagctcctcaggatgctgaggtaggaggatcccttgagcctaggagtttgaggctgcactgagctgtgattttaccactgaacttcagcctgggtgacagagggagacctagtctctaaaacaaacagacctcctcctggaccttttgtatatacaaaagtaattgtcttttgtacatacacgctaccttcagttttataaa

SEQ ID NO: 24022 - DNA, 1067 bp, Homo sapiens
gggaggctgaggcgaggggattgcttgagcccaggagtttgagaccagcctgggcaacatagtgggatgtcgtctctacaaaaagtttaaaaattagctgggcatggtgacgtgtgcctctggtcccagctgcctgggaggctgaggcaggaggatggtttgagcccaggagttggaggctgtagtgagctgtgttcacgccaccacactccagcctgggtaacatagcgagaccctgtctcaaaaataaagtaatcattccttactttcatgatttggcctcttaaccaaaaattattcatttatttacatttggtatgccttctgtatttaatatgtatttcagctacatgttcattaaaattaaatttttatcagccatatattacctagaaaggcagggttttacataaaagtggacaatattcataaaaagcacttaattaaccaacaactagataatttctttgatatgcttctgataaatagagcatagaatggaatatgataaatagtgtgacatagaatggaaggtggggcacagatggcacataggaattctgaacctttcttgtaaacatttttaatcctctatttaaaagaatacctatcattctcttcagttttgccttggctttacaacattttaaggattgttttctcttgtttcctttaaataaggattaaccttacctttgtagtcatatatctgaaacctgaaagaagaatatattccaaacttttaaaacaattaaaaacatttttattgtagtaaaatacacaaattttaccgtttgtaagacataaatttaacattttaatcatgtttaagtgtttgttcactgatattcagcaccttcacattgtgcaaccatcaccaccatccatttgtgaacttttgtctcctcaaactgaagttttctatccttttgacaataactcgccattaattcagcccttatcaaccattatttctgtttttataaatttagttacctcatgtatgtggaattatatttgcttttttgtgactggctcatgtcacttagtataatgtctctaaggtt

SEQ ID NO: 24023 - DNA, 1290 bp, Homo sapiens
cttcctctgggtagaaagaagtttgttttattcttctttttgtttcagttacatttattataaactgtttttgtgttaagaaataagatttcacaggttcttggcctacacagtagtacatgtaggaaagctatggatagtccacctttgaaagcattaaattcaaactcaatctattttctccttctattccattgtatgctgatatcagaggtaagtaataggaccttatatgtggtgtccttgtgttgtcaatctgttaaaaatcttgcactatctaaagaaaaaggcaatttcatcatctaaatctaaattagagtatctttaagtaaatgtattatgataggtaccagtttaagcacaaatgagtggctcatttcacttgataatttcagaaaaaaatatataaaagtttttagctattcctcagcagaacatgcatttttaaaaagttgtcatttatatttttcaagctgttattcagttgtgttcaactaaattcaaaattaaacactgactgtacagaaatccttatcccagaaatatagtcccaaattcttagagttaaaagaaaattaaagaagtgaaaatttacataaacttctgcctgaattggtacttcacttcctaagtgcttacccagaaccttattcgtatagtttaagttggataacacatatggcttatttgtaacagtttttaattgactactatttaaaatgagttaataatcaactctatattatcttctcttcaacacttactgtttttgttagactgaaatgttacttctttgtgtagtatgtgtgacctttatttcaatatctatagttagcttgtatacaaagcatgtagcactccattctaaatactgaaaactagtagctgcatttttggtatcatgattatgaagatatttactgcagaattaagtaataatgagaatgggtttataaagaaggcaatatgtgtgtccataacctctacactcacaggtgagtttcttatattcccagtcatttctcaaaatggcgccacattttcattttcataagtaggtagattatggttttcttgtatggtttagggtttgtatcttgttgaaagggggaaaaatgacagtcttcatgttactgtgatcatctgtgtaacttaattactatttgttgaatggagtctcctttcagagctattcttgtgactcttttctaaatttagggtcatttgctttgtcgaccaattatatacacctttggttttctttcattgtttttctgagtcatgtctgtt

SEQ ID NO: 24024 - DNA, 2627 bp, Homo sapiens
tttatgttctttttaggtaaggttcacttataaaattttaaatcataatgcatggatcattagttttattgtagaactgtacacatattttattatttcagttaccactgttgggaataggacctgataatatttgaagtgtctcagattcacatttgacctttcaatgtcaggggttaacttgacagaggagggaaaatattggctgtaatcacatgagcgcaaaaggaacatatcaacagtcataatttatattatttacgtatttccagcaatacatcttacccattttatgctgattggttggatttcccagtgcttattacgaatgcatcaggaagtcttaacaattggcatcagcaggattctttataatggttgaattctcatcatagtttgatttttgtttgtgtttttgtttgtgttctttttgtttgtttttaaatacttttagccctggcttgaaaaacagtccaattgatgaaagtgaggtgcaaacagcaactgatagtccctctgttaaacctaatgagcttgaagaagaaagtactcccagcattcaaacagaaactttggtacagcaggaagagccttgtgaggaagaagctgaaaaagcaacatgtgattctgactttgctgttgaaactttggagcttgaaactcaaggagaggaggtcaaagaagaaattcctcttgtagcatccgcttcagtcagtattgaacaattcactgaaaatgccgaggagtgtgctttaaatcagcagatgtttaacagtgacttggagaagaaaggggcagaaattattaaccctaaaacagcattgttaccatctgacagtgtgtttgcagaagaaaggaacctcaaaggaattctagaagaatctccatctgaagcagaagatttcatttctggaattacacagactatggtagaagctgtagctgaagtagaaaaaaatgaaactgtttcggaaatattgccatcaacttgtattgtgacgttagtaccaggaattcccactggggatgagaagacagtggacaaaaagaatatttctgaaaaaaaaggtaacatggatgaaaaggaggagaaggaatttaatactaaggaaaccagaatggatcttcaaataggaacagagaaggctgaaaagaatgaaggtaggatggatgcagaaaaggtggaaaagatggcagcaatgaaagaaaagcctgcagaaaacactttattcaaggcatacccaaataaaggagtgggtcaggctaataagcctgatgaaactagtaaaactagtattctggctgtatcagatgtatctagcagtaaaccaagcatcaaggctgttatagtctcttctcctaaggcaaaagctacagtttcaaaaactgaaaatcagaaaagttttccaaaatctgtgcccagagatcaaataaatgctgaaaagaaactttcagccaaggaatttggtctgcttaaacccacaagtgccaggtcaggcttggcagaaagcagcagtaaattcaaacctactcagagcagtcttaccagaggaggcagtggaaggatctcagccctgcaaggcaagctttctaaactggattacagagatataacaaaacaatctcaggaaacagaggctagaccttccatcatgaaacgggatgacagcaacaataaggtgaggagggtaggaagaatggcacagtgtgtctttgaagtgattagctccgctgctgtagctatgtagtaggagatgtaattttgtttcatactttcatctcctcactctaccccggaagctcccatttccttttcttaaatgattccattgtttaagccagtagacattcagagtattaaactcaagttcataatttattgacatgtttgaaaagcattatttggatacaatttggaaataactgtggtttaaaaaaaaaaaaaaaaagtctgcagtgaatctcctaaggtgatttaccactctgcttctgaatgggaaactgtttcctctcttaaattgaagcttcctttatcaggtcactgattgcctaactagacattgtgggacgaaaagatcagtaaaactgaatttaactacaacttgtacagactgtgcctatactgtttagtgactgttgacttagttttgtatacatgttaaataatttgcataattgactgtatttgggtaatgtttactgtttttttttgttttttgtttttttttccagaacattaataatatggttgtaaattccgtttttctgtatttcttatttactatttcagactttggctgagcaaaacactaagaatcctaaaagcactactggtagaagttccaaatctaaagaggtaaaaaatagatcacagaccctaacccttctttttcatctccatagcacagttcatctatcttataacttgtgcctgccttaacaatgttagtgactaagagtttagagcaagggataggaatgagatgttttgtttttaacttatctctaatcctaccattaatttactttttgaccttgagctagtctaaacaccttgtgttttcttgaggcggggggagcgggcaaaatgttatatggggacagaaagagagtagagtagggcaata

SEQ ID NO: 24025 - DNA, 1021 bp, Homo sapiens
aattcttctattttatattagcagtaggcttccctcccaaatttgggtattttttgcaaaaatgtataatgttgattcagacagtataatatgtttaatttaaagcaatttaaatactgttactagagcaataaattaggactttctttttaaagctaaaactccaaccaagagagttagaattgggaaaactctgccatcagaaaaagctgttgtgacagaaccagcaaaaggtgaagaggccttccagatgagtgaaggtaaagcaggattgttggaatgggaaggaaagttacacaacacaggagagtagttgaagtttaaagatctatctaagaagaaaagtagaaaatcagtggaatagagcaggggtgggaaaagtcaactatagttattagatgtgggtaacattttgatctttgtaatgtagagagaatggattattgatattagaatgtgacagattagaggaaatgatcctcgaaaggttttctgaccatgttgcagcatcagatagaaattatttattaactagctattatttgtggaccttgctttgttgatgcttgtcagcagccagccaatgaattaaacaagaagccttaatagcgtttataaaatttaacttgaaacaaataaggaagggtctagtgagagagaatactttagtcactcagcagatacttgtcatattgtattgggtatccttcataacaatgttaaaaagggtagacaaaagaaagtacatagctcttgctctcaaggggtttattgattcagagaggttaagcaaaaaatcaccttgccagtatgatttaaatagagcactgtaagggtatcgcttttaccattctctttgtagcaccctcattgccctctttctttcctatcctatcttctttaaggaaaacttaccaagtatgatttggtccaaggatttcaggtgggctctcagtgctgctcccaatatattagaggtctccttcctttactatttcctaaccagatgtaaaattagctt

SEQ ID NO: 24026 - DNA, 1032 bp, Homo sapiens
actcgggaggctgaggcaggagaatggcgtgaacccgggaagcggagcttgcagtgagccgagattgcgccactgcagtccgcagtccggcctgggcgacagagcgagactccgtctcaaaaaaaaaaaaaacaaaacaaaacaaaaaaaagaacttggccaagatgaaatagagaacttgagtaattctgaaaccattaaagatgctgaacttgtaatgaaaacatccttgaaaaagatacctccaagtcctgatggtttcactggagaattttgctaaacattcaaaagaagaattgattttgtgcaacctcttccaaagaaaatagaagagggaacacttctcaactctttttttttttttttttttttttttggagacagagtctcactctgtcacctaggctggagtgcacaatctcagctcactgcaacctctgcctcctgggttcaagcgattctcctgcctcagcctcccgagtagctggaattacattttatgaggaacttatttcaggcatgcagggctggttcaatactggaaagtccatttaataaactatcaataggctaaagaagaaaaacatgagtgtatcaattcatttagaaaaggcatttgatataaaaatcaacacatcaatattctcagtagatcataaagaaggaacttcctcagttttataaaaaggatctacagaaaaaaaatctggcatcgtacttaacgtttaaagtctgtgttccctctaagattaggaacaatgaaaggatgttcattcctgccatcgttaggcaacaaacttactactgcagttttccagccactgcaattctaggcaagaaaaagaaaaggcatatagatgagaaatttaatgaaactatctctatttgcagatacatgactgtctacccagaaaacttcaaggaatgtgtaataaaacttttagaatcaatgagtaaggttgaaggacacaagatcaacagacaacagtcatttatgttttctgtgtactgacagcaaacaagtagaaacca

SEQ ID NO: 24027 - DNA, 1044 bp, Homo sapiens
aaccaaagcccagagacttggaggaagtaaggtcagggagtttccaccaacagagggacaagaacagttacctggagagttttagctacagcatctcaattatctgcttttgattcacttacatagatgtttccagagatgggagatgttaactgaattatccaggtgattgtcttagagcaaagcaacaggtcaaatcaagtccaaccagtagccatctctgaagaaattaattggatcagtcaatcccaacagctaattctgtcaaaataatccatctagggttccgtgtttttggtgcatcaggaggctgttatgtgcccttacatgagaatccatgggtgattttgtcagggcctgttatgagtctgttagcatgtgcaaccaagccagagattgtgtgagggcctagtggggtgttcattgagacaggcgctgtgggtagaggcttgttttggcattgatagtttctgaccccatctcccctaccccagcttcatccagtccagtgttatcccttcctcctgcatgtgggagctgagtccctatgctggccaacatttgctaagggacagtcacactctaaaaatcctatacagtagataggaaaaaagacagtagggaggctggaacatatatttacacacgcccatgcagaaaccaatatatctatatctatatatattagagagaaagatgacatctagatatttatacacatgtttctttagcaagggactattcagggatgaagcagggatgaagcttttcccaccagacagtacttggagtctccagtgtgtgtgttgggatagggggttgggggcttaccctagaggctgggtctctggaccgccaaggcctgggggagagagaggtggagaaaggggaagaaggagcctgactttccacttccaggtgctgcctggaccactgacctagccactggcctatttataccccctgcaagacagagctagagcgtgctggcaggagtttttaatgagttagtagcctgagcattcagccgcaagactagtgcaa

SEQ ID NO: 24028 - DNA, 1073 bp, Homo sapiens
attttgatcagaaagggcaggccaagcttgctgggtgaagaaaaaaatattagctggctagcatggcctgtttctgggaggcggggcaatgttggacttggaaatgtggcaggaaatggaggtgtggctgggacaggcagaatcttgtaggctacatgaaggtgtcagcattttacctgagggcaatagggagccacagaaggactttgagcaggagtggaccataacccagcctctgtttttatttttttcttgggataggatctcgctctgtcacccaggctggagtgcagtagtgtgactgcagctcactgcagcctcaaactcttgcctcagcctcctgagtagctaggactacaggcacatgccaccatgcctggctaatttttaaattattttaaaaatttttacagagacagggtctcgctatgttgtccaggctgatcttgaattcttggcctcaagtgatcctccaccttccaaagtgttgggattacaggcatgagccaccgtgcctggccttagactgtcttagaaaggtctctcttgggatggtgggtgtggaggatggactggaggggtaaggagggggtggggaggcctcctggggagcatctgtgggaatcagagaagtgccaggtcctgccctatgatgctgccagtgggggaagacaggaggagcctttctgaagatgaaatccacaggagttgatgaccaattccacgtgggggtgagagggaggtgttgaggatgactgtgcgttggatgactcctaattctagctcaggagctggggtggctggtgacgccattctcggagggaatatgggaggggatgggccagggttgggggtggtaggctcaggatggccacatggagtctggggtgccagtgggttccccaggtggacaggcctgggaggcagatgggtccagggctctggagctctgggcaggagaaagcgcccgggatgtgtgagcatagccagatccttcagagtggaggagctcgcccagggaagcagatggaggggtgggtgccaaggcctggggaacaggcacatttgaaggg

SEQ ID NO: 24029 - DNA, 1027 bp, Homo sapiens
attgagctgtaacacagacaagtggatgttttgctgcggaatgaacacttagcagggtctgcctcttcctcctgtgttgtgacccaattcctcagcacagggagtaaggtcagaagttgaaaaggccatggtcattcagctgggtactggagaactcatgattttttcttttagattaggtcagtgcttctcaaaccattttcctgtctagcatacctgcagggtaggctaaatttgatagtgtctctggaggtagaggctggttggggaatggatgtggtagacagttgggggaatgtggtttaagaagacctctagataattctgttaagggagagatgggagcattttcccctttcccctgccagtctcattataatagatgattattaaaagcagttaatttctttcttttctagcccacaccagttatcctattgaaagaggggactgatagctcccaaggcatcccccagcttgtgagtaacatcagtgcctgccaggtgattgctgaggctgtaagaactaccctgggtccccgtggcatggacaagcttattgtagatggcagaggtaagtctacagagttcctcaggcctgtgtgcaggaaaggaggctcctgagggggtgtttgggactagcataggttggtatcagaaatcccactgcttttaagatcgttgaaagatgactcactctgaagcagttccaattcttatattgtcctgactgctgagcccgtgtgggactatatgagagaacctaggctcaggagcctgttgcctcatagggagacgtggcctagaaacatgaaatagaaccatctggagtttcctgtgttcacttccattgttatcaagatgagaaaattcctgtttatatcttggtatattaattgatgtgtgagggtatcaactgtggtaagaatatctaagtggttacttttatttaaaaaatcttttctgtatccagttgacctgtattaattgctcttcaaggaaaattgggagtctgtggtctgcaaaag

SEQ ID NO: 24030 - DNA, 1050 bp, Homo sapiens
tcgggctatttgaagcaatgagatgaaagatgggatagtatttttgttattcctgtttatcttgagaactcattgtttgatatatatatatatatatatatatatagtcctcaggtgacctgaggatggggccgccccaaaacacaacagcttgcctgggagaagatcccagaggtcttgtgtggtatgtccagggctaaggggaggagttggcgggagtaggggtgtttccaggttcctggcatgctcataggaagatgcagtattcttcagcgaaatgccaccaagttcagagagtctgcgggttcctagcagtgtcttttggagtaccagtttacaagaggaaagttgaaagtagttccatattacctcctttcttttcctactcttttaggggggtacatggtatggagtagacatcaacaacgaggacattgctgacaactttgaagctttcgtgtgggagccagctatggtgcggatcaatgcgctgacagcagcctctgaggctgcgtgcctgatcgtgtctgtagatgaaaccatcaagaacccccgctcgactgtggatgctcccacagcagcaggccggggccgtggtcgtggccgcccccactgagaggcaccccacccatcacatggctggctggctgctgggtgcacttaccctccttggcttggttacttcattttacaaggaaggggtagtaattggcccactctcttcttactggaggctatttaaataaaatgtaagacttcagataactttgtaaattattttggcatggtactcataaatgtctggctgtagctcagaattttagctttacatgcacttgtccaacagggagacaagagcatcctggggtgagctccactagagtggcccgtctggaagtttcactgtggttgcattctttgttccagaagtggctggacaacacgcagttgctttcttctggcatcatcttatttagccctggcctagccagacactgctctcagggtttctctggtttgagtaaatgggttacattaccttgtctgccc

SEQ ID NO: 24031 - DNA, 1142 bp, Homo sapiens
tggctttttacatcttaaagagaaaactattatagttttgagtaagagttaaaaataaattaaatgaaaaattccatgcgtctgttcttaccggttttcaagtgctcagcagccacactaggctagtggctaccatgttggacagagcagataatggaacagttccatcatcacagacagtgaaggtgtagagttttgtcactaatgagcagtagttgttgttttgtctggtgaatattccagggggtacttaattcattgaacatgtattattagaattcaccatgtgccacacattgtgctgggtgctaaggaaagcttggtgaacccaaacatttttggtctctgccttccttgtgttcatggtctagacagggaggcagacagatttcagatgatcacataaagtgaaactaatatatgtgctaatattctatgaaagcataaagtaagataatctggccttgtcagtgaagttgggaaagccttcttgaggaggttatgatagagctgatatctgaagacagtttaaggttaatcaggcaaaggggagggaaagagccgtctagctgagggaaaaacacatgaaaaggtactgttgatgagagagagcatggcattttccaggacccagaagccaacgtggtttgagcacagactgcaaggctttgtgtgctatgccaaggatttaggggctttatctctggagctttggggagttgaagaaaatatttgaaacgaggggatgtatgataagttaggtgtttcagaaaggtcaggtgtatagcagagtgtggaacagctgtgatagcaaggtgggatggggagcagtagccataggtcaagggcataaattaggagaccattgcagcattgcccggcaaaagatgatgaaagtttggaatagggaagtgttggtggatacagggaaaagtggactgatttgagagatatttaagaggcaaaatcatcatacttaataacggatgggatgtgaaaggtgaagtagccaggtgttaggttattgtttgaatggttgtgccaatattaagatatggccagatttatggtggaggtggtggctgtgagtgggtggtggaattggttgggtgagtcttaagattatgagtttggttttgaag

SEQ ID NO: 24032 - DNA, 1034 bp, Homo sapiens
cgagtagctgggattacaggtatccaccaccacgcctggctaatttttgtagttttagtagagatggggtttcaccatgttggccaggctggtcttgaactcctgacctgtgatctgcctgcctcagcctcccaaagtgttgggattagaggcatgagccaccgcgcccggcctctaatcgtgaactatctatgggtaatagaaaatcttacttctgagagcccagagtattttttcctccccacagttttttctttcccctgagaaaaattagatattttcttatttacctgagagaatatatgataatatatagaatatatagatgattttctgtattaaaggtagatttacaatgatacaaggagtgttcagataatttttcctttagttcactggcatattgaaacttactggcataggttggaaagtgtttaaggaaaaaatgcttagtatgtttcttgctagaaatttatgaactatgaaattcttagatgtgttgtataacatctaatgctgcgtatttagaggatgagatcaaataataggaaacattaatttcatccagtttactctcaagttaaatgacaaaattgtgttattcaatttactctcatatctcactagataataagggagttatagtggtgttatataaggcagtgattaagtttgtagtcctgttactaaggctgagttaaactatgatactgtttaaatttgaagcaaaatatgaccagtcttataactaagtctttttaagagggaagtgagtgattcagagccttatgttgtttttatgctggtcctacagaccattcaggcacttcttgtaattccttaacctgaatttctgagttgtgctggggaagataattcagttctctgggttggcatcactagaaattcttggtctccaacttttaattgggtcatcaacagtgcttggaaatcttttttttttttctttttaagatggagtctctcgcttttgtcaccaggctggagtggcagtggcccgatcttggctaact

SEQ ID NO: 24033 - DNA, 1063 bp, Homo sapiens
gttagggcagaacattttaaattattggagtagattcctggatctcataggcagaggaaattttatcattgctgttttgttacgcataagtactaacattgtgataaataggctctcgccaatggcaaatgtaattgatgatggctggtgccagaatggttagatacctcaaaaaagagggatgcaagccagtaacagatatccacacttgaggaaacaagaagcagttgaaagctgtaagaaaaaggcatggcaagtaaaatacaccaccttcccatcacacacacacagataatgttgtacacttgagaatcattaactcttcagctttggcctgctcctttagcaaatacatttgcctatttatgtgatttaactgtccaactccaccctgagatattcttaaatatttaaggagatgctgaaatgctgcttgtaacttacttgttacttactattccttacttatacttaaatagctattttaggtactgaggatttctgtaggttctgaaacctagttagggttaactctaattttttttgagaaaagactgtcagattctttaaatactcagcctgcagttaactggaaatagtaaatttgctttacttgcccaaaggtcccccttgtagcatcagctctagtgtatttggggactttgttaaaaactcttcatgagttttagaggggtgaaggactgttacggaggtttaagactgcttctctgtgccaagaccaaagaggaactgtaccaattgttccttggtggcaaaggttattgttacatatcagtttttcatttttaattaattcattcagtaaataaataactctcttttgagtaccttttaagtgtagcaggtactttgctaggcactgaggatatagctatggataaagtagacacagttgacaatttagatgggaagtggatagactgaagattaaaacaagagggtgatgaattatatggaaggtatgcagggtatataagcagtgacagtatgtgttttgactaagtaaaggacagatgacaacatggtgagctctgtgaactct

SEQ ID NO: 24034 - DNA, 2036 bp, Homo sapiens
gacgtcattactctggatggcctaaatgaaaatgctgttgtatgcagtgaaagagttgctgaactacaaagaaaggtgagacacaataaaatgatagttgtaagaaacgtggcctttttcagtattgtttcaggaaatggtattgtttgtttttattttactttttactgtttcctgggtacatgaccaatgtcatttgactggtgagtacattgagctagcagctttagagaaatttcatggtgatctagagatgcatgacagctccctgcactggcagcctactttacaactaccatctgagaaggaaagcaattttgaaaagcctgtaagtttttctatttgacatttttttctgggcggggagggaatgttttatttgaaaaatttccaaattttatttgaaaatactttatttgaaaaattatatccttcagtaccagcttgtaacttgtacctgttcttcatctgatatccaggaatatgttccattagaggttggtataaaagaaatgtttatgtttcatagactgtaagacttagttctgtggtgtcttggaaaaggcatcccatggggctccaggcctttcatattgaggcagcctaactcttcctagttgtgccagcaagagtctttagacagtgttaagattaggcttattcatgggaacatccaaaagcttgtactttgaatgtttccctctggtcttcaatgcacaagccttgaaacagtccctggaatatttaagtatttctgtttagaagctcttgaaagacttgacttcagaggtgtcttgaaaattgtaagacccatgtttgaccaggaaggataatgaagtgcttaacgtccaaactggccagtgtctcttcaaagggaagtatctccttcccaaatgagcaacatactaatgtatatacatgtctcttccctctctctatttatatcattattaccattgtgtgtgtgtgtactagaaactggcaactctaggatgtcataaaaattttatatcagccttttttttttaaattaagttctggggcacatgtgcagaacgtgcaggtttgttacataggtatacaggtgtcatggtggtttgctgcacctatcaacctgtcatctacattaggtatttctcctaatgctatccctcccctaaccccctaccccgcgacgggccctggtgtgtgatgttcccctccctgtgtcattcttttatagaaggcttttatttgcttggatccttggatcccttggcattaatgttcctctggtcccgttgaatgaatatcctcttttgttgtctggtactgtaagtcccaaggtgggccctacttccttgtgatatagccttatatcctgttattcattaaatacagttagataaaatagtgatgtacttaatgttacttctcttttcctatgtataagattggtatgtttttgtaaagctctattagtttgggttacaaccacatttagacctttaggttcagattgttggtagaaaatgaacaaagatattatgatgaacttttatttataatttattacatttattaaagtttttttaacacagaatcactaggtttattttcttcagtattccaaactaggcattttttaattttaatctgataactggggatgaaaatgatagttaacactttgtgctcaagtactgtgctaagaggttacatgtatatatcaattcgtttttgtcctctgtcaatcctatcaaatagaattgttagagattattatcatccctattttgcaattgacacttagaggatttaggaacttgctcataattattcagcaattgggggaaccagtatttgaaactaaccatatctgtgtacttaaccaccataccataaactgttccccctccccccaccttttaactattcttggtgaaactaaggttaagattttgcattattttggcaagagtagaggttttgaaggagattgcctaaagttgagttcaataacaatgagaaacaaagtaacaacttttaaagtgttc

SEQ ID NO: 24035 - DNA, 1024 bp, Homo sapiens
gctattattccctgtattgtctttcagttgtagctctatctgtcttagtcttagatctaggagttatttaatgtcaatatcagaaaagcaaggagccagatgtggtagtactttttctgcatggcttagcttgctttcaggggcttgcttactccttggtttttccttatgctcctcatctgtgtcacagaagagtcattcatagttacttggttcacttttatatctactcctcataaatgattatttgggtatccacgtatgtatgatggagcttggaactgtgaaaagaacatagagattttgagtcaaaatccagttcagttactttgttagccttgtgtcttgagcaaatgacttcggaggatcactttcctgatctgcataaggaaataggaatagtaataaccttatacatcgtactattaaatggggtaagttatgtagcatttatatagtgcctggttgttagttctcttcactttgctgaaactagactactagagtctctggtggtttcctactttctatcattattttgtttttctttctcctttttcttggtagcagcacataattaatatgcttttttttttttttttttttgaggcagagttttgctcttgtcatccaggctggagtgcaatggcacaatctcagctcactgcaacctccatctcctgggtttaagcagttgtcctgctgcagcgtcccaagtagctgggattacaggtgcctgccactatgcctggctaattttttgtctttttagtagagacggggtttcaccatgttggacaggctagtctcgaattcctgacctcaggtgatccacctgcctcagcctcccaaagtgctggggttacaggcgtgagccaccgtgcctggcctaatatgctattttagtacctcttgttttggccatttagctctaaaaattatttaaggtttaagccttagatttcttttctctccccttcatatccccccacctttggagacctagttgcctgtctctgtgtgg

SEQ ID NO: 24036 - DNA, 1044 bp, Homo sapiens
aagtatggcttataaacaacagaaatttgtttcttgcagttctagaggctggttccaagatcaagtgctgggagattcagtgtcttgtgagggcctgtttgtcatagatgacatgttcctctgtgccctcccatggtggaaggggcagggggtctctctggagtcgttttttgtaatgggcactaatcccaaacatgtggcctgtgtcctcatgatctaattgctttccaaaagccttacctccttaatttcatcaccttggggattaggatttcaacctatacttttcaggggggacacaaacattcagaccatcacaagtcccctgatgttttattagaggaatcatttggtttttcatcgcattctacatggcagtgtttagaactgaattatatggaggagtctgatgttagaatctgtttattcctttgtgtgacttgaagggaaaaaggaattgattgagcccaagatgacaagagtggatgcagataagtttgtagagaggaaattgagagaaatcagttttgaggtaaaagcaagattatctgctgagggaggtgagtagtggtggaattaggttagaggcattgaggagagtggtttggtgaagacttacagtttatgttgaagtgaatttgagatggagctgaccaagggaaagtaaaaggattggagggcagttctgagaagtcagctcaggttagtgataatgattttataatattgtcagcctgtatagaatctctgatttgtttttcctgctaacactcaggaatggagatgatgaattacagtattgatccttggttcaggaatacattgaatgggtatggtagaaggatagcagtcaaagagagaagagttgatcacctattggtttcagcctacatagggaaagagaagccagaagagttgttattctaggagaaaatagaaggaccagagatttctttatgaagttgattagatgaggtgggaataagttactgagagcactagaagaataggtaattttggtcagattgaataagtagatttaaa

SEQ ID NO: 24037 - DNA, 1088 bp, Homo sapiens
tagacccaatagcattatcccatctcattgaaaattctcttaaaaatccaagttgtaagatccatataatatttcatccactggatatactgttgtttataaccattactctgttgttgaagatttaaaatgtttttactttagttttctaattaatatctttgtgtgcaaatatttatctcctttgatggctgtttccttaggattcatttctagaagctttttaaaggctcaaagctggctttttttccagcacatagaattttaaaatagaaaattttatatactattaacaaatctctttttctttaggagacacttctaaaggaggcatagctaaagttactcaatccaacttgaagtcaggcatcactaccactcctgttgattcagacattggatctcatttatccttgtcccttgaggacctgtctcagttggctgtaagttctctagaaactactactggtcaacacactgatactctcaaccaaaagacattagcagatactcatctaactgaagagactctgaaagtcacagctattcctgaaccagctgaccagaagactgcaacaccaacagtactctctagttcccactcacatagggggaagcccagcattttctaccagcagggcttgccagacagtcatctaactgaagaggctttgaaagtttcagctgctcctggactagctgaccagacaactggcatgtcaactctaacctctacttcctactcacatagagagaagcctggtactttttaccaacaagagttaccagagagtaacttaaccgaagagcctttggaagtttcagctgctcctggcccagtggagcagaagacgggaatacctacagtatcctctacatcccactcacatgtagaggacctcctctttttctatcgacagaccttgccagatggtcatctaactgatcaggctctgaaagtctcagctgtgtctggaccagctgaccagaagactgggacagcaacagtactctctactccccactcacatagagagaagcctggtattttttaccaacaagagttcgcagacagtcatcaaactgaa

SEQ ID NO: 24038 - DNA, 1050 bp, Homo sapiens
cccaagcagcaggtgcatacagaaggatattggcacacagacgaatttgaaatgccggagaggcattgaaaattgggagtttattagttcaactacagttagaagtcctctacaggaagcagagagcaaagtcagtatggcattagaagaaactcttaggcaatatcaagcagccaaatctgtaatgaggtctgaacctgaagggtgtagtggaaccattgggaataaaattattatccctatgatgactgtcataaaaagtgattcaagtagtgatgccagtgatggaaatggttcctgctcgtgggacagtaatttaccagagtctttggaatcagtttctgatgttcttctaaacttctttccatatgtttcacccaagacaagtataacagatagcagggaggaagagggtgtgtcagagagtgaggatggtggtggtagcagtgtagattcactggctgcacatgtgaaaaaccttctgcaatgtgaatcctcactgaatcatgctaaagaaatactcagaaatgcagaggaagaggaaagccgggtacgagcacatggtaagaagaaagtttcaggcttataaacgttatagtttaataatgtgtttaaagttagatatttatgttttgaggaagcttagccaatgaaaaatacaagcaagatcaagaaaaaaaatgaagttagatatttggagttctaaatgtattttccaatagaattgttagaatgactatatttcttctaacaatccataaaaagcctatttaaccaataatgtagttaagttacagtattaatagtaccagcctgagtttacgttcttgttcttaggagaagtagattctgatgtatgacagagagtaaagaggtcgcttgggctcctgagctcctaaagctatcacgtttctctaatcctcccattatagtatccttattctgaaggcagaaagagcctccaatttgctgtgctctaaattgctttttgtcctaaaactacatatattttctctttcccttttctaatagaactcttggtgttgatct

SEQ ID NO: 24039 - DNA, 2040 bp, Homo sapiens
tgagcacagacttcagttccatgcacaacaaagaatgtaagctttatgaaatagtcactaaacaacacttacaacaagcagtaacagcaaactccagggaagggggagaatccagtatccagagttgtcactttataatattcaatatgtccagttttcaacaaattataaggcatgcaaagaagtaaaaaagtgtgactcattcaaaggaaaaaagagaaattaatgaaactatccctgaggaagcccaccttaaatgtactcaatgagctgaacaataccatcagcaaagaactaagggaaaccaagaaaaggatttcccaccaaaaagaaatatcgacaaagagaaattataaaaaggaaacaaatagaaattctgcagctgaaaagtacagtaacaaaaattctttagaaggattcaatagctgagtagtctgaacaaagaatcagtgaacttgaagaaaggtcagatgatttatttattcgaggagaagaaagagaaaagaataaagaaaatgaacagggctatgggacatccccaagcataccaacatatgcattatgggattcttagagggaagagagagagagagagagagagagagaaaggggcggtaataatatttgaagaaataatggttgaaaacttccctaatttgttgaaaaatgaatttcaaatgggttaaactcaaagagacccacaccatgtcacattatagtcaaattgttaaatatttagcatagatgttggttctattagtagaaatatactttccttaatgaagtcagctttaacagattttttttttaaatctggttttgaagtcataaaatacaaaactatgagcttcttacaaagttattcctgccgtaaatactgtggtaatttatatatttaaaaaattgagaatttttttaaaacaagtgtttccaaaagcttattgatttttaagtaagttttgtatcacatggtaatacgtttcttttatttgtagaaagtagatttttactttttagtgcttgttgactctgtgtgtgtgtgtgtgtgtgtgtgtgtgtgtgtgtgtgtctattggtttacatgacggtgaagaactacttatttcttttttggtttgttacatgaagtctttgacattgtttgtttgtttgtgacagggtcttgctcagtcaccgaggctggagtgtagtggctggatcttagctcactgcaatgtccacctcccgagctcaagctatccttccacctcagtctctcaaagtgctggtattacaggcttaagccactgcacctggctgatgtgtcattaagctggatgatgagagaataatataacctgataaaactcatgtagatcttttgagaagagataattttaattgtgaaatagcatctggaaatcagtaaaagacatattttagctaaccagtaatttcataacatctttatctcagtataatttactataatacataaggtttgcccatttaaagtgtatagtttatttatagaattttacaatagcataattttagaactttgttgtcattagcccctctcccccaattccctagccctaggcaaacaccagtccactttctctcccaattcttttttgccaattctggacattttatataaacagaattgtaatgtatgatcttttgtgactgccttcttttacttagcatagtgttttcaagagtcattcatgttatgttgtaatgtgaatcagtacttcatccctttttattgccaaattacatttcattgtatagatactttgtttactcattagttggtagacatttggattttccactctggccattgtgaatagtgctgctatgaacatagtgtttatgtgttagggtaggtgtttcatttctcttggttatatacctaacagtagaattactgggacatacagtaactccatgtttaacatgttgaggaacttctaaacttttttctgaagtagctgcactatttacattcccatgagcagtatatgagggtttcagtttctccacgtcctt

SEQ ID NO: 24040 - DNA, 1120 bp, Homo sapiens
taaagaagtggattttcattcttcatcacaaatgccgtccccagaacccatgaaaaagtttactacctccatcactttttcatctcaccgacattctaaatgcatttccaattcctctgttgttaaggttggtgttactgaaggtagccagtgtactggagcatctgtgggggtatttaattctcatttcactgaagaacaaaatcctcccagagatcttaaacagaaaacctcttccccttcatcatttaaaatgcatagtaattcacaagataaagaagtgactattttagcagaaggtagaaggcaaagccaaaaattacctgttgattttgagcgttcttttcaagaagaaaaacccttagaaagatcagattttacaggcagtcattctgagcccagtaccagggcaaattgtagcaatttcaaggaaattcagatttctgataaccatacccttattagcatgggcagaccaagttccaccctaggagtaaacagatcgagttccagactaggagtaaaagagaagaatgtaactataactccagatcttccttcttgcatttttcttgaacaacgagagctctttgaacaaagcaaagccccacgtgcagatgaccatgtgaggaaacaccattctccctctcctcaacatcaggattatgtagctccagaccttccttcttgcatttttcttgaacaacgagaactctttgaacagtgcaaagccccatatgtagatcatcaaatgagagaaaaccattctccccttcctcaaggtcaggattctatagcttcagaccttccgtctcccatttctcttgaacaatgccaaagcaaagcgccaggtgtagatgaccaaatgaataaacaccattttccccttcctcaaggtcaggattgtgtagtggaaaagaataatcaacataagcctaaatcacacatttctaatataaatgttgaagccaagttcaatactgtggtctcccagtcagccccaaatcactgtacattagcagcatctgcatctactcctccttcaaatagaaaagcactttcttgtgttcatataactctttgtcccaagacttcttccaagttggatagtggaacttta

SEQ ID NO: 24041 - DNA, 1029 bp, Homo sapiens
ggtccataaggcatggataaggacagtaaatccctttaggcatcaaccttttgtctcatttccttcatttggaagtgagtttcttccttagaagcaggctactaacaatgtggaattcattgccaaaatgtcatcagaatgatagagttgccaaagatggtgacacagttctaagtaatataaagattattgtttctggccaggcgtggtggctcacacctataatcccagcactttgggaggccgaggagggtggatcacctgaggtcaggagtttgagaccagcctggccaacatagtgaaacctcatctgtactaaaaatacaaaaattagccgggcatgatggcacatgcctgtaatcccagctactcgggaggctgaggcaggagaattgcttgaacccggaaggtggaggttgcagtaagcagagatcgtgccagtgcactccagcctgggcgacagagtgagactccttcccccttccccaccaaaaaaaaaaaaagattattgtttccagaggagagctcattctactccaggactatcagaatcagtctagaggattttgggttttattaactagagatgagcaactaggagtccatctagaaatggttacaggatataagagaaaaccgtggtctataagaataaagataaacggaaggagctggaggcattcggccatgagaaatggtagctacattgaaaattcataatcatatgagcaatacaaccctatgaaatgctcagaaataacctaaacaaaaattttaaatgacctaatgcaggaaacactaatcctttttgtaaagatagaaaataataatttactaaattaaaaggtatgattctagaatggaaggctgaatattgtaaaggtatcatttattcccacataaatttatactctaaagtaattctgcacaaagttctaatggaactgttcttttgaactgtgtaatttatctttatgaatttatttttatttttaatttgtctgggtatatagtagacatagatattta

SEQ ID NO: 24042 - DNA, 1028 bp, Homo sapiens
ataccttgatctctggttcagataggtgagttatttgatcagatatatacacataagcatttataaatatttgatgaaggaaattgtatggatcattatttgggttagtgggctccatctagggcaaagtttctaagctttcttggttcacagtacccttagttgtttcactgatttattttctccgctttatatataataagcaattatttttttcaaatagcaactaaggaattagaacataaatactaattgttttcctctgacaactaatttaacaaatttgttatttatttttggttttggtttttgaaaaaaaaatttgttcataaataacaatgatgacttactaatgacatatgtgtagctgttggacactgtgcaacttcccaaaccatgagatgagattggaccctcttattttctgccttttattacagcagctgccaaaaatccagcttttgccaaggcacaacagcattgaaaagaacatagcactatctgatgttgacactttgaccttgagctagtagtttatcactgtcctttccctagaattttaaactatcctgcagcatccctgtgaatccactacagaggaggtgcagagttaggaaatgaataataccccatggaggcactagataaatatttcctatggagattttaagttaagggtgcagagttagtgtggtgtagggttttgattggtgggacagtattttgagttgtcgacgggatatgacttgattcactttagacaaattgttttttccatgattgtctataaatgtcattatatatatagaaattacaaagaaaggagaagttgcccctggtcttaggcagacatttttgttactttgatatgaaagagaaccaaactagcttctgatagtaactgcactaaagcctctgatacaacctcgcctgatttcccacaatgatggcattgaaaaaaaagaaccacaaaaatactcaccacaagttaagattgttaagtttatagccataaatgaagaaatgtt

SEQ ID NO: 24043 - DNA, 1044 bp, Homo sapiens
cacacataacaatattaatcttaaatgtaaatggactaaatgccccaattaaaagacacagactggcaaattggataaagagtcaagacccatccgtgtgctgtattcaggaaacccatctcatgtgcagagtcacacataggctcaaaataaagggatagaggaagatctaccaagcaaatggaaaacaaaaaaaggcaggggttgcaatcctagtttctgataaaacagactttaaaccaacaaagatcaaaagaggcagagaaggccattacataatggtaaagggatcaattcaacaagaagagctaactatcctaaatatgtgtgcacccaatacaggagcacccagattgataaagcaagtccttagagacctacaaagagacttagactcccacacaataatgtgaggactttaactccccactgtcaacattagacagatcaatgagacagaaagttaacaaggctatccaggaattgaactcagctctgcatgaagcagacctaacagacatctacagaactctccaccccaaatcaacagaatatacagtcttctcagtaccataccacacctattccaaaagtgaccacatagttggaagtaaagcactcctcagcaaatgtaaaagaacagaaattataacaaactgtctctcagaccacagtgcaatcaaactagaactcaggattaagaaactcactcagaaccgctcgactacatggaaactgaacaacctgcccctgaatgactactgggtacataacgaaatgaaggcagaaataaagatgttctttgaaaccagtgagaacaaagatacaacataccacaatctctggaacacattcaaagcagtgtgtagagggaaatttatagcactaaatgcccacaagagaaagcaggaaagatcgaaaattgacagcctaacatcacaattaaaagaactagagaagcaagagcaaacacattcaaaagctagcagaaggcaagaaataactaagagcagaactgaaggaaatagagtcacaaaataccct

SEQ ID NO: 24044 - DNA, 1008 bp, Homo sapiens
tttttttttttttttttgaaacagagtcttgctttgttacccaggctggagtacagtggcacaatctcagctcactgcagcctccgcctcccagattcaagcagttctcctgccttagcctcctgagtagctgggattataggcacccaccaccacgcccagctaatttttgtatttttagcagagatggggtttcaccatgttggccaggctggtctcaaactcctgacctcaagtgatcttcctgcctcagcctcccaaagtgctgggactataggcgtgagccaccgcacgtggtcatggttacattttatgtatattttaccacagttaaaaaaacttaagaagttaccaaaaatcttaattgaattttaaaagtagatgtctatgttccaaatcagggttgagtatacgaaattagcaaagtaacagaacgagaaatacaggaaactttaagatagcataaacagttaaatcagatgagtggaattcggtgagatgtctttagctgtgataaataattttagcatatgttgatattgtctcatgcatgtatttaacttaagcaagttcaaataaatatacttaacaaaagaggagagaaagaattttaaaagtgcaggtgttttgtgcatgcactctaccctttatgaacatatgactacggaagaatatgtaatgaaagatgggaaacttcattctcaaaattaattgtagtcctcgtttgccttttgtagtgtaggcatcttatcttgcttatttgggtatgattctagagtttgaagaaatgtctttttggtacaatatcagatacttcatcaggtgctcagattcaggtgcagtgctatgttacaagcttggaggaaaaagtggaccctcatgggtttcttgagcagacacgatgtcaatttcaacatatgccttcctaaggtaccttcaagggtgattttgaccctctatagcaaggttttcacctcacatgctgactttaaaccctgaattccattt

SEQ ID NO: 24045 - DNA, 1050 bp, Homo sapiens
ctatacccttgtagtatagtttgaagtcaggtaataaggaggcctccaggtttgttctttttgcttagtcatgcttcggctgtgtgtgctgttttttggttccatatgaattttaggattgttttttctagttctgcaaagaatgatgatggtattttgatggaaattgcattgaatatgtagattgcttttggcaatatggtcattttcacaatattaattctagccatccatgagcatgggataggtttccatttgtttgtgtcatcaatgatttctttcagcagtgtgtttctcattttccttgtagagatctttcacctccttggttaggtatattcctaaggttttgtgtttttttttgtttgtttgtttatttgtttgttttgcagttgttgtaaaagggattgagttcttgatttgtttctcagcttggtctttgttggtgcatagcagtgctactgatttgtgtacattgattttgtatcctgtaactttactgaattcatgtgtcagatctaggaactttttgaatgagtctttaggattttctaggtatacagtcatatcatcggtgaacagtgacagtttgacttcctatttacctgcttgggtgctctttatttttttctcttgtctgattgctttagctaggacttcgagtacagtgttgaatagcagggatgaaagtgggcattcttgtcttgttccagttctcaggggaaatccttttaaccttttccccattcagtataattttggtgtgggtttgccatagatggcttttattaccttaaggtatgtcctttctatgccgattttgctgagggttttaattataaagtgatgctgaattttgccagatgctttttctgcatcttttgagatgatcatgtgatttttattttaaattctgtttatgtggtgtatcacatttattgacttgtgcatgttaagccatccctgcatccctggtatgaaacccacttgaccatggtggattatctttttgatatgctgttggatttggttagctggtattttgttgag

SEQ ID NO: 24046 - DNA, 1052 bp, Homo sapiens
tggcaggtggtaggtagtgttcaaggagaccggttacctcccttttgtgtctggtcctgtgtcagtgtagtaagtctgccctggaggaattgcacagcttctgcatacttgctgtatagctgagccatttagcaaggttgacacctaggtggcatttgctatagagatgctagtcaaggtgatgcaagggatttccccactctccaggaagagcgtaaccacagggaaggggagcttgctccagttctgtgggtgaaagtgaaatgtgaagattgccacaagttctgtcacttgggcagaccaagttcatgggtgcctatagcatatccagcattggaacaggctatttcccttcactgtgatgtggggaaaactgactattgtattgtcttcccggagaccactggccatggtaataaaagggactaaccagtagagagagaccaagttcattgtatatactacatggtgatttagcaccagttaagagtttttacagaatgtaaaagagcatagagattcctctaagaatgaagaaattcctgatacatcgagagcattgcaagggcacattttacttatctatgtcctttctctggaagaggagcttaagatcagaggccagttcataggaataagttggatctaatgaagcctggtctgagggcgctggtgcaggcttcattcaggaatgacagatccagggtgtgagtccctgcaatttaagagaagaatgagtggttatcaccacagggtagggcccagtccagacaggatttagctggtcttgaggtgatttagatttccaagtcttaaggtgacctcagtctcaaggttgatataggtgaagcttaacatcagtgggaactggaagacaggttcacatattagattgagagcttgtgttagttttcctaaatacacaatatgttttacatccctctcagtctcaccatcagggcatgtcaaaggttccattgtgccagggtaagctcttccatatagtaattcaaaagggctaagtctcactttcccttttggtgccagctgaa

SEQ ID NO: 24047 - DNA, 1059 bp, Homo sapiens
ggttgtgtgtgccacatttatgtatccattcctcagtggatgggcatctgtgttgcttccacatttgcctattgtgagttgtgctgctgtgagcatgggtatgctgttagctttttaagtccctgcttactgtgcttttggagacatactcagaagagggattactgaatcaaatggtagttctaagtttcacctttggaggaatctcaatactgatttccagagcagttgtgccattttacattgccaccaacagcacacatgagacccattttatctacatcctcaccaatacttgttattttcttttttttttataatgaccgtcctagtgggtgtgaggtgatatttcattgttgttttgatttgcattgctctgatgattggcgatatagagcatcttttcacatgcttgttggccatttgtatatcaactttggagaaatgtctattcaattcctttgcccatttttggtcaggttattgattttgttgtcattgttgaattctgagagttatttgtgtattctgtatatcagaatcatgagttgcaaatattttctcccaatccgtaggttgtcttttactctgttgaatgcatcccctgaggcacaacttaagcctggtggtcccatttgtctatttttgcttttgttgcctgtgcttttggtgtcatattcaagaaagcactgccatattcaatgtcacaaagcctttcctctatgttttcttccaagactttgatagttttaggccttacacataggtctttaatccattttgagttaatttttttacataagactagagtccaacttcattcttttgcatgtgaatgtccaggtttccaagcatcatttgtgaaaaatctgttcttttcccattgagtggtcttggcacccttgtcaaaaatcattttggccagggacagtggctcacacctgtaatcccagcaatttgggaggccgaggtgggtggatcacctgaggtaaggagttcaagaccagcctggccaacatggtgaaaccctgtctctactaaaaatacaaaaaattagct

SEQ ID NO: 24048 - DNA, 1034 bp, Homo sapiens
aaaaatacaaaaaataagcctggcatggtggcaggtgcctgtagtcccagctactcagaaggctgaggcaggagaatggcgtgaacccgggaggcggagcttgcagtgagccgagatcgcgccactgcactccagcctgggcaacagagcgagactccatctcaaaaaaaaaaaaaaaaaaaaaaaaaaaagaacacattaatacagaagaatatatcacaatttttaaaatttttgaaaactgtttttccataaaattggggtattcttggtaatcctttgtactttaagttataccttaaaaaaattgttctgaaaagggtccataggcttcaccagatgccagaaggatccatggaacataaaagatcaagtatctttgttaataaggctagggaatgagaagagaaggagcctaggactgagccctgaggttagttaatggagggagagtcaataggggagactttctttgaagggaggttcaagaggcaggaggaaatccaagagagaatggtgttgtgtcatgggagccaaaataaattagtgtttgaaaaaggagagtagccacctatgtcagatgggtgaagacagaagattggcctttgggtttggtaagatgatgtcatgggtgatcttcataagcaatttcgctagaaggattacagagaccctaattagaacgggtagaaaggtgaatggacagtaagaaagtggaggcaaagggtatagacctgaaagtggcaaatttttttctataggggaccagagagtaaaaatttttggttttgtaggctacttgctgtgtctgtgactacctctgctttatagtgtgaaagtagccatagacaacacataaatgaatggatgtgactggttccaatgacactttatttacaagaacagatggctagctggatttggcacaccagctgtagtttgccaaccccggtatagacaactctttggagaagtttagatgggaagggaagtagaaaaatggggaagtagttgatgggggacaaggagcgtgt

SEQ ID NO: 24049 - DNA, 1032 bp, Homo sapiens
ttgaaggaacacgaatcccaaaggaaaaaagccaaagttaaaggttacataagagctagaaggagtaaggaaacatggttttctcttgcttcctgcccatggctgccaaacggttctctgaagactgctatgtgacagaagccctttcctttgaaaacctgtcacgtcacaacaagaaaaagatctctttctttggaggtacatttttgggcacaagaaaggctttttaaaatttttttggccatctttttcattgtaggagtctggtgcttgctgcctagtttgggagtagaggaaaagactctggctctttagggggatagagatgggaaaggagcatggcccagctgggtgtattagctctccctccgctgcacttctggaacctttcatataagggcttcaggataagggggttgcatagctttagggtcttatggacatttggaccatttgcttcataatcattttgaactgtttccttaggctctttattgagaaactaccaaaacatcgagattacaaatctgctgtcattcctgaaaagaaagacacagtaaaggtgggtcttcactttcattgttgcccatctaaaagcttcagagcagcacagactgacttcaagataaaagtagtagtctctgcatctgagtaccagatcctgcaataggagataaggccatttcaccacaacagttctgaagtagcaggtatggtacagtagggggtattttaaatcattttgggaaatgttgcagtcaccaacttgacttaagtcttcttttggattctgtaattttctggcattgttctaattctattttctgttttgtgtctcagaaattaaaggagattgcatttcccaaagcagaagagctgaaggcagagctgttaaaacgatataccaaagaatatacagaatataatgaagaaaaggtcagtatataacagctaagaagaaaattattttgcttttttaggctgtgccctgggattgtaatatgacatttcaatatatcctgtgcttttaat

SEQ ID NO: 24050 - DNA, 1930 bp, Homo sapiens
ttaacacctctgtgggagagaagaatcattcatctaattgtggtttactaagtccttgacttccaccatgttgaaatattgggtatgtaccatctgttccagaatgggtgactcagtggtatgaagagaccttgtaaggaaccaaataagtcttgatggtcagttagaaattatgagtctcttgaaaaaccaaagcctgaatcatccagagagaaacacttcttagaggagatagaagaaattccctagcaaaagttccaagggccactgagtgccattcacaattgttgaggacacccacctaccttgtccatggatgcccatcatgacaaccccattaacacctttgattccatggatccctgggtgaatccaacatcatagtccttgagttcttccaatttggttcaagaacaggagagctagagcaggaaatatcaacaaacaaccccctcttctgtctccaaccctgagatgcaaatgtcttttcctgtctccactcctactgtctggtgatctttgtgcagcaggtatgtgcctgaaggaggtctccaagccagtttctgtgtgctgtcatctgagatggggttccccttgccagttctcacaccccacaagacccaccatactgatctcctggctagcacacaccaaccccagggaagccttttcttcacacttggaacctagatcttgatttccttttgtgaggtcagaatttgtttaactggaatgtggcacagcattgaattcttctgccttgtctattccagcctcagaattctgtttttctcccactttgcagtggtctttgagttttaacactgtggaacagtatctttccccgatgatgccccagatggaaggtttgagttctgtccctgggtcctctccataccctacctgtttaatggcccgatgtcttgatgccttctcgcatcaaggctctgcgcctacagtccttcatccaaccaggaattccagaacccatcaggtaccctagatcttctgaaccagtgggatcagagtccccgttttgagtagtacagagaagaaagttccccctttgtgtttacctccctttttgtctgcctactccagttcccccttccccctgagtgctcaagctgcctaacatcttccactgccttcaaacaagggaagccagaaagttccaagcctcttcgtccacagtttacttttgtccagtacagccttggtgacctctgggagctctctccctgagaaggttgtctgagtgaattagatgaaatgtggtgggtgggttatttggtatgtcatctataaccatgagctaggacggcatgcgcttgcctgggcttaatgctgttactttccattagaaaaagatcaccttatcattcatcagacactctacagaatctcagaattatggttctgcacaatgtaagtgagggcatacatccacctacccaggaactgaagtggaatctcccccaccccacttgtggcatctccccacgattgctcttcagacaaatcctcatctgtttagttgtcattctgctggggacaatgcaatctaagttatttcatttagttattttcatccccttcccctctctcattgtatccttcaccacagacagctcttccagtttccaataattgtttatactccttatttctttttctttttttttgagatggagtctcgctctgtcacccaggctggagtgcagtggcgcgatctcggctcactgcaagctccacctcccgggttcatgctcttctcctgcctcaacctcctaagtagctgggactacaggcgcgtgccaccacgcctggctaattgttttgtattttttttttttttttttttttttttagtagagacagggtttcaccatgttagccaggatggtcttgatctcctgacctcatgatc

SEQ ID NO: 24051 - DNA, 1035 bp, Homo sapiens
caaatttctactcattctccctaagacccagagcagacccaggacctaaagaaattacatcatctctattttcccttggctccagcccactcttgtttgaacctcccacttttgttgttccaactacttcttgagatgaaggaagggcagaacattggccctcttcactgaagtcttcaccccttaatccagggttcaatttttagttcaccttagcctgtttgagattagaagctgggccttaacttacaggtgtgtccggcatcattcaatcagcctgttagatccagaatccagcactgtgacgctacataaccatgggctctgtccttccagttcctttagtgccttccctcactggtaggttcactctgagggcttccttccttgaactccagtggcaactatagtctgtttcccacaatttgttgtgtgtgttttttgttgttttgcagcgttttcatattgtcttttatgtaagtcatgtttctgaactatcgtataaatttcattagggtaagaatcatgtttgctttatgcactgtgtaacatgccttgcagtcagtataggcacttaaccttattgatcagttgttccttggtgttgaataatgtgttaggtagccaggtggacctgtgtcctagcctggagaagctctatgtcaccttgtaggaagccatctgaatttgactcagcatcatatgctgggcctgtgctgcacttgagctttctttccagccgccaggagggatggttgtcctggccaacagcgaatttaatgggtggtcaaaagaagatgtgcctgcatagaaggctgaaagagggagctggaagtaggaggagacaaggagatagtgacaccagtatcttgtcacagaaatcaaggaaggcaacagtttaaaggaggggagggagatcagtggtgccaactggctcagaagaggtttgctgggttaaatctcaagatgagcccatgagatctggtggttagcagaggcctttcctgacaaccccattttaagcacctcttcccc

SEQ ID NO: 24052 - DNA, 1081 bp, Homo sapiens
tttcttaaggctctttgaattatcaaaatgggaagtggtacattttcattgtcactgctgaagacactcagttggttactcttttaattccaaattagacaaactagttctatttcttagtgcttccggaaagcctcctagaagaaaaaaaataaggatacatttgtaaatgacaagtgatttttctgactttaccctaaaatcatggaagatatgtaaaacaaaccctataggctatccgttccttgtgtacgtaccccgagagagcctactttttataaaagctaaatatgtgaattacaaatggctgggctataggttttacttctttttcagctgttggatatcccacctgcctgttttcctctcttctctcccaagccatgcctctcggactccgaagttgaattacatataaccacatgggttgtttggaaacatagtcagtctttatttctagccgcttcatgaagtaggtgtgtgagaccctcagaggaaaatagagaagtagaaacactttgttaattagaaatgcattaagaagctgcatggatcttaacctttgcttgtaaaggaagaggtaataattgattacactgtgggcatacaacattccaggtgctatcttcagtgagggcattttcgagacagaaaggaaaactaatcacaagttctaatcccgagggtaatttagactttgttcacttgcacagatttattggatgcctcctgtgttgaagcaccaaggctggccctggggctgcagcagtgaataaggcagacccagtccctgcctaacagggactgaacacatgctcacgtgtgtgatatttgttccaaaggaggaacacaggttatctgggagagttgattatagcgaggaagaaatcttagtcttttctgtttgagttaaaggaaacattagcatatggttttagagcagaggccctgactcctagatccttatgccctgttctgtcctgcagcccctgcattcagtctgcagtacttccctcccactcagcaccacacccttctgcccctcaccccatcaccaccacaagctttgaagaaataaagg

SEQ ID NO: 24053 - DNA, 1010 bp, Homo sapiens
cctggccgacatggtgaaaccccatctctactaaaaatacaaaaaattagttgggcgtggtggctcccgcctgtagtcccagctacttgagaggctgaggcaagagaatcacttgaacctgggaggcagaggttgcagtgagctgagatcgcgccactgcactccagcctggcaacagagcaagactctgtctcaaaaaaaaagagtgaagtcctaaatcagtgggttaatccatctgttcttccaggacagatgatattgaataatgaaatgtttgtcaagcagagagaggactgaggataattcagtcaaaacaaacatttggagcaaaaattttgaggtgtgaaagagcctggcctgttccccaggaaagaggtcaaatctggctaaagcagtgagtccaggggaagagctaaggcagttgagaagtaggaggggtagctttgtgtgacaggtaaagaagatgtcattttctgagccagtgtgcatcaaacttcactaccagatgaatgcagaatagaattatgtacactctgcaaagcagcgggggaggagagttagtctcaagcctcacttgtttttccacttctttgttttatctttgacctgtgcaaattttacattctattcctgagtgaatgtttggtatgacatgaaagagatatttcaaattacctaacattttataaatgcaatgctattcatacatactgctttgaaccctggggctatggctgtaggcggtaaagagcctgtgaagtattttcagcaaggaaagtcatgtcattatattgccgtactacagacgggtggagtgaaggggaaaaactggaaggagggaacagcttttgccaggagctcaatacaacttacctcagtgacctgtggatgggtagacaatgaggaaatagaagcccacaaggactgcactgctagtaccttatgaaggcaggaatttactcctggactttctgaccttaaggcctgtactctgtccatatgcttccctg

SEQ ID NO: 24054 - DNA, 1072 bp, Homo sapiens
gaatgagcgagtgcaagaaagagcagggaaacctgccttataaaaccattagatcttttgagagctcactgccatgagaacagcatgggggacctgtcccggtgatacagtcgcctcccaccaagtctctcccttgacacctggggattacaattcaagatgagatttggctggggacacaaagcctaaccatatcaactagcaattttcaaattgctcccagaactctaacccaagccctacctgccatgcatgaagaagggaaataaagtggctcaagagtgggtgggatcttaaatgtgagccccccagagcaggaaatggagcatgaactccaggaagcttctttatctcttcccatctgccactcttgacataggggacaggtgtggggaacttaaacccttgtcctagagctaaagaacctggccaaaagaaaaaggtagaaaacagcaagaacccaaaagttaagcatctgacatttaagattggcccgcccggcactctatctttgtctaaataccttacccaatgacttccagataacgttaatggagtggatctctctgtgcaggaaaaaaaaaaaaaaaattttttgttgtgctctttacccttcaaatagaatttattgttaagggaagaaaaatacatggctctataggattgaagtgctccattgccagaagcctgcaggtccatgattcacaggagcagatctgcactgaacccttgacggttctgcaggtacacaggaagatgaatgatctggggacgtaagagtgccccagaagacagaaatctgtgtttctgtcctttatgctttggggaaatgaatgtgagattggtttctaacaaatacataggccaggcaaggtggcttacacctgtaatgccagcactttgggagaccaaggcaggtggatcacctgaggtcagcagttcaagaccagtctgggcaacatggcaaaaccccatctctaccaaaaatacaaaatttatccgggcgtggtggtgtatgcctgtaatcccagctacttgagaggctgaggcaggaaaatcgcttgaacccagg

SEQ ID NO: 24055 - DNA, 1888 bp, Homo sapiens
ctcagcctcccgagtagctgggattacaggcatgtgccaccgtgcccgactaattttgtatttttagtagagacggggcttctccatgtttgtcaggctgttttcgaactcgcgccctcaagtgatcggcctgccttggcctcccagagtgctgggattacaggtgtgagccaccgtgcctggccttcttctgtcatcttaagtgagaaaacatagtatagctttcatcgttatgagggttttgatactaacttctgttacgttttgaaaaaaattttggcctgtttgtctttcattgtgtctatcataaaaatttgatttttatacaacgagaattcatcagtattttggcttttcttacttaagttttattttagatgttcagatttctaaggtgagatttatttttgcatgcgatataagatagggattgaacttttcctaaatagaaagcctgttatccccaatctatttattgggtatttgtagtttcccttgtagtgtatgaattctaccttaagcatttcataagtactcttacagtcatgggtgttttaaggcctctttttacttccattgacttatttgtctgattctgtgtatttcattgttttaattaccaccatttttatataatactttggtttaaaacatacttcttacttttttttttttttttggcatttctttctccaaataagcttataaacaacttaccatgttctgcgaaaaatactgggatttttcagttggaatcacatgaaacgtacaggttattttggggagaatagatagctttacaatgaatcttcctatccagagaaagggaagtagacctttccgtttattctagtcttttttgtgtgttcatcaaagttttaaggccaggtgtggtggctcatgccccataatgccagtgctttgggaggctgaggcgggaagactgcctgaagccaggagtttgagatcagccagggtaacatagtgagaccccccgccaaccctcatctctacaaaaaataaaaactagctgggtgtggtggcgcatgcctgtagtcccagctacttgggaggcagatgtgggaggatcgctgtagcccaggagttggaggctgcggtgagctatgatctggccactgcactccagtctgggcgacagaaggagactctgtctctaataaaaaccaaacaaacaaaataaatgaaacgttttaaggttttcttcttacacatttcttgtgaagtttcttcctagatatgctgtagctgctgttgttgctgttgggaatgggatcttttctgttatactttgtatcccatctttgcccgcatattagaaatgcagctgctctgtgctgcctcttctgacacttctgtccctttctccctcaagtcctcatggtatattgtctgtacctccgtggcaatactgtgtgcctgagtgtgagttcccagtggtggggtgctcatctcactccatttcatgtcaccagtacctggcacaaagcctagcatgcggtaaatccttttaataaacgccgtggcatcagattgatgagagggacagtgagcttcacctcttcaaagtgtgacagcctgggccaatgtgagcagcagaatctcaagcagccctggctccaggccctgcaggctgtgatctggataacagattgggcaccctccttgtccccgcaggaaaaaggaggtcctgggccatttttccacgtgcagacatcagggaggagccctctgagcctctatctcattattatcctgagacccacagcccccttgttgttagccctcattagtgctaactagttgggagaactgctttcttagcttccaatcatttcaaggtagcacaaacaaacttatctgcagcttc

SEQ ID NO: 24056 - DNA, 1052 bp, Homo sapiens
tttgctcctgatagctctgccttccctccagcaactcctagaactgagttccctgaagcctggggcactgacacccctccagcaacgccccggagctcctggcccatgcctcgcccaagccccgatcccatggctgaactggagcagttgttgggcagcgccagtgattacatccagtcagtattcaagcggcctgaggccctgcctaccaagcccaaggtcaaggtggaggcaccctcttcctccccggccccggccccatcccctgtacttcagagggaggctcccacgccatcctcggagcccgacacccaccagaaggcccagaccgccctgcagcagcacctccaccacaagcgcagcctcttcctagaacaggtgcacgacacctccttccctgctccttcagagccttctgctcctggctggtggcccccaccaagttcacctgtcccacggcttccagacagaccacccaaggagaagaagaagaagctcccaacaccagctggaggtcccgtgggaacggagaaagctgcccctgggatcaagcccagtgtccgaaagcccattcagatcaagaagtccaggccccgggaagcacagcccctcttcccacctgtccgacagattgtcctggaagggcttaggtccccagcctcccaggaagtgcaggctcatccaccggcccctctgcctgcctcacagggctctgctgtgcccctgcccccagaaccttctcttgcgctatttgcacctagtccctccagggacagcctgctgccccctactcaggaaatgaggtcccccagccccatgacagccttgcagccaggctccactggccctcttccccctgccgatgacaagctggaagagctcatccggcagtttgaggctgaatttggagatagctttgggcttcccggccccccttctgtgcccattcaggaccccgagaaccagcaaacatgtctcccagcccctgagagcccctttgctacccgttcccccaagcaaatcaagattgagtcttcgggggctgtgactgt

SEQ ID NO: 24057 - DNA, 1032 bp, Homo sapiens
gctgagtgtttagaacaaggaagataatggtggacggtctgagcttcactgggcaacgtggtgctgtggcgtcagtgctatgccagagggcagagcaagcctccaggtcctggccaggccccttgccaggtatctcatctcctctcagccttcttaggatcataggagataatgtgccttgaaagttgatgagtggactgtaaatgctggtgatactgttgccccgtgaaccaagatcaatgtgctttccacaaactcttggaagtagtagtggctggtattgggattgtgtggggaaagatgaggtcatgtgttttgggtgctcagacccctctctcccagcactcggtcccccaaccccatgtcctctctcccccactgcttggggcaggtctgcaccctgaccaaggaagacaatcgctgcgtgggcaagattcccgaggatgagcagctgcatgttctccccctgtacaagatggccaacacggatgagtttggtagcgaggagaaccagaatgcaaaggtgggcagcggagccatccaggtgctcaccgccttcccccgcgaggtccgacgcctgcccgagcctgccaagtcctgccgccagcggcagctggaagccagaaaggcagcagccgagaagaagaagattcagaaggagaagctgagcactccggagaagatcaagcaggaggccctggagctggcgggcattacgtcggacccaggtgtgtggggggagggtgcccgcttggagtcacaatggcactgtcctcatgggggcccctgctcttccacgcaccctcctgcatcacactggaactggggcctctgcttaattgtcagtcagaagggtatctgcagcagccacagccagcctgataggaggccgtggggatgcaagtacagcaggacttgttatctgcgtggaagtgagcttggtagaggggaagcactgggtttctcctctagtttgcatccctcagagaatcagaggctcccctctgagctctagtttgctcccctctgaga

SEQ ID NO: 24058 - DNA, 1031 bp, Homo sapiens
tgcctccgctctgccaggaacatgaacggactctgggcaccctagctttggctgcagcccaccagagcctgtcagtgccgggctgcgtacatagaggtggcaaacatccgggaggctcccagggccttagggaaagggggaatggagagtgacaagtacccatatttcagcggtacttgcagaatttcagttttacaagatgaagagttctgaagatggatggtggtgatggttgcacaacatatgaacgtatttaataccactgaactgcacttaaaaatggttaagatgggccgggcgtggtgacacgcgccgaggctgaggcacgagaatcgcttgagcccaggagttcgaggctgcagtgagccgtgattgcaccactgccctccagtctgggcgacagagcgagaccctgtctcaaaaaaaaaaaaaaaaaaaaaagttgataaggtttatgttatgtgaattttaccacaataacaaaattgggaaaaatatacaggggaggaggaaaggaaaagctctgtttgcatttttgggtttccttgggaaggtgatttggtcggtcattagagcgctggcattgttggcattgttagagccctgcaccttacaacatcagccccttctttttttcatctaacgttcactgtgtaccagacactatgccaagctgtgcgaattcaaagatgagaaaaactgttcttaatggagctcatgttcctgacaaggggcagaacacgcgtgtaatttccagtcagtgcggaaatgctgttagaaatatttcaaaggcgctgcttgttggagcaatgagttcttgaaggaaaacgtgggaggggactttcagggttttccctggtctgactcttgacctcccccatgtttcgttactgtgtgttttctccccttctccctcttcctgagtgctggcctcatgtgactgtggaccagacctttcctaggcttccatggtccaaaagagatttataaagatgctctcattcattacctaaagaactgggccagtttgt

SEQ ID NO: 24059 - DNA, 1047 bp, Homo sapiens
ttttagaatataagaggagattacttcattggtcttgaggttagagcagtcttcatgacaccaaggacagagatctaaagggaaaggctttttttaatgggatcattttacttaaggaagagatgctcatctagtttagtttagtttagtttagtttagtttagtttagtttagtttagtttagtttagtttagttagtttagtttagtttagttttttgagatgcagtctttctctgtcgcccaggctagagtgcagtggggtgatatcagctcactgtaacctctgcctcctgggttcaagcaattctcctgcctcagcctcctgagtagctgggattataggcgcgcaccaccatgcctggctaatttttgtatttttagcagagacggggttttgccatgttgaccaggctggtctggaactcctgacctcaagcaatccaccctcctcggcctcctaaagtgctgggattacaggcttgagctaccacgctgggccagatgctcatctttaagtaatgggcactttactgtaaggacatgtgtgaaaataggaaaactgggactcttccacatttgggtttcatggaacccaggaagagttgcataagcagttctctttgggaagagacagcctttcgggcagctgaacatggttttgggaactggaggttcttctagatcctgatttttcttcttgctccccacctcagcaacagttttctgatttcttgccctgttgtctcccattggtgtgactattattctgcctattctttctgtctttgttctgtggttctagtttgaactgcctcagggacgagctcttactggttcaactaactctcactgctctgttgagctaagcttttgcgccaactggaccactggccagcctagagattgttgcccttggcgtcacatactcactcctggtctgtcagctttggatgatatggtggggtccctgggaagagcacattgccaactgtgagaaggagcttcctccagtcccctgccctgcccctattcttaccaggaaagt

SEQ ID NO: 24060 - DNA, 1049 bp, Homo sapiens
tgtatttgttgaaattttgttaacagacaattcagggagtaacctttgtagagaagctgcacccagtgtcacctgagtttctttattattcatttatcatgtaactagcttcagaaataaatttaagttttgagtataagcatggttgtaggcaattagaaaatttcagctatagctttgatagctggagctaaggagcaattcttattcaaagatactgtgtcatttagtggaaaaaaatctttagccgttgcaaaggattggattggtatgactgtaatgtgtcctgtcaggttctgttaattggttctaaggtaaagcctcgtcaatcagttatcacataattattgtaataatgaccttacatgattatatcagaaataaaggcaaaactatatactttcaactatctttcaacatacttaaaacaaccttgagtaattttagtgatattttgcttagaaaaggtaaaattcttgaaaggctttaaaaataggatgaataaatttaattatatgactcaaaacagtcgagctgggaccaatgggttaaagctatatgatattaggtattaattttaaaaaagtaaatgacaattagctgttcagaaaacatggcacaagccattaagtcagtttttttttttttttttcctggagatggagtcttgccctgttgcccaggctagtgcagtggcacaatcttggctcactgcaacctccaccttccaggttcaagtgattctcatgcctcagcctcccaagtagctgggattacaggcatgcgccaccacgcccagctaatttttgtatttttagtagagacggggtttcaccatgttggccaggttggcctcgaactcctgacctggtgatctgcccacctcggcctcccaaagtgctgggattacaggcgtgagccactgcacctggccgtaagtcaattatttttcagagatgttgagtttctacaatgacttgactagttgagacctaatccaatcccagctttgtgtcagaaatcaagacatctatttttttctttctagg

SEQ ID NO: 24061 - DNA, 1431 bp, Homo sapiens
gtcacaaacagcactccaggccagctcaagaagcaaagcaggccaatagaaatgcaatatttttaatttattctactgaaatggtttaaaatgatgccttgtatttattgaaagcttaaatgggtgggtgtttctgcacatacctctgcagtacctcaccagggagcattccagtatcatgcagggtcctgtgatctagccaggagcagccattaacctagtgattaatatgggagacattaccatatggaggatggatgcttcactttgtcaagcacctcagttacacattcgccttttctaggattgcatttcccaagtgctattgcaataacagttgatactcattttaggtaccaaaccttttgagttcaactgatcaaaccaaaggaaaagtgttgctagagaaaattagggaaaaggtgaaaaagaaaaaatggtagtaattgagcagaaaaaaattaatttatatatgtattgattggcaaccagatttatctaagtagaactgaattggctaggaaaaaagaaaaactgcatgttaatcattttcctaagctgtccttttgaggcttagtcagtttattgggaaaatgtttaggattattccttgctattagtactcattttatgtatgttacccttcagtaagttctccccattttagttttctaggactgaaaggattcttttctacattatacatgtgtgttgtcatatttggcttttgctatatactttaacttcattgttaaatttttgtattgtatagtttctttggtgtatcttaaaacctatttttgaaaaacaaacttggcttgataatcatttgggcagcttgggtaagtacgcaacttacttttccaccaaagaactgtcagcagctgcctgcttttctgtgatgtatgtatcctgttgacttttccagaaattttttaagagtttgagttactattgaatttaatcagactttctgattaaagggttttctttcttttttaataaaacacatctgtctggtatggtatgaatttctgaaattctgtcttcctatgactcctagttgtgacctaaccagtttttttctcatttaatcaatgtagctattcctatattcagtaacacttacttctatagccttaaatagataattttttttcttctatttttttttttttttttgtagagatggggtcttgctatgttgcctgggctggtattgaactcctggcctcaagcaatcaatcctcttgcctcagcttcccagagggctgggattacaggcctgggccacccacacccaaacagaggtttaaagagctttggagaaaccagcctcgtcctccagtctctttgtttgtttgttttgagactgagtcttgctctgttgcccaggctggagtgcagtggcatgatctcgggtcactgcaa

SEQ ID NO: 24062 - DNA, 1050 bp, Homo sapiens
ggcgcggagtcaaccttcccctatgctgccgctgcctgtagctgagggctgcccacctcccgccctcacagaggagatgctgctgaagcgcgaggagcgggcgcggaagcggcggctccaggcggcgcggcgggcagaagagcacaagaaccagactatcgagcgcctcaccaagactgcggcgaccagtgggcggggaggccgggggggcgcacggggcgagcggcggggagggcgggctgcggctccggcccccatggtgcgctactgcagcggagcacagggttccaccctttccttcccacctggcgtccccgcccccacggcagtgtctcagcggccatccccctcaggcccgccgccgcgctgctctgtccccggctgtccccatccgcgccgctacgcttgctcccgcacaggccaggcactctgtagtcttcagtgctaccgcatcaacctgcagatgcggctgggggggcccgagggtcctggatccccccttttggctacgtaaggcccttaacccggactctgcgccccgtcccatgcccgctcttgagtatcttccccaccctattaaattacatccggtgcttcggcttgtacagaactgggggagtgggatgttgtgggcagaccagtctccggtatacacgtattttgcccctgtcggagcttgcgtcgatgcctggggcttggaaaccaccgcaaaaaaccaggctgcaaaccagcggaccgacttttgggactccgcctcttccagccgggattacctggcgtgcttcggcctttggcgtcattccgaaaacataccgcaagccaatcagcggcaaccttgctcttcggggcggctgttcgttggttgatatgccagagcctgttctgttgtctgtattggctattgccgctgtcagtcagggccgtgggtcgaaccttcacctactctttgtctgtacaagctcttgttgtctgggtgagcggcggaggcgctgctgtggattggtcacagggagaaacctctgatctgttcctattggcccgtccgtcaag

SEQ ID NO: 24063 - DNA, 1059 bp, Homo sapiens
gttactacactcccagcaatgttttaggtactttacagatattaattcatttaatctccttaacagtcctatgagaaaagtactattattttcattttacaaatgaaataagcactgatagattaaataatttgtctaaagtcatacagctacataaaaacaaagctaggatctcaaccccaagcagtctggctcattacaacactatactgcctcctcctagctttcttttttaaagggggaggggaaaaacggtcctttgaagatagcacccttttagaccgggaaaaggtatagtaatgctgctgtaggagggtcgtgggaaatgtatctggcaaagtacacagcaggccactgtctacagatcttttgttacctagctgagcattgtgaaggtgtctaaagcagtggctttcaaccattttcctacaactcacaataagaaataattccatagtgcaacccagtatgtgcagatacacatacacacacaacttatttaaaacaagttacctaaaagaatacttttagctgggtgtggtggctcacgtctgtaatcacagcactttaggaggccaaggcaggagaatcacttgagttcaggagttctagaccagcctggacaagatgaggagacccccccatctacaaaaaatttaaaaattagggttggccgggtgtggtggctcacgcctgtaatcccagcaccttggaaggctgaggcggtggatcacctgaggttaggagttcaagaccagcctggccaacatggtgaaaccccgcctctactaaaaacacaaaaattagctgggcatggtggcacgcgcctgtaatcccagctacttaggaggctgaggcaggataatcacttgaacccgggaggcagaggttgcagtgagctgagatggcaccatcggcgacagagcaagactccgtctcaaaaaaaaaaaaaaaaaaaaattagggctgggcacggtggcttactcttgtaatcctagcacttcgggaggccaaggagggtggattacttgaggtcaggagttcctgaccagcctggcc

SEQ ID NO: 24064 - DNA, 1059 bp, Homo sapiens; identical to SEQ ID NO: 24063

SEQ ID NO: 24065 - DNA, 1038 bp, Homo sapiens
agagtgacaggggcaagggggctgagggactgggcacctactgtggtctccgcaagtccttcctgtatcctccccaagagtctgagccctgccctcaaagcccctctgcctctgccaccttccccagtgtctcagacagcctgcttcaggtggccatgccccagaagctcctggtgacagaagaggtgagattctcaggagagggctttgccgtcccccagggttctttcaatccctgtatccccatccctatattctcccctaattggtacctttcaagatccttctatactgcctgccccctttcatgtttgctctccatttccctgtttctctctttttctgtcacctgcccttcgtccttcaggaagccaatcgcctggctgaggagctggtggctgaggaggagcgcatgaaacagaaagcagagaaaaagcgactcaagaagaaggtggctagagcatggctggagggtgcaggggagccaaagggatttgggagagggaaagaggaaactttgtgggaacaggagagagctcaagatggcctgcagtggactctcttgccaggaggacacaaggggcccagggactggggggtctctcacaggccatctggtgcagtggttctggaatcctactgtgctgcctaggtaggaatctgcctccttacatgaggcctcttgctggtgcctctcttgtctgctttttcacctgcaaaatgaggataataatgatgcctgtctcatagagctgcaaagatggaatgcgaaatcttagcccagcacacgacatacagtaagtgttcaaaatacatcattgttaccattactattgcagcgtcaaaaggaacggaagcgacaggagcgtttggagcagtactgtggggagcccaaggtgagtatctagggcaggtactaagagcaccaagtgccaggaaggtgagggccaagaaagcaggcagctcaaggtgatcccaactctgtacctgtctatctttcttccaggccagcactacctcagatggagatgagagccc

SEQ ID NO: 24066 - DNA, 1034 bp, Homo sapiens
tgatacacactgttcaagggcggggcttagcggagcagacctccatccagaggccattttggtgggacaggtttgagttttgttgtccaagtcttcagtataagaggtggcagtgctagctgggctagaatttgggaaacctcaatggggagagaggttatgactcagccagttaatttgactggaccctaccttcctaactagaaggatttgccctgagagttctttgctcacccctggttggggagcaggatgggcataggtggttgtgtttgtccaaggggtgattatattacagtggttccataagaggcctgcccatctggctttcctgtttttgagcagggacctgcatgcttttgggatgtctgtagggctcctgacctctcaaaggccacccaccactactcaatggtatttttgccttccagctgagctggctccttgttctagcttctcaagtaaatgttccctccccagtaccttagcctgccctggacttgtagcttctccaagagtcacgtgactcctgacactttgccccattttcaccctcctaattaataggggtctgacccaacagcctgagttctgagttcccaggactggaaagtagagtgaccaaccatcctggttttcctggaactgagggatgttctggagtgagggactttcaatgccaaaacttggaaaatgctgggcagatgggaaagagttgatcaccctactggaaatgttccagagaggcagtatttagaagggagtactgaaggggcaatgcagttgcaaagaattatttttttgcatatgcataatggctgacagattcttagctccacaccagtggtcactgtctgtttccatgttgccatttttcttccagttgcccacatttgctaggttgtcattgactcatgcaatccttgatccctggggcaatcgcagattcctcttctgtgaccacctcccagccccacctcaagtctggccctgagttctctctgctgttaccttttgcagtggccagatatata

SEQ ID NO: 24067 - DNA, 1051 bp, Homo sapiens
atcctggaagatgtggcagccaggaacctcgggccttagcctctttaggaatcccctttttagcttagtctccatagccccttttcatgtccgacatcaccccacacttttcttcatcacacctccagcctttagcctcacctccttttgtgcctttgctgtttctcacagaacgtccagtagtgtttgaagttcccgtggctacagctgcgcatgtggtcttgccatgttctccaagctcagcatgggcatcctgtgtgtggcaccagcccagtggagtgactgcactcaccccccggcgggatggactggaggtggtggtgaccccaggggccatgggcgcttatgcctgtgaatgtcaggagggtggggcagcccatgtggtagcagcttacagcttggtatggggcagccagcgagatgctccgagccgggcccacacagtgggggcgggactggctggcttcttcttggggattctcgcagcatccctgactctcattctgattggtcggcgtcagcagcgacggcgacagagggaacttctggctagagacaaggtgggcctggacctgggggctccaccttctgggaccacaagctacagccaagaccctccctccccctctcctgaagatgagcggttgccgctggccctggccaagaggggcagtggctttggtggattctcaccacccttcctgcttgatccttgcccaagcccagcccacattcggctaactggggctcctctagccacatgtgatgaaacatccatctagagctgggcaaatgaccactagtgtataagtgatcactggaacggagtgaccactgagatgctgggggtcactgggcctggaagaccatcccagcctctgagttctctttgagtatgagtgattacttggattttagtatctgttctctctgagcctggatgggcttggggccagacctttgcctgattcctgattcccatgagaaatcagaactgctttctgcagcaaatcagggcttccccctaacatctgaactcctgtaaaccttc

SEQ ID NO: 24068 - DNA, 1051 bp, Homo sapiens
gctcccagttacttcctatcacatcctcctattttaattctcagcatagcatatcatcaatttgtattttcttgtttgcttagtttaattattttccttcttgttagattgcaaactccatgaaagcctgaactatggcttttttgttcactgttgtatccccagtgcttagaacagtgaacagtgcctgacacatagtagatgctcaatatttattgagtgaatgaatatggccattgccgagctgacccactgggtaatggaaagaacgcaggtcctgctgagaggccaacaccatccactggtcagtactcctgtaggaggccacttagctcccagctcctgtggttctgcagtaccaagtggcagcccctgggatcctctgctcatagactcatggttttcaagggatagctttagggtgtccttctcctagacctcaaatgacctctccctgtctgtgttccgaactccatcctggacccttctttgctttgggccctaatttgtgtctggttgtccacaggtaggtcctctctgctctttctttcagagtgaaagaatcaaagtatccctggaaggcacaacaccactttgcaagcataaattccctaatcatagttgcccttaataataataataatgccctaaaatataatcatctactagatatgatgtgggcattgagctaaacattttttacatcaaactcaatctcagaaagactggtggtgttagccacattgtcggccagtgaaactgaggctcgaaggagaaataacttgctcaggtcatacagttagtttgtagctgagttgtgactaaaacccaggtctctcggattccaaagcttgtgctcagaacccctgcagtgtacaaagtacccaaatagtgcccattacagatcaacttccgagaactgggtcttgccttcctagagtggagtggtgtttcctccttcactcattgttcatttcatatatataaaacagaacatgatcatatttcaatacgtaacttctgtacaaccaaaaattaaaacaccacatta

SEQ ID NO: 24069 - DNA, 1047 bp, Homo sapiens
cagccctgaggcatttgcttttaacaagctcccatgatgatgtcaactccccaatttatatctctagccctcttgcttgaacttcagactattgacaactgtttacagaacatctgctcttgagtgttgaagtgacatctcaaattcaagatgaccaaaacttaactccttcctctgccctgaaacctgttctatctgcagtcatctccattcagttcatgtttatgatacagctaaaattgctcatcagcatctaatgaagcaacgaagcaactttgtcaatcagacattgttgttttactttctttttcttccataaacttactctatggtagttcttttgttagtatggactttgaactcttcctgggcatctccagacctggtctctcatcaaaaggctgatctcatctaattagggcctgaggactgcaagggagggaagatcaaggggaatcctagaaacctggattccgttcaggcaggaaagcagattgatgatcaatggcctgggtccatgccacttactgcttgtgagactaggaaagttatttactttccagacgattcatagatcaacctaggggagggggtgttgattaaatgagaatatgtatagtcactgatgcatagtaaaagctcagttaactactggtagtaatgctttatcttaggatattctgagctagaaataaagtaaaaaatgaaattgatttgggagcctaaagaaattatcctgaaatgcataaagagaaacatgtaaaatactcattgaaaagctgaaatggaaaatggtcattttcccatagatattggtggttcacttcataaatctttctgaattaatcctttaattcagtatgtatttattgagcatttactatatgttaggctgttaggcactgctctaaatgctgaagaaaaatccgtgagcaaaacaggtgaaaatccctacatttctgaagctaaccttctattgggggtcatatattgaacaaaataaataatactacgggttggaggaaaggagatgattcatttggagtt

SEQ ID NO: 24070 - DNA, 1034 bp, Homo sapiens
tgccaccatgcctagctaatttttaattttttttgtagagatgggatcttgctattattgtccaggctggtcttgaactgctggtctcaggcaatcctcctgcctcagcctctcaaaagcactgggattataggtgtgagccactgggcctggccatatttgcacatttttaaagtttcaaaagatatgtatcaatttatacactagtatcttggtgtttggaggttacaagttattctctattttcttttctttttttttgtatattttctgattcctttatggttaatgtgaattagtcatgtaattacaagccattttaatttgcattaaattactagtaacacattttaggctttgggaattcaaaaaatgaataagagaaggagaaacaacatttattgaattttttttaacattttaggcaatgagctgaatcctttgtataatttaattcatttaatttttaccataattgcatgggatattatgtttccagtttacagataagggaactgaggctcatagaagattagaaactagcctaagattgtacattcagtgggatttgaaaccagatctgacgccaaagaacttatcgatattcatacaggtttaaaatttttccatgacaccacaggagcttgcagtattagaggggctcagaacccacaaacccaaagacttcaggtccaggcagacccagatcagtggctcatgagtgagacaaacatagggtcatggagatgcatagaggggagatctggctgcataatcagggagtgagatctgatgtgaacttgatgtcagatttcaggaatcagcaattgaggctagagcttttcccgaaggccaaagaatgtgggtgcagtggcaaggaggaagagtagggacagatgggttgtctggagtagacgtggggaagtttctgacacaggcagtactggacaaggttgtctgcacgaggtttgttgattcatatttcacggttaatctctttgcatttatttattttatagcattaccacttttgt

SEQ ID NO: 24071 - DNA, 1112 bp, Homo sapiens
atcggtggtttctagggtctgccatgggtcttactaattatttggaaccaaatataacagaaaacaagtttggaattctaaaaaatcccttaaaaacctttttaaaaaatcttggacacagcagctgtgaatggtctgggcctgcctgtgcagttattgctgaaattactggggctgttgagtatttggaaatcaaatcccagaagtgaattggctgtgccaatcagttgtaaaaggatctggccctgggaggtttgatgggtaggggcaaatggggacatgggaagagggtgggaggcttcaggactgcatgaactgagtagaaagatttggcctttggggacagagcatgcaacgggcagctgttcccggtgacctgggcatctgggacttactgagggagagacgtgatcttggcctagctgaccaccatcgaaaccactcatcggaggcgtggatgcagtttgctgggaagatgagcaccgatctgtctggtggtcacatggagggctttgcagatctctgacactggatatttccccttgccctggtgccaaggactaggggagagatcactctgggcttgagtcagggacagggatgccaggcacagcgaaagaagatgactgtggtacaaacccagctgatgaagtggaaaataaataaaagagaaggaatcaagctggttcatgtaggaagcatgcacacactcatcccatccattgttccacatcgggcacctccctgagctagctgccactcctgctgcactctgccactccttggaaggcagcacagggcagtggttagagccttctctttcagtgtcagacaggcctgggttcatgtccaggtctgccactttacttactagctgtgggatgctgatgagcccaagctctctcctagcctgcttcttgatcagtaaaatgacaatgactagagtacctagtatatggagttactgcaggacttgaatgtgccaatacatctaacatgcttagcatagggcctgatcatggttggcatttgataagtgctagttgttatcattattaatattactaatcatcaaagaaagatcttcagttggatatttgggcaaaattatg

SEQ ID NO: 24072 - DNA, 1061 bp, Homo sapiens
gaacaaattaatggcattcgtagcaacctggatgggattggagaccattattctaagtgaagtaactctggaatggaaaaccaaacatcatatgttctcactcataattgggaactaagctatgaggatgcaaaagcataagaataatacaattgactttggagactcagaggaaaggatgggaagggagtgagggattaaaaaaaaaacagccctgtgagtttccagttttaataaagctctgagaattaaaaaaataataatgtaaaggtgtatagcatgaaattagactatatgtaatgtctgtagaggagtgaatcccactggccgccccttacccacagatattcctggagggacttggagttttaagtctcggttggttcctggaagaattttgcccaaaattaatagtggcccttcctttctctgcagaacacggagagttcctggctctggatcttggagggaccaacttccgtgtgctttgggtgaaagtaacggacaatgggctccagaaggtggagatggagaatcagatctatgccatccctgaggacatcatgcgaggcagtggcacccaggtatgacccttctctcagggcagcccctggtgacaaaaaacttccttggcatgttctttctgtactttctccagccgctcccagcgtgtggataggcagtcacccaagacactcatggatgccagcacagctgtaagggctccctctcagccggagctcaggctgttctggttgtattttatacccaacatgtactcagtattaaaaggagtgactagagaagaagcatgaaatccaagtaagacgctgttcagtgttgtcacatctcgggcctcagggcttggaagaggtcaagccctctgattcgtggtcggctgttccctctcccacacaaggctccctcctgggaaaggaatttctgaccatgagtagaacacgctggggagatatttttagactcattatttgtctttggggtggccttgaggtaaacctgctttccttgttatcatgctggggttggagaagggaggctgc

SEQ ID NO: 24073 - DNA, 1034 bp, Homo sapiens
agcagtgaggaaacagcctcagtcttacaaccacatggaacggaattctgccggtagtctgtccagttgaatgtggattttcccctcaagcctcctcagaacagccgggccagctgacacattctgacacatttgctttggccttgtgaaaccccgagcagagaatctagttatgccatactggacctctggcctgcagaactctgaggaaaataagtgtctaaggtgctgaatttgtggtaagttattatagcagcaatagaaaactaatatacttctcactgaaagtcaaggtaaaaaaaaaatcaggaatactactgtagtggaaaggatcctggatggggtccgggagacactggttttcatcctgctactcattatctcccatgatgtgttaatcacttacccttcctgagctttctcttaccaattaagtgggttattttaaagttttttccacaggacatatttttcttttgtgaactttatttttttcagcaaaatttacctattttagtgtgcagctctgaacattaaatacctaaaatcaccatcacaaggtatagaacagttacatcaccacaaaattccctcatgccacgcctttgtagtcaacccatcccaccaataatgtctgtggaaaccagtaatctattgtccctgtgattttgccacctccagaatgtcatataaatcaaatcacacagtatgtagctttttgagtctggcttcaatttagcataaggcatttaaggttcatccatgttgcatgctatcagtagtatgttcctttttattgttgaatagtgttttgttgtatgggatgtaagtaccacaatctgtttatctgccaattgaagggcatttgagacttccagtttttagtgattatgaataatgctactgtaacatttgcatataggtttttgtgtgaacatcactttttgttgtctcttaggtatataggagtaggattgctggatcttatttaagtgtatgtttaattattaaagaaaatgccaactattttccaa

SEQ ID NO: 24074 - DNA, 1049 bp, Homo sapiens
tgtggttgtgaagcccacctgaagattctcaaacacacatttcttggggatgcccagaagaggtgatgcaataggtatcctaaaatgtctaaccaggggttcatggagtgtcaattatgggtccagtgtaagaggggaaaagagtgagcagaggagggaactggggaggtgatgacagagagaaatggaaggacccagggaagtcagagagcagatgcagtgagaataagggcactggagagcttgaaggacaggaaatcatggctggtgttaacgtttccagaaaaatgacatgttccagggtacaatttggaagtgtgtgcctgttatggactgaatagcaacccctgccaaattcatatgtcaaagccctataccatccaacgtgagcatatttggatattgggccattaaggaggtagttaaggttaaatgaggtcagttaaccccaataagggtccctcattattgtgtctttaaggaggtacttaaggttaatttaaagggtgagaccctaattaaataaggctctaatgggaaaacataaagttttttttttttttttttttttgagacggagtctagctctgttgcccaggctggagtgcagtggtgcaatctcggctcactacaagctctgcctcccgggttcacgccattctcctgcctcagcctcccgagtagctgggactacaggtgcctgcccccatgcccggctaatttatttgtatttctagtaaagatgggtttcaccgtgttagccagtatggtctcgatctcctgacctcgtgatccgcctgccttggcctcccaaaatgctgggattacaggcgtgagccactgctcccagcctggaaacataaagttcttatagagaaagagacactcaagagctctctctctctccccacatgcacagaggaaaggccatacaagggcagagagagaagatggccagctataagccaggaagagagccttcaccagaaaccaaattggttcgcatcttgatcatggacttctagcctccagagctgtgggcaaataag

SEQ ID NO: 24075 - DNA, 1027 bp, Homo sapiens
tgaagaaggtaaaggtataaaagaatggctactccatagacagagcagcccctcaatcattgttgagagctgctgggagtgggaggtaattccccaccttcctgcaacctgtgcaggagagaagagcggcattctgtagcttaggaaaaagttcctaggcaaagaaaggcagatcccggcagggtaatgtctctggtaaaaggcccgagggatatggctctgctataacaggatctagatcttacacttcaaaaattatctttcaatgctcagaatagtatttgggatactatagtcccctgacaactgtggacatatcaacctgatatgagggtatatgtgagaaatgcttgcagatacacattaaatctgtaccaacaaaagaatatggaaagaaagaaagagcaagaaggggccaggaaggcagcctgcaccatcgtttctttggcatggggagtcatctctactcacactttctcataaatcttgttcggatgctctggccattcgatcatgcacacgactctgctgggcatggtctctgtggttgagtagtagccctgggggaaggccagcaggagagccaggacccagatgacacagatgaccactttggtggctgtggctgacagccggggctggaggggatgtatgatggccatgtacctggaacagagaagaaagaacaaagttctgatctggtcaccaaaatctgtatcagagattccatatttttcctgccaataagaaaattcatagaaaccctttgattcctgatgatttgtacaattattttccaattccttttccatattctacccttaagctttgtgatatgccatacaatgccaacatgcgtaagaaaagccagctagatttttcagtatttcagaacctatctagcagcattcaaggagagacattttcatcattgaaatgcttgtgctggggacaggacagccaagtacaggtaagtgaaattagaaaaataagaacaatgttgtaaatttattcaatgtaaagactg

SEQ ID NO: 24076 - DNA, 1048 bp, Homo sapiens
acttaacaaagagtgagtacagctgaaggagccggggagcagcaggtatatgcgtcaggtatgaggaagaaaatagattttggaagttatgagaactgtagagattgagttgagcatagtttgtgattttgagggcctctaaaagtattagggcagcagcagcggctgcacggagacatgatggccagcctgaaacagtaaggtcaagttgtttggacaaaaaggctacaggacgcgatcctggtccttacataagaattccgactgcacagccctgcactttggctgtgtgtaatgaaaagggttgggatgagtcagggagaactagagtgggggcaatttctaaagctgtcttcaaggaatggaaagaggagtggggaaaggatttaggatctatggggtcagctaggtttccttttgtgagcttatataatggttttgttaggatggccaaaccaggtatccaaaggcgaaagtatccaaccatggccaggaaggaaaggagttcttgttttgtagaaggggttggggtttgagagatcagtcagacacgattggcagggagagcacgtgtgtttttatgagaattatgccaagataggtaacagatgaggaagaaatttgagcttgattgaagtaatgggggctgtctgtgaagctttgcggcagtacagcccgggtaatttgctgagcttgatgggagtcagggtcagtccacgtgaaagcgaagagaggctgggattaatggtgcaaaggaatagtaaagaaagcatgtttgagatctagaacagaataatgggttgtagaggcaggtattgaggataggagagtatatgggtttggcaccacggggtggacagacaaaacaatttggttgataaggcgcagatcctgaactaacttgtaaggcttgtctggttttaggacaggtgaaatgggggaattgtaaggagagtttataggctttaaaaggccatgctgtagcaggcgagtgataacaggctttaatctttttaaagcatgctgcaggatggaatattggcattga

SEQ ID NO: 24077 - DNA, 1018 bp, Homo sapiens
gacaccttgtgataattacatgatctctgaaattctttgccaatatacaaagtgaaatttttattaacaacttgcattcacttgaatatttagattttgaggcatatttttccacttttctccaatttcaacattagggtggaagataatttatatcattatcctgtgacctatgaatctattgctgatttatatcaaataagttcatgtcaacacactcttaaagtcattactatttctgttttctattaaagcataagagcagcagtgattgtttttatatttcgtacgtaagatattgaacattgctgccagaataaaaatacatatcctcggaatcagcggggaaagaagaccctgttgagcttgagcttgactctagtctggcacggtgaagagacgtgagaggtgtagaataagtgggaggcccccggcgccccactgtccccgggagggggcggggcggggtctgcccgccttgagggctgccggtgtaataccactactctgatcgtttttttttcactgacctggtgaggccgggggggcggggggcgagccccgaggggctctagcttctggtgccaagcgcctggccacgcgcagcattcttatacaccaacaacagacaaacagaaagccaaatcatgagtgaactcccattcacaattgcttcaaagagaataaaatacctaggaatccaacttacaagggatgtgaaggacctcttcaaggagaactacaaaccactgctcaaggaaataaaagaggatacaaacaaatggaagaacattccatgctcatgggtaggaagaatcaatatcgtgaaaatggccatactgcccaaggtaatttacagattcagtgccatccccatcaagctaccaatgactttcttcaccgaattggaaaaagatactttaaagttcatatggaaccaaaaaagagcccgcatcgccaagtcaatcctaagccaaaagaacaaagctggaggcatcacactacctgacttcaaact

SEQ ID NO: 24078 - DNA, 1046 bp, Homo sapiens
tattattcaaattatgattcttttgtgcactaggaaaggagtcttctgtacagatattttccctctggaagacagtggtaaatgtgggcatagagaaaacactacttatttgcacgatcctcatttagggaaaggacctcatcctacttcttgtttctgcagcattgagccaataccaggcaattaattttccaatgccttttgccttacaatgttgtcaagtgcctttatctatttttcacttagctatgggatcacttttatttcatgagttttctaattatttaattagaaggaccattagttatgcctgagtttttcctttctttgatcaattctaggctccgacgttctgctaactcctagaattcacctaaagaagcaagtggccacagggtgctgtggctcatgcctgtaatcccagcactttgggaggccgaggtgggagttcaagaccagcccggccaacatggtgaaaccctgtctctacaaaaatacaaaaattagctggtcaggatggtggtgtctgtaatcccaacttctcgagaggctgagatgggagaattgcttgaacccgggaggctgaggttacagtgaggtgagatcgcgcctttgcactccagcctgggtgactgagtgagactccatctccaaaaaaagaaaaaaaaaaaaagcaaatggccagtcagagttctaagcaaatggccagccggagttctgttttttctttattatgctacttattaaaatttattgaatgtctgtacagaaattagggaggacagtaggaatgtctttaccctctagtaagtctgaatagtccttacaagtttgggacagactagatggtccctaaaatcaagaacagattctggttttctttgtttataatgttagattttaggccaattaatattccagttagaaccttggggatccctgcaaagaggtcctgtattatttcagttctgcttttcatatctttttttcagttgatgctagatcaagttggactaaatcttcttggatgtgtctatttggctttg

SEQ ID NO: 24079 - DNA, 1035 bp, Homo sapiens
cccgagttgccgcacttgaagcggcaccagacggggcccgggagattgtacctctacctctcctgccggggctcttagggaatgccggttgcagggcttgtgtttggagctgaactttttatttcagtcttgcctgtcattgtacctcagccgcctcctctcgggaattaaaaactttgaacgccagctttactaagtcctgcataggggtttgggggccctccactgcctcatccaggattagcggatatcactgcccgcagcaaatatgttaggagttgtagaagtagtggactggtatggcactatggggaggtggaaatgagaatgggggtaagacggaagccaaggagttaggtgggcagggttaaaagaacaaatgggaactaacaggaattaaaacggtggccgaatggcagcagaagaactaaaatggcggcagagaaaaaaggaagtaagatggcggcagtgaggaagcaggtagtaagatggcggcggcggtgcagaaggagatggcggtggagagactaagatgggggccgcggacaggattaacggcaagagaggctagccacacttcaagtggaaggctaaccagagggacttgcaccagcgaaaacacttggtggcagtggtccgacgagagtggaggtcccagaaccattgaacaaatttgatttttgactatttgcctcgcctctgacaaaaattggtaaggtcgtttaggatactgaagtcgagtgtgccttcggggagccagcgagattggtcgtctaaggtatattgcggccaggcaaccatgcagaagaaaattagtcgctttcgttttaaatcttggtcgagttgtaaagttgggaggttgtgcaggaggcaccctaaaggggtgttttgcgcgattttggactgggtggacctcatcctcttccctttatggcagcagtctgagggacagcagaagcgtcctctggggtcactcagaccacgcggttcctggagcctcggatcggctacttcagacacggacgtctccgagtt

SEQ ID NO: 24080 - DNA, 1055 bp, Homo sapiens
ggcagctaaaggaatggtaaaaaagcaatcctttagatctatcactatgagaggccagtattttgggataattgttggggagggtaaccctggttgtagtgcacccatgtgttgaattacagcattaacagcccttaaatctgttaacgttctccatttccctaattttttcttaatgacaaatacaggagaattccaaggggagcaagtaggctctatatgacccttttgcaattgtttctgcaccagctcttttaaagcatccagtttttcctgtttcagtggccattgctctacccaaaccggtttggcagttagcgaaacaagaggaatgggagccagaggctcaacaatggctgcttctaaaaatgacaccccaatccggtccaatctgtttgtcctattaactctaaaggttctgattggccatttttatcttttcctagtccttttcctgggttatatcccatatttctcatcatttgtctactattactactatattgatccataggaatagatatttcagcatcccattgtgttgcaataagtctttaccccataaattaacaggaatagatgaaatgataggctgaattgtgccttcgtgaccatccgacccttgacatggtaaaatcaaggaactttgaaaaacttctgaggcagctcctactccagcaataaaaatggatgccttttgcttaggccaatgctcgggccattggtttatagcaataatagagacatcagctccagtatctactagtccttcaaaatcttttccctcaatagttactgtgcaaataggttttttgtcagacacttgattaacccaatatacagccgttcctgttggattagtactaccaaagcctcctgttcttttcactgtgcttcttctagttttatgtaaggtaacagcaacaactgagcaattctttcccctggggaggcagaccacggagttgaggaactaataacttattgaatttctctggtataatcacagtcaattattcatgtatgtacagtaaccccttttaaatttagactag

SEQ ID NO: 24081 - DNA, 1049 bp, Homo sapiens
ttgcaaagaaatgactccattctaaaatataaccatttgatttttaagttaatttttcaggggactaatagctatgatgtcattcttagaatctcaaagctacaagtaatgttagcatgtatagtttattcctctactcagttttgaattctcttacagtctacaacatattcccaatacaagatattctcaatctgcttacataccctcatgcaggcatttaaaaagttataataatcagttgaaagacaaacttggactttttttccctacatattccttctcattcattttctcatcagtggttataatgtataactataagaaaacactactctgtgaaccattgagtgaagtataagaaatatacactgtgcccatttaaaaatgtgtgagtctaaatgaaagaaaaatatctttacactttgcagcttaggattctttttatgttcatatataaaatattaagtctgtttctctttattctttcaggaacaaacaaaattgaacactatactatgtcagacttttgtattctgttatttgtggtctttgggtggaaacctaactgaaaactactatgattcttttgatacatttattagaacacaatttgatgataatcctgatgccagggtaagaaccaaataaattatattttaacataataattctgaattatttaaattttaagattaaaactttaaaagctttagttctattgaaaatataacttatacactaaactggttcctaaaattattcatgtttttccaaccatagacaacatttatcatattttttaagttaggagccctctcccagtcatattaaaaaagtaagatgtataagtatataaaaactctctactgtaaacaaatattgaattctagttagtaaatttatttttcacagtgtgaaagtaacagtgtgattggttagctatcctgaattgctggaatgtacttgctatatattctaagattgactaaataagtaaatatgttgagaataatggcaatgaatttctcactgttagagaagggatt

SEQ ID NO: 24082 - DNA, 1810 bp, Homo sapiens
gcaaaagcaagaggcctgggggcgactggggtggggcgtctcctagagcgaggattgctgcagagtgcgcgtgcacgcccgcacatccacacccacggctacacatcatatctgcacacgcacaaaaccacacaccctcccacgccggtcccatatcctttctgcggggtgagcagcagattcccggaaagggggaaatgtagccgcaaaagcaaagccgggggcctggcgcccactctggcggcgactacagcccccacgctgggcacactgcgagctgggggtgcccggcgcgggagaagccgcgcccagccgggctggtagcccagcggggggcgcggcagggcgaggagcagcccgcgctgctcccgcccctcgggtgccagcaccgcccctgctgcggcgggtgaggggcggggcggggcgcggcgtatataaggctaggggcgggcgccgctcttttgtttcttgctgcagcaacgcgagtgggagcaccaggatctcgggctcggaacgagactgcacggtgagtgcggcgccggggcggggggcccacccagggtgtggtcggatccggtgcaccgggcgggcgcgccgcaaccgcgacaggcgcccttctcggaccggacgcaggggccggcgaccacgccctgggaccgagaagaggggtgcgggacgcgcccagatcctcggccttggggctgctcggcacgccttggcgcgagtgccacgtcgagaggcgtcggcggggagcgcggaaggggacgctggcccccaggcccaggtcaagcgccttggtttgcccactaggattgttttaagaaaatggcagacaaaccagacatgggggaaatcgccagcttcgataaggccaagctgaagaaaacggagacgcaggagaagaacaccctgccgaccaaagagagtgagtgtgcctcggtctcccgcgccccagcccagcccctcaccctgctcttccttgcaaacccactcctccaccccccaccccgccgttgtccccggtgtgggcggccccggccactctttcagtttcacaaagcgccttgtttctccccagccccaagcttccttctaaatccccacacctcgtgggtgcctcgcccacaccgggaagcacctcggttgcgggtgggggttgcagctcccctccagcgcccgcttcccgctctccacagccattgagcaggagaagcggagtgaaatttcctaagatcctggaggatttcctacccccgtcctcttcgagaccccagtcgtgatgtggaggaagagccacctgcaagatggacacgagccacaagctgcactgtgaacctgggcactccgcgccgatgccaccggcctgtgggtctctgaagggacccccccccaatcggactgccaaattctccggtttgccccgggatattatagaaaattatttgtatgaataatgaaaataaaacacacctcgtggcatggctggcgtggtctgagtcttttagttgagtatgcgtgggcagtgccactgcagcaaagcccctcgatggagtagagttcctgccgcaaaggggaggaggtgggtcgcagaatgggctgactcggagggagtttttaattttggctttacctgcttctccgtaagatttcatgacttgttagccacttaactcttgctcgtaagcaatctgtgtaaaatttaaccccactttgtccccaggttgcgttggaaaatgctttttcaaaagagcaaggtttgcttttgataagcttcgaaagccccactgtttccctctggcctcctcctagc

SEQ ID NO: 24083 - DNA, 1023 bp, Homo sapiens
caccattgcaaccatcaccatcacctccaccatcacaccaccactaccattatcatcatcaccattgccaccaccatcactaccatcactactaccatcaccacctctaccatcaccattgccaccatcacacctcaaccaccacaccactaccatcaccatcaccaatgaccattgccaccacctttatcatcaccatcaacagcaccactatcaccacaccaccctgtccccattgccaccatcgtcaccaccaccatccctattgccaccaccaccaccatcaccattgccaccatcaccatcatctccaccatcacaccaccactactattatcatcatcaccattgccaccaccaccactactaccatcaccacctccaccatcagcattgccaacaccttcaccatcaccaccaccaccaccatccctattgccgccgccaccaccatcaccattgccaccatcaccatcatctccaccatcacaccaccactaccattatcatcatcaccattgccaccatcactactaccatcaccacctccaccatcgccattgccaacatcttcaccatcaccaccaccaccatcttcaccatcaccaccaccaccaccaccatcaccatcaccactaccaacaacaataacgacatcaacaccaacacccatacatcatcttcttctaccctgcctatgaacaatggccaatagaagaccaatattatgcagatatcaatcaatgagcttcagagggcccagtgcaggaaatgaggcttgagtagtataaatttaaggcactttggggttcagcaatataaaaatctgtgaggacattttgttttggtttggttgtcataataattaggggacattattggcagttcataggcagagaccagaaatgtttgacattctgaaatgcatagaacaatcctacacatcaaatatttgtctcatgcatgactttgttttaactctttactgtattataacatatatatggtggccaggtgtggtgg

SEQ ID NO: 24084 - DNA, 1048 bp, Homo sapiens
ttaaatcattcaacctttcagtcactactatgtgtaaggcagtctgctaggttccaaggaatgtggggctaagtgaataagatgcagctccttactttaagtctggcaaggaagatgcattttttacgtagcttccacagtgcattgtgaaacatgccataaggaagggataaacactgatgacaaagtaattgccaacttttactaattttgtcaaatttcagagaggtactctactgtgattctagcacttttttcttgagtgccttcttaactcctttttttttttttttttttaaagacagagtctcgctctgtcgcccaggctggaatgcagtggcgtgatcttgtctcactacatcctccacctcctgtgttcgagtgattctcctgcctcagcctcccgagtagctcggattataggcacctgccactgctactggctaatttttctatttttagtggagacaggtttcaccatgttggccaggctggtctcgaactcctgaccgcaagtgatccacccacctcagcctcctaaagtgctgggattaccggtatgagccaccacgcccagcaccttcttaactctttctgggctacttttgattttgggtaaaattgtttgagatttcaagccggttgcagtgatgtgcacatgtagtcccagctagatgggaggctgagagaccctatttctttaaaaaaaaaaaaacaaaaaaaaacaaattgagatttcaagtagagtccttatctttatctgatttataatttctctagctttttgaagattttcacatgtaaaaatgatagtggataaatgagcaggtggtcatattgttatgctagtttcagaagtatctgatactatttatttttaaaatgtaaaatacaagactacgtaggccattaatctacttagtcccaactttttttgtttttatttttttaattggcaaaaattgtatatatttatcatgtataacatgatgttttgaaatatgtatacattgtagaatggcagctccaactttttgaaagttgtacc

SEQ ID NO: 24085 - DNA, 1030 bp, Homo sapiens
taattaattttagtgttgtgctaaggaccatgatgtttttcatttccttaaaattataaggtattttttcagtctttgaagttattcattaaaattgagaaaagaacccgtaagcagtatacagatcagagcatcttaaaatttggtaatttttttttttttgagaccgagtttcactattgttgcccaggctggagtgcagtggcgcgatctcggctcaccgcaacctctgcctcccgggttcaagtgtttctcctgcttcagcctcccaagtagctgggattacaggcatgcgccaccacgcccggctaattttgtattttttttttttttgtagtagagatggtgtttctccatgttggtcaggctggtcttgaactcctgacctcaggtgatctgcccacctcagcctcccaagtgctgggattacaggcatgagccactgcgcccagccagttatttttatatgttagccatgtcttgatttatgttaaagatctgggataaggcagacagtttcctaaaggaacatattacctagattacatgagaaggaagtgaggagccaggaaaagataggctgttcttgggttggtaaggaccagtggccaggtgggtgttggcagaggaaagacaggcaaggtgggtgtgaagcttggaaatggatctgtagctacaggatgttggaaacagaaaaccagctctcacgcctgatggaatgtcttgagagctgggtaccaggaagtgaaaacactgcccaatgaaatgaacaagagatgaatgaattgccttgttaggcaccttccaccattccctctctgctacatccctgatggccctcttggtgtttgttaaccatggtaactgcctgtagaattgtttttagttgttggctctctgagttgtagcaaagtagaattatgagttcatccaattcatatacacagtcaattagcctcatatctttttttttttttgtcttgaggccgggtctcactctgtcacccagactggagtccagtgacataaa

SEQ ID NO: 24086 - DNA, 1048 bp, Homo sapiens
tcaggaacttcgacatcacttgggcaggaccagccaagtccagataagatacggggactgggccccaggtaccactgtgtcctcaggttacaaagaaaatgtatgatattgtgtgattttatgtatgtatgtgtaattaattcttgttataggtgctaattgtgtttttcttgttgttgtttttgagacagagtctcgtcacccagtctggagtgcaatggcgtgatctcactgcaaccgccacctcctgggttcaagtgattctcctgcctcagcctcccaagtagctgggattacaggcactgccaccacgcctggctaatttttttgtatttttagtagagatggggtttcaccatgttgaccaggctggctttgaactcctgacctcaagtgatccacccatcttgacctcccaaagtgctgggattacaggcgtgagccaccgtgcccagccgctagttgtgttctataaagtttacatgaacaccaagttagcaattactgaacctctgttcctagaggaatctcagggtgaggttcctctgagcctctggttataacattttttcgatggatcaatacgtaaccttgttttatgtgtatttctgctaaaatacatcacatattatattatatatgatatatattatatatcatatataatatataatatgatatataatatatataatatataatatgatatatatatcatatataatatataatatgatatataatatataatatatattatatatcatatgatatattatatatgatatatattatatatcatattatatattatgtgatatatatgatatatacatcatatatctgagatatatgttacatgatatatatctcatatatcttatatatatttagcagcatttcagcactacacttgggagccatttaaatagcgaaactaccaagaaacagcacaaaaaggtgaaaacatgggactaaatagaccatgaaaacgacacttgtttacaaaatgagagctgaaagaaggaggcagagcattgctttgttg

SEQ ID NO: 24087 - DNA, 1033 bp, Homo sapiens
cattttcctcattttatgtttatgcttagtcccttccttctttcttttccgtattaccgtatatcactctcagtgatacaaagacatcctttctcagagaaagtctcccaaagatcagttcatcctaaccaactgtttactgtacctttcagcttgcatgtcttatcacttcaaaccaaacatgtctaaaatcagactcacatgcctcctaaaccagacataaaccacaactcttttccgccagtgctagagtattctctatactttgtattaattattcctactcctatacagagctttatgtttgttgtaggtccctttattttaaaatccgtgaagaaactggagcagacataaagaaatgtaatttaacagttgacggtaggattttggaggacttgctaacattttaaattggttagcctacaaaacaggggaaagtgacttagttcatgtttgtggtgagtttttgagactggatttaggataactgctctatatgtggagaacattagaacaaagggacctgaagttatatttcagtgtcttagcgaggatttcaggaactgcttggtatgaagagttgtgtcagggtgagtctgttgtacttccccagctagaacaagtcatctttcatcattttcatatgtttggctttgtttctgtaggtctctatcccttagtcttcatactgttttaaatgcttatttacttatccttattccccatttaggctctaagcactaagtgggtactgcaagtgctcaaaaattttggttgctagaaatagtagtgttaagtcaatgagaaatggtcttaaaatatagacccagggcagatcttttcccacctcagtacaatgagctgtcatgtgccttacttgactgggaatctatcacaaatacatgtgcagacatttctagtttagataacattaaaaaaacatttagcgaacagtatgtattctgctccctccttatacatcttgcagtacattaaggatttccagttttcctttccctcaaacagttgc

SEQ ID NO: 24088 - DNA, 1028 bp, Homo sapiens
ctaagctcactcatgagcaagtccattgttgctaagataagtttctgttttcagaacagggatgcatttctatgaacaaataaaagagtgtagatcagttctttaaaatgaggcaaaccaatcagttattccaaagtggaccaagttcctctatactgaaaacttttagaaatgaattaaacttccctctttcacaaagttcataaagaactctttaaatacaatatttcacccatttttctattcactttgttgggcagatttgaaccagctttaaatcatctgtagccacaaaagaagttttatcacactttccacctacctcatgactttgtgaagattgacaaagtaatatatgtaagtcattaggtacataattaaaagtgaaggaacttgctattaaaccactagagggacgacctctgtgtggcaagaatttttattcactgctgtgtcctcagcaaatatttttgttcactgctgtatcttggcatataataaataataaataatgaaaggatgggtggatgctccttgttgttacatatcacaggactcacagaattctacctggaaaaaaaaagtagaaaagccgatttccagtcagaaagggttgttttaaatgttttaaatgctgaatgaatgtatcagtttcaagtaagactactgcgtgaagactacacatattgcaaaacctacttactaagcttcccggttctctttcttctggatcttgctcctggatcatgctctccccctatttcatttctctttctctgctgtggaatctctttagccataggttttctcttgaagagtgtgtttgtacgggtctcgataccccatttctctctcctcttgagtctgtcccttaaacacagggcataggtttttaaaaatatgcgtatatagagttatatgtatatttaatagatctttttattctcttcctatttctaaaaataactaaggaaagctctctaaaaaaaaacagacaaaccctagagtttctttttattttggcaagg

SEQ ID NO: 24089 - DNA, 1047 bp, Homo sapiens
taaaccccagagggagccactgaccaaaattttatcattccctcattttccttttatagttttactacatgtttgatttcctaaactagatactggttttcaactttatactgtatgtattcttttttttttttttttttttgagacggagtctcgctctgttgcccaggctagagtgcggtggctgatctcagctcactgcaagctccgcctcctgggttcacgccattctcctgcctcagtctccccagaagctggaactacaggcggccgccatcacgcctggctaattttttgtatttttagtagagacggggtttcactgtgttagccaggatggtctcgatctcctgacctcatgagccgcccgcctcggcctcccaaagtgctgggattacaggcgtgagccaccgcgcccggccaatactgtatgtattctttgaaatttcctttcactcatctgaggcagatgttcttaccgttgctgtgattcattctttttccaattcattctgtgcatattgaactgttgagcctttgaatctgaatagcctttttttttttttttttgagacggagtctcgcactttctcgcccaggctggagtgcagtggcgcgatctcagctcactgcaagctccgcctcctgggttcacgccattctcctgcctcagcttcctgagtagctgggactacaggcgcccgccaccacgcctggctaatttttttttgtatttttagtagagacggggtttcaccgtgttagccaggatggtgtcgatctactgaccttgtgatccgcccgcctcggtctcccaaagtgctgggattacaggcgtgagccaccgcgcccagcccctgagtagcctttttaaaattcagttacaaaaactgccgtcaacattcttccacattctctaggtgcacacagacaaaagattccctccccgggaatttatttaagagtgaaattacggtatcataggaggtatatgtgtttaacttgactaaaaatatgaacaaatttttcaaagtggttgtgctgatt

SEQ ID NO: 24090 - DNA, 1026 bp, Homo sapiens
ggtgatccacttgcgggcctcccagagtgctgagattacagacatgagccaccacgcctggcttcgtgctataatttcttacctagcccacactttttgtcctttttatttcagccatcctagtaggtgtaaagtagtatctcaggtggttttgatttatatttctctgaaatataaattatgttgagcatcttttcttgtgcttatgggccatttgtatatctactttgaagaaataccttgatcctttgcccattttttaattggataatgtgtctttgttattgaattgtaatagttttttattccttatgtaagtttttttatctgatagatgatttgcaaaaattttctcccattctgtgggttgtgttttcactttcttggtggtgtgctttgaagcacaaaacttctaattctgataatgtcccgtttatgtattttttcatttgttgtgcatttgatgctgtatctagaaaatcactgcctaattcaaagtcacgaagatttaaacttgtgtgttcttctaagagttttatagttttagctcttacatttagatatttgacccatttagaattaatttttatatgtggaatgaggtaaagggccaactttattcttttgcatgtgagtattcagttgtcccagtatcttttgttggaaagactattctttacccaatgcattgtcttggcactcttgttaaaaataggttgactataaatgagggtttatttctagactctcagtctattcacattgatctatatgcctggtgtttttgtttgttttttgacacagagtctcactttcacccaggctggagtgcagtggtgcgatcttggctcactgcagcctccgcttcccaggctcaagcaatcctccaccctcagccttccaagtaattgggatcacaggtggaagccaccacgcctagctgatttttaaattttttgtggagatggggtttttccacattgcccaaactggtatcaaactcctgagctcaaagtgatctgcctg

SEQ ID NO: 24091 - DNA, 1095 bp, Homo sapiens
aactttgttctttttcaatattattttgggtattctgtgtccgtttcatttctgtattttagattcagcttgtcagtttctgcaaagaagccaactaggattttgaatggaattatgtcgaatcggtagattagtttggagagtattgccatcttaataatattaaatctgctgatacatgaacatgggatatgcttccatttttgtaggtttttaatttcttttgacaaacttttgtagttatcacagtatgagttttgcacttccattgaatttattcctaagaatagatggtccccagtttatgatggttcagcttatgctttttttatcttatagtggtacaaaagcaatatatgttcagtagaaacagaactttaaggacatacaaccatgctgtttttcattttcagtgcggtcttcaataaattacataaaataggctttgttttaggtgattttgcccaactgtaggcttacataagtgttctgagcacgtttaatgtagactaggctaagctatgatgtttggtaggttaggtgtattaaatgcattttcaacttaaaataggtttatcaagtttattaggatataaccccattgtaagtcaaggagcatctgtattctttttactgtcttaaatggaatttttatcttacttatttatctatctattttgaaaggttctcactgccacctaggctggactgcagtggtgccatcatggctcattgcagtctcaatctcaggctcaagtgatcttcccatctcagccttccgagtagcccacaccacatgcacatgccaccacagctgactgaatttttaattttttgtagaggtgaagtcttgttacattgtaaaggcttgtctcaaactcctgagctcaagtggtccccgcctccacctccaaaagcgctgggattataggcatgagccaccgcggctgttttttaaattttatttttgaattgttcattgcaaccatatagacaaacaattgattttttttttcatatagatctcatatcctacagtgttactgaacttgtttattcattccaagagtggtttgttttgtttgttggttggtt

SEQ ID NO: 24092 - DNA, 1030 bp, Homo sapiens
gccagatctaatcttttgacagtgggaccagttcattttgctaaccccaacttgaagatcctcacaagccttgcagtttcatttatatcctaaatgttatatttcatcaagaaatttgtctagtctctgtgcagatgagccaggtttcccagcatagcccagatctcataagtacatgcatcaggggagcaagtcaggcaggtagaccttgtgtctgccctgctacactgtaggtccttggtagaagaaatgtaggagtttgtatgtatgtgttttcttgccctttctagcttctgcatataccaagaagaattaaatagagtaatagagaaaagtcagaggaaatcttaggatatttttcagttgaatattctgttcactgcagattttgtttttgtgttttattttcctctttttatttacccccagatgaaattctggttagatactttcccaagcatctaatctgtaagaaatcctgttttccttagaaaattttcacctagctttctctggagtggaaaaagtctaaatgtctttttttttctcattgagtctaattaaagcatagatttgcacctccaggtaacagtattgcaacaagtgtggggaattcgtctcaacacaattaaggataaattacagccaagtattccagcaatgtctcattctgaattttgccacctgtaaaacttcacagtggagagcactgtagaaattggccatgccattgttcattgactttttaacaataaggtcttttctttttaacttacacaggttgaatgatcctaaaatgtctgaaacggagcgccagtccatggaaagcgagcgtgcagaccgcagcctgtttgtccaagagctccttctgtccactttagtgcgtgaagagagctcatcctcagatgaggatgatcggggggagatggcagattttggtgctatgggctgtgtagatattatgcctttagatgttgctttagaaaacctaaatttaaaagagagtaataaaggaaatgagcctccacca

SEQ ID NO: 24093 - DNA, 1070 bp, Homo sapiens
gcttacctgctaacatttgacctgtttggaaattggggattgtttttcctcattgaaattggtgagggttggaagaatacgcaaacgaatgtttggtgtggaagaacgctggaggagtaaacttactatactcacaatttggattacaacatagtttggttaacccagctctggtgaaccaaatgtacaagtattatttccttatggttcatcttataaaatattttataaattggttgctttctttaagctctccacaaatgaaaaatcagtcccaaaaatctataaaagactatttcagcgttaattgaccattaaggaaatacatactaggctgcatgtggtagctcacgcctgtaatccccacactttgggaggctgaggcagacagatagcctgagctcaggagttcgagaccagcctgggtaacttggcaaaaccctgtctctacaaaaaaaaaaaaaaaaacaaaaaccaaaaaaaacattagccaggagtggtaacgtgtgcctgtaatcgcagctactcaggaagctgaggtgggaggattgcttgagcccaggctgttgaggctgcagtaagccaagattaccccactgtactccagcctgggtgacagagtaagaccctgtctcaaaaaaaaaattttttttgaacaataaagaaatacatactaaacatttacacagttattttgggaattgcagaggggatatttgtcttctttcccatccccctttctctctctctctctgtgtgtgtgtgtgtgtgtgtgtgtgtgtgtatgtgtgtgtgtgtgtatgtatgtttaagatggttagaaatcatgaaactccaccgggcacagtggctccctcctgtaatcccagcactttgggaggccgaggcgggaggatcacttgaggtcatgatttcaagactagcttggccaccatggtgaaaccccgtctctactaaaaatacaaaaaattagctgggtgtggtagcacacacctataatcccagctactcgggaggctgaggcgggagaattgcttggacccgggaggcagaggctgcagtgagccaag

SEQ ID NO: 24094 - DNA, 1073 bp, Homo sapiens
gataacgcctactctacacctgcaagtatcattctcccaccctaccttttctcctggctgattccagcaatgtgggactggctggggggtaaggggctagcacatggtacaagaccagctcccaagagcaagtgttgagtgcaaccactatggaaaacagtatagaggttcttcaaaaaacaaaaaattaattaaaaattaaagaattatatgattcagcaatctcattactgggtatatatccaaaaaaattgtgaaatcactgtcaaagagacgatctgtacccccacattcactgcagcactattcacaatagccaagttacagaaacaacctgagtatccgtcgacagatggatggctaaaggaaatgtgggctctgcacgcaatggaatatcattcagctttttaaaagaaggagccaggcatggtggttcatgcctgtattccccagcactttgggaggttgaggcaggaagatcacttgagcccagaagttcgagaccagcctggccaacacagtgagaccccgtgtctaagaaaaatacaaaaataagctgagcatggtggcacatgcccgtagtttcggctactcgggagactgaggtgggaggatcgcttgagcccaggaggtcgaggctgcagtgagccaagatcccaccactgtactccagcttgggcaacagaacaagaccctatttcaaaaaaataaacaaggagaaggaaatcctgccgtttgtgacaacaaatggatggacctggaggacatcatgctaagtgaaataagctagtcacaggacaaatattgtatgattctgcctgtatgtgggatcgaaaatagtcaaacttaaagaacgctggttgccagggaatgggggaagagggaaatgtgttgttcggtgggtgtaaagttacagatatgagatgagtaagctctgcagctccgctgtacaacatagtgcccatggtttagagttgggcacttacaactttattaagagggtcaatctcatgttaagtgttcttaccaaacacacacacacacacacacacacacacacaaagggacacaag

SEQ ID NO: 24095 - DNA, 1026 bp, Homo sapiens
tgaaattagttctgtagccgcttgtcaaaggaataatgaggctgttggttttttagactttgggaaggtgcctgttctcatgctgctaataaagccatacctgagactgggtaatttataaagaaaaaaaggttaatgaactcacagttccacatggctggggaggcctcacagcagaagggaaaggagaagcagaggcacgtcttacatggtggcaggcaagagagcatgtgcaggggaactcccctttataaaaccatcagctctcatgagacttattcactgtcacgtgaacagcatgggaaagacctgccatcatgattcagttacctcccaccgggtcccttccatgactcgtgggaattgtgggagctacaattcgagatttaggtggggtcagagccaaaccacatgagaaggattatgtcagaatgatttgggggtgctgttttaaaatgcacatcctgggcttcacccctgtaatttccgctccagataggacagaactgggaatccacaacaacttctagggtgattctgaccacagccaggcttgagagctttgtggtgtgtactgctactcacaggactgggcagtagacatgaatgagatgatctgcctttgtcagagtccttcagagcttctgttgtgggtaaatattgggaaagccaatcctcttcaatagggttcatatgaaattttataagccatttttataagtcagaaatagttgatggttagcaattctatgcagtttcactgatagagccaggaagtgaggctggttggggcttggagttgaccatctcctgcctgctagctttgccgccttggccaaataatttggactctccaagcctccatcttgcatctccagaatggggattgtgacatctcctttgccagattcttgtaaaatgtagagtttaccgtgtacatgtcaagtgtccctggtacctcagtagctactgtttttatcctattgtgataaccattcccatcttcccccctccccccacactgcc

SEQ ID NO: 24096 - DNA, 1035 bp, Homo sapiens
aaagtctcaggcaggtctcaaagctggcaagtttaaactaagtgatatttagtctgggtgggatactgatcatgcatttttctttcttttttcttgctctaaagggcattattagggccgggtgcagtggctcatgcctgtaatcttagcactttgggaggccaaggtggcaggattgcttgaacccaggagttcaagaccagcctaggcaacaaagcgagacctcatgtctatatttaaaaataaataagtaaataaatagagggcattatcaggacagctggcagcatttgaataaagtctgtggattgagtgatagtattctaccagcggtagttttctgttctttgttccttctcctctaccactgctccacttgactagccttaaaaaataaaaagcaattaaaataaataagatggcaattttatgactaggtaaactggtattgtaagaaaatgtcttttttgggaaatacagaagtatttagacaaaaggggacatcatgtgtgcatcttactctaaaatggtttggggaaaaatgcatatagagagagagataaagtaagtgtagttaaatgttaacatttggggtatgtaggtgagtggtatgtggaagttcattttactattcttgcaacttttgtataagtctgaaattattttagtatttaaaagtttaaaaaaaaaaaggccctcctgtggctgaggtggtaggagggttagtgtgaaaagatgggagaggggctatgggatggagaggggtggggcagaaccctggaaggtgaccccctgggagtggatggctgaagacatgtgaatgaagagaggagaaggggggaataaactgaataagaaaagtcccccaaacagagcaccttcccaccgaaacaggagggattaccttcgggaaatgatgtgggcagactctaaggcattgccaagttggaattacagaattcaggagtggtggctcacacctgtaatcccagcactttggggaggccaaggcgggtggattacttgaggccagga

SEQ ID NO: 24097 - DNA, 1048 bp, Homo sapiens
aataataacatggtcatttccggagtacttgccatgtgccaggcatcattctaaacatgtatgttaactaatttaatcctcacaacagccctgtgaggtggcgatttcggtcagcatcatctcattacctccacatgcagggagggaaaatgaagtgtggagaatcgcagcaacctgcctaagggtcacatagctaacaagtggcagagcccaggaacctgcgcgaggcaccacccactctgcactgcctcccgtcacacagcaagatgggtctatctcccagaggcaccttgacttctgcactcataaaataggccacacagtagagattcagtacgcattgttgaatagctttcatctctagggcagttttctgtcttcaagacaaacagtggcctgagagctctgagaatttaggtatccagggatccaattgctttcttatttactgagagataggcatgtctctggtgagatcctgccaaacataaactcctccttattaataaatttaggaattgtctggaaccaccacgatggagactatcaacaatatgtacatcagttctctgagttgaaaggtgtgtgcacagcactgcccctgatgtctgtgactttcggtcagagacttaacctctctgatctttagatcttcactggtttaaaaagaaagagctgggtcagtattaccaacctcaacaggtcattatgaggattaaatgagacaacacatgggaagggtctcatccagtgctggctcgtagtgggatctccatgaaggtaagtctatccctgtgccttccaggaggggcaacagctatgtgggatttcataaaacgatgcattataggacctgctccctgccctcacctagcttataatttaggcaagaagagtttctgaaaccacagacatagaaatcataattccaggccacagcaggggagaccccacatggcagtgcctggtctggtctttagagcaggcatgacctatgcccgtgggcccacatcccttgtagctgtgatttggggcaggaacagtgatt

SEQ ID NO: 24098 - DNA, 1107 bp, Homo sapiens
ttcctcccggccctggaagaatgcctggtgtgtgtgcatccccctctccagttagcaattaccgaacaacttctgtggctaccaaggagagcatgatagggtcccagccctccagagcttacaatgtaagagaacaaacaggaacatgagtctttacaatacctgcagtgagcgccaacaaagtggaataaaatgtcacctgaaatacctgagaaaggggcttctcaagcttggagaaggcagaggctttggagagatgtttgatctgagccttgcaggagaccgtccaagtgtgggttctagtactacctggatgcaagccttcctccgcctgtgtcccagcaaggaagagttgccttcttaatgaccccattcattgtccctagaacgtggtgatttaccagaagtcttcagaggcaagccatcttcaattcagaaggggaatcccacatgtgtgttgaatatgaggcattgtttaagacacctcctgccctcaccacattggcaaactgacagcgtcaacttgaaacaagtctgcacattgtggccattttcactccacaacaaatgtttgtaagtggccacctaagcctgtgaacttcctaactttgataattacaaacacgaggtagataagattgaagcaaacctggcaagttatactgacttgcagctgaagcactctgagaaacagaacaatttgttcacagaaaaaggaaattaaggtgtttctacactctttaatttccaaggtctttgtttaaagtgaatgagttcaaatgagggaagacacattctgctcacgtttgatgtcactcactactcatgtcgcagcatagggtgtcacagcctgtgtcccagcttcttcccatgggcaccatgctcttcagccatacagactcggacattccactgccaaccagtatcctcaccaatgaccccaaggtgctgttgaggcacttttctttttcagagtttactgacatcctacccaccactgagtagcatgttccttgcccatgattcccttctgtactccctcccccaataccctgtataggccaagtatcccttatccaaaatgtttggggccagaagtgtttcgca

SEQ ID NO: 24099 - DNA, 1002 bp, Homo sapiens
aacccaggagtttaagaccagcatgggcagcatagtgagacctcatctctttgaaaagaaagaaagaaaaaataaggggctaaaaaatacctaaaatgtagtgccatttataagaatgtttgtaactcccaagagaatgataattgcatttggttatacaggagaatgccctggtgtttaggagatctgggctgaggtatttgagggtaaggtgttacaatgttgacaactgactttcaaatggttctgcaaaattaaaatgtgtttgtgtgaatacatacataggggagggaggtaagcaaagccaatgtgtgaacatgttaacgatgattgatctggatgaaggacagatgggtgtttattgtacttttcctataactttcctgtaaaatggaacttttcaaaataaaaaattgaagacactcattgaacctataaattgtggataatacatatgtagtgaaatatattcaatgaaaaacatgcagaggtatgacaagcagtacctttaggacaacattacttctgggagggcagataaatgaatgacagatcggatacttgagctatatcaataacactttatttctttaagaaaaaaaagaggtggggagctctagattaatatgggaaaatgataagctattcaatctggtgtccattagtgtctctacttactttctgtacttaaaaaaaaatatatatatatgtatatatattttttgagatggagtctcactgtcacccaggctggagtacagtggcgcaatgtcagctcactgcaacctcctcccaggttgaagcgattctcctgcctcagccttccgagcagcttggactacaggcacgcgcctccatgcccagctaacttttgtatttttgatagagacagggtttcaccatgttggccaggatggtctcgatctcttgacctcgttctctacccacctcagcctcccaaagtgctgggattacaggcatgagccactgcacccagcctat

SEQ ID NO: 24100 - DNA, 1046 bp, Homo sapiens
taggacagttctgtgttagggttctccagggaaacagaaccaaggtgatgtatgtatatatagcgagtgagtgagtgagtgtgaatgtgtagagggagaaagatttaagagggtaagctggcaggctggagactggcagggaagagttacagtctaagtctaaaggcagtctgctagcagagttctattcaatttaatgctcaagaataatcctctttggcaccattcattctctgtccttccagcccaccaggatgggagctgggagctgtgcccctgaggccctgggcggcagccacaccttgtgaatcccctcttggggtcattcttccctcttcttgaaagataacaaatgtttgcagccacatcactgtagcccattctgtagaagtctgacagccttccttccctttgtcctgtctttgtccattttaatccaaaagggcagtatttctgctgaggtggttggttgaatccatgcttcacagccccagtctcattatctgatcgtccagccacaccattggtgttctcttaggaacacaccttctcatttttttgcaatgaggctaggctgagaattttctaaattttcaagttctggttcctttttgcttaacaataatttacttctcacattttactacaagcagtaaggagaaaccaagccacaccttcagcactttgcttagaaataacttgtgctgaatatctaaattcatcactcacaagttctacctttcacaaaacactacaaaataactcagccatgtttcttcccactttgtaacaagaatcgcctttccactagttccaataacatgttccccatttccatctgaagcctcaccggaagcacctttaacatccatatttttggggttttgtttttgtgtgtatgtgtttgttttggttttagttttggttttggttttggttttggttttggttttaggacggagtttcactcttgtcacccaagcaggagtgcaatggcacatgatctcagctcactgcaacctccacctcctgggttcaagagattc

SEQ ID NO: 24101 - DNA, 1026 bp, Homo sapiens
taggtgtggcctgaacactgggattttttttttttttttttttttttttttgagatggggtctccctctgtcgcccaggctggagtgcagtggcacgatcttggctcactgcaagctccacttcccggattcacgccattcgcctgcctcagcctcctgagtagctgggactacaggcacccgccaccacgcccggctaattttttgtgtttttagtaaagacggggtttcaccatgttagccaggacagtctcgatctcctgaccttgtgacgtgcccgcctcggcctcccaaagtgctgggattacaggcgtgagccaccacgcctggccgagcattgggaattttaaaagctctctggatgatttcaactctgggtgaatcacactttgcagagtttgattcagtgggtcgcggtaggtcgagcctgagaatttgcattctaacaagtttccaggtgatgcttatgctgctggtctggggactgagctttgagaaccactggcatagggacattgtctgcactagtaatggtaaacacccagttttagcattgcaaattgggtcactctcagaagcaaactggagagtttcatgtcaaattattgattgctgagccagtgctggatgctctctgaaagaacatcaatagctctgccccagctttgagctgagaaacctgacgctgcttaacatgccaattctcaaaaatattcattggaatttcccttttacaactgtacatacagccaggcacggtgactcacacctgtaatcccagcactttgggaatctgaggtgggaggatcacttgagctcaggagttcgggaccagcctgggcaacatagtgcgacctcacctttactaaaaataaaaaaaattagccgggcatggtggcacatacctgcagtcccagctactcgggaggctgaggtaggaggattgcttgagcccaggaagttgaagctgcagtgagccatgatcaggccactgcactccagcctgggtgactgagaccctgtctg

SEQ ID NO: 24102 - DNA, 1028 bp, Homo sapiens
gagacaatcagcggtgtttcagtgacaggtggggattgatgagttgtgtgacacctgacatgctaacctacaaccacgtgccttcccaggaaatcaccagtcaccgtgaaaaaggaggaggaaaagaagccccacgtgaagaagcctctgaatgccttcatgttgtatatgaaggagatgagggccaaggtggtggctgagtgcaccctgaaggaaagtgcagccattaaccagatccttggaagaaaggtaagacctgccctctccctccaggccagggaggcagcgtccctgcattgatggctccgtgtggtctctgaccctctctcccccagtggcacaacctgtctcgagaagaacaggccaagtactacgagctggcccggaaggagcggcagcttcactcgcagctctacccaacctggtcagcccgggacaactatgtaagtgcacactctgggcagaggacgctcagaccccaggaacagcctctgcaagaggaggaagggtgaaggaaagcaactgcatttatttttatttattttattttcttttattttttgagacagaggctcaccctgtcacccaggctggagtgcatgcagtggcgcgatctcggctcactgcaagctccgcctccccggttcacaccattctcctgtctcagcctcccgagtagctgggactacaggcacctgccaccacacccggctaattttttgtatttttagtagagacggggtttcactgtgttaaccaggatggtctcgagctcctgacctcgtgatccgcccacctcggcctcccaaagcgctgggattacaggcgtgagccaccgcgcccggccagcgactgcatttatagaggactcttaagatcagggagaagcccatacttctctagaaataaggaaggtgttttaattctcaggaggtcaacaagtcctgaggacggacttcagttgatgcatttccctttgaactggactctgccctcgatttcataacacagggcacggggttagctgt

SEQ ID NO: 24103 - DNA, 1034 bp, Homo sapiens
tggttcaaaatgcaaaaagtacagaacgatatatgtattgtgaagaaaccaccttccacccttgtccccccagccactcagtttttctgctggagacaaagctactgcttccttgggtataactgtgaaaatggtctctgcagagacaagcaaatgtgcttatgtacttttaaaaaataaaatggtaaaatagtgtatagactctgtcctttgctttttcacttaatacatcacggaaattgtcccatattgcctgtaaagtaaagcactttctcatttgtctttatggccatatagtatctcactgagtgaatgtgcttttatttatgtaaatcagcccattaatgaacatttaggtttttccagcctttccctattataaacagtatgacaaagaatcacactataaatgtaaacatgtcggttttgcacatggatgaatatatctgttagataaattactagaatgcagtatcaggccccgcatgtacaaaacatgtatgatttcattaggtactatcaagctgtagaggtggtaacagtttactctccagtgtgttatgcactctggccaatgtacatgttatcagactttttgatctttgataatctgactaatgaaacacagtagttttacatgactcttttttttttttttttttttgagatggagtcttgctctgttgcccaggctggagtgcaatgacgcgatctcggctcactgcaccctccgcctcccaggttcaaatgattctcctgcctcagcctttcgagtagctgggatcacaggtgtgcaccaccacgcccggtgtgctaaaaatacaaaaaaaatacttttttgtatttttagtagaaacagggtttcaccatgttggccaggctggtcttgaactccagacctcaggtgatccacccaccacagcctcccaaagtgctgagattacaggtgtgagccacggtgcctggtgacgtttttctgttttgcttttttttgttttgttttgttttaatgagtgaggttgaacatttgttca

SEQ ID NO: 24104 - DNA, 1029 bp, Homo sapiens
ggagatcgagaccatcctggctaacacggtgaaaccccgtctctactaaaaatacaaaaaaaattagtcgggcctggtggcaggcgcctgtagtcccagctactcggaaggctgaggcaggagaatggcgtgaacctgggaggtggagcttgcagtgagccgagatcgtgccactgtactccagcctgggtgacagagtgagactccgtctcaaaaaaaaaaaagaaaaagtggagggtgggaggagggagaggatcaggaaaaataactagtgggtactaggtcaaatacctggctgatgaaataacatgtacaacaaacccctgtgacccaagtttccctatgtaacaaacctgcacatgtacccctgaacttaaaagttaaaaaaaaaaaaagtatgacatttaaactattatctttgggggattaatatgtgcctaggagattgacccttgtctgttttacagggtgaaagattgtctgctggatattctccatcatatgacaaggacaagagtgttctggctttcagaggaatccctgtatgtatcacccacaacttggtaccttctgccagggcttttgttgtgtgttactgtgtggtgccagaactgtggtagacgctggggacacaagggtggcatagaccttagcttccaagagctcacacttgaggggagtgaggggagggtgtatggaacacaaacatacaaaacaacttctatttaataagataattgccataatgaagcaggctataaaacgcagagagaataccaaaggcacaccacagtctgaaatgagtgtatgaatttttgtttatttacattcaaggtggacatacacttgtccccaacatcacccaagttccacatcatagttaaagttttccaggtacctcaatttaaaatggacttcaaggccagtaagtggctcatgcctgtaatcccagcactttgggaggctgaggcaggcggatcacttgaggtcaggagttcaagaccagcctggccaacacagtgaaactcc

SEQ ID NO: 24105 - DNA, 1070 bp, Homo sapiens
tttgttagggacagggccttgctttgtcccccaggctggagtgcagtggtgcaatcatagaatttgtgggttcaagcagtcttcccacctcagcctcctgagtaattgtgtaccaccaggcatagctaatttttttttttaagagacaggttcaccgggcacagtggctcacgcctgtaaccccagcactttgggaggctgaagcaggcaaatcacgaggtcaggagttcaagaccagcctgaccaacatagttaaaccccgtctctagtaaaaatacaaaaattagctgggcatggtggtgcacgcctgtaatcccagctactcagcaggctgaggcaggtgaatcacttgaacctgggaggcagaggttgcagtgagccgagatcatgccactgtactgcaccctggcagcaaagcaagactccatctcaaaaaaaaaaaaaagagacaggttcttgctgtgttgctcaggctgatcctcaccttatcctcctgagtatctgggaatataagtgtgagcttctatgtgtagctaaaaaatattctaatataggaacatcatttggacatctgtgaagtttcttttaatggaattttatctttatggtgacaaacccagcattaatacattaataatttttactttaaatacatatatatatatatatatatatttttttttttttttttttttttctttccagagacagggtctcactctgttgtccaggctgaagtgtagtaatgtgattgtagctcactccagccttgaactcctgggctccagctgggactacaggtgtgcactaccatgcctagctaatttttaaaaaatttgagatggagacggtctcattatgttgcccaggctggtctcaaactcctggctcaaatgatcctcccactttggcctctcaaagtgctgggattacaggcatggtggcatgtgcctatatctctggctaactttaaaaaaaaaaaaaagtaaaaaataaatgtaggctgggcacggtggcccacgcctgtaatcccagcactttgggaaactgaggcgggcggatcacaaggt

SEQ ID NO: 24106 - DNA, 1481 bp, Homo sapiens
tcagtttactgtgcccatgatgaaatcccacaagtaacttagtggtatgagaggacaaacccaggatcttgatgagtgctgaaggttagctgttacaccagttagtagtagaccgaagttcagagcctgcagtctggcttccacattatgtttggattctgttttaggcggttatagaaaattcagaaaaacgaacttgaattagggagatatttgttctccctcctaacaatagatgacaaagcagggagacatggattcggaatacgtttgagcatcttctacactgttgagcttttgtttcctgcgcaactcctaacagcaaaatcagataattgccattttagtcagaaaatgcttttcatttaattgtttaatcgaattatcttgttgctcattataattggtgttccttaagattagggaaactggcctacctgtggcctcagttctaccagactcccaggtgcagaggggtttggtacagttgtggaagtgaatatgatatagggcaaattctgttctttaaaggatataggactaacagttcacctttctggtgattagatttataatgcaaactttgaattttaggaggaaagtgcaaacacaatgaattaagatgtattaagcatgttttttaaaatctccaaagattttacagatagtaacagggagggagcttgcatacatacatacatactttgtttaaagttaaagaaactgagccaggaatttctcttttccagataagatttgtgaccaaatcagtgatgctgtccttgatgcccaccttcagcaggatcctgatgccaaagtagcttgtggtaggttcagaatgtgcttatcaactggtggaaagatagcataaaaattatttttatagaagtgatgtttgagttgaatgtctctttttattagaaactgttgctaaaactggaatgatccttcttgctggggaaattacatccagagctgctgttgactaccagaaagtggttcgtgaagctgttaaacacattggatatgatgattcttccaaaggtgtgttttaatgattttgctcatttttttctaggtaacagctgtgaggtttgaagaaactcctagaatgttcctgctaatcctaaactccagttgtatcttactatacactaagccctattctgttcattctctaaaaggtccgatggtttaggtatatttgatttcttcagcagtgtttagaattccagataattgctgtaaacagcaggtatttctaggacgtaaacaagatgttgtgttttttgcttataggttttgactacaagacttgtaacgtgctggtagccttggagcaacagtcaccagatattgctcaaggtgttcatcttgacagaaatgaagaagacattggtgctggagaccaggtatcttggtgtagaggctgttttaatctcttctaacattaaattctggagcttgatcacattggtgac

SEQ ID NO: 24107 - DNA, 1080 bp, Homo sapiens
acacagtgaaaccctgtctctactaaaaatataaaaaagttagccaggcacctgtagtcccagctactcaggaggccgaggcaggagaatggcgtgaacccgggaggtggagcttgcagtgagctgaaatcgtgccaccacactccggccagggtaacagagtgagacttaaaaaaaaagccgtggaaatctgggtatggtagcttacacctgtaatcccagcactttgggaggctaatgcgggtggatcacctgaggtcacggtttgataccagcctggcaaactgaaaccccgtctctaccaaaaatacaaaaaagctgggtgtggtggcaggtgcttgtaatcccagctactcaggaggctggagaatcacttgaacccaggaggcagaggttgcagtgagccgagatggcgccattgcactccagcctgggccagagcaaggttccttctcaaaaaacttggaaatctgttgggaagtagggggagggcaaggttaaaacctatgcaggtgtgtcaattagacttgttccaacttgagaacctgaattttgcatgtaattgaaatgttccagaacaagtctggcagtttcataagggagtttttagatgccaatacattgcagataaccatattggctacattaggggaatgagcatggataggtgcctccaagttggtagaatagcatgagaagttttcaaaagtaaccgctttaaggttatgttcagtatttgctaagtaaacaaagattccccaaccttgagggagcttgtggaccaaggggatagtgttgtcctgcccagcctaggggaaaagtatcctgaaggttaataaggtggtggaggaacattaggccacagggagcagagggaaagcataacagcaggggatgataagggtgattatagtttagaaagcatgaaagtatgacttaaggaaatgtctttaggttgaacattctgtatataacctgcctttctaaagtttcaaaggggatggatacccatcaggggcaaagatccaaatcctgagggtagaatgaggaggatgtatactaaagtcttttggctaaaag

SEQ ID NO: 24108 - DNA, 1025 bp, Homo sapiens
ttctgctatttgggccagacccaccccttccccaagccagactgtggtctggtccttcagttttccaggtcaggtgggggcaagtgtccttcaggagtgggagcttgggaggcagagcctgtagcagctctcctgatcagcactccttcctaaagagctcaagtgccccgtgtgtcttttggaatttgaggaggaggagactgccattgagatgccttgccatcaccttttccattccagctgcattctgccctggctaagcaaggtactgcttctcttcttctagctctcaccgtgccctgggcccagtactcaagcttctttctgttcatggactgctgggggatggaagaagagtggcagttgggagcaggggagggtggttatcagcttatgaagatcagaccaaggctagaacactactctacttttctcagacaaattcctgtcccttgtgccgctatgagctgcccactgatgacgacacttatgaggagcacagacgagataaggtaggggctgatgcttaagtggaggggtcgtaatgggctccctgagtcctgtccccgctgccatcacttcccacctcagcaggactgggtaggcctcagaatccctggctctggctgtcttcttagtgactttgatttgtggtgagagcctcagcaatgcagacgccagaggcctgaaaacagagccagccccataatagctgcccatcccctcacccataggccttcagttttggcccctgcccagcatgccttctttccttcaggctcgaaaacagcagcagcaacaccgactggagaacctccatggagccatgtacacgtgaggaggttggggctgagtgctggccctctgcgtcttccttattaaccttgaatcctcattaaaggtttctttacccaccctgaggctgtattgatcacagacctggccaggggctctgcatcctccatcaggtctctacttctgttggggaaggtgatcctaaatcgcagaaggcaccaggctgcggt

SEQ ID NO: 24109 - DNA, 1092 bp, Homo sapiens
ttttccttgttcatggaagcatgaagtgagatacgttttgctgtatttgtagcactggtttcttaggccaaaggaatcaggttagtgtgatagacagtgtccaccaaggacaccttttcttgatgacctgttgcttttttttttttttttttttttaagacagagtctcaccctatcacccaggatggaatgcagtggcatgatcttggctcactgcaacctccacctcctgggttcaagtgattctcctgcctcagcctcccaagtagctgggacctacaggcacctgccaccaggcctggctaatttttgtatttttggtagagacggggttttactgtgttggccaggctggtctcaaactccttacctcaagtgatctgcccacctcggcctcccaaaatgctgggattacaggcgtaagcccctgtgcccagccaggaatgtccatatttaggttctctcagtggttgacactgtgtacctcataagtgagaatgtctagtctgtcatttctgagcaggaaggagacatcataggtgatgattagatggcttcctcttttctcatctttagtgtccactaaattccttttaaaaagatgtacagaagtgtttcagactccattgtacttcaaggggccaggcgcagtggctcatacccataatcctagcactttaggaggctgaggcgggaggatcttttgagaccaggagttagcctgggcaacacagtgggaccccattgctattaaaaaaaaaattagccagttttagtggcacacacctgtagttccagctacctgggaggctgaggggaggatcgcttgaatccagagggtcaaggctgcagtgagctgtgattacaccactgtagtccagcctgggtgacagagtgagaccctgtctcaaaaaaaaaaaaaaacaaaaaaacaacaaacaaaaaacagtgctttaaaaaaattcccaacaggaattgagtttgccatgattgacacaccaaaagtcctattaattgaatcatggccagaagaagtcatgtaccctcttctttatgactgttgctggatgatgtctagtggctgttcttcta

SEQ ID NO: 24110 - DNA, 1046 bp, Homo sapiens
acctctgcaaagtctgtcccttggagaagatgtgaaagcagatctgtcaaacgcaaggatgtccaggcttgagtgttaaagaaaacaccagtgcagcttatgatgcagcttgtacagcgtaattccacttttcgtaaaatactgtatgtgagtacgcatatgcatgggaatagcatatgggacaatagttaaccaaatgttatcagtggtttgctctccgtggagagattaaggtgattgaaacaattttctttctgttcactcttctgtattttctttttcttttttttgaggcagagcactttgggaggctgaggtgggcggatcacttgaggtcaggagttcaagactagcctggccaacatggtgaaaccccgtctctactaaaaatacaaaaattaaccgggtgtgattacatacgcttgtaatcctagctactcgggaggctgagactggagaatcatttgaacccaagaggcaaagttaccgtgagccaagatcacgccactgtactccagcctgggtggcagagtaagactctgactgaaaaataaataaataaagatgaggaaactgaccaggatggtggctcacatctgtaatcctagcactttgggaggctgaggttggaggatcgcttgagcccttaagtttgagaccagcctgggcaacaaagtgagactccgtctctacaaaagataaaaaaaaactagccaggtgtggtggcatgagcctgtggtcccaggtatacaggaggctgattggggagaatcacctgagcttgggaggctgaggtggcagtgagccttgtttgcaccactgcatttcaacctgggcaacagagcaagactctgtctaaaaaaaataaaaaataaataaaaataaaaataaaaaagatgaggaaactgaggcttggagaggttaagtatcctgctcagggccccccagctgactctggggccaagatgaaccccagtaagaatcaagagcagcattcagaggcaaacacgaagccccatttctagcccacatactggtgtacttaa

SEQ ID NO: 24111 - DNA, 1045 bp, Homo sapiens
acgcggaggtggccctttgaaataggattcgcaacgcatttattcattagagaaatacttattggttgcttgcaatattctgtagttaacaccatccgcaaagctaggaccctgctctcatgaagcttgcgttccagtgagtgtggctattagcaacactaccccaaattaaaaattatccgccattactcattttaacccaatcaggaggagcgaggagaacgtacaagatcttcccaaataaaaggcagtctctggtcgccaccgtggggactttggctaaagaagttatcaggttttcgtaaaagcagaaaagtctaaaagatctgactatgcccttttgatctgtgatagttatagcttggaacatgtatgacctatctgtgtaatttttttttcactcagtacaaacagtggcattgtgggaatatgagaggcagtaatttgtagtgaaaacttgctaaaagcctaattttaggtttagtgtttgccattcacttaattggatgataatagacagatttcctcatctgcagactagagttggtaataaccatccgaaaagtttgtgaggtataagtggggtatgtaatttacaatatgtttttatatgtactctcccttagttcccctcaagaaagagaaaccactccatctgatactgcagaaacctttgtgctgccattcaatgccagtcctccgtttcctggtagccatcgttagcatttttctactcattttctttgcctgaagcagaatctcttcctcagcatccgttctcaaaataactgtgatctctgttttaaggtcatgagaaacaaatagtgtgacttgaaagagttgatctcagaaacttgaaagagttgatctctttctgaaatgtccttaacgtagaggggtattcttgttttaaatgatacctgaaaccagatactactggaggaagtatctgtctgtgcaatcacatcttgacaattttctgaatgttactgatgccatttagtaaggggaaacacaagataatactaaccgtcacattatctgt

SEQ ID NO: 24112 - DNA, 1809 bp, Homo sapiens
atttattttttgagacggagtcttgctgtgtcgcccaggctgaagtgcagtggcacagtcccggctcactgcaagctctgcctcccaggttcatgccattctcctgtctcagcctcccgagtagctgggactacaggcgcccgccgccacgcctggctatttttttgtatttttagtagagacggggtttcgctgtgctcaccaggatggtctccatctcctgacctcctgatccacccgccttggcctcccaaagtgctgggattacagatgtgagccacagtgcccggccttttttttttttttttaagaataaaattattggccaggagcagtggctcacatctgtaatcccatcactaatcccatcactttgggagaccgagggaggctgattgcttgaggtcaggagttcgataccagcatggtgaacatggtgaaaccctgtctctaccaaaacaacaaaaacaaaaattacgaggcatggtggcacctgtagtcctacctattcaggaggctgaggcaagagaatctcttgaacctgggaggcagaagttgcagtgagccaaggtcctgccactgcattccagcctgggtgagttagtgagactctgtctcaaaaaaaaaaaaaaaaaaaaaaatttaaaataaaattatcaaatccctttatttggcaaaggaggaagctaaggttttgaaagtggccagtggctggttaggatgttaaaaccttaattaaaggcttaatttcacgccttttatctcgaaatgcagtgtttttctaccataccagtgatctttaatccctggaagggcttgttgaaatgtatgttcttaggggacgatttggctgtagtataccaacttggagaaataatgtacctgtcatgctgacaatcatgtaatgattaataatctgggtcctggagcctactggtttgttttaatagccaagcaactagctttatgatcttagggaagttactttacctcttgatacttctgtttcctgacttataaattgggggttaattatagcaccaaacctcaaggttgcagtggaattattaacaaatgaattaagtatacgtaagatttaggatagagtctgggacaaaggaaattcttggtacattgtattttgttactgctactactgtattgttgatttcattgacatgaaattttctctgttggcaactcaagagtagagtttgtagtctggtagatacactgaaactttggtaaatgcatcagaaatggaactttctgcttggttgtattttttattaaccaaaaacttttaatttcgtctgtggggaaaagtctaaaataattaagtctttttttctgccacagtatctgtatggatattgatcctccttaagtcgattattacaagtacgcagaattgttcttctattgtggatattaaactacatctaaaaatggaactactaggctggacatagtggctcatgcctgtaatcccagcagtttgggaggtcaaggcgggtggatcctgtgagctcgggactttgagatcagtctgggcaacatggtgaaaccctgtctctacaaaaaaacacaaaaattagctgagcgtggtagtatgcgcctgtagtcccagctacttgggaggctgaggtgaggctcacttgatcctgggaggtggaggtggaggttgcggtgagccaggatcgcaccactgtactccacagagtgagaccctgtcccccccgccacacacaaaaaaattaaatataaaataaagatggagctactaaagatagtgttgggtctaatgtg

SEQ ID NO: 24113 - DNA, 1090 bp, Homo sapiens
ctcttgaggcagcaggctacagagccaacactgacctctgcaatgccaaccaagcctgtattgctctacgtcagcctcatcccagaccttggtttataaataaagacaagatttattcttgtaagaagtcttgccaggtgcagtggctcatacttgtaatcccagcactttgggaggccgaggcgggtggatcatgaggtcaggagatcgagaccatcctggctaacatggtgaaatcccgtccctactaaaaaaaatacaaaaaattagctgggcgtggtggcacgcgcctgtagtcccagctactccggaggctgaggcaggagaattccttgaacccaggaggtggaggttgcagtgagccaagaccacgccactgcattccaacctgggcgagagagcgagactctgtcttaaaaaaaaaaaaaaaaagaagtcttagtttgcttgggtgagtgttaggcattaactatatgttgtttatcttgctttcaccctaattatgacagtttatctgtatggatcaagccagatgtagtctctgagcaaataggctgtgttgtttggttttcctctttctgtctgaggaccaggccatacagggaactggcttcatcttgtctccacgctgtcacttgttgctttgagagtcaacttggcctttcatctgatttgcacttaagaaattaactgtataggtgtaagcgtaactgggcttcctctttgccttctgctggatctatgtttcctttatttttctgagttccctttgcctttctgattttgagtagtctgactgggaaatgcattccattgccttaacttttatttcttttgatgattattcatttcaggaagaggaaaatgatgagacatctaggaggaaagctggtcatcagtttggagttacatggcggtatgtcacacgtaattagaaccttgaattacagtgtcttacagtgcatggaatatgccccatcaccctgtgaagatgttttcttgtgatgttctaaaataattgatttttattgtgcaatataaatttcactatttgtattcatacacatttagaccgtttttcaataaggtc

SEQ ID NO: 24114 - DNA, 1145 bp, Homo sapiens
tgcaagtgggaggctgttgatgtcccttcatacctcacctctggtttcaggcaacatgccaatgatctaataggacatgttaattgagcacttaggaattaaagcagtggtaaaactgccagatttgaaagactagtttgtgtcctttaagggtttttttttttttttttttgcaacactgtaaaatccacatatctttttcctctaccccctctcattttacattttcaaattgttatagcagggtgagccctgaagatttcctttcacctcccttgcttttgtattcaaagatgaagatactggaacctagagatactccctaaatgggtttgcttttaggcagataagaacatgaatttaagaaggcagcatgttaacagatgtgtgagaattgttttctgtgtatccaaatccttgtttcacattgaatgtttttaaaatgaatttgaaattcagtatctattcaccatgacctaagagtatacagaggaaacagttagaaatgaccagttgagggtagggtgtttaattgagaagtcagcacacactggcagctcttaaaccaaatattggctcgtttaacttgaaactgtaagtattttgaaattctttgtaacatataatatgctataatttcaacccttatttcccctgttgttagacatagggactttagactaaacatactttttgccttcatcacagttccaagttcttcgatttgatttgtctaatggaacaaattgatgttaccttgaagtggtatgaggacctgataccttcagtaagatggttcattacttgttatttatcattctagatgaattgggtttctgcagattaatgctttaaaaatgtgtttctcttaatcaggcctactttccccactcccaaacaatgatacatcttctccaagcattggatgtggccaatcggctagaagtgattcctaaaatttggaaaggtcagttttactttttatgtgtccaggtgcatctcacctcaatatcctctactttgataatgaatgtgctaacattactgttagggatgaaaacttccattttgactgaaccaaatgtgttagttgagatgtacttcaaggtcatgtgctcatgttgcatgttggctatcaggagaaa

SEQ ID NO: 24115 - DNA, 1085 bp, Homo sapiens
gcacattaactaaacttggccttgaccacaacccgtccttgattggtgccactgtgttctggttatgtttttatcagcacttcattcacatactaatttttagtgtttgtgaatgggaaccttatgcatattcatgtttccaaaaatgagcaaaaggatcttttgtaggggtagtgacaggtggttttcctgtattttgttttgtatataaatgtgtgttctaaaagtcattagtggggggtgcttgtgcatggctccttgtacaagaaagtagctttatttgaacatctgattgctagtcagctatctccaggaaaagatgatgaaggcttgtctttgaggtgtggctcacacgtgtctctctagcaactatgctgctagtgacagagacgtatgacatttgcatttggttgttagcgcaggcagtttggcacacacttgatacaaccaggctgtgatgattggcgcaggggtacggacctcagctgagtcatgggagctgaatgtatgtgtttctcctttgtcctgcatgtggcaggctgatggggagcacttacatgagactgttgcctcaatctgagcctgcacttcataacagaattctaagacagactgaacccctgctgtactttaagagagggaaacagcaggttctgttctatgcctcttttccagctgtgcacaggatggattccctccttagaaggacagtggtgatcctctacaagaggacaaatacagttggagtatcccttttccaaaatgcttaagaccagaagtgtatggggttttagattttggagcatttttggattaggaatattcaacctgtaccagcaaatcttgacattggcagcatatcagatttacctgtgaaaactgcagtgtagattcgtttggggagtttaagcacctgcggtgattctcatgtacacacagggctgggagctagtagagcccacagatgtgtgtctttgggagcttacagtatagttaagaaaagggcatttagtctctgatttcagagagaagacagctatagtgtctgattgccttgtttttctaatagtattcataatcttttt

SEQ ID NO: 24116 - DNA, 1083 bp, Homo sapiens
cttgtcctcaagcgatccacccgcctcagcctcccaaattgctgggattataggtgttagccactgtgctcagccacaaattgtcagctttagaaagtaaattatctgtactgcaaacctaaacataataattagattaaattatattctaatatcttgtatttaagagcttatacattaatttttctcagaaaaatatccaaatagaatttaaaataccttttcatactgacatacatcgcgattctctggaagattttacttagaaaacctcaatatcttcttgcaagacaaagtaacaagttaatattactgtaaatgatttcttgaatagaaactatgattacaggcatcctgataatttactgggatttcaaaacttctctgggaaattacctcagttataaaaatctaagcagtaccatgccatctataggaggaagatacacatgtcaaatattactgtctgcattcctgaaatcccctttaccaactctccttaaagctctgaagattccaaatgactagaatatatattttaaaaacacatctgatcatgaacacacaggtacaccattatgtaaaaagaagcagttttgtagacatacaaggagatttccaaatcttcgacatcctcagagtacattaaaaggaaaggagagtctcttaatcctgtcaggaagaggggtgtggctgaagggagtccaggtcctcacctgctcaaattcagacttcaattcctgttcttgtaccctaaggacatctcgcaagtgatcagtgtgggcagctgcctgtcggcgaagctgggttctcatttcattttccatggcatctctgacttcttctatctgtgaaaccaaacatagtagttattagttttcaattctccacatatacttttaggaaaacagaaagaccactatcaaccatgacaacagcagcttccatatcctgaacgcctctaatgtgccaggcatgtgtacacttctacttctcatgtgaaacggaaaactaaaccctggaaggtgattcaaacaagatcacacagctgtggcaaaaaccagatttcaaacaaaggtctct

SEQ ID NO: 24117 - DNA, 1081 bp, Homo sapiens
aaggattaggaaactcaaaaaacacccaaaaccaaccatcacaccttctggagaacattaaggtactatttaaccaaaattgagttgactgaaatagtgtaatatatgatcagataatttagtgcctaaaaatagttgaaactatgccaaaactttgccagtgattaaattcttatttttcagatatatctgtatatgctagctagtcttttcaaggctgtcaagtaaatttctgagaaaagcattcatgagtagagtacatataaatatattcgaaattgtcaggttttaaaaacctgctggccaggcacagtggctcatgcctgtaatcccagcactttaggaggccaaggcaggcagattacttgaggccaagagttggacaccagccttaacatagcaaaatcctgtctctactaaaaacacgaaaaactagccgagcatggtggtacatgcctgtaatcccagctactcgggaggctgagccctgagaattgctagaaccctggaggcagaggttgcaatgaaccaagatggcgctgctgcactctagcctgggtgataatagtgagactgtctcaaaaacaaaaaacaaaacagaaaacctattagtggaagttgtaatcaaactttagaagttaatgactagaagatgaagaaactttggagattcttcaagtttagatttggtggtaaggcaagacgattgagaaaggtatatgacttaaaaatttaaggtatataacttaaaaatttaagcacatgtgaggagcctggtgaaatgggtgaattggtttcacctggttcagccttagactagttgtcttgagtttctcctttcttttttatggtgggaagtttatttttgtgaatggtataaactgttaagaagttgattcaatacttcctttttttgaagattaagttacctgaaaagggaactgggacaggtgtcccaactttgcccacaggcctgtcataacttgatattttttgcagcttgggatgacttctgtgacttgatgagccacataagagcaagaactgtcctcaacttttattgcattgcaaaggcttatct

SEQ ID NO: 24118 - DNA, 1131 bp, Homo sapiens
atatatgtgtatatatgtgtgtatatatgtatatatgtgtgtatgtgtatatatgtgtatatgtgtatgtgtgtatatatgtatatatgtgtgtgtgtatatgtgtatatatgtatatatatgtgtgtatatatatatattttcaaaatcattttctttaaattcttctatcctgagtgaagaaaaaagcagccctatcttttttgttcatatagaaatgaacagtgttggtatagttgaacttgagatataattcactttctcagaaatctaggtactttcaggttggactaactctaatcataaacagaagagttgatttcaattcctattctcctcctcccttttcattttatctaagttaaaagattgctgatgagctgaattaaatgcacagggaatttagatcattatatctgtgctcgtaactttcagattcaggcttatttaacgaagtaagagttttttaggtactagtttgccccattcatccctttgtaaattgcaaaagcacgtcataaagcatgtgggtagcatttagagctgtaatactgttaacgtatgttaacatatgcatatattaatatattctgaataacgcctggcccagaataagctgttagtagagggtaactctgtttcccttcctctcgagaattttcttcttaaacagtgtgttacaatgcatattcatttgtatgtgtatgaattttgaagacactgaaatggttatgctttgtacaggtctttgtgtttctattcacttgatttcatgttgttatggctcctctgctatgaaaaatataactagattggatgagagagtggtttaagttgcaaaggcattttagggaagggataatttttttttctttcttttgttctttgtaatatgattagagcttttttttttaacccactacatttttgtaacagtctagaagtcattgactttatgacttagctgtttttttcatttttgacttctttaaaggggaaagtacctttgcctaatgctgcgtagtagaagccagtgtagtagaaaccagaagaaactcatatcttggtaaaagaatatcataatttaacttttttcctgatgtttagagtgaagattgaggctgtcattag

SEQ ID NO: 24119 - DNA, 1106 bp, Homo sapiens
tattagggaattggtacttaggaattaaatactgagttttatatatattgtgaccactgtctgctcagtcattataattttataaaatatatttgagaaacggatgggtttttgacggtaaacagtgaaagccatttccgactgatttgtgtattcatgatacggcatgatacggcctgtttagatcgcacactttcataatgatgttgtatcaaagttatttactcctcttctgcctcagcttctagatttagtatgtcctggatttctccttccaagtcagaacatcctctccggatggacacacccttggatgtgtgcttttttgcttttggttcttgtttggatcctttcttcccaattaagaacaggatgccaaagcttttctttgcttaaaaaatatgaaaagaaaaagtatagtaagacagaagatgttaattatagatggtatttctcttcattagccacctcttggctggtttgcagtgctgtggattttctggacagccatgcaaatgagcttggttacctagcaacagaagctggaactaatgctagctctgatgcaacagtgagtaagaacctgcagttataacaaaaggagtttgacagtgtattgcatttcctcaacctctatatattttataatcttagctttaatttttaatgcatgtgaccagaaaataagctatggaagtttacttatctacctcagtagtttatactggaaaatcagaatggtagaagggagctcagaagtgtccagaaaacaatcgaatgcattgcttattcatgcttcttttccaagagcagcaaataagttacgagcttgaatgtagttagattttgagtgtaagggtgtttgacttttcttacctatgtagtagtgaccatagtaagccttaagaaaatagagatacacatagggcattgttgtaaaactttgtagcaaacccaaagaaaattgtttaaatattagactctttttgtaattttctagttgatgaatatttacttttaatatgtatattaaggaaagaattgaagggattattttgtttgatctgagcaagtactgtcagatggtagcttattaaaattctgac

SEQ ID NO: 24120 - DNA, 1033 bp, Homo sapiens
ctgggattcagtccctgattcatatgtcttcacactccgttctaagccaccatgtgctgttgcatttttgtttggaaacatgaaggaccgaaagaattagtttaaaatcagtctgtaaaccaaacctctaatctaagccttttctattttaaacaattcagataaatgataactcggtttttctctgtaccttacagggattttgtgtatgtgtccatgtaatttcctgcagtaaactgtcattgaggattgtttgcttttaagtaacaaaagacccacaattacagtggcttaagcaaaagtgaaatttttttcttgcacagaaatcggtagtaagacgtccacagcatgtttggtagctctgcattgtgaaactcttagggacttagcaccttgtacctctgttattcccagggtgtctcctgtcttcagagtccaggatagcagccaaagctccagccatacctttgtatcccagaaaggggcagagtgcatatttatgtttcattggtcagaacttaacgtcttacaaagccatacccagctttattccatttgcttatgtaccctgctgaaatttggggattctactatggaaaagaggggaagaatgtactagggggcagtcatcagtctctactatagggaattatctttaatggcttgccccatattttacaatctagaatatacttttaccactagctccttaccctgattactgctaacaaaagttctttctttctttctttttccaggaatctggtctttctgtagacccaagtcagaaggaaccatttgtggagttaaatagaatattagaggcattaaaggtcagagttctgagacctgctctggagtgagtattgagtttgctttcttttgagtactttgagaactctctgtaagaaaactcaatcagaaaacacattagagatttttagatatatttatcttacctgtggtagacttcagagaaatcaaaggagaattattttatttattttggctaagtgaaatatggggggtgtgc

SEQ ID NO: 24121 - DNA, 1388 bp, Homo sapiens
atttgcatttttatttgcttaagaaagaaagctgtgatagattccagatatgctttttgatgttttcctctgctccagctccaagaagtcagcacacctgcattttagctctgcatgcagccccagcaggctgcgtgtttaagaatttcattgtttaactggctggtgtgagaagtcttccgttagcatagagtggaaggagtactattgtttggttgggtttttgtttgtttgttttttgtttttgcttttattgccaagaggtgcttgttttaaaagtatgtttaataaaatgaaattctaaagttagaagtgttcttaagttgatatttactctcttggtcttggtagccctattatatcattgcagacacagtgttgtgcatgtgtgtattgtatatgtgcaccagcatcaaacattgtgtatctggaaggaaagcagcatgttccagttctaaaatgcagttaccagacccatcactttaaatccttaaagttagaagctagcaaattttctgtagtgcagaacgtttattgctgtttttgtgtttgaatagtataatgtttgatgcctctcttctgcaaagcgtatcatctcattgactgtgaatctgtatattattctgatggatacagataatgatcttttctcttgtgaggtatcttcatttatgcactgtccaaaaatagccatgtgtaagagtctttctgtatgacgaactacatggaaaagacttctgtggacataattctgaccgaaacccatgaagttacttcagtataagaagaacgttacacggaaatcaccaaatattttgcaactttatttcttctgacatggagtgaacatcaataggaatactttcaaagaaaatgaaaacacagaagcaaagagaaatgtggcacttcacattttaaactacagatggacttggtttgagggagggggaatcacagatttggtgctaagttaattagaaactggcagcgttttacagtagtacaccagcctggatgttttttctaaaatgtttacctgggagagctggggtttgtttgtgaggagaaagagtactgtggaaaacctctgcttgagtaccatgtggccaggcctatgtggatggctactccgtgctgtgcggcttcaccagcggttgggattggcccagcttggagtgcttgtgtggtccaacctcagtctggccccatagcgacttttgccccatgattctgcttcactgttggaatcctctttgaagttccccctctctttgctaaagcagtgaaggaagagaacagagacaaactctttggactgtgaaagagaaggtagagaattccaggcaacagtctgaccaagggtgtaaaccagtttattatatatatat

SEQ ID NO: 24122 - DNA, 1049 bp, Homo sapiens
ccggccaggccgaggccgaggccgaggccgccgccgccgccgcccggccaggccgaggccgccgccgccgccgcccggccaggccgaggccgaggccgccgccgccgccgccgccgccgcacattaaccttttaagttaaagattaagagaaccaacacctctttacagtgaaatgccccaactaaatactaccgtatggcccaccataattgcccccatacttcttacactattcctcatcactcagctaaaaatattaaatacaaattaccatctacccccctcaccaaagcccataaaaataaaaaactatagtaaaccctgagaaccaaagtgaacgaaaatctgttcgcttcattcattgcccccacaatcctaggtctgcccgccgcagtactgatcattctatttccccctctattgatccccacctccaaatacctcatcaacaaccgactaattaccacccaacaatgactaatccaactaacctcaaaacaaatgatagccatacacaacactaaagggcgaacctgatctcttatactagtatccttaatcatttttattgccacaactaatcttctcgggctcctacgccgaggccgccgccgccgccgccgccgcccggccaggccgaggccgaggccgccgccgccgccgccgccgccgcccggccaggccgaggccgaggccgaggccgccgtcgccgccgccgccgcccggccgaggccgaggccgaggccgccgcccggccgaggccgaggccgaggccgccgcccggccaggtcgaggccgccgcccggccaggtcgaggccgccgcccggccaggtcgaggccgccgcccggccaggtcgaggccgtcggtctcttcgagatccactcacctttccaggcgacggggcggagccctgcaccgaggcgaggtaccgctccccgtaggctttgctgcgcctcatcgcaccgccaacctggctcccgagacgcgtgaaaccagcgctcagccccgcagcagtcgccaattccaacaggaaagcgcctgaaagc

SEQ ID NO: 24123 - DNA, 1049 bp, Homo sapiens; identical to SEQ ID NO: 24122

SEQ ID NO: 24124 - DNA, 1045 bp, Homo sapiens
cgtgccctcctcagcttctagaccctcccattcatgccatgtccagatgacatctccctgaacacaatgctccctctcagacacatttggatggaattatgcctggcctgaatgggaaccttgtctgctttctaggtttctcccagacaggggtaatgtttctagagtccatttactaggagcagcatgatgggactggggatgtccctttaaaaattaaaagttaagtttctctttaagtgccaggattgagtggatttgggattcctgtatttaaccttagttcccaaactgagatttttgtcttactcctgtgttcctttgcttctttcctgcagaggctgcctgacccaggagaagattgtggctggctatgctagtcgcttcatcgtgatcgctgatttcaggtacagtttctggtgtctgagctgccaactgaggaggtagattggatccccaagccgcatccccatttttgtgaaagaggaaatggagagctgcagggactgtctgactttctgagactgatggctaggacttagtacagtgtctaggagaccttatgttctgcttgtaggctgaaggtagatgttgctaatcacagcactgttatccgcagccaggatctctagcatcgtttcatgtgttcagtggaacggggaaacagcttgtcaccctgttagcagagcatgctctcatgtgtcatgtcactcactggatcctcacagggagcctcagaggaggcagggtgtgccctgcccacgggcagtgactcagcataccctgcttcttctcgggtcagggtttgccgcaggtgactggtgtcattgatagtctttgaccaggctctcagatgctccttcaaggaatgtagtcaaaagcacttgtgctgagcatgttaatttcaaatatgtgtatgtgtatatttacttgtgaaatatagccacaggacgagcataaatattaaacacctacatacccacaagccagcaatatcagattttaacatttttgtcatatttatttcaaatagctcttttcctat

SEQ ID NO: 24125 - DNA, 1054 bp, Homo sapiens
aggtggcaagaagaaattaagataatcagaatctcttttcattgctctgtgggagaaaaaggctttagatttgtcattcgtccaatgctgtgtatgacagttgcttctagtgaccctgcagtctttgagtctctttttgctttgggaggctgaaacaatgtttctttctgtcctttgtcctgcaggtgtggtggacacaggcctattcatcaacatggctgagagagtctactttgggatgcaggatggctcagtgaacatgagggagaagcctttctgttgaccctgcaaggagcagagtgtgttcaccttgagtctccagcccacagccaaggtggacgtacctctccaggagcctttgccttaatgtatctctgcctggacaacttgtggtggggggtggggggaagagtgggagggggagttaaatccagtcttatgaagtattgttattaaatgtctttttaaaaagagaaatataaacatatatttttactattaaaatattcagttttttaaatgaagtagaacttgagttcatgttttatatgaaatatttaccaaaaaaaaaaaatgaggtaaactgtatttaaaacctttgacttgagtctgctggtaaagcttctgaatattgagtttgctgagaaataaaaatcaaaacttctttaagctggtaaagtgaggggcccaccagcagtgatctcctgatgccttactggaaactttgtttacttgtctgctaccctctgatttgtttttagttagtttttattgtgagcacacatagtacctagttacatcttaagatcaggtttataaaactgtggagtggagcggtatggtatggaatgacttggaatgtaagctgtcagggagaaaatgttgttacacttttgctaagatctgggggtttcttcatattcctgctgttggaagcagttgaccagaaatgcttgccagtactgccaaagcactgctgtgaaatgtgaagtactttgtttttttatttttaatgattttctttttgttattaatatttttctctgttcctttg

SEQ ID NO: 24126 - DNA, 1044 bp, Homo sapiens
gattctcctgcctcagcctcctgagtagctgggattataggcacatgacatcatgcccggctaatttttgtattttcagtagagatggggtttcaccatgctagtcaggctggtctcgaactcctgaccttgtgatccacctgcttcagcttcccaaagtgctgtgattacaggcatgagccaccacacccagcctatacactatttttgatgtggtttgtatatcttcttgcatgagtggattcagaaacttcttgacagggccaaactgcaggatacaagcaatgtagacatagcagtagcctacctaggaatgaaaaaaatgaatagttttattaaattttattctacaactgtctatctaagctgattaattttaaacagtttctctgatgagaaataaattatatatttattggaagtgtcctcacaactttgtacttcctaaataataggaaaaatagttggacatgataaatgcttgtagtataatggtgtaattggatctgaagtattgcattaaagataggccatagcatcctcccatcagctttgacacttactctctcaggatcatgatttgctattctttataaggatcatttttcttattatcagtcaacatgtttacattggaatagacacactcttctattttagttatagttagttgagacataacctcacttctgaaaccttaaatacatattttataaaacctgtattaaataaacccgtttatctgaggaaagatagccagaatcaaggaagacttcacatagctgtctgagtcttaaattatgaaagaaatttgtcagaatagttgaaaatattttagatataaagaagagactgcacattgatgaaaatgtaaacagtagcagtcattttggaaatgattaataatgaacagcaggctcaatgtgctgttataaaggtactattgtgaagtaaagaacagtgtgctgttactttttctgtttctattggatttttacattttgttttatttccgatggttttgttcattgatgttgggtggat

SEQ ID NO: 24127 - DNA, 1047 bp, Homo sapiens
gtttgccatttggttgtttttatgttttggtcctattgttcaacaagaaaaaggaaaataacatttgcacaaaacaattgtacaagtcattttacatgaaaattcaaattatagttaccaattgacttttacttacagaaaaagaagtttagagtagtataaagttttgataatatgggaatataactgtaagtaaatgtgttggttaagctctatagaagtggttcatcctttgagaatgtcaataaatgctccaggaagaacttttttatttaggaagataaaagataaataaactaaaatactaaaatatgaactaaaaacaaaagtgtgaaacaactaaaaagtggaaaggaatagattagtaagtggagagggaggcaatttgatggggatatttgaaaaaattggaggatacatggattgagagaaagaaaatccaggttggaggaaaactttaaaaacacttgaaaaccacatagaaaacacgcaagaaaaatatgaaagaaaatataaaaccacaactgagaactataactgaaattataatcatttttcacaatataataatatatgtttttacaaacccttggaataaagttttttaaaatttgaatttatttatatagagaatgataatacacaaccttacaacaaaatatataatttaaaaatcctacctatttgatttgaaagacttgtagaaattaacaaaattattacataggtttgatttctcatattttttacttaacattaaactcagttattttctaacagttttgtacatcaaaagtccaggcagactccaccggtttttttacttgggaactcacagggtgatactgaagatatggctaacgttacgtttttatctggaaactaggggaaaagtcacctctaagctcattcaggttgttggaagaattcagtttcttgtggttgtagcactgaggctcacatttcctctggatgtccacttgggattgcacaagctgctagaagacaccctttggttcttgcatgtggcccctttctgtcttcaaa

SEQ ID NO: 24128 - DNA, 1030 bp, Homo sapiens
ttagatcatgcacatttaaagtaattattgggctggtaaaaaagttgggctggtatttattatgtttataactattttctattcatatcatttattctttgcctcccaacaatcactctttttcttatttctattgttttaattgacacttaaaataatcccattacatttcctctcctagcatgtcagttatactttagaacagttttagtgatttatgtgagtttgcaatacacatttttaactaatctcaatctacctttaaataagactttgaataactcaacacaaatatcactttacaagagtgttacagactcaatatttgtattcccctattcccccaaaatgtgtatgttgaaacctaatccctatggtaagagtatttggagatgggtctgtgggaagtgattaggtcatgagggcaaactgttatggatagaattagtgcctttacaaaagaaaccctagagagctaatttgctcttctgccgtgtgaaatcccagtgactggaccgtcctctgtgaacaagcccttgccagacacttaatatgcacatggcttgaccttggacttcccagtctcagaactgaaaactgcatttttgttgattataagccacctagtgtatggtatcctgttataaaagcctgagcaaactaagatacaagtaatcccaattcctaccattatttatgacactactgccatttattgtattcatttatatactatattcattcaatacattgttacagttattccttttaaacaaaatattatcttttaggtcaattaagaataagaaaataaaacattttattttagtttcattcattccttctatgatattcttcctttctttatatagaccagtttctgacctataccctttttcttctccctaggaacttcttcgaacattccttgcaaggcatgtctactgaccataaactttctcagtttttgtttgtctgagaaggtctttatttcttctacactattgcaggataattctattagatatag

SEQ ID NO: 24129 - DNA, 1055 bp, Homo sapiens
attccacctgtgctgcttttttttaagagtggctccccaccccgcattgagtataaaggctttgattttcatcagtgttgtgtcatttattcatttttattgctgagtagttttccatgttaggtaccacaatattcttagccattaacccactgaagcacatttaggttgtttataatttttagtgattatgaataaaactattagaaacattaggtttttgtatgaacataaatattcatctctgtagggtaaatattggagtgaaatggttaggtcatatggtgagtgtatgtttacctttgtaacacagggccaaccttttccagaatgattaattttgttttcccaccagcaacgtatgaagatgtggttgctccataatttgccaacaccaggtattctcattgtttttattttatccattctagtagatgtgtagtggtatctcaatgtggcttcaatttgcatttccttagtgactaatgatgttgagcatcttttcgtgtgcttattgtccatctgtgtatctttgatgaagtgttcaaatcttttgccattttaaaagaattctattgtttgttttcctagtttagttttgtagtttgtggcttgtctttttattctcttttattcaatttttatttcagtgtcttttataaagcaaaggttttaaatgttaatgaagtccagtttttccctctatggaccatactttggtgtcatatttaagaaccccatccctaactaatgtttaggaaatttttcttctagtagcttaatgataatgtttttcacttacatccattttaggtaatttttatataaggtgttaaataaaggcccagctcattgtttttacatgtggttatccagatgtttcagcatcatttgtggaaaacatagtgtttctccattgaattgcctttgcccttttgtcaacaattgattgatcatagttaagcgggtctgtttctcagttttctgttctattccattgatctatgtgtccatccctttgccaaagccacacattgtcttgattactgtagctt

SEQ ID NO: 24130 - DNA, 1050 bp, Homo sapiens
ctactgttgatagataattgaattgtttccagtttgggggctctcatgaatataagtgctatgaacattcctagtaagcatatgcatttctcttgggtacatatacctaggagtagaattcctgagtcatagagcagacagatgtttagctttagaagataatgtcaaatggttttgactttaccagtttacagcacctctgtcagctaggcatgagttccagtttgtcaacactttgtacttttagtctgttacattttaaccatctggcttatgtgcagtggtctcttcatactggtttaaattttcatttttctgtggtatatatatatatataccatggaataaaaggaatgaaataatggcattcacagcaacctggatggagttggggaccattactctaagcgaagtaactcaggaatggaaaaccaaacattgtatgttctcacttataagtgggagctaagcgatgaggatgcaaagacataagaatgatataatggattttgaggactcagggggaaagggtgggaaggagataagggataaaagactacacattgggtacagtgtacactgctcgtgtgatgggtgcaccagaacctcagaaattaccactaaggtacttatccatgtaaccaaacactacctgttccctccaaaatttgaaatataaataaataaaataaattttcatttttctgagtattactaatgttgatcactttttcaagtatttattggatattggttatattctctttaaaagtgactgaatcttttatccatttaaaaaaattcagtgtttttaagttgctttgcggaagttctttatctgtattcttaatgcaagtcctctggtagctgtctgcattgggaacattgtctcccagcactcagcgatggtgagacgggaagtggcagacccccgcgctggctcctccgtcgccgcctctgggtgcctccctgcttccgatgggatggaggtttcaggctcactttgttctttccttgcaccaaatctggaatcagccaaggatccttggt

SEQ ID NO: 24131 - DNA, 1072 bp, Homo sapiens
ttgttgaggatgagaactttctaaaacaatcctttcagatataaaaatccaaatcttccaaggtacacctactttaattatgactcaaagccaataagcctttttaggcttaacattagttagcctttcttggactacctatagaggcagagacatccccaaagagtgtgcaaaggatgtggaactccccaatcaaagactgtccccatgagagcctaggaaagcagagaccctcattgttaacaaggcaaggaaggctgagacggcaatgacccctgtggactgtgaccccgattttaggatgagcttccccaagagcttctggactgctagccacaggctggcgcctgatggaagcctgaccacttgcgtccctatctgacagagaccagagaatatttttgctggttacaaagcaaaactcttaggacatgaaacaagatgaaaggagaatctcttcttaggattttccccctgtgacaaatcacactttcaaaggtcagagacaagaaaacgaagactctttagggaggctgtggatcaatgaccagtgggtacccagaaccaaattcacaagtgttgcaattaaaatatctaattcttacaaatgttttcctccttccaatccaaatttggaaaggaagggacaaggaaaaaccttggcctgtgttggaaataagagttcggagtcgcaaagaaaatgagcactcaaaggatttctcagtgaggcaaatttacttcttttctttttttattatactttaagttttagggtacatgtgcacaatgtgcaggtttgttacatatgtatacatgtgccatgttggtgtgctgcagccattaactcatcatttaatattaggtatatctcctaatgctatccctcccccctccccccaccacacagcaggccccagtgtgtgatgttccctttcccgtgtccatgtgttctcattgttcaattcccacctatgagtgagaacatgcggtgtttggttttttgtccttgtgagagtttgctgagaatgatggtttccagcttcatccatgtccctacaaaggacatgaactc

SEQ ID NO: 24132 - DNA, 1037 bp, Homo sapiens
ttctggagtggaaatcagacaaccctttctctgctttggacccttcgatagctctcatgcccacatgtgccttggctcaccttagactccatgcccgggtgcccttgaccccagttcacctgctgtcactggacctgagtcttggaatattatctctttttctctgattctcctgcccactctgtgcccaacaggtgtaaacatcagggaatgctggggcctgggacaatctgcaggaggcaggctctgcctagagacattaaaattaaagcccacgccagtactccataaactcaccctaggaaacatagctgggaggatcctacccagcctgcattccagagcacctcccatgcacaggcactgttccagggctgggtacggcagcgaggagacccgaatccctgctgcggtcaccctgtagagggagagaccaacaatataccagatgtcttagtcttctctggctgccataacaaaataacacagactgaaggacttaaacaacagaaatgtattttctcccagctctggaaagaaagtctgagaagagggtgccagcagggtcagtttctggtgagggctgtcttcctggtgtgctgacggctgccttcttgctctgtcttcatgtggccttttgctgcatgcacgtggaggcagacatagctgtctctcctacccttttttttttctttttttttttgagatggagtcttgctctgtcacccaggctggagcgcagtggtgtgatctcagctcactgcaagctccgcctcctgggttcaagcgattctcctgcctcagcctcccgagtagctgggattacaggcatgcaccactatgcccggctaattttgtatttttagtagagacagggtttctccatgttggtcaggccggtctcgaactcccgacctcaggtgatccgcccacctcggcctcccaaagtgctgggattacaggcatgagccaccacacccggcctctcttactcttcatataaggctaccaatcttatgggataagggcccaacctt

SEQ ID NO: 24133 - DNA, 1044 bp, Homo sapiens
aagatggggctgaagctagattttcttgcttgcattacaagcttctgaaccaaggacttcaatgtcacctggacttggattcacatcccagctccttcccttcctagctttaagactgtgtaaccttgggcaaatcccttaaccgctttaagccttaactgtttcatctgtaaaatgggactaacagtacctaccttccacaagcgtcaagaattaaatcaggcctggcgcggtggctcacgcctgtaataccaacaatttgggaggccgaggcaggcggatcacaaggtcaggagatcgagaccgtcctggctaacacagtgaaacaccgtctctactaaaaatacaaaaattagctgggcgtggcggcgtgcacctgtagtctcagctgctggggaggctgaggcaggagaatggcgtgaacccgggaagcagagcttgcagtgagccaagatcgtgccactgcattccagcctgggcgacagagcgagactccatctcaaaaaaaaaaaaaaagaattaaatcggacattgtaggtagagcacttaatagttggcattcagcggcagcagttactgttatgttagcatgtggagtgtctgagtgtgtgcactttggctcgaacagccttttgacagtggcacagttggtgcttgtgtaagatagcagggcagagaagtcaaaaccctcggttttctagtcaaactggtgggccacaacagtggtgacctaagtctaatgagtctttcactgaacaaggcagattgaatctccaggcgaggaccaagagtctggggctcagctgcctcaacatttttgggcatagaaggctgtacaatacaaacagcctttgttgtaagagcaaggaaccattcagggaaggcaccatgtggtaaggaatagtggccagaattggattcagaacaaaacaagagaatagtgtttgtctttaagtggagccttggactcaaaataggacctgagctctgtggataatttcttttttttttttttttttggagttgctctgttgcccaggctgg

SEQ ID NO: 24134 - DNA, 1093 bp, Homo sapiens
cacagtcagatggagtgataaataaaggcagaggtaactggctcattccagcttgtactgactcttctctgctttagttccaggacttcttcctgtattacgagcctaatgaccagcaagggcctcacacccacagaggcaacagcttctcaaacttctctatgactttccaactccttgtcctcaactcaaggagtcagttggccttcacttgggttctctcttcctatgctgcaaaagggaaactctccaggcagtcaaggggtaatcatagattcactgccacaattatgctgtgaaacattacattaccatcattctgaaaagttccctgtgccccttcgcagccagtccctttccccaacccctggcctttgacagccataatctgctttctatcactatagttttgtcttttctagaatttcatatgaatgaaatcatatagtatgttgtatctggcttctttccattagtgtaatggttttgagattcatctattttgttgtatcagtagtttgtagcttactatcccattgtatgaatatactgacatttgtttatccatttgatggacatttggattgtttccaggttgggctgctatgaatatttgcatgcaactctttcaggtaaatacctagaaaaggaattgctaggttttatggtgtttcactttttttttttttgagacggagtcttgctctgttgcccaggctggagtgcagtggcagtgtttcaccttttaagaaattgctaacctgcttccaaagtagttttatcattttgtattcccaccagcagtgtataagagttctgattattctgcatccttgccagtactccatattgtcagtttttaaattttatttagagacggagtttcgcttttgttgccgaggctggagtgcaatggtgcgatctcggctcactgcaacctcctcctcctgagttcaagtgattctcctgcctcagcctcccaagtagctgggattacaggtgcccgccaccacgcccagctaattttttgtatttttagtagagatgaggcttcaccatgttggccaggctggtctcgaactcctgacctcag

SEQ ID NO: 24135 - DNA, 1041 bp, Homo sapiens
actttatgatggctgggcccagtggctcatggcctgtaatcccagcactttgggaggctgaggcaggtggatcacttgaggtctggagtttgagaccagcctgtccaatgtgataaaaccctgtctctactgaaaatacaaaaattagccgggcatggtggcacatgcctgtagtcccagctactcaggaggctgaggcaggagaatcgcttgaacctgggagggggaggttgcagtcagccaagattgtgccactgcactccagcctgggcgacacagcaagactccatctcaaaaaaaaaaaaaaaaaaacaactttatgacatgggaaactgcttatgccaagtgaggaaagtgcagttcataattgcatgtcgttttttaggataatcatagtaggggaaagaactagattgcagcatctgaagatataagtgggtgatatttgtgactccttattagttaaggaaacattttaataagaggtttttagctgaggcctgaagttagggaagagaacaggccaggaactatggaacaggtctctctggcctaattagtcaggtatacccactgatgtcactttccttccaggtgtcagctgacaggggctctggccacagcttgtggggatgacgcgatccgcgtgtttcaggaggatcccaactcggatccacagcagcccaccttctccctgacagcccacttgcatcaggcccattcccaggatgtcaactgtgtggcctggaaccccaaggagccagggctactggcctcctgcagtgatgatggggaggtggccttctggaagtatcagcggcctgaaggcctctgagctacctcgactttggacagagtaatgactccccagaaaacgtcatataagactttaccagcccctgagaggaccaggaggagcatccttgaccttcatttaacttggctcacttctcttcagacttgggtagaagtgcagagccacagaattgctttccttccccgcctttgacatgaggccttcagtaaagagctacagaacat

SEQ ID NO: 24136 - DNA, 1047 bp, Homo sapiens
gagttattactggccacaagccctgtattctcaacagggatgcaaattggttcttcagtaaggataaaaaaaaatcacaagcagttgtttgtggccctcctaaggcccacagcacatatagtgtgtctgtgatattccattttcatggcagggagtgatcaggaagaaggcttcctaggggactggcgatttaaaccagttgagaaacactgccatcagcaggcagtttcagactcactcaagttgtctcttgacagtcacttctaaatgggttctaatgtgacaatggcctccaaaactacagccttccctgaagtttaagctgtgaccttagattttagaaggacagtggggctgtacctagaatagtggttctcgaagaatgcggcctgcagatcctgggagtcccaagaccctttcagggaggatctgtgaggtcaactgttggcactgtggcatgaatcaaggtggtggcagcaaacttctagtagttttgatatgtccttgatagaacaaatagcaatggttaactattaaatgttgacctagccagcgcagtggctcatgcctgtaatcccagcactttgggaggctgaggcgggcggatcacctgaggtcgggagttcgaggccagcctgaccaacatggagaaaccccgtctcttctaaaaatacaaaattagctgggcatggtggtgcatgcctgtaattccagctactcgggaggctgaggcaagagaatcgcttgaatccggtaggtggaggttgcagtgagccgagatcataccattgcactccagcccaggcaacaagagtgaaaccctgtctcaaaaagaaaaaaaaagttgaccttgagaatttataatattctgagaaaactggaagcatgcataaagcccctctgctgtgcactgaagtatgggtgccttgaggaaaagcagttacacagttgagttgcaagctgaattggctgtgttcaaggcatgccctttagaattgaaagaactagcagattacggtatttagacttgaatatttggctgatatt

SEQ ID NO: 24137 - DNA, 1026 bp, Homo sapiens
aatgtattaacaatataagagtgcattaagttttcggagtctacattgcctttaagaaactatgacttgtagtaagccgggcgcggtggctcacgcctgtaatcccaacactttgggaggccaaggtgggtggatcacaaggtcaggagttcaagaccagcctggccaatatggtgaaagtccgtctctactaaaattacaaaaattagccgggcgtggtggcagatcccttgtagtcccagctactcgggaggctgaggcaggagaatagcttgaacccgggaggtggaggttgcagtgagtcgagatcgtgccactggactccagcctgggtgacagagcgagactccatttcaaaaaaaaaaaaaaaaaaaaaaaatcacttgtagtcttggtgtggtatcaaagaatagccacaattagctgaaaaggctattttaaaaacttttccaactgcgtatctgtgtgaagtcaacttacttcaacaaaaaagtttggatgtagaagcagctgtaagaattcaactgtttattataacaagatactaaagagactgtaaaatgccacccttctccttggattgttttggaagttattcttcataaaaaatgttaacgtgggctgggcatggtggctcatgcctgtaatcccagcactctgggaggctgaggtgggcggatcacttgagctcaggaattcaaggtcagcctgggcaacatggctaaactctgtctctattaagaaaaaaaatgttaacattatgatttaaaagtgcattaaccttaatctagataataaaagctttttggggcaacctccagaactgtgaaaaataaatttgttatttaaaaagaaaaaaaaaaaaacaaaaacctgagtttcttagtttttagtagtgtaaagaggtcctaagaccaaatcatttgaaaactgctaccctgaggaaactgcccttcagaatcatctttcaattttgtgtgcatttaatctaaagaacagaaggtaagaatttgaagacagtcggaa

SEQ ID NO: 24138 - DNA, 1050 bp, Homo sapiens
gtcaaagacttcgtggtgttggggacaagaaggggtgagctggaaatgtaggaggtggttgccagagaggggccctagaattgaggatatagagaggttgcagtcatggttaatgagtcaactcagagcaggcaagggagcaaatggcggaggcggggtaggggtcttactaggctgtcttggtgtcttacttggctgtcttggagtcctgggtttcttaggatggagaccattgaaggagaggatatcaaccaagagacagtgtactggatggatcaacatatggatattgaaatcaataagagctacaccaggaataaatttggagactagtaatgagccataaactaatactaagatcttctgagaagaaggacaggttgtgacctggggattggaagatgactgcaacacagatgggcagacagtggcaaaagctgatgttgtactcagagctggggcattagaaattgggaggggggatagttggatgctgcaatcacctggcccacctgtaggccactggtttgacggctgtgaagagaaagcagccactgcagaggcccgcaggggaagcctatcctcaggctggcaccatgtctcaattggagcagtgcccctcagcctgttttttttttttttttatcacttttgccccttcagacccatttagacattttgtgcctactccttccccttaaaatgaaatactaaggaataagattttgtcagatagggtagagatttggataggcaaacattattgtaatatctaagatttttcccacctagcctctaggaaacagttttcaccccttgagagtgaaatgagaacaccattgagaatacataaattagaacaagtaggtggagataatcctcaggaactaagtgggcgatagagagaattttgctgatgactgagtctagagggccctgaggaaataccagtttttgaggaggagtgggagatgggggctgtggtggggtgggaggtggcatcagagttctatagatcttagagtccaagaaatgtagaattgtgggtgt

SEQ ID NO: 24139 - DNA, 1033 bp, Homo sapiens
tggttcacaactgtagtcccagtactttgggaggccaaggtgggtggatcacttaaggtcaggagttcaagaccagcctggctaatatgatgaaaccccgtctctactaaaaatacaaaaattagccagatgtagtggtgcgtacctgtagtcccactactctggaggctgaggcccaagaatcgcttgagcctgggaggcagaggttgcagtgagccaatatcatgccactgcactccagcctgggcggcagagcaagactccatctcaaaaaaaaaaaaaaaaaacaaaaacaaaccacttttgaccatgagtggagatatttcagtccagtgtatatacctgctaatgagtggggccaaatgcatgagaatttatctttcccttggctacatgccgtaaatcttcagtttcttctctctctgtgttcagattgatcccatgtttcagaagacagcagcctcatttgatgagtgcagcacagcaggggtgtttctgtccactctccactgccaggactacagaagtgaactgctgtttccctctgatgtccagactctctccacgggagaacctctcgagttgccagagttaggttgtgtagaaatgacagatttaaaaggtaagtacaagtgatgcctttcaccagagcatttcagtcattggggaatttttttacataaccatggggtacaataagcccatcatgctcttatgttgcttaaattacccagaagtttcctctggaatgccaaattgtgtatccttttgggagtgccttgcaacccactaacttttgtcttctctgcggcgtggagtctaaaacggtaaaccatcgcctcttggtcttgatgtgcccggtaccttaggtgcccactgtttgcagtcagctctccaagtcacatttgggagacctgggttcctcctggagtgtcagtttgttcttgggaaggggacttagagagacctttgcctagccagagaggctttgtttttatttgctccccatccagggggccctgaggagaagaga

SEQ ID NO: 24140 - DNA, 1011 bp, Homo sapiens
accagcgtcctttctgacatgttggagccctttaggagaaagcttgtaccttgtggaaagagtgaaaaatggctgggcacggtataatcctgacacgcctgtaatcctagcactttgggaggctgaggcaggaggattgcttgaggctaggagttcaagaccaacctgaccaacatagtgagaccccatctctattttttaaaaatgtagaaagagtgaaaaaccaaactgaaactgccatgctgcactgaccacttagacactttacacacggcaaagaataaagctggatgacctaacagattataaggggagcccccaaagcgttagaggaactaaataattagacaaacatgttttttcacttttagtaggaactatagcggtatcttttggagccctcatttacagaaggatggtgacgaatgagggatttgtcatcttgtgtggcaagaagcatgtgtgtggaaagaccccgaggctgggattaagggacttgtgtccagctcccagctccggcattttactagctgtagattcttacccaaaggaattctcttttttttttgagacggagtctcactctgtcacccaggctggagtgcagtggcgcgatctcggctcactgcaagctccacctcctgggttcacgccattctcctgcctcagcctccggagtagctgggactacaggcgcccgccaccacgcccggctaattttttgtatttttagtagagacggcgtttcactgtgttagccagggtggtctcgatctcctgaccttgtgatccgcccgccttggcctcccaaagtgctgggattacaagcgtgagccaccgcgcccagccaaaagaattctctttacttttgtcatcttgtctctcaaattaggtagactagcattttatggtgcactttgaaacttccagagtacttgtatagatatgattatattgttataaaattaagggaaggaaaagtacttgagaagtaaaaggaattattaataa

SEQ ID NO: 24141 - DNA, 1070 bp, Homo sapiens
tactgctttcgctcatcagccccagcctgaaggtcagagtgcttctctgggtggtgtgtctccacagaaacctgacttgagagagcggcttcatggccctcacttgtttcttaaggagtcaggccaggccaacactgctaagaaatattagtgactctgcggcttcactgaggtcgtgctgctccgactccagctctgcacccctgctctcagtggcagtgcaggcatgttcattttgctgtgatcaagtctctttttaagggtcccagagctcttggtgtttgaagaatggtgggtggctacagcccatgacttgttgggctgagcaccgaggccattactggggcctggctttgggctgtttgagaaaactgggcttgtaacattagccacaacagttactgttataatctacagggatctgtgataactcaacacttagagccaccaagagaaatattctcaacgcttcacagcagaacttgacctcctcttggacttctttctctccatctttcactcccgtctggagtctgttcctccaccactgtgataacagtctcccctcacatagccaggcagtgtgtggggcttaggagccagtgatggacgtgaggccctctgccttcatgtctctgcatgttagcagtgtgcaactaccagaacctgagctgcagaaaacccgcgaggtgtgacttgagcgttctgtctttagtggcaaggaaaggtgcgagtgactgttgagccctggcacatcccatctgcctccagtgcagagccagggcaggctggttgtggtgaagttcgtcaggaaaggtctcatagctgcttagtcctgagggaaacactgcctggggttggggaagagctgggaggtaggtagggaaaggcctgtgcagagactggcaggaggtcactgctgtcaggaactaatggagagatggggcagtggggtagttgaggggtgcctggaggaggtgcgcgtggatggggttaatacagtagtcccctagtttccatggatggggcattggggcagttgggggtgcctggaggaggcatgcatggtt

SEQ ID NO: 24142 - DNA, 1030 bp, Homo sapiens
cttggaccttaaatcagactctgaggatggggccggagcattatgctcctccaggtgattctgatgggccctgtctaaccactgtatttttctgaagcccaaggtgcagcgacttgccaagggtcacatagcaagtctgtgacttaagaagccccagtcacaccaaggaagacatggagagggtctgtcgatgctgaggctctggggcagcaggaatgaggggaggggatgtgtgagctgagggtagcaggcagtgggagaagagccagtggaggaggtgcttctggacctggaagacttcaggaattcacggatagctagcaaagaactcaaggatcttcctctcccatttcatagcagggaagactgaagcacagagtcacagaggacttggttggaaaggcatcagtctgctgggtcacttgttagtacccaggatttctggagactggtgggtcagaggctagcccaagagggtggccctggtctctttctctttgacaagccttaggactggtttctctccaggcttacttggactcttcatgaaggccttgcaaatgttgataaccacagcagccactggaccagaatcagactttgttttgaatcctggtcccccagggaggcaagcaacttacccataaccattctggcttcagattccccctctttaaaatggaattcctccgggactgagggagagaatgtacaggcacaccttgctctatcatgctttgctttattgtacttcacaaatacagcattttttactcattgaaggtttgtggcaacccagcatcgagcaagtctatcgatgccattttttaacagcacgtgctcactttgtgtctcggtgtcacattttggtgattcttacaacatttcaaactttttcattattatatctgttatggtgatctgtgatcagtgatctttgatgttcctattgtcattgttttggggtaccatgaaccccacccacaaagacagtgaactaaatcgataaatgttgtgtgtgctcctcctc

SEQ ID NO: 24143 - DNA, 1043 bp, Homo sapiens
ggatactttaccagctttgatgttaattctccttcccttgtctcctgtagggtccagccacagcaggcccggcgtcccggtggaaggcagccctgggcggaacccaggcgtttaacggctcactaggcagccccagatctggggaacagatgagcacgtggggagctggagtgagctgagcagaagttttgtgcccgcctgcccccatcccctccaggccacgttttagatggcccttgtagttgcgggtcctgggtgtcctcagaactagacatcaatgcctggatccttcagccggccctgccctcctttaggagacaggagtcaccagggcacagccctccaggcccgcctcaggaaggaatgaaaggaatgccatcatctctagttcccagggcccagccttccccttctcccccggggcagggacagtgcggcatattcagattcagacctctttgggctgagccaccttgtgagtgcagttactgcctttgtgtggccgtgacctctatttgtttgcttttaatttgccaacctatcgctgctggcagcactttttgagcaagccgagagcacccattttggctgggggttcagatcgatggccttgtccatgttgtcctttctggcttccctgatggtgtcatgtttcagcgcatgcgccccagcctttcccatgtgccaaaccagaagctccactgcccgtaggctgtccctgtagccctgctccctccctggaggctgctcttctgattctgagagctggcctagtggtgctgagggcccctttctgcttctctgcccacctgctgagttgccactcgcagtgttgtcagttcccgtgttctgagaagaggtcatgcctgggaggaagggatcgtcatgctgcatcgaatcctctctccgccgtgtggcccccaggagagtagctgcctgttgcacctgctccacacctccccacagcctccctgcaggtgctgtgtggccgtgatgtgcagagagcagtgagggagggttcatgaaccaggtggatcctcttt

SEQ ID NO: 24144 - DNA, 1011 bp, Homo sapiens
tttaatttttttttgtagagatagggtctcattatgttgcctggggtagtctcgaactcctaggctcaagcgatcctcctgcctcggcctcccaaagtgttgagattataggcgtgagccaccgtgcccagattcacagaagtttcatacacctttcacccaggttcccctaatgttaacagcttacatataaccttggtacatttatcaaaactaaaggtgcaatcatactaatagctagagtttatttggattttaccatttttcccaatgtcccttttctgctgcagcagccaatccaggatgccatactgcacttagagctgttgctttcttttttcctaactttatattttgaaataatttcagatgataggaagttgtaaaggtaagggccccacgcacccttcatctagtttccctccatggttacatcttatatggttgtaatgcagtattccaacaaagactctgacactggtgcgatgtgggtggacagtccaaatcatttgtcacatgtacatctgtgtaactaccactgcaatcaggataaagaagtcccatccccacaaggatctccctccccaccttccctaactcctggtaaccactaatcgttcatctcttcttattttgtcatttcaagaatgttgtataaatgggagcatagtgtgtaagcattcgggattgtcttttttcactcggcgtcattctcgggagatcatccaggcattgcatgtgtcaacagtttgctcctttttattgctgagtggtattccgtggtgtatgcattggccccctgaaggacacctgggatgtttccagtttggggctattccaaataaagctgctacgactattcatgtacaggtttctgtgtcaggattagttttcgaggagtgtaaatgcttggtcatagggttgttgcatgtttcgttttttaaacaatcaaactttttttttttttttttgagacggagtctcactcttttgcccaggctggagtgcagt

SEQ ID NO: 24145 - DNA, 1042 bp, Homo sapiens
gtttccctgaatcctccacagcacttagtggtgtccacatgtttttacttcagccgttctgacaggtgtgtcgtgatgcctcacggtggtttttcatttgcatttcccagtggtggacacctgtgtttcgcttcagtggaatattcctgtctttcacccattttctgattggattgtttcttctgttgagttttgagagttctttgagattcctttatgggatttttggtttccattggtctgtagcttatctttttcacccctccccctcccccccttttttttttcctgagacagagtctcactttgtcacccatggtggagtgcagtggcacaatcttggctcactgtatacttgacttctggactcaagcagttctccctcttcagctccccatgtagatgggactatcaccacacccagctaattttttttttttttttttttgagatgtagtttcactcttgttgcccaggctggagttcaatggcgtggtctcggctcactgcaacctccgcctcccagttcaagtgattctactgcctcagcctcccgagtagctgggattacaggcatgtgccaccacgcctggctaattttgtattttcagtagagatggggtttctccatgttggtcaggctggtctcaaactcctgacctcagatgatctgcccgcctcagcctaccaaagtgctggaattataggcatgagccaccatgcccagcctatgcccagctaattttttatagagatggggtttcaccatgttgcccacacctggtctcaaactcatgagctcaagtgatctgcctgcctcaacctcccaaagtactacaattacaggtgtgagccaccgtgcccggccatcttttcaccctcttaacagggttttatacagagcaaaagttttcagttttgataaagtccactttactgatatttcctttatggactgttgcttttagtgttgcatttaagaacaactctacctagtcttagatcccaaaggttatctgttttttcctaaaagaagttttat

SEQ ID NO: 24146 - DNA, 1043 bp, Homo sapiens
ggactccgggtatggccacgggggaatcacactcacccgatctttctgaagtgtcccccgaagactccgggcgggctgggctggggagagggactcccgaccgtgcagttgcaggaacgaccgcgggcgagccacgtcgaggcgagtatccaggggaggcacgctgggggaaccgaggcgtcttttggggcggaccagaggggtctgccgtttggcccccaattctgcctctttctaggccccgaggaccactggtccctgccctcaagtctggaaagggcttcaccagccaggaagacccttcaatcaacagaaagggcctgctcctgcttctcacgctttgggcaaagcgcctatccccagaaaatgactcctcgtgccactggaaggctgattaacaagtggcatgagccctactgttcagatgaaaggggctgtggggagccacgctgcagaaccaccgccaccttcagaaccaccagcctccgcccacagccactcctagaagcaacttgtagctctggcctcatgggcggtgcagcgtctttcctgccagctggtcctctgagctgggcaggtggttagaagaggtggtcctcatggaggacaccccacgggcacctggagacagatgctacctcctggctaggggcaaaaggcagaggtgaaggggcttgacgtcctgaggtttggaggtaactttaagccagggtgcagtcctggaggggaggaacacttcaggctgcgtcagcagatctggattataaatcagtccgacagcagcttttgttctgggttaaaacttggcatctgaaaagtggagaccagaaaagtggtggagataattgagaaaagcagcccagtttggtttcagtaacaatcgggtctttgctggtacacataatggccccttctcccttgctggccaaagccacgtttcccagctcttttccactaggaaaaagaaaaaaagctgtggccttggagatgctggagataatgaccatggggtgggcagggaaggcctcctgcttcagctgaca

SEQ ID NO: 24147 - DNA, 1729 bp, Homo sapiens
tatggcagctaaatattccccattttcctatagacacaatcagaggtgcataaaatttcagaatgttaagaaatcctagagactaaacaaagtatcctctagtgcttgaatccttgcttaacatcctgatcaagtggttgttcaggtggagaacctgaaactcaaagagagaaaattatttggatacagtaaatcagagaaatgagaattgcactcaggtttcttagttcaaaacgcagtcttcttttacatcattctgtcattgagtgattttagttttagaaagagggagtggctctagtgaacacagtggaagaggatgagaattgaatgagctgttgaacctaatgaaagtgaataagaatggaatttgcagggggcagccaaatttgaagagaaacaaactcttagtttgatagaaatgaggattttagggaaaaatctgaatatttggtttaatgcaagtttgataaagataagggaaatgataacacaggatgttgggagctatcaagaaaggcatattagaatatggcgttcaaggagttctgaagagtttgctgcctttttgtttgtttaactggaggaactaacaaacttcaaggttttattgaaaaatgttaaaagaatttgagccactggaaagagtctccagaggagataggaatgtggtatcatcttcttccatcccagcttacagagggcttagaatccctcaagaaccagggagctggagattgcttaagtacatagatctgtgatccagggtggatgtctctttttttctgactcttttctcaattctctcatgtacatgtagggtgggacaaatgtaggattggccggcaaaccagcaatgaagcttcatttgggtagttggtaacatgcgtatgcttggggtggatgactgagactaacttactttccagaagcagaggaatagagagctcctactctcaattatgttagcccatcttttgagaaatctgggctttcctaggctgaagatgtagattggagattgccacagatccctgcagaagagggatccagaagtgggagcccataggaaggaagatatttagatagggatgaatgaaatggagctataagtacttaggagggagacttttccagcagtctctctcttgggtatctgagtgtctatgaaggttcttaagcttgctggtttttgtggatctgaataaggcagaatctatataatgacgataattggattttaaaatttttaatgttttaatcttctgtgaagaatattcccaataacaatctaacaacatatacatttgtactttgacttttgtacactcagctttcaaacatttgcagtgtttcagggggctccctgtagtgttctagggtgaaaagaatcaatgggccctctttaagtagcttacatgctgaagatccaagactcccattttccagtgacacagattagtctttgaatcagaaatagataatggagaagagaccgtgccttttctaccttgttttaggttatcaggtttactgcagttcagtaacaaaagttgtgtcagatatcaactggattttcagtttagtctttagggtagataatttataaggacaaattattgtctggctgtgccattataatgcctgtcactatttgttatgggtttaagggtgagtctgcattggatatttcataggttgggagaagtggcagcagaaataggtaact

SEQ ID NO: 24148 - DNA, 1376 bp, Homo sapiens
gactgcatgttttatagaatctatattgtgatttttcatgtgtatattcctgtcatgtttgtttgctaaccaaaacaagagcaaagcaacccaaagcctaatgggtaacaatttcaagggcaagcacgaagatttcagctggatacaaacactgcatgattgatggtaggctgtgtcatatttacctgtagtcaattatgtgttccttttgctttgtagtgtctcctgagcaaccgcctttattcacggtaaacatattttctttaattattaacaaaatgctctgtgatatatacatgatatgttaatcattatgttgtcaaacccattcagcatacggtgaaagacagagatcacatttcaactagattcttaggaggtatggattcactaacttccagtgaaggtaaatttgccgctacaaatttcgttctagaaaatgtagatgaaaatattgaaaatgctcatagttttttgattcccactttttatccaagtgagatggaaggatttgatgtaaatatgctgatgttcttgttaatatctttgtttataaaatgatttttaaggcataaggcggacattttacacggtgagctctagcccaaatgcttttcctttaaagttgtcatcagctaaagatcccagttttgaattcctgtgcatgttagggatttgaggaggtgtattttgacactaaatattttcagtgcttcaaaattgattgcaatactcttctgtcttcttcatctagagaaaagctatacctgctgactttacaattgttttagaacttcaacgcctttatttcagcgttgttacattgagaatcttaatcacatcttctgattaccggattgagtttctgcatgtgtgtgtgtgtgtatctctgattaaaaatgaataaaatgattaatcattcttttgtaactctttggtagatacagtgttttaaaacaatgattctgagctgttttggccttagaatattttcttctactactatttattgcctacaggtaaccaacagcctgaattaacgtttttacttttaagtcactgcaatgcacattaaaaatactttacaagatacttgcactttcataggtaatatgtggaatctgtttccaagtatcaagtcttctatacgatttcacacagtgtacataatagctgcaactcggcttttgtaatcagtggaatatatttcagatctgtccaggttgacacagtttggtcatctttgatttgttttatgactgcaccacatatttgatttgttttatgactgcaccacaattaattaaaatctcttcatgctgatacaaaatgaacataaatatgatgacataccaacatagatttgcttatgtggt

SEQ ID NO: 24149 - DNA, 1069 bp, Homo sapiens
cagtctatcactgatgggcattcgggttggttccaagtctttgctattgtgaatagtgctgcaatagacatacatgtgcatgtgtctttatagtagaatgatttttaatctttggggtatgtattcagtaatgggattgctgggtcaaatggtgtttcttgttctagatccttgaggaatcaccacactgtcttccacagtggttgaaataattgacactcccaccaacaatataaaagcgttcctatttctccacatcctctccagcatctgttgtttcctgagtttttaatgatcaccattctaactggcataagatggtatctcattgtggttttgatttgcatttctctaatgatcagtgatcatgagcctttttttcatgtgtttactggctgaataaatgtcttcttttgagcatatccttcacccactttttgatgaggttgtttgttcttttctcataaatttgtttaagttccttttagattctggatattagccttttgtcagatggagagattgcgaacattttctcctgttctgtaggttgcttgttcactctgatcatagtattggaagttctggccagggcaatcagacaagaggaaaaaataaagggtattcaaataggaagaaaggaagtcaaattgtctctgcagataacatgattgtatatttaggaaaccaaattgtctcagccccaaatctccttcagctgataagcaacatcagcaaagtctcaggatacaaaatcagtgtgcaaaaatcacaagcattcctatacaccgataaaagacaaatagcaaaatcgtgagtgaacgcccattcacaattgctacaaagagaataaaatacctaggaatacaactcacaagggatgagaaagacctcttcagggagaactacaaaccactgctcaaggatataagagaggacacaaacaaatggaagaacattccatgctcatggataggaagaatcaatatcatgaaaatggccatactgcccaaagtaatttataggttcaatgctatagactaccattgactttcttcacagaattaga

SEQ ID NO: 24150 - DNA, 1095 bp, Homo sapiens
atggttattttcagtgaatattggactgatatccaaatgtaaaagcttattaatatctaatgccaggagccattgcattttgtataaatatgtgtaatttattgtactttttgatgaggtttatatattataccttcctgccattagtggatgaagaaaattactgaaggctaaactagaggatacaagaaatgtaggcagattattccaccacatgtgtatgataaataatgaatactatctactaggattcaccaaccatatatccaagctgatcaatttagatcccttccacttaagagacgtgaagtgtacattcatctgaagtgtcattgtaattgtgtaccttctcagttatcaggcaagttagagcatgatgaatgtttgtagtatagtagtgtaaatccttttgataccttgcatgaaagacatggaggatgatgtagcacctgctttgacattgattctcaggtgtatgagttgctcctctgattttagatcacttttgtcctcatcattcagcatattcacattgatagtaacactgtttcattttagttttagacatatgaaaaatcataccatgattgacattgtaagggtttattttgtgaaacctgtatttcttttttttcagtgtatttctggtcatgttccagtccccagacacaaaaatcaaagcctatactaatacaggcaggagcatacagcttgatgctaacacttcatgaatgtatagataactttatcatatttacatatgagtgattatgtatcccttttgcttttcagtgtcttctcagaaacaaccagcctcaaaggtaattaaactctcatttatattttgtattagtaactgtatagtccatgaaacatactttctttattgataatttgcttcaaattactttcaggctacaagtgacaagacagattctgctttgaatatagctacagaaataaaggatggactacagtgtgggacaggtaattttgcaaaacacatttaatgtcatgttcagtccagatagaaaagaacttctcttccctgaataaatcagcggggggctcgtcaaagctgcacattctgattca

SEQ ID NO: 24151 - DNA, 1848 bp, Homo sapiens
gaaaacttgttgtaataacccgtacacactgtaggagaactaaggagacccctgttgtagcaatcattttgccaaagaagacggattgtgaggcaggaaggtgtgaaaagaggaagtcatttgtataattttggggtttctgctgaggaaacctgagtgaactcacttcagatgcatttggaatattttaataaaaaatacttgattttggctgctgcaggaactgctggaagaaggaaaccattctgggattggcataaaaacacactgactcattactctcctttgttactgttagacatcagagatatatgttttgttgattttagttatagaaatgagacaagcttaaatctgaatacattagtttccttgttcaaggagctacctcttggatacaacagctatttcatgaaacttctttagcgaatgacatgatactcccaacaagcctattttagaaagaaaaattatgctgcattgtaattaactcctaaactggtcattttcaatgagtattgctgtgatttctgaatgaaaaactgatcaatatctaatgcttgtagctgttttactttgtataggtatgtcaaaattgataattgatgatatttttattgaggctaagatactatcctttggtgccaagactggatgaagaaaatttcggaaggctaaagtagtggatacaaaaaacttaggcagattattactccatatcggggtgagagataatgagtattatctactagatatctgcaaacatatatccaaggtgatcaatttaggacccttccactgaagggatgtgaagtgtacttcaactgaattgtcatcgtaattgtgtgccttctcagttattgggcaagttaaagaggatgatgaatgtttgtagtataatggtgtaaatccttttgatttgttgcatgaaagacatgtgggtacatgtagcacctgctttgacattgattctcaggtgcatgagttgcccctctgattttagatcactttgtcctcatcactcggcatatccacgttgatagtgacacggttttattttagtttttggcatatgacaaatcataccatgtttgaaattctaagactatatttcatggagcctgtattcccttttctcagcgtatttctgtcacgttctagtccccagacacaaagtagaagccatcaaagcgtacactaatacaggcaggaggacagaggttgatgctaacactgtatgaatgtatggataattttgtcgtttttacatatgagtgattatgaatcccttttacttttcagtgtcttctgagaaaccaccaggcttgaaggtaatgaaactgtcatttatattgtgacctagtaaatgcatagtctatgaaacatactttattaatttattatttcatttcaaattccattcaggcttcaagtgccgagaaagattctgttttgaatatagccagaggaaaaaaggatggagaaaaaactaagagaggtaattttgaaaagagatttaatgtcatgttcagtgcagatagataagaagttctcttccctgaataaatcagcggggggctcgttgaagctgcacattctgattcagcagtcctgagattcttcatttcaaataagttcttgggtgatgctgatgctgctggtctggaacatgatcttcgcagtaagattatacacttccccacattgaaattgggaagaagaaatatggagagcagttcaaggcataaggggctccggggaacaacataattttgctttaattctccagcttgttttcagtaagggtggaaggagaaagagaggaagtatagaatttacacacttcag

SEQ ID NO: 24152 - DNA, 1090 bp, Homo sapiens
atgtgagtgattatgtatcccttttgcttttcagtgtcttctcggaaaaaaccatccttggaggtaatgaaactctcattcatattgtgagctagtaaacgtatagcctatgaaacataccttatttattactttgtttcaaattccattcaggccacaagtgatgagaaggattctttttcgaatataaccagagaaaaaaaggatggagaaatatctaggaaaggtaattttgcgaaacacatttaatgtcatgttcagtccagataagaagttctcttccccgaataaatcagtcgggggctggttgaagctgcacgttctgattcaccaagcttgagattcttcttttctaacaagttcttgggttatgctgatgctgcttgtctgcagcatgatcttcgctgtaagattatacgcatccccacattacaattgggaggaagaaacatggagagcagttgaagacataaggggctctggggcccagcataattttgctttaattctgtagcatcttttcattaagggtgtaaggagaaagagaggaagtacagattttacagacgtcacatcatagtgctaaaaacagacagaaaactgttcattataacccgtagacactgtagaaggagaactgagaagacccctgatgtagcaattattttctgaatgaagacggattgtgaggcaggaaggtgggaaaagaggaagtcatttatataattttgtggttactgctgaggaaacctgagtgaactcacttcagatgcatttggaatatttgcataaacaatatttgactttggcagctccagcaactgctggaagcaggaaacagtgtttgaattggcataaaaacacaataactcattactcctctttgttactactaggcatcagagatacatcttttgttgattttagttatagaaatgagataaacttgaatatgaatatgttggtttccttgttcaaggagctacctcttggataaaatagctgtttaatgaaacttctatagaaaataacatgatactgcctacaagggtattctagaaacaaaaattatgttgcattccaattaagt

SEQ ID NO: 24153 - DNA, 1050 bp, Homo sapiens
agaaggctattttagaaacaaaaattatgctggattctaattaactcctaaaatgctcattttcaatgggtattgcagtgatttctgaatgaaaaactgatcaatatctaatgcttgtagcagtttcactttgtatgtgtatgtcaaatttgataattgatgatatttttattgaggctaatatattatcccttcgtgccacgactggatgaagaaacttttggaaggctaaactagtggatacaagaaacttaggcagattattacaccatatgggggtgagagataatgaatattatctactaggtatcagcaaacagatatccaaggtgatgaatgtaggacacttccactgaagagatgtgaagtgtacgttcaactgaattgtcatggtaattgtgtgccttctcagttattgggcaagttaaagagcatgatgaatgtttgtagtataatggtgtaaatcctttttatttcctgtatgaaagacatgtgggatcatgtagcacctgctttgacattgattctgacgtgtatgagttgctcctctgattttagatcactttgtcctcatcactcggcatatccacattgatattgacacggttttattttagtttttcacatatgacaaatcataccatgtttgaaattctaagactatatttcatggagcctgtattgcttttctcagcgtatttctgtcacgttctaatccccagaccaaaattagaagccatcaaagcatacgctaatacaggcaggaggacagaggctgatgctaacactgcatgaatgtatggataattttgtcatttttacatatgagtgattaggaatcccttttacttttcagtgtcttctgagaaaccaccaggcttgaaggtaatgaaactgtcgtttatattgtgaactagtaaatgtatagtctacgaaacatactttattaatttattatttcatttcaaattccattcaggctacaagtgatgagaaagattctgttttgaatatagccagaggaaaaaaggatggagaaaaaactaggac

SEQ ID NO: 24154 - DNA, 1034 bp, Homo sapiens
gattctcaggtgtatgagttgctcctctgattttagatcactttgtcctcatcactcggcatatccacgttgatattgacacggttttattttagtttttcacatatgacaaatcataccatgtttgaaattctaagactatatttcatggagcctgtattccattttctcagcgtatttctgtcatgttctagtccccagacacaaagtagaagccatcaaagcctacgctaatacaggcaggaggacagaggttgatgctaacactgtatgaatgtatggataattttgtcatttttacacatgagtgattatgaatcccttttacttttcagtgtcttctgagaaaccatcaggcttgaaggtaatgaaactgtcatttatattgtgaactagtaaatgtatagtctatgaaacatactttattaatttattatttcatttgaaattccattcaggctacaagtgccgagaaagattctgttttgaatatagccagaggaaaaaagtatggagaaaaaactaagagaggtaattttgaaaagagatttaatgtcatgttcagtgcagatagataagaagttctcttccctgaataaatcagcggggggctcgttgaagctgcacattctgattcagcagtcctgagattcttcatttcaaataagttcttgggtgatgctgatgctgctggtctggaacatgatcttcgcagtaagattatacacttccccacattgaaattgggaagaagaattatggagagcagttcaaggcataaggggctctggggaacaacataattttgctttaattctccagcttgttttcagtaagggtggaaggagaaagagaggaagtatagaatttacacacttcagctcgtactgccaagaaaagacagaaagcttgttgtaacaacccgtagacactgtgggagaactaaggagacccctggtgtagcaacagttttcctaaggaagacggattgtgaggcaggaaggtgtgaaaagaggaagtcatttatataattt

SEQ ID NO: 24155 - DNA, 1114 bp, Homo sapiens
tctcatttatattttgaactattaactgtatagtatatgaaatatactttatttattgactgttttgtttcaaattctattcaggctatctgtgacaaggaagattctgttccgaatatggccacggaaaaaaaggatgaacaaatatctgggacaggtaattttgcaaacacatttaatatgatgttcggtcagggtagaagagaacttctcttcaccaaataaaacagcggggggttcgtcaagccttcatgttctgcttcagtattcctgagattattcatttgtaataagttctcgggtgaccctgatgctgtggtccttggccatgatggaagtactaagattatagatgtctgtactttgaaattgggaaaaagaaccatctgacagcaattcaacacataacaggctcaggggacagcatcattttgctttaattctacagcatgtttccatcaagagggaaaagagaaagagatgaagtaatagatattagaggcgtcagattgtattgtgataaacagagggaaaagtgatcctaataccacaaaaacactgtagaatgagaactagcaagagcagtgatgtagcaattattttcctcaaggaatagggattgtgagtcaggaaggagggaaaagtagttatttatgtaatttgggatttctgctgaggaaacctcagtgaactcacttcaatacatttggaacatttgcataaaagaagatttgattttggctgctccaggaactactagaagcaggaaactatgctagaattgggataaaccacagtgactcattactcctctttaggagtaatttactattaggcatcagagatacatgttttgttgatttcagttataaaactgagataaacgaatatgaatacattggcttcaaagttcaaggagctaagtcttggataaaatagctattgaatgaaacttctttagagaatagcatgatactccaaagaagactttttagaaacaaaaaatatgttgaattctaattaactcctaaagtggtcctttcaatgaatatttgattgatttctgaatgtaaaacttattaatatctaatgcttgtagcagttttactttgta

SEQ ID NO: 24156 - DNA, 1009 bp, Homo sapiens
atagtctatgaatatatactttatgtattgattattttgtttcaaatcccattcaggctacaagtgtcaagaaagattctgtttcgaatatagccacagaaataaaggatggacaaatacgtgggacaggtattttggaatacacctttaatgtaatgttcgatcaaatagaagagaaattcacttccctaaataaatcagcggggggttcattgaagttttatgtttggattcagcatgcctgagattcttcatttgtaataagtcctcaggtgaccctgatggtgctggtccttgaccatgatctgagtagtaagattgtagacttccctacattgaaattgggaagaagagccataggagagcggttcagcacataacagcctcaggggacagcatcattttgctttaattctacagcaagtttccatcaagaggggaaggagaaagagatgaagtaatagatattataggcgtcagatcatattgttataaacagagggaaaagtgatcctaatacctcaaaaacagcatagaatgagaacgaacaagatcactgaagtagtaattattttccgcaaggaagagggattgtgaggcaggaaggagagaaaagaagaagttatttatgtaattttggggtttctgttgaggaaagctgagtgaactcacttcagataaatttggaatatttgcataaaagaatattaaattttggcttctccaagaactactggaagcaggaaacaatgctagaattgggataaagcacactgactcgttactcctctttgttactgttaggcatcagagatacatgttttgttgattttagttataaaaatgagataaacttgaatatgaatacattggcttcattgttcaaggagctaactcttgggtaaaatagctattggatgaaacttctttagagaatagcatgatactcccaacaagactattatagaaacaaaaagtatgtggaattctaattaactcctaaagtggt

SEQ ID NO: 24157 - DNA, 1049 bp, Homo sapiens
aacaagacaaactagggtaaaaaaaacctttaaaattcatcacaaataagttaaagcagagttttggtgaaatttgtgaaaattacaaaactgcttgtattgaggaagagcaactacataataactctacaggaagaacaaacttaagtaaaaaccttctaatttgacaaatgattcacctgattgtcaggaaagtgatgcatctggcatgtctgtctctgtagtagtccagatatttcctgaacaaaaataacccagtctcaaaaatgcctttctttctcattcatactctgggtccccagaatatgcttgccagtcaccttcagagctttatttaaatacaaataaagtagactgtgaaaacgacaacaaaccagatactgaacatgtttttaactcagacaaggaaaatttttataatgatactgaaagtacaaaagcaagaaacccagaagtagttatggatgaaataaaagaagacaaataggttgtgaggcaaatgacaaaaaaacaaaacaccgctaattggaaattaaacatcggacatatgcctcaatttagtgattcaaaaagccttttaggtatgtggcttacctgctccaaagaaatgaagcatgtgatttaaaaaaaaaaaaaaagatgatggtgtttctgttgttacaaacagtacaaaaccaatacagaatgtgttccagaagccgttatgtgacaactgtagtgcaaataaatatgaaagcataaaacttgaattagaaaatgtgcattattctccaccacatggtgacagaacatcagcagtatgtctagaagtggaattaagtgatatatgcaaagatttaagaatgaggtaagcatattacaagtaaagtagagttcctggctttggagaaagttcaacttccaaaagacttagagggtcacttgctgctactctggtttttctcttcaccaattatttgatccatttgaatttttttacttatgaaaatctcttgtgtaaaatggggtaatctaaatacctaattgtatgtataaatagattgtttttg

SEQ ID NO: 24158 - DNA, 1102 bp, Homo sapiens
tgatcttagctagatcttctggataacttgctgcagcttctctatcagcactggctgctttaccttgcacttttatgttatgaagattcttttcttaaacctcatgaaccaacctctgctagctttaaacttgtcttctgcagcctcctcacctgtgtcagacttcatagaattaaagaatgttagggcttagctctggattcagctttggcttagcgaaatgttgtggctcatttgattttctatccagaccactaaaactgtcttcacatcagcaataataccattgtacttatcatttgtgcattcactggagtagtctgtttaatttcctttaagaacttttttttttttgcattcacagcttagtttactgtttgatgtaagttgcctagctttcagcctatctgagctttcaacatgcttttctcaccctattaatcatttctagctttgtatttaaatactggcatcatgggggctaatgtggcttacaaagtacaattcatctggcagatggaaccatagtttgacactaccagtcttatgtcgggttcaacccagtaataaatccaagcctacccattcttcccggaaggagcttgattatgcattgaatcaagctcccagaaggagcttgattatgcattgaaattccacaacctccgtggttagtgcccaaggaactgttttcttaagaactctgctctgtgagtcgacaggattttgtatttttgaatgtatttagaccatagaaaacaaagaagtaagcatacaatgggcccacattcagaagctatctcctcaggatcagaggctgcatccagagtgtgcataggtgtttgtcacagatcctctaccaagcttaatggagagagagtgggagataaatgtccatactaatcttcatcatgtagctagaaagaactgaaacactcctccagccttctaactttctagctacatctggattgtctggctcctaccttaaccaatttctggttactgacaaggcgtggcacatcctaagttccagggagccaccaaaaacagtcaatactagagcacacaaggacttgagaggtacctgaagatctctggc

SEQ ID NO: 24159 - DNA, 1026 bp, Homo sapiens
gtggcgctatcttggctcactgcaacatctgcttcccaggttcaagtgattatcctgcctcagcctcccaagttgctgggattacaggcgtgtgccaccacgcctggctaatttactaaactaataaattactaaattagtaagttactagtaaattagtaattactaaaatataatttttagtagagatgggatttcatcatgttggccaggctggtcatgaactcctgacctcaatggatcctcctgcctcagcttcctgagtagctgggaccacaggtgcacaccaccacgcccaggtaattaatttttattttttgtagagtcgggggtctccctatgtttcccaggctggcctcgaactcctgacctcaagtgatcctcccacctcagcctccccgagtgctgggattaaagacgtgagccacggcacctggcctgaattttcctcaaattcaaaaaatcctgatgaaggtttggctaaaatctttggtgagttaccccactccctgtggaacctcaggctggatttgaagagttgcgtgcatggtcctcattgtctcccaggtaacctgttcccgctgctgtgaagggaaggcaggtgctcttccttgaggctagaatctgtctacgtgtcacagtctcaggaaattaagcaaaacagatgataaacacctcaaaaggaccctactgagcatcagtggagcagagcagggccatgtgggactgcggcgtcagatgccacctcacactagctgtgacacacctgcctcgccagtttctgctctgaggccccaaagccgagctgaacctcctccaggggttctcagccctaactgagcatgaaaacccctggggcaatcctctttttaacaattgagacattccacacacaccccacatcagattttggggtgtggggatagaccttcacatttgtagttttctaaccctccaggggacactaggctgagactcattggtctccactctgaaccttccactgaacatgtgagaaaaactaag

SEQ ID NO: 24160 - DNA, 1085 bp, Homo sapiens
ttacttctttgtaagaaacattttagactgaaataaaaacctgttataatcatgcggtctggttgcagcgtgaaatatgttcacagtctaagattcaggtgaaaaggcaggatgccaaatcttgtgtacttgctgatcttatctgtgtagaatatccaagtcagaactgattttagttaaggtatctgtggggggtggggtttccctctctatattttccaagcctgcagtaagagaactatggcaatcatctttctttttaacatatccagcttactgccctaggttggccacagtcagatttcttgaaagcccctagggctgggcgcaggtgtctggttgtccctccgagactcagggctcactctcgcttcgggaacactaatgcaactcttctggtggtgagaacccagctgagagttcctttattttgttgatttcagggtgtaggtatttaaatatttgaaagtattttgatttttaaatgagatgtgtgggaacttttttgattcatcacccttggaatggttacagagttttgtttttataatacaaaactttcttgaggtgaatctgtgactgagaaaatagacatctatttgaaatatcgtgtctaaagtactaaaatattgctggttgctaaccacttaaattgagtatttttcttcataaacattaagttttattgaaagagttgctgtgatttccagacactcttctttactgcttgttcaaataaggggagggggcctccagatgaaaaggttaaactagagtcaggcctgcttgaaagttttgagtcaggaccttcagtgggagatttgccagagtcccacacagtagggcacaggctactgcttccttgggtctctgggaggaggtttctcctctctataatggaaagttggatttctagctttttttctggatacttcatggggtactgtaattgtgttgactaattgatgctctttcctggagtctcactcattaattgggcccatttctatggaaggcacaaatattgtaatgtaagaatcagatatatgctggtgatgctgtgtgaagcagcagagctgctgtga

SEQ ID NO: 24161 - DNA, 1051 bp, Homo sapiens
gaatttccttgtttttgatgaccttgacagtgtttagagacagaatcaatttttattttatcttatttatttattttttttgagacaaggtcttgctatgttgcctacactggtctcaaactcttggactcaagcaattagcctgcctcagcctcccaaagtgctgggatttcaggcgtgagccaccatgcctggcctgtcttatttatttagtcatttatatcaatatggactcaatggtttttttgttgttgttgttatttgggttataattgtcaaagttgagtcaaatatagagacaattctctgttttatttgggaagcaagaattgcagttctgggcatatacacagactggatggtcttccatatgtctgaagaacaaagaaggttggaggttttataaaaagcagaaatgttacccattgttttgagagacagttcattggtactagtaatgtttcgaggagctggcaagctctgattggtgagtgtaaaactattcttagactcacagcagcttgtttcagtagctattagataaaactggtttcaggtcacaataggcagtttcagcagctggacttgcggagaattaccttcctgtggcagtgttacgtgcccagggtgctctgtccctgcttggcttcttgattctgttttagttggatatgacaggaataacccaatccatatgatcaacttttatgtaatccagtactagggtattcattgtgttgctcagattgttccagctttggccactgggggctctttcagttagctcgtgttcctctgacatacctccattattgtgggttgtttgatttttgagtacttccttattggcactgcaagatactccaggctcatcttgtgtatctcctatcccagccctagaatcacccatttctccacagaaccctcatcccttttattggagtgtagtcttagaaatcaagatatgggtgccaagtggctaaagttattgtaatctcaatttatgtgtactcagctgagcaaaagcaaagcatccaaatggcagcggcag

SEQ ID NO: 24162 - DNA, 1047 bp, Homo sapiens
tggtggagatgcagtaaaaagatcttgaataaatgagttctgctagttcctctctgagtcctgtagtggctctaggtcaaaagcagtaaaacctaaccagaggaaaaaaccagaggggaaaatattttggacacacgagaagctatgtagacaggaagcaagtgggagctccttggagaggggagttgcttgagactgaagttcagggaaaggaccaggagactgggttggtactggttcctgcgggctggagggggtggagtagggagtgttgtgaaagtttcaagcacagaggactgaatggaagcctcacaatgcaacctaaggactttggattcttgcttttgagtacatgcactgtgtgtgtgtgtgtgtgtgtgtgtgtgtgtgtgtgtgtgtgtgtgtgtaaatggtgtagtttgttggctgtcagccttactaggaggctggtttggagcctgttgccttagctctgtggggtgatgatgggaatagtgaaaaagagggtgacaaaagcagagagtctcaaagaggggacagaactcagtgactgaccagtttggttgatggttggaaagaggtgtcagatacatctgagctcccaagaatggtggtacctggaagggagagaaatcaggaggagccagttctgaagggaatgtggtctcgggtctcagtggataccaggagttcaggggcgggtgactgggtaacttggaaatacaggactgggccttaggagtgtcattagggccaggccaagaggggttttggcatcatctcctggatggccttagtggataaaactgacaaggctgcagagtggagggatatgccaacacccagccctggcttgaacctgtccctgtcccttgatgttgggaagcagagattccctgtcatgtcagatgactcagaggggccctaggatgctgaggcaccaagtgagggctgtcatttacacaccgtctgtcgataacattggtaccaagcagtatagggtcttttatcctggagattctgaacctctgtgatggacccctgagg

SEQ ID NO: 24163 - DNA, 1162 bp, Homo sapiens
tgctggtcaattgtgcctaaatttcaaagggaggagggtataaatgagacatgtccaacctcctcttcccatcatagccttaactagatattcgggtttactttgaaatgctcctctccaagaggaggggtccagttcagttgcttgaggggcttagaattacatttttggcttatagtctccaataaatgctgttgagaaaatgggatatccacgtacagaagaatgaaattagacccttatttcttaccatatacaaaaattaactcaaaatcaattaaatacttaaatatgagaactgacactatgaaactgctgaagaaaacataggtgaggcgcttcaggacattggtacgggcaaggctttttgaataagatctcaaaagcacaggcaacaaaagcaaaaatagaaaaatggcattacattaagctaaaaagcttctgcacagcaaaggaaacaacaaagtgaaaagacaaactgcaggattgaagaaaatatttgcaaactatacattagacaaggggttaacatcagaaacatacaaggaactcaaacaactcaattgcaggaaacaatccaatttaaaaatgggcaaaagacctgaatagacatttcccaaaagaagacatgcaaatggccaacaggtataggaagaaatgctcaacatcactaatcatcagggaaatgcaaattaaggaaacagctgtaaagtgaggaagaagcttggggcctggagtttataatctggggttggagtgtcctggttctactgctatctgctttatgaccttgagctggttgcttttccctctctgacactgggtttcacatgtggctctgagcactcagtgaaattatcactgggaagtgcttgatggaagctcttttccaccctactcttagcaggtcagatatggggaggaaagagagggagttaggtttctctgcttcactgttgatatggacttggtgccctgtgtcccagccgctctagccgtggctgaaaggggccaaggtagagctcaggctgtggcttcagagggtgcaagcctcaaccttggcagcttccacatggttttgagcctgccagtgtacagaagtcaagaattggggtttgggaaccactgcctagatttcagaggctgtatggaaactcctggg

SEQ ID NO: 24164 - DNA, 1005 bp, Homo sapiens
aatgaaggctaagacagagttataaactgccttcctgaacattgaaaatgcaccccagtatacacacagggactcttagctacagcaaaggtctgtgattctggtatttaaggaaatatctgtccaaccattatctgactactaacctaatgaagcagtcacttcagtggccacacatgacaaagagtattactttacagaattagatcagaaaaggcactgaagaaacagccacacaaaagagcagcaacaacaaagcttggggaagggagagaatctaattccagagatctcacattatattatttaaaatgtgtagttttcaacaagaagttatgagatgttgcaaaaaagaaagtatggctcatacacagatggaaaaaacccatacagtcagtagaaaccatccctaggaggcacaaatgtttaacttagtagacaaagatttttaaatcagctattttaagtatgttcaaataactgaaggagagtatgtctaaagaactgaggaaagtatgagaacagtgtctcaccaaatagagacttgaagagatagaaactataaagatatctaaatacaaattctggagttcaaaattataataactgaaatgaaaaattcattaagagaggctcaactgtaggtttgagaaggcagaagaaagaatcagcaaacttgaagacaggtcaattgagattatccagtctgaggaacagaaaggaaaaaagaatgaagaaaaatgaacagagcctcagagacctgtgggacacaatcaagtgcaccaatatacatataataggagttccagaagaagagtaaattgagaaggggggagataaaaatgtttgaataaatcatgaccaaaaacatcccatgtttgatggaaaacatgaatctacatatccaggaagcccaatgaactccacataggataaactcaaagagatccacacttgatacatcatactcaaatcattgaaagccaaagacagaatctttaaaat

SEQ ID NO: 24165 - DNA, 1032 bp, Homo sapiens
aagacacttagtgctttagacagtgtctcagtgagaagtggcagggattgctttctagggtccgttaggggaaggatacttgttgaaacccctctcactttgatctagaatccaaaaggctaaatctaaacctctagagtaaaggaaccagaagcaggtgttcatagggactacaggttcattaagtttctgaaagtaaatgaaaatattttagagtgctagtgctccttggaaccttgcagaagtagttacaaatcttgtctggagaaagcaccatcctagacctcaaataatttctacaagcaattcttaaaatatagtgttcagcataaaatcatgaattctcagaaacatgaggagataagaaatatgaacagaaacaataaacatagaaatagatccaaaggggctgtatatattagagttaagagacagacactaaaataactgttattgactatatgtcttagttaataggggctgctatagcagaatattgtagactgggtgacttaaaaaatagaaatttattgctcacagttctggaacctgagaagtgcaagataaagatgctaggatatctgttgtctgatgggggccagcttcctggtttgcagatggacgtcgtcttgttgtgttctcacatggcagagagcagagcagaggaagcaagctcttgtgtctcttcttttaaaggcactaatcccattcatgaagactctaccctcatgacttaatcacctctgaaaggccccacccctaataccatcacattgggatataagatttcaacacataaattttggggtttgtgtcagaggacagacctacttaaagaaactttagggggacacaaacattcagtcataacactaggtaaagaagaataaggacattattgaacattttcagagaactagaaaccatgaaaagaaccaaatagatattctagaattaaaagaaaaatttcaagaagcaaatttacaaaatgaagccagagcaataaaaataatggaaaaaaaaatcagagga

SEQ ID NO: 24166 - DNA, 1031 bp, Homo sapiens
ctaattgtcacctctctgctgcttatcattgtgttctttttgcagcatataaagagttatcacaaaaaacaattataattttccttgaaagaggattaaaaaataaaaaagaattagtaatactccaaggaagtaatacttcatctcactcttttctgtttcacattggggttggtgactgacgacagcctccctgcccccagctgcttgcactttagagttagttacatgttctgggacaggaagattgcatgttgctgggaagaaatgttcagacctagccacttggtgggttttcggtgtaagcgttttaattcccatgagatgaacagtgagaggacttgaggtgtcaccatccctgagggccgggggaggagaacccatgaggcaggtctgcagccagttcatttgcagcctgtctcccttgtcatcccacctcagtgttcggtggtgccatctgccgcatgtaccggtttccaaccactgatggtaaccatttgcggatcctggagcagatggcagagagcgtgctctccctgcacgtgccccggcagttcgtgaagctcctactagaggaagatgcagccaggtgaggccacatggaaggactgactgtccatcatacccatgtcatgtgccccttcctttctgagatatagcgggcagagcactggcatcagatagactggactgcaaacacagcctctccccctgcagctctgtggccttggcttgcctaagcctcagtttgctcattgggatcatggattcctgtgcaaggatttcataagacagtgtatttgaacccagatgtgtgccccacactcagaacctcctcttttctcttctttactctttttttttgagacagagtcttgctctgtcgctcaggctggagtgcagtggtgcgatctcagctcaatgcagcctcttctcccaggttcaagtaattctcctgcctcagcctctgaagtagctgagattacaggtgtgcgccaccaggcctggctaatttttgtatttttagtaga

SEQ ID NO: 24167 - DNA, 1269 bp, Homo sapiens
ccccttgactccagccttcacacttgagtttgacaaacccgtcaaactattggcactatcaaattcagacagggttctcttgtaaggtaaggtggggggtaacagctagcaggactttctgagcaggactgcccagaaaactggtagactggtgggcaagccacgggtcaggcagctaaacgggaagctgggaagcagccatgacatgcagtgccctgttggccacctgctggccgtgggtgtgacttagggccagtgctttctcagcaggcatctgctgttgtcgtcgtgtatatattgatatctgtacatttccaaacttgagtgaagcaacgcgtctgcaggttgcatcggtctgctctgctgcttctctagcagtcgacaccatttgctcttatgagcaaagtgtcaaatgagtgttttatcatgagagctgtcagtgtgctctggcgacctcaccctaatgatgttctgattctgaggcagcaggcgtgtttgcagaatgaaacccggaactaaaagtgtctactgttgatcgatgccttgtttcaagcactgctgggcagccccctacctcacataccaaaagaaaggataagaaacctggtttcccgtctccttcgatgtagtcaccaatgctgttaaagtctcgtttccaacagtcacttctactaaatgttctgtatcatttgtcctctcaccaaattatttaaagtgttcaattctcttatcctttctgtatgtttctgccgtttgaccttctcacaatactgcacaaaagcgacgcgtgagctcctgcctcttgataagtgcattttgtaaaaatggaatcgttttgtcccgttttgtctttccaagttcatctcaacctctctgttaaagctcgccatccctctgcccaggctcagggaagcaatggagactcaaagaccggtgctctggggcgcctttttaaaattttaattccctggtctgctccccaggagccttggtgccattcaggcctgatgtccagtgtgaccctggtgctgagggacggcagccacgcctgtgcccattagctgcacggtggtgggaggggacattctggtgagctgcagacctcagccagtgaagaaaggagaacaaagtggacagggatccctgtggtagtggcagcaaggagcaggatcagggccagtcaggagctggcaccccaagttaggcacacagtccatgcggaaacctctactcagttctcgggctctcgaacaagttcaacggaaacaa

SEQ ID NO: 24168 - DNA, 1017 bp, Homo sapiens
ttttcaaatgcctgcttgctcacttacttttctacagagtaactcaaaagtaaccattgaattacaatccactttgtaaaaatctgaatgtaaaacagtaaataataaattaaataattggatcctaggcataccaataaatgttatttggggaaagaagctagcactatctcatgcagtgagaataacgggttctagtgaattatcctatctacactaccacctgaagaagttgaaagaaagattgataaatcaacgggagataagactttattagaaggtaacacctgcaaggtaccccacatagttggggccactcttttttctgtcccttatgagttacagaacagggagtctgctggagacacaaagccagcagtaaggtccctttagcctgtctcctgttctctgaagctccctgccgaggctccctcacgcccagaggacacatctccccttcttctctagatgttaatgtagggcctcagatgtggcatgtcaacactcccatggggaatttatgaccatagagatagtagaaacctaaatattttcagaaaaaaaattttttttgcaggatttccaatttatctttgaaaagacagtacaatcatgtttgaatgtctgatgaaagtgtcttatttttaggtttgcaataattgttactttcttattctcattcttatgtaagatgactattgagaaacagttgaaatttattctcctcaaatgagattttgaaagggatttatgggccataaaacttaggaatttcatagaaaattttgtctggtcatcttttataagatgatgatgagtcttatctgcacatagcagagtttgtttcttaggagtttatatgttttattgattctgtttacgatgtttacatgttcttgaaaaggttgtaaaagaaatacatatggcacatattaatgatgctgatcctaatgatttgtgaacctcttagaaattcttttgtctaaaagcctagagattcttctggttcctttagaa

SEQ ID NO: 24169 - DNA, 1027 bp, Homo sapiens
gcctgaggttgcagtctgcggttcccaagccccaagacccgcctcagaactaactgcatttgcttttgactcctggcctttctctagggttgggaagaacatggaaagtgacctccctgccaaataactcagaagaggagtgtcggtagccaaatgtttcttcagaatacgtgtaaaagaaatgtttttcttccatctaggaagatgttaccgagtacttcagtgaattccttagtgcaggggaacggagtcttgaattccagggatgcggcaagacacacagccggagcgaaacgctacaaatatctgagaaggcttttccgctttcggcaaatggactttgaatttgctgcctggcagatgctctacctgttcacatccccacagagagtttacagaaattttcattatcgaaaacagacgaaggaccagtgggccagagatgaccctgctttcttggtcctgttaagtatctggctctgtggtaagtgtgtttatctgagatagaattgaacgctgagtgtttctgattagattttttgttataaatgtgttgtgggtcagaatctggaaatattggaaactatttctcctttttactgaagcctcaaaaaatctcacaggaaagaaagttgtagtcttggttctacaggtcccaagcagatgccagagtaaactgttaccctaggacattgaaaagcaggggacaagattcactccatatctttttaagtacttgaatcggtacccaaatgtcagctgactgtgaataggaatatgaaactggaaattgcatttcacaggcaaatccacagtgagaattgtaaaggtattgatgggaacctgagaaactgaagttctccaattccataatgcaagggtctcatttacctgtagggtgttgaagtgggtaagatattgaagtttatagggtgttttgcaccttaactggacttaaactatgttagtgccttctctacactggcgttctaaatactgaggccaccgtggtgaatcagcctggcaa

SEQ ID NO: 24170 - DNA, 1055 bp, Homo sapiens
acaccaccacacttggctaattttcatacttttagtagagacagggttttgccatttggccaggctggtctcaaactcctgacctcaggtgatcctcccgcctcagcctcccaaagtgctgggattacaggcgtgagccaccgcgcccagccaataccacccttttacaggcatagttcagatatgctagttccattccagatactgcagtaaagcaaatatcacaataaactgagtcacacagatgtgttggttcccagtgcatattaaaatcatatttacactgtactgtagtcttttaagtgtacaatagcactatggctctaaaaaacaatgtacagactaatttaaaatgctttattgcttaaaaatgctgacacagagacatgaagtgggcatatgctgctggaaaaatggcacaggcagacttgctggacacagttgccacaaaccttcaatacgtaaaaatttaaaaactacagtttctgtgaagcgcagtacagtgcagtgtggtaaaatgacatatgcctgtattttcctttgtaacttctgactagtacagcagagcttttgtatgtgctagttagccaataaatgctgtccactgttaatataaaattctaaaatctggcctagaattaatactaatgtaagtcacgtattcattaccaagaaattcatgaaaaacaaatggtgtgttttaaaatttcaataaataagactttcaaaggaatagtttcattcataacaagcattctgccctgaatgcagtaattctggaggccactgtcttagtctgttctcaatgctgctataaagaaatatctgagactgggtaatttataaaggaaaaaggtttaattgactcacagttctgcattgctaggtaggcctcaggaaacttataatcatggcagaaggcaaaggagaagcaggcaccttcctcacagggtggcgggatggagtgagtacaagtgggggaaatgccaaatgcttataaaaccatcagatcttgtgagactcactgactatcacgagaacagcatgggggaaat

SEQ ID NO: 24171 - DNA, 1053 bp, Homo sapiens
cacgtggggattctggggattgctgttcaagatgagattttggggacacagccaaacaatatcaggcacagaaggggaccaaatcagcctggagtttagcacatttcatgtgagtctgtatcatagtttgaattaaatagaaagggattcagtgtatttttgagaacctatgttgtgtgaggaactagaaagagaaatgactacatgtaatgatgaccatcacagaggagctacagaagccagcataaggtggtggtttgtggagatggggaatagttgactcctggtgctgggaattgcaagtgcaatggcatagaggtgtgaacagcacactaggtctgggagcatagggtgacaccgagtcactggggaagagatgtgactagagaaattggccttcatgccattcaggaaaaaaattggactttatctcatagactgcatgtgtgggttgggggcaaaaggaggtggggagctttgaggctttaaagtaaggaaataatgtcaaactcacactatcttttccatggcagtggaggaggcaaaagttggagtagtgagtgggcaaggctggatacacttgcagaggtctgcgtaggagtagaggaggcccagatagtatggtggtgataggaatagagaggagagatggattcgagagcttcctgagataacaaggtatgaggggggatcaggaagagggagtgggtgggaggctcctttgggatgacctgtaagattttggcttagatgactgaggaagcagcagatgcagatgaagcagcccttgctggcctgttgagttcagggagcttcctgaagagtgaaaagaaggtcagtagacactgaggttgatgactctagacctagaggcaagagtctgggccatgatgagcctctgactggcgttaatatggagctgggaggtgaaaaccacagtgccttggagtgctctcggaaggcacatctgtctttcagaggaaagactctcactgaggccagaagcttgaaaagcgcccatttgggataagcgggagaataggggcagcagag

SEQ ID NO: 24172 - DNA, 1081 bp, Homo sapiens
actcttcccacagccagccccacctcaattaaaggcagctccatcttccatttgttcaaggcagaaatctctcagtcatccttgagtatttttttctcatactccaatccaataatgtcaggagctctaccttcagagtatcgtgtgtgccacatcttagcacctccactgccaccagcccctctgctcatctcttccttgcagtagccttctaactggtctctgctgccagtcttgtctctggagtctgttctcagatccgccaccagggaggctctgtcaaggcatttaagtcaaatacttttctcagaactccacagtggcttctcacgtcaccaggaataaaagccaaagattgtaaaacggccacaggcttcgtaagacatggagcctgtgtgacttgatgttgggcccaaccctgtttcttttctggcttcatttcttgctccttttctttcagacactggtcttttcaccattcctcaggcctgccaggcaccatcactatccttgggtctttacccaaatgttactttatgaccctcatatgtacaattgcatctcaagtttgtattctccacatttctctgctgctttctctctttccataataccatctgacataggtgtatcattgtcagccttccttcctagatggaaggcagggatttttgtctgttttgtttactggtatatctccagaatttagaatgtctgccgcatagaaagtcgtcagtaaacatttacagaattcattttattatgaaagaaattttaattttgctcttaggttcatctctaacaagtatttagtgaaacgacagagcagagactatgatgtggaatggggctatgcttttgatgtgcatctcaatgctttttatccactcctggtcattttgcattttatccagctttttttcatcaaccgtaagtagcagttaattagagtattatccaagtcttcattgcatgcattggtaaagggactcatggtctgcgtctcttctggcagatgttatcctgacagacacatttattggatatttagttggaaataccttatggttggttgcagttg

SEQ ID NO: 24173 - DNA, 1031 bp, Homo sapiens
tccgagatatacatgtagttcatgaacttaatctttctgctatcagtataagtcagtatagtaggctacagttgttttgtgtgtaattaaataaatatgacctttttaggttatagaagcaatgcgtgtgcattgagaatagtttaaaaagtacaaacaagcaaaaaaaattctactttttaacagaaaggtgttatgatttagtgaaaatgcacttgcctaggaattaggagaatggggttccagaccacaaactttattgatagctggatgcacttggataagttattgaactttctggaattcatgatcctcattcataaagtaaggatgtgggcagtcagttctaattataggagttggaatttcttcagtcccttctagctctttaattttctgtgattctatggcaaagcattctttatctgccttcattgttgaagaagacactttaaatgatagtaattttgtggaatcaatctaggactgactcatttgatgaaagtgggatgtggctaatgtgtataattactacctgtggttgaataaaacatttataaattaattcgtgcccttattatattaaaataaccaataattttactgttaagtttacaattaatttgctgcttagttttttaatactagagaaggggaaacctgttcatttccaagacatagttgactgatgggtctacttcctacttcccacagcctctaaagagagcaatcactacacttatggctgggattttgcgcttagtagttcaatggcccccaggcagactacaggtaagtgtttcttttcaagaatttgtcttttctaccccttatgaattttttttttaatcattacaaggcaagctaagttcttttttttatttttttgagacgaagtctctctctgtcacccaggctggagtgcagtggcacaatctgggctcactgtagtctctgcctccctgattcaagcaattctcctgcctcagcctcctgagtagctgggactacaggtgtctgccactatgcct

SEQ ID NO: 24174 - DNA, 1039 bp, Homo sapiens
agtatttatagaatatatcacatatgcacactcatgtatttggtacagatgatgcacataacagcttacaacacataattgtgtggacatttctttttggtttttggctcaagaatatattatggccatcattcaatgtgaagacctgcaaagatagtaaacctcattcattttaatggtagtattgtatcctataggatacatcagaatttgtgtatttgcgccaggcgtggtggttcacacctgtaatcctagcactttgggaggccaaggcgggcggatcacaaggtcaggagttcgagaccagcctggccaacatggtgagacccccatctctaccaaaaatagaaaaattagctgggcacggtggtgtgcgcctgtaatcccagctactcgtgaggctgaagcaagagaatcgcttgaaccttgggggcagaggttgcagtgagccaagatcgtgccattgcactccagcctgggcgatagagcaagactccatctcaaaaaaaaaaaaaaagaatttgtgtatttgtatcattttacttagttttattattaatcattttatttagaatggatgcatcataatgtagttatcatggtgaggaacacgggttgcctttaaacttttcagtgttacacatagtgttagaatacacatccttattcggtatattttgtatacttagaggagtgtttctgtgggatagtttcttagaaccttttgattcttagataattaattcaagtattagctctgtggagctgtttctgatcgctcataggcagagttcattagtcatttgcctgtattctcataatactttgtagattctttttataatacttatgttttattttcatttttaatttacatgtttgttttcccacttgatagtcagctcttcacctgagaatagggagggaagaggatgcagcccagtgcccagctcatagcagtgcttacagattctcctgacatttaaattatttagtgttgtctggttgctcctgctttgttctacaggttaaactccat

SEQ ID NO: 24175 - DNA, 1066 bp, Homo sapiens
caggtccctcccctaacagtgggaatcacaatccaacatgagatttgggtggggacacagagccaaaccatatcaatgagttaggtgtttattctaatctttgcagtctgggcttgtttgtacctgtccttgttaagaaggcttttcagattcaaagggaattgagtgctgtgatctaagtctttggtcactgcagtcttatctgtactagaaggtatcccaagccctctatctgtacatggaatgggtggatggatggatagtatgagtctcttgaagactcatagaggtaccgccttcatggacttgggtgagatctggaagaattccctggattaccaggcagaatctctcattatcttccctcattttccctaaaaggagtctctttctctgtgctgggctgtctagagttggagaatgggtgatgtaagcactactatggccaccataggtaggactgcactgggtcacacccaaattcagcacagtactgggtctcatccaaggcccttggcaactactgcctggctactgctgatgcttattcaagacccaaaggctctttcctcagcaggtggtgaattttgccaagactaggtccttctctttagggcagcatgttttcttctagcctagggtgagtctagaaatgccatccagaagctagggcctaaattcaggggcttcaggaatctgctaagtgccttattttactgtggctgtgctagtacccaagttgcaggacaaagtcctctttacccttccctctcttttttgcaagtggatggactctctcccagagctgcactgcctggaatttggggaggggtgatgcaagcactcccttggccagtacaactggtgtctcactgggtcacatgtaccccaagttcacaggctctgagcccattgcagtaccaggacttgcccagggactgcagtccttgtggctaagactgcctttcaaatatatttaggaccccagtccacttaagtcagcaggcagcaaagctggccagaactcagtttcctattgctagggcagacaattcctctctggcca

SEQ ID NO: 24176 - DNA, 1058 bp, Homo sapiens
gccataaaaaatgatgagttcatgtcctttgtagggacatggatgaagctggaaaccatcattctcagcaaactatcgcaaggacaaaaaaccaaacactgcatgttctcgctcataggtgggaattgaacaatgagaacacctggacacaggaaggggaacatcacacaccggggactgttgtggggtggggggagtggggggggagggatagcattaggagatatacctaatgctaaatgacgagttaatgggtgcagcacaccaacatggcacatgtatacatatgtaactaacctgcacattgtgcacatgtaccctaaaacttaaagtatagtaataataaaataaaaaaatgaaaataaaaataaaatttaaaaaaagaagtaaaaacctcacagcagcttatgttaatttttcaaacaaaaaatcatttattcacaagttacacaaaatattttttttactgtttacctgacatctaaagtaaaagcagaataaaataaacttctcaccaatagttaaaaaaaaaaagaatattctgccgaactaaacttcatatatgaaggagaaatgaaatctttttcagataagcaaatgctaaagaaatttgttacttctagaccagccttacacgaggtccttaagggagttctaaacatggaaacaaaggaatgatacctgccagcacaaaaacacagttaagcccagaaacatacgtagcctagagatcctctaaagcaactacataattgaggctacaaagcaatcagctaagagcatcatgacaagatcaaacctcacatatcaatattaaccttttgttaattgtctaaaatgccccacttaaaaggcacagagtggcaagttggataagtaaacaaaacccaacagtctactgtcttcaagagactcatctcacatgtaacaacacccataggctcaaaataaaggaatggaaaaaggtctatcacacaaatggaaaactaaaaagagcaggagtctttatatattctgttatatcagatagaacagactttaaaccaacaacagtaaga

SEQ ID NO: 24177 - DNA, 1052 bp, Homo sapiens
aagaatgaaactggacccctacatttcaccatatacaaaaatgaactcaagatgaactaagaacttaaatgtaagacctcaaactatagaactcctataagaaaacctgggaaatacccttcttgatgatggctttgggaaagaatttatggttaagtcctcaaaagcaattacaacaaaaacaaaactcggcaaatgggacctaattaaactaaagagcttctgcacagcgaaagaaactattaacagagtaaacagacaacagaatgggagaaagtattcacaaactgtgcatctggcaaaggtctaatatccaggatctataaggaagttaagcaaaccaacaaataaaacacaaataaccccattaaaaagtgggcaaaggacatgaacagacacttctcaaaagaagatttacaagcaactaacaaacatatgaaaaaatgctcatcatcactaatcatcagagaaatgcaaatcaaaaccacagtaagataccatctcacactatggctatttaaaacttttaaaaataaatgctggcaaggctgtggagaaaagggaatgcttatacactgttggtgggaatgtaaattagctcagtcactagggaaagcagtttggagatttcacaaagaaccaaaaatagaactaccattcaacccagcagtcccattactggatatacacccaaaggaaaataaatcattctgccaaaaagacacatgcacccatatgttcatcacagcacttttcacaatagcaaaaacatggaatcaatctaggtgcccattaatggtggactggataagtaaaatgtggtgcatcatcaaaaagcttatccaccacgatcaagtcggcttcatacctgggatgcaaggctggttcaacatacgcaaatcaataaacataatccatcatataaacagaaccaacaacaaaagccacatgattatctcaatagatgcaggaaagaccttcgacaaaattcaacagcctttcatgctaaaaactctcaataaactaggtattgatggaacgtatctcaatat

SEQ ID NO: 24178 - DNA, 1040 bp, Homo sapiens
ggggaatcttatcttccaggacctgctctgatttgaaatagaaactggttaattttaaaacctgaaaatttcctaaagaaaaatttgctttgatattttaaaaagtttagagttatttccaattcactactcatttccctgtttcaagatagtattctcacaggctcagtacatagtttgttggcacactctctttcttaagcataaactcctaatctcacttcaatccaatttcatattgacatgagtcatgcgtatcttacatatgtaactaaatatacactcccatcccacctctaagcttggtaacaccacaattttgttccctttctttttaaaaaaaaaaatactgatcttttcattctagttattcaccctacccctggcttcaaggatcagttttggtctttcattcatttatttagaaatgggatcttgctctgtcacccaggctggagtgcagtggcataatcatagctcactatggcctcaaactcctgggctcaagcgatcctcccacctcagcctcctgagtagctggggcgacatatgcgtgccaccatgcctgggtgtttccattcttataccagggtctccgtagggaaaacaaaataaaacaaaataccaacaggagcatgagaacgtgacttagaagaggtttcctctgctccatttcttcctcaatcaactctattcttggtttcattcaaatggtagcttataagttttacaagacataagaaggccagcactaaccttgtttgcaaccttacagagaaaatctcccctctctgtttgcaaaggtcttctgtactcagcagcaaactgcacttcaagcttttacaaagcgacggcctttgtcctgtaacataggcttaacaattggagaatccattagtcagtagatcactgcgcacctggcttcaacagagtagacatcagcgtggctctactgctgtggaggaaacttttaaacaccagcatgaagactcacctggcttttcttaccttcgtcctgtaccaatgatcattagaggagc

SEQ ID NO: 24179 - DNA, 1786 bp, Homo sapiens
taataaaaactataccagtgcttcacaatgtattttaatccttttctagtgaagatgatatcctgaaagaactggaagaattgtctttggaagctcaaggcatcaaagctgacagagaaactgttgcagtgaaggtgaaagacagacctttgttacctattcgtatttcgtattctattctttcttcttaatgttggtttggggagctacatttggaaacttttgagcagtgtacaatatgttatttaaaagcttctatgaaatctgatgtcaaagggaaaaataggaatgtaaaggtattttgtggtatgttgattgttcataaaattggtacatttggagttgtgatgtaatcactcgttccatcttcagttttctctgttgtttctttttcatccttcgaatttggataagcctcagagtaatgggaaaatcatagatattttttcttctttcaacttgtcccttaggctttgtaaagttagtaaatgggtggtgactagtgcctgtttcaagagcccctggattctgcaatttacaatgatgcgagatgtgtctgaggccaaggccaacctctcttgcttgtttgaattttatattcctgtgaaaaagactttgaaaaagattttgaaatcattttgagatttttaaaaaatgtttacttaatgaagcacatgactctggtctcaattataattctgttaattttttctaacaatggaaattttttagccaacagaaaacaatgaagaggaattcacctcaaaagataaaaaaaagaaaggacagaagggcaaaaaacagagttttgatgataatgatagcgaagaattggaagataaagattcaaaatcaaaaaagactgcaaaaccgaaagtggaaatgtactctgggagtgatgatgatgatgattttaacaaacttcctaaaaaagctaaagggaaagctcaaaaatcaaataagaagtgggatgggtcagaggaggatgaggataacagtaaaaaaattaaagagcgttcaagaataaattcttctggtgaaagtggtgatgaatcagatgaatttttgcaatctagaaaaggacagaaaaaaaatcagaaaaacaagccaggtcctaacatagaaagtgggaatgaagatgatgacgcctccttcaaaattaagacagtggcccaaaagaaggcagaaaagaaggagcgcgagagaaaaaagcgagatgaagaaaaagcgaaactgcggaagctgaaagaaaaagaagagttagaaacaggtaaaaaggatcagagtaaacaaaaggaatctcaaaggaaatttgaagaagaaactgtaaaatccaaagtgactgttgatactggagtaattcctgcctctgaagagaaagcagagactcccacagctgcagaaggttggttaatactttagaggaaagagcaaaaggcttttgattcacagtataagttgtaatcattgtgccccaaggtcgttttgttatttgtccatgggtataaagacacttgattgtaaggagccatctaaaaaattacgtctaagtatttgacttgatttgcattgttaattctttacatatatagtataaatatctttcagattatttatgtacagactggaatttttatagaattgcattatgaaaactattttttttgctgttgataaaggctatagaagttacttaatgaaaaatttattcttcctttctgataactcagtgtcagataatatttgaattctttcctgtctttaaaaacctagttcaatttatgaa

SEQ ID NO: 24180 - DNA, 1438 bp, Homo sapiens
tttttttaagaagatataatgctgtcacacacttaatagactacaatatagtataagcatctcttttagaagcactactaggaaaccccaaaaattgtgtggcttgctttattgtagtattagctttactgcagttgtctgaaaccaaacctgcagtatctctgagttacgcatgtataagaaaatgcaccccatgctaagtgtttaatttgttttgacaaatttacaaccactgtcattcagaacatagaccatctccatatttccagaaaagttctctcatgttactttgcagtcattctgctgccctccctaaactcaagctagtattgatctttctgtgtcatatggactagttttgcctgttttatgatttcatataaatggaatcatatagtatgtaattttttaagtttggcattttttgttactcatgttattatgctttgttcatgttgtcattacatgtataaagggtttttcctttttatttttgaatagtagtccattatctgaataatactgcactttatccatttatctgttgagaattctagttcctgcatatctttgcgaatactcgccctacctccagcattctagtaggtgtgtagttgagtgcaaaattattgtggtctagtttgtttccacagtgactaatggctttatgcatcttttcatgtacttatgcttagagagatgaccatatctgtttctttgaaaaatatgttcaaaatcctttgttctttattagattgttttattgttgagttttaagagttctttatacttctggttctatgtatataattcctttttcacttgtatgtactgctgatgtattcttatggtctgggacttggtttttcattttctttgttttgttttgcgtgtgtgtgtgtgtgtgtgtgtgtgtgtgtgtgtgttggagactgtctcttgctgtgtgtgtgtgtgtttttttttttggagaccatctcttgctgttgcccaggctggagtgcagtgtggcgcactcttggttaactacaacgtccgcctcccaggctcaagcgattcttgtgcctaagccacaggtagctgggattacaggcatgcaccaccacacccggttagggttgtttttttctggggggcgggggggcggtgtgtgtgtgtgttttagtaaagatggccaggctggtctcaaactcctggcctcaagtgatccaccgctttggccacccaaagtgctgggattacaggcgtgagccaccacgcccagcctccttttcttaatagtgtgttttgaagagaagaaatttctgattttggtgaaatccaactaatttttatattttatttatttttgggacagggccttgctctgtcacccaggctggagtacagtggcattatctcagctcactgcagctctacctcctgggtttaagtgatt

SEQ ID NO: 24181 - DNA, 1032 bp, Homo sapiens
acactgggttctttggaagctctactggaatttctgaaaacatcagaagtgcccgtaagtaactacaactcgctccacaagtgaatggtggttggtcgtggtttttggtgccatcgccattacctgatacatacagataaacatggaaactcccattttttcagtatgcaggaattaacattggcccagtgcataaaaaagatgttatgaaggcttcagtgatgttggaacatgaccctcagtaagtaatttctcttgctatgaaggctttcatgttacgtagctatcttaaaactgtcctatcttaaaaaactgtcctctgtgacatactctgtttttcactgaatggtctttgatgtgttttaaccttttaggtatgcagtaattttggccttcgatgtgagaattgaacgagatgcacaagaaatggctgatagtttaggagttagaatttttagtgcagaaattatttatcatttatttgatgcctttacaaaatatagacaagactacaagaaacagaaacaagaagaatttaagtaagttactgtttttatttactttgagtctttgttaatgaacatgattgagaattactgaattccagaaagggctgtaaacagcaaaatcatggcatttactcatctaccagaggctgcatcctgaaatggtgtgttacaaaccagaaacccaacatactggggacattccagcagtatgcaaacaagtcttgtctgtgacttcagtttaataatcttggcagacttgggtcttgttaatgggttcgtagttattaaatgtagggactttatgttgctcatctgggattatatagattggaagtaacaaaacttgagtgaggaaaaccgggaaataagagattctgtgggagagaagtccattcctctaccaaactttcactcaagcactcacagtacctacattgctgcagtggtagaggaggcatcagcagagaaccaggccagcctccctcctcctttccctttgagacagggtctcgttctgtcaccc

SEQ ID NO: 24182 - DNA, 1055 bp, Homo sapiens
ctgtttaataatgcaaatgatgaaaatcgttaaagataacacatataacctgatgtgtgccatgtttaagttgaattcaccctatttttttgaacaatctttcttaactcttggtaatctttatagctcactcaacactgcaacttattagattaaaaactgaaagttaattttttcagaataaaataataaggcatgcgtatactttttaatttaaccatctttatatgttcattttttcagagtcttgcttttgaatcttaagaacccaaagggctaagtcttctttcttaatttttaaaacaagcatgtgttttgttctttacatgaatcgtcggttctcccagtgtgatcacgacactgtcccatgctgattccatgcacggtgcaactctttcccaagagaggtcagatttcgaggtgttgaaaatagcccagtgactcagtattcttggctgctttatgccaacggtttaattggctgcatcatagcaagcatctaattgagtttcacatttaaatagtggatagggtacttggtgcattatttgcttacagaagtgtctgattagcatgttcctgatcctcgttctatttgtagcaaagatgggaggtcagggactgtcacatttcatattccccacagcatctcatctcgatggggccttgttcagaatagatgctcagtaaataggtgtgggaaatgagctgaattgttggtggtcactatccaaaggtgagaaatttctgaatgctaatggggtacttaactatgagtaattctattttaaatctcaaggtgatgatgattaatagtatctcagggcactaaataaacatgtattaaatatgagcgtatgtttaaagggggagtttttaatgcagtctttaaggcacaactgcttctcacttgaattctttaactgagattaaggagtccttggcattttaagcaaagtcatttcttaggtaaagttcccccagagaccacttgaacttttgcaagtcttaaaacaatgggtggttccatttgatggttcagaatagaaaggaga

SEQ ID NO: 24183 - DNA, 1058 bp, Homo sapiens
tatggcatggatttttaatgacatacctttttctttatttttaaaggctacagagtattattcagaagtacaaataggacgttatttaacccatccctattaataaataatctattgagttgactgttacagtttttgtattaacttccttatctgtatatctttatgtacatttcaagattttctaggtcagggattattaggcctgggtaaaggcacacctgtttgaaatattgatagatgctgccaaattgggggctaaaaaaagctatgcctgttaacctccccatctacagtgtgtaaggccgccttgtctccatatcttaactaacacaagatattttccagcttttaaatcttttttgtgcattttcacatgtttgaggtagtaccatttatagttttctattctgattgttttgacgtgaacataagcatttttccatgacataaacaatttaaattaaattttattggctacataatagttatacttgttttgggagtgtatcgatggtacatgaagacgcaaagggaaatatttgaaatagaggttgtctatgaaaattaagtggctatgatcgaccttgcagtaaacctgaaagattttctggaaatggtgttgggagacacacccctccagtgatatgtttccaagaaaaccctgaggagatgaccttccaggcctttctcaatccagtcagatggtaggctgccccaagcatttctaagaagctttgttgcttttagaatccatcagatttacagtcagacaggttctaaattcagttctctgaatgtacagtagttacgtaaacacttcgtacattgcatgagacagctgaaaagtaaatttgctgtattcttttaattttttcgacttttattttagattcaggggatacatgtgcaggtttgttacctgggtatattgcatgatactgaggtgtggggtatgaatgatcctatcacccaggtactgatgtagtacccaatagttaggttttcagtccttatcccctggctccctgctccctccagtagtcttcagtacctgt

SEQ ID NO: 24184 - DNA, 1032 bp, Homo sapiens
tgaattattctgggctgtatatcatttcagagagttctaggaaacaacactgaaactgatttaagaaggcttttcagctggaagacatggccactcaacgcctgcgcctggggacagtggtggtaggggagggtgaggttgggatgacctgtggtaggaccaaccatggaataacagggtcaggagttaacgattcaaggggtgcctccgagttcccattgtgcaggtcaggggtggctctaccgagtgaatgcccttcttctttcttccgtacgcacggaactgttttgcatcttggttccaatgcctccctgggttctatggcattgcagctttgccccgtcgtgaaggcaagtccccgggccacatgtataatgttgggggaaagaggtatacagggtttgggaggaatggggttttcctccattttcccagatagggaaatgtgtggtcagaaatatgaaagaactttgaaaagaacatgagatgaggtctgtgaattgtgaaacatggtgctcctcttagttctggggcagatttttcaggatcaagaactaaaaccaagaatacctttgaacactttagtgtggctcatctggtggccacactcacattgctatttccagtaaattacatcgcttacagacactagagccatacagcagcgggaccccatccttccagagttattaatgttctaggacaaatctagtatcccaaggagattttctttcagctaaagcagaagcctgaattcacttgagttcgggcagaatagataattcatccagattacttgaggccccaaatggatctgacagtctaaaagttagattgtaaaaggccgtattgatcctaatatcttattctctttcttatacctaactagggattgccatttttatttattttgtttttttgagatgaatttttgctcttgtcacccaggctggaatgcaatggtgcgatcttggctcactgcaacctctgccttctgggttccagctattctcctgggattacaggcatgcg

SEQ ID NO: 24185 - DNA, 1106 bp, Homo sapiens
tatagtattctagaagagattcctgtatcatacttgggaggtaatgtgaatggaaagttcttatagacacaaatcttataggaaagatctggatgaagccttgagtgtttgcctttctgggatccaaggaaactcatgaaacagggaggatttaaaggaggaggaaagggaagtgaaaagagaattcccaaagcctggaattgacccacacagtttggcatgaaatggtcacttccgcatctagagcacacattatttttctgaagcaccctgttgaatgagaggaatacatacgtgccatcataggttgaaaaagtgatcttttcagcataaattggtgggtgtttgagagcattacttgcacagttcaacaatacagagctggaaatgcataaagaggacattccctgctagtcaacgaatacatagatctgtagctggaaattagttttaactttcaagtagtcaagaaacttttatgtccaataagactctctctacgtaattttaggctgtacactggttaaaataattctatttggggaaaatcttgtggttgtttgtcccaaatcgccctgacatgttctctgccttgagtccccaaatccctgccgtggggcgcagcctgtcatgcatgggccaggaggacagccagcacacggggcagatgccgcaggtcatccagctacgttttctgtgcattcatctcaggaatacgggtttccctgcacacttaaatctacgtgtaacccaagtttatagacctgctgggaagtggaaggcagttggttgcctttctcaaaggctgctccatgagcaagatgcctttcatctagaccattccgctggaagcatctgtcagaccagagtagtgcatcagtctaaagtcagctctctcttctctggtttagggtggtagttgtgtgctttggttctgtttagctgagtgggtgaatgaaagtaattaagataccctaaatagggtctttagctaaacggtcacctccctgcctaattgtgacaccaataaatccaagaaaggggaggacagtggcagcaggtcacagtgggaggatcatggcttggagcaaagacaagggctgtga

SEQ ID NO: 24186 - DNA, 1015 bp, Homo sapiens
acattcgaggagacgaccagtttttttccctactgacctatgatccccacatcccagcttctctgcctactggttggtcttcctgacattagttttgttcttgtgtatttgatccatgcacacatttttaccacaccggatatcctgaagttgggctggttggggttttgggagaggcatgtctagggttggttcactctgtggattaggatctagttttatcaaggtggtgggagaaaggcctcaccaggcagcaatcaccaatggatcccaaattcccagctgggcctgcatccaacacaaccaaccagggttttcagacaactcagattttaaaaagaaaagcagcaacctgtcagtttggtgacctagcagatacatctcaatgctttttactttttaattgactttttaaaaatggtgaattaatgccattttccgtatgaatgcatcattgtgtagatttgtgtagatgccttggagacgtcccctgagattgagagcgtggggtgggcatgttcgggggcggggagggatatgtagagcaactagaaggattgaggttttccttgcgtgcacaccctcctcctggcagcgtgcagtggtgagttcctggttcattgggagtgaaatgggcaccctcctgcttctgtgtgcatactgtatgaggtatgtagctttgccagatcttagtgtgacacaccaggatgacagctagcaaggtcacgtctctgagggttgttaggccccagccctggtataatgcctctgcaaggcatgttggtcccctacagtgggccggctgtgtccagggagcaggctgggctcagaggtagtgcgagctctcagctggcctcagggcccagccaaggcccctcatcatctctgactatagggacaggtgggtgcagggaaggggtggcaaacttagtaacgttgatctccttgatagtttctacccctgaatgcacctccacacaaaattgtgcaggccttcccagggaccctagcctac

SEQ ID NO: 24187 - DNA, 1038 bp, Homo sapiens
tggagcccctgcctgcgggtgcctcttggctgtaaggcactcttcctaccaatatggccttttctgtctctgtttaggagcccctctctgaaaccttaggtctgtgtgaccccagagtccatttctgtttcacccctggtgacctccttactgtgcagagaatgtgttcgttgaaattcaaagtagataagaaaggctgaagctcagtgtcacctcccttagcaggggctcagtggccacagtgtgaacagaaggggtaggacagttaggtggggcaggtgtgcaatgaatggaactcacctagagctttctgtgccccaggcatcatgctgggtcctttattgcacacatacctgtgacctgcttcctgtttgcaccttgcacaattgctgcctggtgggtgttagctgcattgtgttaggaatgaggggaacgggctcatgaggtttaaggggcctactcaagatcatagagcaagtaggttggaatggagatttaaatcagactgactctgaagtcggaaaccccctattctgagcagcagtggctggagaaaggcctcctgagtcagtgccaggaggcagagcccagggtctgctctgtccccaagcctgtgtctgtgggcaggccacttagccttgctggggggtggtgctgcctgatttatgagtggaggataactatagccagcccattccacccacagaactgatggagacaaaatgagattatgttttttcagaacttggcagctgccaggggttggtgagggacccattgggccttcctgaagagccctggctgccagtgctgtctgagtggattttccctctagtcagtagctcctgcacatgcagaagtttttgttttaattttagtcaccaggatataactgtcccttcaaatgtactttgtaagcactattaccttggagccaccacgatcatggggaggtttgtgggagtgaatgtcaggtagtggcacaggaattcagatgggggtttggccctggctttgtccttcctttcctccctccct

SEQ ID NO: 24188 - DNA, 1021 bp, Homo sapiens
atgagggtaactgcccccatgattcaattacctcccacctggtccctcccaggacacatggggattatgggaactaaattcaagatgagatttcagtggggacacagccaaaccatatcatagctgggcgagccatcgtgaaatgggtgaagatgcaatttgcctaatccttgccatcaaagtagagaacctgtttttgagtgtctgctgcaggccagactttgcaaacttaagttcatttaagtttcaccgctgtcctctgagataggtgtctgtcactcatgttcaaaacctccagtgccttcccgtctcacataaagcaaaagccacaatgcccctctgcccctggctccacctccccctcaccaaagcaatcaccgggctggcctctgggctgttcctcgctttccttgctgtctgggggaggcaccctcactgctcactcccacactcccttcaggtcacagctcacatagcatctcatcaaggaggtcttccaagactccctaaaacatcagaacaagactccccgaaccccgtcccacccaggattcaccttttcctgcactgcagtgataaccaaagaacaggctctgtgtttacttatttgcttgcctgcagttttccccaactcccctgacacatgcatcccccgcctcatgtaagcaccatgagagtagcggctttgctcacagtgggttcccccttgcccaggcactcagggagtatctgttgaatcactgtatatcacatgcagttggcacatttgtgctttggcatatacattctcctgcctcatcacagagcccaagaggagaggcaaatagaaggagatagtacacacggtgcatggatcagagacctgcacattgttagttttcctaaaattgatccccaaattcaattcattctcaatcaaaatcgcatcaagctatcactttttttttttgaggcacagggtttcactctgttgtttaggctggtgctcactgtaaccttgaactccgggctcaagcagtgt

SEQ ID NO: 24189 - DNA, 1034 bp, Homo sapiens
gggtgtgtgtgtgtgcacgtgcatgcgcgtgcatttgtggtcatccaggaagcagtgtggggtagcaggaagtgcgcagggttagaatcagacaggcctggctttgattcttgccaatgtttactgtctgtccttgggcaagtcactaaatctctcttagcctcagtttcttcttctgtcaagtggggtgataatagtagctacttattgcagaaattaaatgtagctgcgtctgatcccctggcacagtgcagtatgcagtgctgatagggaaagctaaaatttgcagagcgctcacagcctgcctggagcattttacatgcagtaattctccaagccttacaacacctcctcacaaaataggttattcttagccccattttacagttgagaaacctgaggctcagggattgcacagccagttggcagcaggcagggattcaaatgcacacatctgtttctaaagtctgggctcctaacagcgtctgtgacattcagtaaatggaagccgctccttttgagtcaccaccttcccaaggggtagagaaaataagttctgataggaattcttgctttccaaagaaagcaattatctaactttgccgtattgcaaaatccagcttactccatttcttgacagaaatgagcacctgttggctaagaagaaactgcttcatattcacctcttcctttaatccagtgttaaatgagtccatgacctcctctctccagtcagctgtgaggttgtttccatagtcccatacctttggttgagagacggagagtagaaggggagtttatggctctgctgcctttgttcatgagaatcaaaagtgtcaggtcagattcgctgattcttggggctcttaatggagtggatgctggttctgaaacatcagctaaacaattttatgattctttgaccctaattcttagtctcaatgtcaataaagtggttcagatgagagggaagagttcaaacataagcaaacaagaagcctacgcatgccattttgcagaagcagatatttcag

SEQ ID NO: 24190 - DNA, 1024 bp, Homo sapiens
caatgtagcaggcaccattaagagtcactcacatgcgttaatatgtgtaggcgcatagaaccgtgcctggcccagagcgaggctgttttatatttgctctccttatccttatggatcctatgaagtacatagttacccagttcacagatgatgaaactgaggcacagagagattgaataatttacccaaggttccacagccagacagtgaagagctgggatttgaactcaggcactttggctccagagcttggtgcttaaccactcctcagaatcctatacgggacacagtaaagctgaatgttctcagagtgtggggctcagaaagggagaatgaggagctgagaggtggtggtcgctcctcgaggaagaggcggctcttgaggtggaggtcgggacacagggtagtcagggggcaggaggctgtgggccccagcagcaacgcccctcttggtgtcaggccaagcacaggctggcctgctggggtcccctcccatgccccttgtgtgactggggattggagagccattgtaagggggatgagagcagccagaattccttcccacttctcaggctgtggggcttcaagtctctctctgtttccttcacactgccaacatctcagatgtaacagaagctcatgtgatagattttcgtacagcaatttctgatgaaatagcctagaactttctttaccaaattggcagagaaaaaagagaataaaatagctgaaagtgaaagtgattttaagatgagaactggcaggcgcggtggctcacgcctgtaatctctgcactttgggagactgagctgggtggatcacttgaggtcaggagtccaagactagcctaggtaactcagcaacacccgtctctacaaaaaatccaaaaattggtcaggtgtggtggcgcatgcctgtagtcttagctacttgagaggctgaggtgggagaatcgcttgagcctgggaggaggaggttgcagtgagccaagatcacgccactgcacctcagccagggtgacaga

SEQ ID NO: 24191 - DNA, 1044 bp, Homo sapiens
gcagtgagccaagatcgcaccactgtgttccagcctgggcaaagaaggagaccctgtctcaaaaaaaaaaaatttttttgcaaagccccagctctctcttgtggctcctgccttttctccaacattgctcttctctatgcaaaacacagctgaaacaaaggaaacagaaaggaaaggatcaaatatgccctgggtaaggtaggcagtgcccctgccaagaagtgggcaggattatcacggtgctctcctaggaacccagccacctggctattcagaacacattgggtcaagcacattgtgaagagagaaaaataagagtctgaaaatagtgcttaattagtgggagatgattcctcatgaatgtgcagaaagttattttcccctcaacattccaaagccatagcctgaatgttttggatgtttatcacgattgggacttaacaactttattcttcctggagcgaaacctcatcactgatagtttcatatcttctcagacacctgtcagacttgtttttcatttgtttcgagaagtgccgagaaagctatttgtcacttccttgtggactattagtatgttttcctccagccattgcaactaatttatcataagcaggtcgtctctgatgagaatacttaattgttctgatgactgagctggtaattcagtggaacagagccagacatctttctccagctctttgtattcttttgctgttaactaatgctattaccatttctgcatcttccttgctccttcctgagccctttgaaaaaagttctctaccacctgagatcttcctgccctcatagtcatctttttctcctcatcatggctgatttgggagctcacctttgtcatcagacagacttggaagccaaccttgggtgcttccaaatgaggcagacatgattcattctgagtcccagggactctcctggttttggaatcccaagaataccagcccaagacaaaactttctcagggtctttgaagttacagtgtaatgaaagtttcaggacgtgataacctgtggactgttt

SEQ ID NO: 24192 - DNA, 1033 bp, Homo sapiens
aacaagggattgccagctgctgttatttctagtaccgtttacttctggatgttttaagtatttaagtgaagtgagcttgcttgatgggttcatagcgctaactactgccattcatcatactcaagaagcgacctgcctgcacacttcaggcccctgctctttaagcatagatgaagtcaatagcattgaatgatctgttccaaaaacatgtcctgtcttaagacatgacatttaatcaaatttagtattttgattgaggacttcagaaagtggattatgcatcttcttgtcctaagtgttatgctaattgctgggcattgcacactggtgggaaaaaaggattgttactgcctagtttaagggttggtttaggctggttttaggaggacataccatctacagtaagtcttcactgagctttaagcacactggcctactgtatgctgtaaaaacttggttttgttacataagacattgcttaaagtcagtttccaggagcctatcatcgacattgaggatttctcacatgtacctaatttagttttgtgctcctttaatttgttcacttatgtttgaatcgtaggggcttcaagaagcgtgcacctcgggcactcaaagagattcggaaatttgccatgaaggagatgggaactccagatgtgcgcattgacaccaggctcaacaaagctgtctgggccaaaggaataaggtgctaaagttatctgtattcgaaggtgaacttttgcaatgacaccagcttcacttaaccctgcaagagcccatatcagttcagtaatttggttaatgcatgtggaagtataaaaaaaaaaaatactgtgaccgtgacttagggtgtgtagtatctgcagggaagccccttaatttagtggcttatgaactgagacccaagggaaggagccagcagtgtagggtgggaaagagcattgcagagagaggaagcttggcaggatctgggagcggggtggtgaacgcaggtaaagtggaataaatcactgtgagcccagtggaggag

SEQ ID NO: 24193 - DNA, 1014 bp, Homo sapiens
catttttagtagagaggggttttaccatgttggccagggtgatctcgaactcctgacctcagatgatgcacccacctcagcctcccaaagtgctggggttacaggggcaagccaccatgccgtttcttcatattttaatgtaacagaaaaatcacgtaacaaagtttctggtgatagacaaaagactaacacatttggaccatttggacccagatatctgcttaggattaaccggttgggtatcaatggtggctaccttaacatgtcttcaaacaagcatccctcctgtggtaacagcatttaatgttcacctgggggttatgtttcattttccagggaactgtaagttctaggttggtcagagtagagcaaaggacagcattagaagcaggcatatgagatatgtgaatacagctagtggctgcttggttgaaaggaggcattgacttcagcaacacaattatgtttttattaggaatgtgccataccgaatccgtgtgcggctgtccagaaaacgtaatgaggatgaagattcaccaaataagctatatactttggttacctatgtacctgttaccactttcaaaagtaagttctccatcccataaagccatttaaattcattagaaaaatgtccttacctcttaaaatgtgaattcatctgttaagctaggggtgacacacgtcattgtaccctttttaaattgttggtgtgggaagatgctaaagaatgcaaaactgatccatatctgggatgtaaaaaggttgtggaaaatagaatgcccagacccgtctacaaaaggtttttagagttgaaatatgaaatgtgatgtgggtatggaaattgactgttacttcctttacagatctacagacagtcaatgtggatgagaactaatcgctgatcgtcagatcaaataaagttataaaattgccttcatgtttttgttctttttagttgcaacataatgtacttgtataccctatcctaattatgggatcatttgaagagct

SEQ ID NO: 24194 - DNA, 1942 bp, Homo sapiens
gttgttgtcttctaaaataattaattgatttttggtgagataaccagattcatattttaagccttttgtaatggccccgtggtacctggagtcaaggttcagaagtaaaaagttccttaaggtatcaataacaaaaatttgtattaatagttcagtcctaaagcagtgttgctgagattatgtttcaccagcatttacaagctgtatgttaaatgctgccataaagaggtctctgaagccgtagggcacacccaaggcagggctgagaagtacctagtagtgttgcaccacccaaaaaccatggatgggcagcagcaacatctccagcttacccattcactgccacagtctacagcttaagacacttaactacaaggtaaaagaaaaggaccaagtaaatacaaaaagtttcttattaaaaaacttggaagccaacattgaaagcatggtttgtacacaacaacatttttggaaggacatataaagtgaatacaaccaaatatattaaaatggtttcaattaccagcattgaaacagtgcaaaaaaaagccaaatacaattgcacagatagtggactcccttagatcttgaaagtgaacttgattcctgacctctcccattgtcactccaagtgaaaaatgaaagcatggggcttttcttgcttcttggttagtatgagacattgtgttcatctgagagcaaaatcaacactagcatcacagcagaagtgcccatttcagcaaatccggtaaaaattgtaagttggcatcaagggaaccaatggataccttagggcactgacaattctcaatacatagaaatgcttgagggttgtgtcggttcccctggccacagtttgtcaggttgtttagccagatgccccattggtaaggtagactgaaatctcggtttagggctgaccccaagaaacagtctggttcgtgctttggtatggtggactccagtgtgcatagcagctgctgtcttgctacaagttactcagcttaagttcagattgtgattggtggctcatttcaaaagttttgagattgtactgattgatcttggcattttcaagtttggatttcatgtccagtggcttttcaaaaaagttgactaatgactgttcagtcagaagtgaagctaaaatatgttcaagggagacagtccagtccctttctgccgcctctggaaatgcctgggagtcctggggcgtcttcccagtgtctgcaaaaaccgagtcctcaggagaaggagctgaagcccgcagctcctccccacactcctgggagcagcttccagagctgctgcctcgctgccccacctccccgatctgcagcagcagtgtggtgactgtggcgatggcttgatacaaatcattttcttctggatcttcatggaacatactgtacagagttttacagaactggataaattctctctgaaattgaaataagtcttaggtagcagcagaaccagggtggaagtgtcatttttttttttaaacatacctgtgagctttgagaaaacgacacagtatttttgaagacacagaatataagaaaaggtagtctctgcctttccactctaaactattaacagtggtgattcctgggaatttcagcacagacttggaaatgggtagaccttcctagaggatgtgcacaccctttaacaaagcaattcaagaaaccacagcaggctgggcacagtggctcccgcctgtaatcccagcactgtgggaggccgaggcaggcggatcacctgaggttgggagtcagaccagcccaatcaacatggagaaaccccatctctactaaaaatacaaaattagccaggcatggtgacccatgcctgcaatcccagctacttgggaggctgaggcaggagaatcgcttaaacccaggaggcaaaggttgtggtagtcaagatcacaccattg

SEQ ID NO: 24195 - DNA, 1104 bp, Homo sapiens
taacaattatcggggatgacagggaaggttccccatattttaaaaagtttggaacttattcgtaaaccatttcactgaaaataaatcaaaggcaaaattcagctgtgattcaacaagcttccacaagatggcagcaaagctttggaaagctacccttactttttccaactttgcccaaaacgaattttgtgcagtggcacatgtaagaatccactcaaactgaacaggaggaaaattgcaaaccgtgaatggtacctggggcagtcaggatggaaatggatttcccagaatagtgctgggatgccaaagaacttggcgtaccacaaagtagaaatgtgtatacaagtcaccaacaaaatgtgatgggagccatagaaaggcagcaattaatccagggggtgggcaagtgtccagaaaggaggcaggtaaagtattaacagtgacaaggagctgaggggccaaacaactctcagagcagagcctcccaacctctgccgtcacagcatatgaagagaacgtcacctggacatggaactcactgaaaatactcattccacgatctattgatgatcagaaggataggatattatgcattatgggaaatagtaactactaagaatgcatacagtctttaaaaatcctttcaatctttttacatgagatatttgggctgtttaaacatgaccttatttttcattcctatatatatgtagcctgtaattcaagcgtctaaatggattgacagacaatttctattaaagtgttcattgtgtctcacttcaagtactacccaagttaaaataagataaaggatttacatttggtcatctgaaaccctcatctcagacttctgtttgaaggtagtaggtaacttcattgctccaacagataccaccagcaggaaggtctctcctttatagccttagggaccttcattacacactgtacatggtttctattttctatatcattgtcattgccactgccatcttcctcactttctaaatgggatgcctgtggaggcgacaagccagttccaccataagtgtcttctctgtagtagaattcacatatggctttgaacacaatctggccttcagatgc

SEQ ID NO: 24196 - DNA, 1046 bp, Homo sapiens
ttttatagagtcatgtgtcaatgagaggaatacgttctgagaaatgcatcattaggtgattttgtcattgtgcaaacatcatacagtggacttacacgaacctagatgctgtagcctactacacacctcgcctataaagtctgttgttcctaggctacaaacctgtacagcatgttactgtcctgaatactgtaggcagctggaacacaatggtagctgtgtatctaaactatctaaatgtagaaaaggtgctataaaaatatggtataaaagaaaaaaaaatggtatacctgtatagaccacttactatgaatggaggttgcagggctgtggaagctgttctgggcaaatcagtgagtagcgagtgaatatgaaggcctaggacattactgcacactgccatagactttataaacacttaactgtactgagttcattttaaaaatattcttcttcatcttcaataataaattaacctcagcttactgtaactttttactttataaactttttgactcttttgtaataacacttgccttaaaacacaaacacattgtacagctgtgaaaaatatttcctttatattcttattctataaacatttttctatcaaaaaaatctttttaacttttctgttaaaaaccaagacacctaagccaaaagaacaaagccagaggcatcacgctacgtgacttcaaactatactacaaggctacagtaaccaaaacagcatggtactggtaccaaaacagagatatagatcaatggaacagaacagagccctcagaaacaacgccgcatatccacaactacatgatctttgacaaacctgagaaaaacaagcaatggggaaaggattccctatttaataaatggtgttgggaaaactggctagccatatgtagaaagctgaaactggatcccttccttacaccttatacaaaaattaattcaagatggattaaagacttaaacgttagacctaaaaccataaaaaccctagaagaaaacctaggcattaccattcaggacataggcatgggcaa

SEQ ID NO: 24197 - DNA, 1047 bp, Homo sapiens
tttgagacggagtctcgctcggtcacccaggctggagtgcagtggcgcgatctcagctcactgcaacctccgcctccaaggttcaaaccagtctcatgcctcagcctcccgagtagctgggattacaggtgcccgccaccacacccagctaactttttgtatttttagtagagatggggtttcaccgtgtcagccaggctggtctcgaactcttgaccttgggtgatccactcgccttggcctcccaaagtgctgggattataggcatgagccactgcgactggcccaaaatcatattatttaaaaatcaaaaaggactagccagatctgtaggatacagaaggaactaataaccctggctacctgtggggagggccccagaggtggaagtgagactttttattgcatatttttaatactttctcaattctgaaccacatgaatacattaacaattttttttaagttttttttttaaggtgagttgaagtcttgggaatagactgaaaactaacaaaaccggccccatcgctgaggaccaggtgagcctcttcagaatgcatcatttccacccatactaaatgactacatcatctctttggacatcccaattcacaaaagtctgaagtagttcccagtaactgcagggttcttgaccatttcaatgtcctctgtccacaggatgggacaaaaacaagggcagatgctgtagtctgcaagctcatatcctcaaagagaccaaaatgccatttataattttactgtcatattcactgcagccatgttatttaaatagtcattacagaatcatgaaaataaccacaagaacttttaagtgtgaaataaaggtctcataaatttctgttccttaaaacccaaggtacaccatgaatttctatgtatattcatgtagactgtcacatcaacatcccataaaatgcagaagaaaatggttgtaatgcatatgccaaggacaaatattagtttacatagaatgccacaggaaaacaaaccactataaaaataggcaaaggatatgaacaggtga

SEQ ID NO: 24198 - DNA, 1051 bp, Homo sapiens
tagagacgggatttcaccatgttggtcaggctggtctcaaactctggacctcaagtgatccacccgcactggcctcccacagtgctgggattacagacataagccaccgtgcccggccagaactgtaatttgaaaaaattaaaaaagctttagcagtattgactaaagttgaatatatacgtcacccatgacccaacagttccacctcaaggaacccattctacagaatcagcagcactggggtccaggaaatgcacaggtgctcagtgtcaagcagcaacgaccggaagcaacacaaatgtcactcaagagatgaataattaaatatatcagagttcggccctacaaggaaactgcaatcactaaaaaagtatgagaaaagatctatagattctcatctagaacaaagttcatcatacatggtcaactgaaacaaacaaacctgcaggtattatatataccataatctcacttctatgtgggaaagaaaagtaagtgtgtgtgtatgtattgtaggcatgtgtgtatttatagatagatacaagagggaaaattctggaaagatacgcacattgttaaccgtaattatctgtacagggagggtaatacgggcacaataggccctttttttttttaatttttatttatttattttgagacggagtttcactgtgttgccagggctggagtgcagtggctatgatcttggctcattgcaacctccatctcccaagttcaaacaattctcccgcctcagccacccgcgtagctgggattacaggagtgcgtcaccacgcccagctaatttttgtatttttagtagagacaggttttcacgatgttggccaagctggtcttgaactgctgacctcaagtgattcggcctcccaaagtgctgggattacaggcgtgagccactgcacccagctactttcctttcttgcttagaagctttgtttttcttttttcaatggtaagagaaaaaaatggttttttctttttttaatggtaaggtataattttatttagctttgtgtctttcaattaaact

SEQ ID NO: 24199 - DNA, 1029 bp, Homo sapiens
acgctccacaccgtcaggttggtctgcgggtccacgtactcgatgtttaccacggccgagaaccactcgagagcccggccccgggccccgggcacgcacagggccagggcgagcaacgccagagccaacacgccgcgagccccgacgctggcttcgcgccgccgccacgccatggcagcaccgctgagctgactagggggagtcagggtcacgcgcgagtgcggtgcagtcgaagagcagagagaagcggacacccaccgccgccctggaagactgaggcggggtcggggccgctgcgcacgcgcacctggcggagtggacgaagggcgtgatcggccctggctccgcccccgtccgaccggccgcgttgtgcgcaggcgtaagctccgcggagcctcggaccgcgatccgtcccgggatctcaggcgcctgtgggccgaggcggggcgcgcagcctgtaccacagcttgcgccacggcggaccctgtggccaggggccaagtttgcgcaataggacgtctagcacccccaaagtgaagggaagtaactccagagaaacgggaagcttccctgaaagcaggtgtgggaccgcagttctgtaaaatcgctgaacagatgtttgtggagagtttattgtgcaaggcacatggcagaggccttgtctaagtcgtttcaaagttaattagccaagcctggtggcgcccaactagagttcccactcgggaggtcgaggtgggaggaccacctgagccccggaggtcgaggctgcagtgagccgagatcaccactccacttcagcctgggcgactaagcgaaaccctgtcaattaagaaaaaaaaaaaatccaaatacattttgtgaaaaaaaaaaaaaaaaatccaaagctacgcacacattatccaactgccttttgctactaatattatgatgctaattgattccttacagcttaagtatatttacaacagccctttttgttatagtattttatgcataatctataattttgaaataggcataagcatacaa

SEQ ID NO: 24200 - DNA, 1035 bp, Homo sapiens
taggagagcaaacgaagcttatctccttccccaaattgttgataatgaaggcgaaaagagatatagctacaggtaaactagattgaatctgctgtttatgtgttggaagatgacgtttgaagatgagttttagttcttagcaccaatacaacaaatgatgggatttgaggtttaagtgcctaagtttaaggctctcatataataactcttaatttctttttgtgtcgggaaaagaacaaactcttgccttgaattaaccagttattttaaaaaatcatagacttctgtcattagaggaaacggcctgaactccattaccaggtgactttttagctttagtgggtggcacatgggactgtctgtggtgtgccatctgcagtgcgcaagccatttgtttctggaaacagtctcacaagcaatgattctggtgagtttagaaatgaatcaggatgtgctaagctcaatgaggactcattagccttggataatgtgattctataaatgaacagaatggagacggtgaagactcaggagtatagagaaaataggatgacactggaagctaggctgattggtgggagttttggaatcaatgtgcttcaactattagttgattaagcatatagttgaattagtaaagagtgggagacttgccccttgactgtgtgttattaaaaaaaaaaaagctatcttggccaggcatggtggcttatgcctgtaatcccagcactttgggaggccaaggtgggcagatcacctgaggtcaggagttcgagaccagcctgaccaacatggagaaaccccatctctactaaaaatacaaaattagccgggcatgatggcacatgcctgtaatcccagctactagggaggctgaggcaggagaatcacttgaacctgggaggcagaggttgcggtgagccaagatcgcgccattgcactccagcctgggcaacatgagctagactccgtctcaaaaaaaaaaaaaaaagctatcttgagtactgacatggtccaccatctcctttatgtaca

SEQ ID NO: 24201 - DNA, 1054 bp, Homo sapiens
gtcagtgaggttgtcttttgattgtaattgcagaactccctaaagataaagccaataatatctgaaataaaatggtttttgtccaacatagattaccaagtaaatggcctgtgagtctgtgttttagactcttaaaattttggggggaagtatatacaggttaatataaaatgaaagagaaataggcaattgcctctttatttggcatttagctctcatgttaaaaactgtgaaacagaaagaaggtggtaatggtcgggcacagtggctcatgcctgtaatcccagcacactgggaggctgaggcaggcggatcacctgaggtcaggtgttcaagaccagcctggccaacatggtgaaaccctgtctctactaaaaatacaaaaatcagccgggcatggtggcatgagcttatagttccagctactcgggaggttgaggcaggaggatcacttgaacccaggaggcggaggttgcagtgagccgagatcacgccaccgcactccagcctgggtgacagagcgagactccgtcttgaaagaaggtggcaagaccaaataaggagcacactaagggctccagggagaaaacgtgtagcatcagaaagttagaaggttgtcatggcttgctctcattaaataactgaggaaacacccaggttacctctttaagtacaggctaagtaagtaatctccctatttcccagtctagaatgctcttgaagcgtggatcccaaagtacagattgtcatagcatatttctctgcagcatgctagcaagatttttatcagtggttcctctcccctggggggcttgttagacatagattactgggccccatcccacagtttttggtccagtagttctgaggtaagactgagaatctgcatttctaacaaattatgaagcactgctgaggctacttactggtctggagaccacactttgagataaaattatttgagataattttaatcacctgggaagctttcctctcaacattttattatgaaaaatttcaaacctatagtaaagttgagaggtgtaaaatgaat

SEQ ID NO: 24202 - DNA, 1050 bp, Homo sapiens
aagttagtcattatgacaaaaccatgaaacacagatgataaaccttctagtaaaatttaatcttttgaaattatttgtcacctgggagagctgccattctgacacttagtgctttttaaaatcagtcaggtgtgtatgtacttctgttggtcagagatggtgagtgggtgtgtggtttctgggagacctgaaaatggggccagagctgtgggttttctgcagctctaacaagctgccacccttattttggtgatgaggcttgtgcccactttttaattttttgattaaattgtgctgattacatggttccaaagaacttagggaatgcacagtattgctccagattacttgtcagttaggatttacctattgtgagatatatatatatatatatatatatatatatatatattttttttttttttttttttttttttgctgttagtcattgttgtctcatttgatggatcagagtgtgagattgggaaatgttacgtattaatatcaggaaaagagacaggcctggagtaggtctggaggtagggctgcttagtgttttattaaccatgctgatgaatgcacacattcaagataatctgttccctttccattctctgccactccttttgaattgctcaaggctgggattctatgtctggaacaggtgactcagatgaaataaagtttgaaaaggaaaaaaaccctgtcaatttctggttactcattatcattcagggtccagattctgccttttctctctactctctcccccctctttctccctcacttaggctcctgtcacctttaactttctcaccacactttttaaaagttggccaggaatgaatggaaatggtgaggaatgccatgaattaatatttattgatcctctgttctgtggcaggctctggaagtattttgagattcggagaggttacctaacatgctagcatcatatggcttgtaggtggcagggctgtgcttgaatccaagattgactcaggacctatttctggaccatgttgcctccagtgctttctcatcctggtt

SEQ ID NO: 24203 - DNA, 1032 bp, Homo sapiens
atgaagaaaagttcgaatgtttaatattatttacagccatttgaaaagctggctaatgatcttagagtaagtttctgaactgctattttagcagcttttaaatggttcttttgagtagtaaagccatattgacagcacaggcagagggtttctaggatttcgtatttgagcagtgcatgtaggatattaccagtgagtctcttcatttggctatcacagtttttctctctacttcatccctgaattacacacagacattacttggttgcatttcatttacctaccacatttaaaaaaaaagattatgaagttaaattgaagcccaattcttaggcttcccccactaataaaaaaacttaaagtaactaataagttattttaatttttttaataagtaaagttatcccactttttatatttaagattcatagaggattgcaggtttaaaaactgccatctagacttcctagagaaatgtttaatttttttttatttagatatttatgtagtctttgaaaataggcaattcccctaagaagactagttgtgaagggtggggtagggtgacaggagaaccatctttttataaacacttgcaaatgtcattaaaatgtcaggatcttttatgactattatagaaagcagagcctaaatgtgggaaactaagcttcctgccctatactactgtaaaggaagtcaggtactgggccagatgcatttattctattaataactaaaactgtttagcatggtaggcaggatagaacattggttgagtggttggagactagcataagtcagacctgggtttgagtcctacctctgctgcttacctatatagcacaccctatgttattcaactttcaggacttactttctcctcatctatacataccaaccctttgaaattacttttgttaggagaattcaatgagttagtgtatattaatcatctaatgtaacgtggatacatagctacctatcagtaaatatgaattgttgtcattgttctttgttttaaacacccactcc

SEQ ID NO: 24204 - DNA, 1113 bp, Homo sapiens
aaaaaaaaaaaaaaaaaaaaaaaaggaacagctaggactgaggccagggctgtgtgagggtgagtgggtatttccatgggaccagcagttttttgagtcccaggagagctagcagatgggtagctccagagaggagaggatagaaaggaaagaggaaagcaggagagggtaactggacacaattaaaagaggatgagaagagagactactagaataggtctgaggactcgtgttctttagcaactttgcactgcttgaagattaaaagttttcacactgcaagttaaacttcgcataaatggacaatctttggccactaatagtttagaaaataggagtttctgaattatctaatttttgcatttgttatgaatttgtgtagtaactagaaagagtctcccatttcctcctcctgttcattctttgggggagacttttctcgtgtaggactctattttaaaactcatttttgattataatttcaggtaatactttgaattacatgctttatctctgaaaatcttaaacattttagaagtctaggattataccaatatctggtattatacaaatctcacctgtatattgtagaaatcatacaatagaactaatttcacatcttgtatttggaaaggttgaacaaattgattcagtattttcagtttatgtcaagtacattgatgtaatagatatgtagctatcattttttcagttgccatattgaacaatcattttagaacagtaaaacataatttaatgaaaatattttatggattttttcagagatcattttcccaatttagaagcaaccagataaactcagttgacaagtaattgtcatatttttgtaatttcccaagtggaaggaataccccaacaatagtcaattcagggaatccatggtactgaatatttttaaagaaatcacaattctttattttcatcactaatatgaaagtatatggagatacctgggttatgggtgtttgtagacttgggaaaaataagaaaaattgttggtatatttgaaaaattagctgttcttgagatattatagtctcaaaacgtggggtttgtctttgctcgttgaacgtgccattttgttactcgctc

SEQ ID NO: 24205 - DNA, 1045 bp, Homo sapiens
acagtatgtgttctagtgtcagctgctgcttttttttttttttttttaagtagactttttctaaacgttttttcagtattttgcagtttagccattctgaaggggtgtaggaattaataggtgtatctcattttaatttgcaatttcctaatgatgtatggtacatcttttcttatgtttgtatatcttctggtgaagtatttcttctatctttaatccattttgtaattggattgttgcttgcttattgttgagttttaagagttcttcgtgtattttggatctaagtttctgatgagatatgtgttttgcggatattttctgccagtttgtggcttgtttgttcatgctgtggaatgatgtcttttgcagaagagaagtttttattttagtgaagtccaacttactagttttttctttcatgaattgtgcttctggtattgtatctaaaaagtcattgccaaatccagagtcacttggattttcttctgttaccttctagaatctgctttacagctttgtgtttcacatttaggtccacaatccattttgaattgatatttgtgaaagtttcaaagtttgtgtagatttattttcttttgcctatggatatctagttgttgcagcagcattcattaaaaagactaacctttctccattgaattgcttgtgctcctttgtagattactgctatatttgtatagttctatttttttttttttttgacacggagtctcaatctgtcatccaggctggagtgcagtggtgagatctcagctcactacaacctctgccttccgggttcaagcaattctcctgcctcagcctcccgagtagctgggattataggcatgtgccaccatgcctggctgatttttctatttttagtggagacagggtttcaccatgttggtcaggctgatctcaagctcctgacctcatgatccgcccatctctgccccataaagtactgggattacaggcgtgagccaccgcgcctggtgtatagttctatttctgggctctattttttcccatttatcta

SEQ ID NO: 24206 - DNA, 1018 bp, Homo sapiens
gaatgtgtcagcacgtgggttggcaactactgcattagtgttagcagtaaaaatggacaagcacgtgatgatggacaacactggtaagatttcttgattattttcttttcctttttccctttcttttctagcagacatggctgatatcccaggccacgtcttcacaagaggaatgatcatagctgttttgatcttggtggcagtagtgtgcctagtgactgtgtgtgtcatttatagagttgacttggttctattttatagacatttaacgagaagagatgaaacattaacaggtaacacatataatgctggaatttcttaccttatgttctcattaagaaatcagataaataggcattaatcttcatcttattgtgatgatattgtagaattaatctgtgggagaggttttctatgggaaatattgttctgcctgtaccatccattatgaatgttgtctatgtcttcttttcttgtgcttacttatgtgttgcccaaaattgttctgattgtctcgtgtatgtatgtcatagcttcctaaatgccctgggagatgctcgggcccaggaactgtatatctgggtgtctttgtgcatgcatcacttaggtatctttatagtacatacactcaataaagttgctttaagttagattgaattgtcctatcgctcattatttcaacctggcaaaggaggcttacataatggacgtgtaagaacccccagctggccgggcgcggtggctcacgcctgtaatcccagcactttgagagtccgagacgggcagatcacgaggtcaggagatcgagaccatcctggctaacagagtgaaaccctgtctctactaaaaatacaaaaaattagccgggcgtggtggtaggcgcctgtagtcccagctactcgggaggctgaggcaggagaatggcgtgtgaactcgggaggcggagcttgcagtgagtcgggatcgcgccgctgcgctccagcctgggcgacaaagcaagactccgtctcaaaaaaaa

SEQ ID NO: 24207 - DNA, 1047 bp, Homo sapiens
cgtttcctggaaatccttctataagagaagacgttgattctccatcctgaaaaatgaactggtgttggctaggagcgtagggagagaaatggcatttcaggcagagggcacagcctgggcaaaaactccggagtgtgagaaaggacacagcgattgcttaaggaatcatacatagttttttataattatattgcaaactgcatgtgcacatatgataggagatgaccctagaaaggagggttctgtcacatcataaaaattcccagagatccagctaaaaagcagtttttctaagaacaagggcaaccaacagagaatgctctaaagcactgagcctggctggatattttggctgctcttagttttgatagtttatccatctcttcaggtagtcagtcagctatatatttaacaataaacactaaatacctaatactgtctaggcaataattaatagtcattgtgattatgcagtaaattctggatgtattattgagcaccttgtagactttgaacgatgccgggttctgtgagcccacagacatcagacacaatcctcatcctcaaaaaactgctgcaatatcctccagcattcttccactctgatttctaaataagcaaatacatatcatgggttcctaaaaataatttttgtctagttataaaataatgcctgttaagtgtagaaaattttaaaaattcagcaaagcccaaagaaaatattgtggttaagataacactagatgctgtaattgatgtctaatactgtcatagataaatctaatacgtgtaatgtcttaatagaagtttatttcttgcttagtccaatgtgagtgtttggccaagtgccctccatgtggaaattcaaggacccagtctcctgtctggtggcactgttatcccccagggcctcagagttatttccttctctctggcagagaggaaacagggaaggagtgtgggagagacaaagctgtattcaccagatcccatatcttattccttattcctggaaaatgatacttctctgtcctttatgtggtgtta

SEQ ID NO: 24208 - DNA, 1045 bp, Homo sapiens
tttccttctgttttaaggctgaacagtattccattttatatatgtatatatacagcacatttctttcatccgtttatctgacaatgaacacttaggttgattccataacttgaatattgtgagtaatactgcaaccaacataacagagaggatatctcttcaagatactgatatcacttcatttgaatatttgcccagaagtggggttgctggatcatatggtaattctatttttatttttctgaggaatgtccagactgttttttataatgactgtactattttacattcccatgaatggtgtacaaatgttcccttttctttacatcctcaccaagacttggtactatttgtcttttagataatagccatcctagcagatatcaggtgatatctcactgtggttttgatttgcacacacctccctggtgattagtgacattgagcactttgtcatactttccgcccatttgtatgtcttcttttagacaatttatattcatgtcctatgcctgttttttaattgagttctttgtttccttgttattgagctgagtcccttctatattttggatattaaacccttgtgagatgtatagtttatacatattttacccattcccttcactctactgattgtttcctttgtagtgcagaagcttctcatttgtccagttttgctttgttgccaatgctttggagatctaatccaaaaaaaaaaatcattgcccattgcgatagtttgctgagaatgatggtttccagcttcatccatgtaccctagaacttaaagtataaaaataaaaaaaagaaaaaaaaatcattgcccagaccaatattaagaagcttttttcaaaagttttcttctagtagttttgcagctaaagatcttatatttaagtcttaaatctattttgagttgatttttgtgtatggtatgaaataagagttcgatttcattcttttaagctttcccaacactcatttgcccaccacagtttattgagataatcctttccccatgtgtgttattggtatttttgcc

SEQ ID NO: 24209 - DNA, 1060 bp, Homo sapiens
gttggccagagccctccctcagctcctgccacatgggcctctagggcaactcagcacatctggcttccctcaggctgatgaagaaaaggtaagcaagagagaagaacagcaggtggcagattcactgggagccatcttggaagctgcctacaacagtggaagacccacatatacttattttcttgttatctaagtgtctctctcatgtatttaggtctttcttctatggttcttatgtgtgggcatatatgggtacctatgtgtgtgcacatgtgggtacatctgaacacctgctgtatcattctttttgtcagataggattattagcttaaacaaaactgcatctttactatgttttgttttcttatctcattatagcaacattctcactttaacatcactcatttcttctttacaattatttctgttaacatttaatacagagcctggtctataataattgctcagatttgttaaatgaacttgtaaagtagtttatttttagaattttattctgcaaaaccaagcatataaaaatagaataatataatgaactccacagatccatcaaccagcttcaacaattattaataatttcccagtcttgtttttatttctcccctcccaccccccagagtcatttaatgtaaaccccagacattctgttattttacttataggtacttgaatatgcatctctaacataaaggtttttttaaaaaaatagattccttgccaccgccatatctaacagaatgaacagtaatttcttatcatctattacctatttcatgttcaaatttccctgaatgtcccaacagtagctttttgtatatagttggtttattttaattgggagttaaacagggtttatgcgttttatttgattggtaagtatgttaagtgtcttaatttataacagattatagaattaatgtaaatggtaaattttgtttaagtaagtggatttcttatttgtttaacatagtatccgtttccccttcatagtagtatcccagtttccccaggaggaattagttctttttcgctggttatagtt

SEQ ID NO: 24210 - DNA, 1028 bp, Homo sapiens
tggcttccggaagtgctgggattacaggcgtgagtcaccacgcccggctgcaatttttttttttttttctaagatggagtcttgctctgttgcccaggctggagtgcagcggtgtgatttcggctcactgcaacctccgccttctgggttcaagtgagtctcctgcctcagcctcccaagtagctgggattataggtgcctgacaccatgcccagctaatttttgtatttttagtagagatggggtttcaccatgttggccaggctagtgtcgaactcctgacagttgatccgcccacttcggcctcccaaagtgctgggattacaggcatgagccactgcgcctggctgcaaattgttcttaacagtggcaaagcaaattcccttcaagaattcttggtgtttttagctaaagatctgtttttttcacactcttagcctcaccttatttaatggattgtaccaatgaataatggactcctttgaatgtaaatatttttgtgtgaattcattgctggaataattctggacttttaataaacatattcaatatcctgctactgatgctgtgataactttgtaaatttaatattataaatttccagaatgccatactcttaagcaatgtgtagaaatgtctttgaaaaagatcctaaggactttttatgaaaaatagcaaattagggccatttttttaaagccctttctaaatggacaacaatgaaaatgtttataaatatgtttaaacctcaattatgttaaaagtaggaaagccaccaccttatgtcacaaactctggagactataggcagacacaattttaaatcaagtgaaaaaccaagtcttcaataatcgagactcttttgcttgagaagatgctaaaatgttgtaggagcaaaaggaacagtgtggaagagacagctgaagaaaatacaaagggatatttacctaacaaaatggaagaattattttaccacagctacttaacactgtcaaggacatttaaaaatcagttgagtgaggaggagc

SEQ ID NO: 24211 - DNA, 1054 bp, Homo sapiens
cggcagtttaatgagtttctaaagagttctgtacttactaaatatatgctccattttttcttttggaaaaagcatggttttttgcttttgttctgtggggtttttttttttttttggtgaccaaccaaccattgaacctaaattatatgtgtaacaatttcttaaagtgtaacgttagtttgaaacacctaacaactttgccaagttaaatttcataccaattttagaattgaatatgggaaattttaagctaccacttattttgggaaaatgccttttgttttctattcctgtggcagattttcttctgagtgaatttaaaactgaaagattaggacatcggcaaccttaaagagtaaggtgatgatttttgtatgtagttgagctgtatggacgtggatggtgaggatgtttgaatactaatgtgtttactagaggcaccaccaaaatctggttcttagactgggaaaaaggtatcttgaaacactaatgctaaaccaaatacaaacccaaatacctggctagcaggattgttttgaagcttatggaaaaaccattaactgagtcccaattgatacatatgttttcattttttgttttttttgttttttttttgtggaagggttgggtatttcttagtttaaataataatttttcatgaaggttggtttaggagtgaaaaggtgtttatttcagataattatgaaatttctgttaattctgtcatggttggtaaacttgtcccagtgggccaaaccacaatttggatgtgaaatgccaattttcctttaattgtaagatgcttgggggcccaaaccacttgctggcactttttttctagtgcctagtaagtgccacacacgttctggggccaatgaacactgacagtgaacagataggttaacattaacagagagtcttttcctcaccaccttcccccagtgattttctggttgacctaattttacctttcataatatttaaattttgcattatttttcatgctaatatagatgtttctgaatcacataacaggaaaactgctaaaaaaaaa

SEQ ID NO: 24212 - DNA, 1046 bp, Homo sapiens
gcccatctgtatttcagaaggaattacacccaacacctttttgaggcttttctgttgttgatgttttaaactctcggaggttgatgaccactgggttgaaacaaatgatgtagcatagaaaaatacattctttagttttcatttgtttacctgttttagattctctgaatgcactgcatttttttactttatcagttttcccttttaaaaatatgggagggagttatgtttatggccaaacctaaatttttttattctaacaagatgatttgggctattttataagcttttatttgaaacaatacagaaattctcatagtgaaatatttagtaatttttaaattaaatgtaaacattgttttatgttaatggtatgaaatatttaatatcctaaatatttgcatataaatatgctaaactaaatattaaaattctaaatgttggtgatttttttgtattttttattactcaattataaatgtgtctcataactgtggttaaatgcagctatttggtctgtctctgtgtatatttttatttgctttcatctggcttttttaaatcagcaatccagtggggagaagatggccgtccatttcactatctcttctatactggcaaacagtcatactattcattaatgcatgtaagtatattgcatttatgataaataatatgagctgtaagctacaaaactaattatactggatactgttcgcagcttcagaatttacctagtattttataattgacaaaaataagacttctagaggtaggacagtgtgttgatgaaatgatttatagtaattcatttttgctaaaggtgaactttatagagtttatatcagaatggtttgtctttaaaatgcttttacttagaaattgaaatcatgttccaagatagatgttcaactcaattatagtgtgtacatgtgcttccagggtaaagaaggaggaggccaagtgtatgatgctgtcgggggctgtgaggcatttgccttgaaaaagaatcaaatggttatttctcattttttgttgttttatat

SEQ ID NO: 24213 - DNA, 1034 bp, Homo sapiens
aagttctttgggtattttgtttttgtaagttattggaggtttccattttttcccattgtggtgtttgaattttcttttaccctactctgtgtaaccctgttacctgggcatgaatacaagagtccctgtgtaatgtgaaaaaggatgggcagttgattcttaccttagactactgctttagaagttggaataaattggggaagtttgagctgaagaccatcttcgcactgttgatgagaagaggaaagcaccatgtgtgctattggcggctgcatggtcgtgggcaagtcacttagcacctaagtctataagctcctcctctgggcaagtaggttggtctctgtgcaccagaccttctagtacaagccgctgaggttcaataaaaacactacctatggcttaggctacttaattgcttaaggctcttaaaaatccatttgcttataagcaatttgtcatcatatgggattcatatctagtcattgaagtaatttgctagaatcttaacaatttgatgagtttgagctactgtgcatatctgaaagtaataaagcattcttacttacagttgaagctagaacttaggtcttttctgtattttgtcaaatactgctgttttattccatgcatgtcctttaagtacaagcaagtgtaaatgttatgggtatatcataaacaaggttttcctttgctctatgtacattaaatggtccttaataaaatacccaagccttgtatacagtaggaggagtgctaacgttggaagagtgaaaaagacaaggaaaaagtatggtccatttacatatttataaaagcaatgtaagagctttcccatcagtggtattcttggaatctatggtctttactaacttactatagctccagccactgctggggctcttccttatgggccatagctaagagtaaccccagcagttgcctagaaacataatcactcctgatgattgggagaatgaaagtttcccgtttaaactgactttattcttctagaagaaactgcctgtgctgagaat

SEQ ID NO: 24214 - DNA, 1050 bp, Homo sapiens
tggacagctaccaggcactttggaaagttggttcagttactactatgaggccataatatatttgctggtattaaaattcttcagaattggaattactatttgaaataatattttggttgacttaagttttgagagacaattctaaaattgatctagagactcattcaatagcaatgtgaccttttaaatacttacattaagtaaaactgccagtagattaaatcatatatatatatatatatatatatatatatgtaagagcttcctctatttactactgttgaacttcagtaatttttagaggctaaataatggtcagaatgtttttaagtgtgctcttttattacatgcttgtgcaggttttgtaattcagtacagaaaagtttaaccttgtacatttttgtatgtaaaaagtcttttaagtagtcttatccttatttaaataaacagaataaaattaccttgagtaggtctgttattcttattaaaatggaaaaatgctctgtaatgacttgatctgtttttatttgagtgaacaattttggaaagtattctttatagtacaactttctatacctggattgattaagatcagatgtgattcgagtagtccagccatatcttgtagcccttctttgaatgagagggtggctggagtggtctggtgctgggatatcacggtgctacagagcctgacatgttgactgtcactacatgttgagggatggaaatagaagtctctgaacttcccatgtaatattaaagctcttaacaaaatgagacaaactagagattcagttgagagattttatgttagagtgatctgaaaaaaagttaatttctaaactgctatcttaatattattatatttggagactgatgctgtaaattaaataacttggaaaagactcaggtaactttctactttgtcttttgttttgttttagagatgaggtcttgctctgtcgcccagagtgtagtgcagtggcatgatcatagctcactgcagccttgaactccttggctcaagtggtcctcctgcttcagcct

SEQ ID NO: 24215 - DNA, 1044 bp, Homo sapiens
gttcacagcaggatggaaatggctagagtgtgaatgaacctggaacctcgaacctgattcagtgagcagcctctacaacactcactttacatactgcctgttgaaccaagttgtgatgtatctaggtagttttatgcactgtactaagtgctataattaaaacctacatgtagtttttttttgttttcgagacagggtctcactctgtcacccaggctggagtgcagtggtgcgatcctggctcactgcagccttgaacatctgggctccagggaaactcctgcctcaacctgagtagctggaactacaggtgcacaccaccatgcctggctgaaatcttcatgtgttacttgtacatcccatttagtaattgcctaaacctacgccatccattgtcttttgaataactattagcatttgatacatttctaccatttctccaagtgaactgaggagctctagagaactgaaacacttatgggtcacccctgccaccaccaagctggactcactgcaagtgctcggtgtctgttgactgacattttttcatttttgtttgccagaaagaagtgtatctatttatagtaacggatgattccagataggcgtataaacaagtacccttcatataaagcaaaggtaaagaacaatctggggaaataagtatcagggacaaagaaagaggaaagtgttgtaagtgcccggactagctgaggggcctggccactgtgtaagaccaaatccagactgctgcctgcttttcaaatgaagttttattggaacacagccacgcccattaatttacttccattgtttacatccgcttttaagctagacggccgagtagtgtgcagctgtgtgcagttgtgcagttgttgtgtagttgtaatagttgagtagttgtgacagagactgtatggtccacaaagccccaaatatttatctgatttttgaaggaaaaatgttgccaatccctggggactgtggcatgagggtcacatacatgtgacttcaactgggggtcagggaatgatggggaatcaa

SEQ ID NO: 24216 - DNA, 1024 bp, Homo sapiens
ggctgctcttccaagtgagttgtctgtgccagcttctcgaacctacccttttgtgttaggagggccactggggccatcagagtgttgagcagccctccctggagcagatgggactgagataggacggtgagtctggcgtctctgttgggagaagctcctgcatgttccaagtttcagaggggctgcaatttgggcagtttctttcaactcacaggtttagatttgcagtcacactacctctcatgtggccacttctacacgtagcaggttccaggatatgtggtggcaaagaattgtttacttcaacatgcttaatttcccagcaatggtgggggcagccaggaagtgagaagtgaaaagtaagttagaaagtggtgagatcacagggagatgcctagaaagacgcccatgcccatcttagaggacaaagtccatcaatgtctccttcgattttccttaacggttatgtctcccatttaatatcttaagaattttggttgcgtgtttaaggatgtctgcaagtcaacaaatattttaattatgtcacttatgagcctggctacaggagaggagagcagttgctgtctctttcatgctttccctctcatcagctgtcttcattttaaggacaatcactttaaaagcttgtattcctgtttgtgtgtgtctgtgggaggttggggggagctgctgcattggtaagaaagcagctcccccaacaactttttttttttttttttaaactgctctgcatgatggaagccagcttggagacattgacataaaaagcacaagctacttgaatatttttaagagaccaagaaataacaagggattcagggagttattttgagacagtttttgggaaatttaatataggtgaagagtgaattttcatcaaacgattaaaaaaaagtgaaacaaccttggttgcagaatctagcaagatggttatagaaacagattttttttttccagccatttccattctttctttccattcttctggttctcccctcacttt

SEQ ID NO: 24217 - DNA, 1005 bp, Homo sapiens
agcagtccctggccggcgtgaactccaagtcaggagtctgcagtggtgacgtccctcttgagtgtcctcaggtaggctctcccttacagggatgtggccagggacagggagaggctctagagttgacgtttttagtagtttttctaaattgtttatcttttttgccaacattccattttgggttttgcttgtgattgttaccttatttcacatgtgtgagtgccccctccctttattgaccacatagcagaatgccccgtccgtaaatgtcacgtttccatagagtactgctttccacttgggcccctgacggtgctcacagggaatgagtgggaaatgcagcagatctgacagtgagagcccagtcactcctcagtcagacttgttttatttagtgccttccggaatatgccacttatgatcttacccagaggttatgttgaagattttgttgtgttcacaaagaccaacgtcagaagtacttgggaaaggcagggatcccaggagccagagacaggactgtcttccctgcctggagtctgggtctggtacaggcctttcttgtgggagaagctaaatgtaaccgtatcttccaacctgagagctcatttagtaacgtttttgtaatacattggtcattttcccagtcgttaagtaccacgtctcggcggcgtgtgcttagaacagaggtctctggaggaatcactggggcgtgctcatgtgtgggtgttgtgctttcatggctgggttttaacttccggccttggttcctttggcagtgacatggagggagagggtagatgaagttgggtgtgtgaacttggaattctaaggacagtcctgcacaggcaggacagtaacacagacctggttgccatgccccacagaattcagtgggaaaacatgctcagcatttgtgggacaccagtgtcaccctctccaccactgcagtaagatcaggagcccatctcccacctgagtctcaattccaggaaagagcatcag

SEQ ID NO: 24218 - DNA, 1032 bp, Homo sapiens
aaataaattaaaatgtgtgtgaagtaatggtaagggccatggaaaaagagaaaacagaagaaaggaatggagagtggtgcggcagctattttatatgaggtggggcaggtttggcttggcagagaattggatggaatcagagaaggaatatgagagaggcagggagagcaagggaggggacatttgaatggcggcttgaacaaagtaacagaacaaagagtcctgcagagagctggggaagagcattccaatgcgaagaccccaaggtgagaatcagagtttggaaaaactgcccagggtcaaggtcttttaggctttggtgcagctttggatttggttctgtttgggtgggaagctgcactggggtttgcagagaggactgacacaaatacctttagtttttaaagttccccaaagcgagtgccaggagggtagaacagagagactggtagactggagaggtgctgttggtctggagtgaagtgcatgggagagaaggggtggatctgaggcatattttgaaggcaagtctgtggggtttgctgctggaaagaatggggagtgagagacaagagcttgagggatgagtctcagattgggggctgggtcagcccacttaatggttgtctaatacccacttactcagaagggcagactgcgggaggcacaggaggtagtttgtttatttgattggtttccttttgtttttcatggggagaatgaagagcttagttttagacgtgagatttgaagtgcatgttagacatccagatgcagatgttcaccaggtagctgggtgcaggagtctggcatttggggatagagcagggtggagaccaacatttggcagcaacagatggatgacactcaaagccaagagggcggatggaggggaggctcctagacggcctggctacccctccatctttagttcagaagcacaagtagagtgagccagaaaactaagaaggaagggtcagcaagggacaggcagcagggctgtgtgatctccgcgcagctggtggacggtgt

SEQ ID NO: 24219 - DNA, 1055 bp, Homo sapiens
cttgctagaatgcagattgccccagcttgctgacttcgaatctctggggtagggctctgcaaccttggtttgaagaagccctctgagtcctttttttgttccaaatcctgagaacctatgaactcctgaataattctgatgcgccaatttgagaaccactacgttgtggagtatgcacttgattcaagcccttttgcatactgttgtgtaatatggtaaaattctgacttaaatgtatcactcagtcacatcaggtatgacactatggaaagacaaagaataacaaggacaatattctacaggtctatatggtgaggtattacatgtgactttaggaaatacatttggggatagggagggctaaccacacacatgcatactaactggaaagtggacagggaacgctccgtttgcctagattaggtagatgggacttggacagctgctctgtagttgatgattgacttttcatttatgtaaataagattacttccaaagttaatgagatgaatatttgaacatgtcagtgtggattggcttcaggcctgtggagtaaatattttatagagtgaacattgataggagaataggaaaagctggtgagactcttcacacttggggcaaggaagagataatctgatgtaaaaacaaagaacatagggtcaactgacagctagcagcataagtataggcaggagtaatttttattaaaagaaggctaccttagacaactagggcaggtgaccaaatagaatggtaaaactgaaaggcagtttttctgagataaaaacagagaaactattaatcagtggatcacgatttgcctctaacccatttgttctcacttttgggaggtaaatgaaccacttctgtggacagaagagtgccttctgtaaagaagtaaaaggggaaaaacatgtctttaccaaaagaaaagaatgatacaacttgtgataagaaaccaacagggtgacctctctctgggggtagaaggagatgtgtagattattgatgcttggagacttcagcgtggctggagatcagtccagggtctg

SEQ ID NO: 24220 - DNA, 1034 bp, Homo sapiens
ccaagaagaggtgaaagagttgatgtgccagattgaagcatcagctaaggaacatgaagcagagataaataagttgaacgagctaaaagagaacttagtaaaacaatgtgaggcaagtgaaaagaacatccagaagaaatatgaatgtgagttagaaaatttaaggaaagccacctcaaatgcaaaccaagacaatcagatatgttctattctcttgcaagaaaatacatttgtagaacaagtagtaaatgaaaaagtcaaacacttagaagataccttaaaagaacttgaatctcaacacagtatcttaaaagatgaggtaacttatatgaataatcttaagttaaaacttgaaatggatgctcaacatataaaggatgagttttttcatgaacgggaagacttagagtttaaaattaatgaattattactagctaaagaagaacagggctgtgtaattgaaaaattaaaatctgagctagcaggtttaaataaacagttttgctatactgtagaacagcataacagagaagtacagagtcttaaggaacaacatcaaaaagaaatatcagaactaaatgagacatttttgtcagattcagaaaaagaaaaattaacattaatgtttgaaatacagggtcttaaggaacagtgtgaaaacctacagcaagaaaagcaagaagcaattttaaattatgagagtttacgagagattatggaaattttacaaacagaactgggggaatctgctggaaaaataagtcaagagttcgaatcaatgaagcaacagcaagcatctgatgttcatgaactgcagcagaagctcagaactgcttttactgaaaaagatgcccttctcgaaactgtgaatcgcctccagggagaaaatgaaaagttactatctcaacaagaattggtaccagaacttgaaaataccataaagaaccttcaagaaaagaatggagtatacttacttagtctcagtcaaagagataccatgttaaaagaattagaaggaaagataaattctctta

SEQ ID NO: 24221 - DNA, 1873 bp, Homo sapiens
gcgattaaacaataactcccattctgccttgcccccagcccctagtaacttctgttctactttttgtctctatgaatttgcctactctaggtacgtcatataagtagaatcatatatttttatccttttgtgtcttgctaattttacttggcataatgtccccaaggttcatccatgttgtagctatatcagaattttgttcctttttatggctgaataatattccattgtatgtatatactgtacttgtttatccatttatctgttgatggacacgggtgattttcaccttttggctattgtgagtaatgtcacttatgaacacttgagtactgtgagcactggtgtacaaatatctgtttgagtccctgcttttaattcttttgggcatatacctaggagtggagttgctggatcatatggtaattctgtgtttaccttttaggacctgtcaaactgttgaaaagttaactcttatgttatttatattttcagacatagattggaagatggacttatgctttttctctttctctcctttccttccctcccttcctttgttggaggctgaaagaatgagggtcagtgatcaactcagtataccactggaggctatatgagtaaacagcaaactgttctcatgaatgcagaatgttagcaagctgacaactgcgtctgctgcccagaaggaatgctgagggcagtcatgccccaggcacagtgttgcttgtgattaggcaaatctgaagcctgttagcaataatgtgaacctgtgatcagtcaagcagctgaccaatcgttacctactcctccctgctctttctacccaataaatacaaaggctgtagaagctcagggctgcctttgctcactagaagcagggatccccctgaccccttctttaaaacagtttcttttttgttttcatttctgcgttcatccgccttcgttcagtcctgtagtaactgtcactacctacctacctttgttccttccttccttctcccctacccttgacatatagggtctcactgtgtctcccaggctagagtgcagtagagccatcacagctcactgcagcctcaacctcctgagcttaagcgatcctcccacctcagcctcctgagtagctgggaccacaggcgcacactaccgtgcctggctaatttttcattttttgtagagacggtgtctctctatgttgcccagactggtcttgaactcctgggctcaagtgttgctcctgcctcagcctcccaaaatgttgagattacaagtgtgagccaacacgcccagcctttttttcttaagactatagattttcattggttgagaggacttggtaattttaacatggaacttctgaactgaccattttataagatatcgaacatatgatcagattcatattttaccctcattaatcaaaaaatagtaggaacttttttttttttgagagacctagtcttgctctgttgccctggctagagtgcagtggcacaatctgggctcactgcaacctctacctcccatgttcaagcagttctcctgcctcagcctccctagtagctgggactacaggtacgtgccaccacgcccagctaatttttgtattttgatagagatggggtttcaccatgttgcccaggctggtctcaaactcctgacctcaggtgatccacctgcctcagcctcccaaagcgctagaattacaggcataggccaccatgcccagttggaattttctgtaaagtttcaaagatttaagtgaacatgattcttgaagttgttgatttgaaggtacccaactttgtgtgtgagaacaaattggtttatttctactaataagtacaatgttatctctatgatctgt

SEQ ID NO: 24222 - DNA, 1059 bp, Homo sapiens
gtgtgtagttcagtggtgttaagtatgtttatattgttgtgaaatagctctccagaactttttcatcttgcagaactgaaactctatatccattgaatagcaactcctgctttatccccagctcctggcaaccactgttctactttcaatgtctataaatttgaatacagcagattctcaaataatgttgttttattcaacatgattttgttataatgttgatgagaacaaaaaattgattcccagttgggaccagtgtctgtgtggggtttacgtgtttctcccatgtctgcttgggttttctcctggtactacagtttcctcccgcatcccaaagatgtacatgttaggttaattgatgttaaaatcgtcgcagtgtgagtgggtgtggctgtatgccctgtgacgggatggagtctcgtccagggttggttcccatcttgctccctgagctgctgggataggctccagccacctgcaaccctgaactagaataagcagggtggaaaatgaatgaataaatggacacacattattgtaaaataaaaatttgtaaagtatatgatcatcatacaataaatgatgatcaataaaacacgacagtaaacgatgtggtacaaaagcactcaatgaagatgccctgttttccttttctttgcttgttttttgttttttgagatggagtctcgctctgtcatccaggctggagtgcaatgtcgtgatcttggcttactacaacctctgcttcctgggttcaagcgattctcctgcttcagcctcccaagtagctggaattacaggcatgcgtcaccatgcctggctaatttttgtatttttagtagaggcggggtttctccatgccgttcaggctggttttgaactcctgacctcaaatgatcctcccaccttggcctcccaaaatgctaggattacaggcgtgagccacctcacccagcctgccctatgttcttgtttgtttccaaataacgtggtggcaggaggtgctacttgcaattttcactttgcaaacattgattcattgatttaaccaccattttg

SEQ ID NO: 24223 - DNA, 1041 bp, Homo sapiens
gatgttgtctcaaaataaaaataaaaaagataccatcatgaagtacttttcaacagtttcaataagcactaagttttctgggaatgccatgaaattataaattgagtgaaggatgaaatttgcttggactttatgctttattttcataggtggtactaacattaccacctatgaacattttgcccttaattgttcctttatattctatttagaaactcaaatcctttaagacaatggttagaatatattaaaaaggggtgttttttgttgtttttttgttttgttttgttttttagatggagtttcattcttattgcccaggctggagtgcagtggcgtgatctcagctcactccaacctctgcctcccgagttcaagcaatgcctcagcctcatgagtagctgggattacaggcgcgcaccaccacgcctggctaatgtttgtattttttttttttttttagtagagaggggtctcaccatgttaggcaggctggtctcgaactcctgacctcagatgatctgcccgcctaggcctcccaaagtgctgggaccacaggcgtaaatcaccacgcctggcccaaagggttttgtttttaaatgagagatggttagtaaactaatgttttcctgagtgacatagggcatatacatagagatgagcatatacatagagatgagtatgatgaacatttggggttataaatgactttcataacaaggacctatgaagagtatataaaggtggagacactgattagcacttgatagattgggtaaatcaagttaggtgaaattatcccagatttttttaaagtcccgggaggaaaagatacgcaagtgtattgggcattgaacaaattttttaaataaagatctatgtccattcagaatagtctgtggaaagcatttatcctgttattttgttgttgctgtttcttttttttttttttgagatggagtcttactctcgctcaggctggagtgcagtggtgtgatctcagcttactgcaacctctgcctcctgggttcaagcgattgt

SEQ ID NO: 24224 - DNA, 1030 bp, Homo sapiens
gcagccagaattttgagattaattttaataatttattaatgaatgcaccagcagagaagaggtgggaaggatatggtcgacaagtggtaggagtaaaaaattcagctgtggggaaggggtagcttttgcttagaaagttcaccacagacccctgccctctaagttatggtgaattctgtggaagtgattagagtggagaaaaaggaacaaagagggttggaatccagacgttccatgactaaccccaagatgactaaaccagctactgaatgcacccacagaaagggaagtgacatttactgagaacacatttagtgttgctgaacgcttaaaatgctttctttgtgttctcagtccttaccagtctgtgaggggggtttattttgtctacattacagatgaagaatctcacctgcaaatgaagaaagttggctggccgacaggagatcgtttgaaatgaaaggattccagggtttctttctactgagcgtattcaataagcagggcttattatactatctagaatggtgctatcctgtagaaatacaatgtaagcagcatgtgtagttttaagattttctagtagccatttaaaacaggaaaaaagagatagggaagattaattttaataatatgtttaatttaacccagtatatcaaactgtcatcatgtccaagctatatacatatcatgtcatcagcattttaaagttaccaggagaattcagtgggtactttaaagtccatctgaattcagactagccacatttcaagttgctacatgtgactactggctaccaaagtagacagcatagctctaaaaaaaaggtagacagactcatcctaaaaaaaaatcgaatgtagaggccctgctttgaagtcattgagaggaattatggtggggcaagaaagcagcttcacctgagatggaaagctctgtggaaggaaggtaccatacataaaagcagggctgctcttgaaagaatgtgaccatatcatgcaaggacattactgactgaagggctatttat

SEQ ID NO: 24225 - DNA, 1035 bp, Homo sapiens
acataaattttagaattgttcgttcttctcttctcttctcttctcttctcttctcttctcttctcttttttcttcacttttctttcacagagtcttactctgtcacccaggctggagtgcactgatgcagtctctgctcactgcaacttctgcctcctgggttcaagcgattctcctgcctcaagcctcctgagtagctgggattacaggcacccgccaccatgctgttctgtgcgggagatgcctgaggggggaagaaaaacacacacacaatacctttaagggtaaacaagctttatcccacgtaaatggcaatgcagatataataaacaaatgatataataaacaaattgcaatgaaaaggggagaagggaaaagatatatatatatattttcttacactcaccaaactatggaggattcatcaccagaccgggaagcaacagcctgggctccagagtcagacacttgtccgtgcacagcgagggaaggtctcatgaagtttcggtgcagtctgggactctagctgttttcgtaacaagttgtttggcatgagacccagtcacgagtgcccttcgtgactgggcttaaggaacacaaaaaggtcacaacttgtttttgcgattgtctattgttttttaataactaacgtgtaagaatagattgaaatagagatttctctgaaacagcgatggatgaatgcctcaaggggctcactcaacctgtttcaggacttagtgaccattgtttgtgtccatgttcaattgagttcaaatttaatatttaacttttcctccacacacatgcctggctaatttttgtatttttggtagagacagggtttcgccatgttggccaggctggtctcgaactcctgaactcaggtgatccacccaccttggcctcccagagtgctgggattataggtgtgagccactgcacccagcctagaattgtttattctatttctgtgaagaatgtcattggtattttgataaggattttattgaatctataaattgctttgagtagtat

SEQ ID NO: 24226 - DNA, 1050 bp, Homo sapiens
cgtcaggtcctggccttttctttactgggagactttttattatggctttgatctcgttacttgttattggtctgttcaggttttggatttcttcatgattcaatcttggtaggttgtatgtatctaggaatttttccattccttctagattttccgatttattggcatatagttgctcatagtagccactaatgatcctttgaatttctgcagtatcagttgtaatgtctccttttcatcgcctttttttttttttttttttttccacttgagacagagtcttgctctgtcacctaggctggagttatcttggctcactacaacctccacctcctgggttcaagtgattctcctgcctcagcctcctggctagctgggattacatttgacagagttttagctcttggtcaggctggtcttgagctcctgacctcaaatgatctgcctgctttggcctcccaaagtactgtgagccaccatgcctggcctccttttaatctctgattttatttatttaggtcctctatttttctcagtctgactaaaggtttatcaattttgtttaactttttaaaaaaactttttattgaactttattatttcttttcttctattattaattttggatttggtttgctcttgcctttctagttccttaagatgcattgttaggttatttatttgaagggttttttgttgttgatgtagacatttagagctataaacctccctattagtactgctttccctatatctcataggttttagtatgttatgtttccattatcatgtgtttcaagaaatttttcattttccttaatttcttcactggcccactagtcattcaggagcatattgtttcctttccatgtatttatatagtttccaaaattcctcttgttatttatttctagttttattctggcctcctattttttttacagcgtgtgagctaagaatattttgaccttttttaatggttgagaaaaaaataaaaggatgatatgaaaattatatgaaattcaaatttcagtgttcataactaaagtt

SEQ ID NO: 24227 - DNA, 1018 bp, Homo sapiens
tggtatgaagtgttctcagaggaaccgaaatcggtgtggtcacacatcatcagtgcctcttcatacacccacgctctcctgaagtttgctgtttgtattgcttccagtgcgtgttgctgttcaacagtacccttggtttcagcgtagttgctatgatgaagaaaacctgttagaatctgccttttttttttttccagaactgttggaaacattgaataattccatgtactctaaaaggaaataaagtcttttgggtaatttggacccaaagactcctaaggaatctaggaattcagttacatagaaggtcacttctttcactagcttttgcctccaaacctgcaggagaaaaccagctgaagaggaatactcatatgagtggggactgcacctgagcacctcacgaggctcctttcagaaccctcaaaccgaccattcacaatattcacgtggactaggtctgggtcatttggagagagagaaggtgtgggctggctgaggtgtctgggtggtttctagtcagtgtttacactccggggcttgcgctgcggctcctgcgcctgtcatgcacccagtttcccagaagcttccggggttaggttgtcagtgttgagaggcagtgctagttcagacttgaccttgtgatggtctgtgggggagaatgttttaggccctgggacagtgcagtttaatgactgaaacaggaatctttgagtcaaatcaacttgggttggatccacacactcttattggttgtattgtttggtcaagtcgtttaactgctttaagactcagtttccccatctgtaaatgggtataatcacaatacatgcctcatagggttgagatggaggttaataacacataatgtgctgggtaggtactccaacgtcagttgttagtaataattatattacataaatagttgagagactgagctttacaatacaagcaaacatttttatgtcctagcttttttcttttgtaaactcgtaaaagtctttattattagagtcaa

SEQ ID NO: 24228 - DNA, 1029 bp, Homo sapiens
tttgttgcaactactgaaaatttcttagatttgaggttctgaaagcctctacaacattaagcctatgtgttaaaatactgcattaactgaagggtttagattttccctgttcctgggatgttcctgttttactgatgacagaaggctgcagtaaagagagacttcctttttttaaattacatttactgtttagtactttaatttggaggtcttgatttaagtgtttgaatattctgattagatggcgggaaggctatctatactttgtgtactattgttctttttcctacaaactaacttccagagtttattttaaattctctatttaaatgtaacaaggacaaattgacaagcttcaacttctctattaaatttgtatttgtcacagacagctatactacagtaactgtaatttgctaaagaaacatttattttaaaattgttgactcaccaatttttgaagagggtagcattaaaggactattattgacactaacattattagaacttatcgcttactatgtcaggtgtctcttagctacatttaatgtattaactttgaattgactggattaaacaatttaaaagtctcagagtttaaattgttaagaagtttgtatgtgaggttagtgaaaatattgagctctatattgctaaccagatagacaattggaagtgacctctgaaaccaacatttattggtagactccagtctacaatggatccaagagtgaagttaccaaaaacagttttaatttcagatttcggggtttggaggaatttccttttttaaaaaaattaagttatataaaaaaaattctaaaccaaccttttctttattttcagacaatagccaaagtactcatgagtaaaataacgtatatgccaaggaagtagttatttacatagttacaatgctctttcaaacaactagatttttttttttttttttttgcttagaatttaattaaaagaggaagaataattcttaagtattgcctgttctagttgtttaaagagaaatatttt

SEQ ID NO: 24229 - DNA, 1058 bp, Homo sapiens
cacccaggctggagtgcagtggcacaatctttgctccctggctaaagtgatcctcagccttccgagtagctgagactgcattgaaatatttttttaaaaagcagaatacttatttgaccatctatgcttaaagcaatatcagtaggtttggtgtccatcataagcagctgtgcaattcaacagaaacgtattgccatcacctttgtctatctatgttgccatctgctattatagctgtttaaaggaagactgttgtgtggtattgggaggaaatggtacattttattgtcagaattctaattgatcggggtaatgagaatgaaaaaatggcagtgttatagggaagaagtattcgtatgcgtggaactagaaacggatcacaacttacatgttggcttctaatttgtaatgtttcaaccatgttcggatggaaagaagatgtataggattgtttccaaaaaagtttcttctctatgaatgaacttaggatggtcttcagagatatatataaagaaagagaggagacagagactgaaattgactgcttcaactgtagtgagttaactttcactcataatagaaatagctagaggttggattatttcaaaaagccagtcagtgtttttagagcttctgattctcacaagaacagatgaaaaaatgcaagtatcagttatagagaagactttccatttgagactctcagaaaaggtgtgggtggttactgtgtttgtttgacattgcatcctttaatgagcttgtttagtacgtgaggaagtggaactttaccttgggcctctctgaagcccagtttcctccaaatataaaaagaaaggcttggtccattcagaagctttaaagagtcatttttttcccagacaggatttccctgtggattgtggtatgtgaaacaaagtcagtgattctccatggaggtgatgtgaggagagaaggctatgtggcctagactgcagattcctttcctgaggtccttcctttgtcccatggcagctgcagaggcgtcttggtttaggagatcaagatttgaaaaccaggtg

SEQ ID NO: 24230 - DNA, 1032 bp, Homo sapiens
aataatctccctgagctccatcgtggtgtttctcccaccaagcttttcttgtgattctgtcttgcacaccaccgttctttagaagtagtatttcttggaggtttgtgtttgagatggggactggatgctggctgtagcctctttgtggctccaaaggaaagaggagggaggattgtcctcaaagactcttacaagggtagagagggaggaagcaggctgggcaaagctcaaggaagtccatgcaataactgacctgtgtcaggttggggtctccttctagcaggatgtctgtagggggagggaagaaggactgcagggctctctggtgtgccagctgccagctctcatgcagcactcagttttcagtgactctcatgttaattcagcatgccagctgttcaatttaatgtctataccaatggggaatgggagagaggtagataatgaggaaagagaagaaataatgaggtaatatgtcatctcctaaaagctcattttgtaacagaaattgtccagactgttactgcattacattttaggtttttctcaatcccctcagaaaacaaagaagctcatacagaacattgcccctaccactagcaagaggcaaatctttcagccctcccaaggctggctttcaggctcctgaagctgtgccttctgaatgtgacaccttgtcctggcgacatctctggagagacgccacacacatcagtgttaagtggtacacatggtccttttcaccacaaatgtcctgaaatcgagggactatttagaaaacaggcggctgcttcattctattgtgggagtgatgtgacaggaagggaggctcaggaatgaccatgacaggaaagcatgtggagcactcacagtaaagcttcacagaagccctcacggccaggcgcagcagagcacagcgactgcccaaggagctgctgtcctagccaccctcccagtcatcttcaagaagaacaaaagttcactgatcgcctcagttcctttattctcctcttgttcttgaggactgaccaa

SEQ ID NO: 24231 - DNA, 1122 bp, Homo sapiens
aaaaataaatgaatccaggagctggggttttgttttgttttattttgttttgttttgagacggagtctggctctgtcgccaggctggagtgcagtggtgcgatctcggctcactgcaagctccgcctcccgagttcatgccattctcctgcctcagcctcccgaatagctgggactatgagtagctgggactacaggcgcctgccaacacacccggctaattttttgtatttttagtagagacagggtttcaccgcgttagccaggatggtctcgatctcctgatctcgtgatccgcccgcctcggcctcccaaagtgctgggattacaggcatgagtcaccgcgcccggcccaggagctggttttttgaaaagatcaacaaaatagatagaccactagtgagaataataaagaagaaaagagagaagaatcaaatagatgcaataaaaaatgataaaggggatatcaccactgatcccacaaaaatacaaactaccatcagcgaatactgtaaacacctctgcacaaataaaccagaaaatctagaagaaatggataaatcgctggacatgtacaccctcccaagactaaaccaagaagaagtcaaatccctgaatagaccaataacaagttctgaaattgaggcagcaagtaatagcctaccaaccaaaaaaagtccaggactggatggattcacagctgaattctaccagaggtacaaagaggagctggtaccattccttctgaaactattccaaacaatagaaaaaagggactcctccctaactcattttatgaggccagcatcatcctgataccaaaacctggcagagacacaacaaaaaaagaaaatttcaggccaatatccctgatgaacatcaatgcgaaaatcctcaataaaatactagcaaacggaatccagcagcatatcaaaaagcttatccacttcagtcaagtcagcttcatccctgggatacaaggttcattcaacatacgcaaatcaataaacgtaatccatcacataaacagaaccaatgacaaaaaccacatgattatctcaatagatgcacaaaaggcctcgacaaaattcaacagtgcttcatactaaaaactctcaataaa

SEQ ID NO: 24232 - DNA, 1128 bp, Homo sapiens
aagtatgggtatcatcaaattaagatttttgattctaaaattattaggttccaagaccaaagattaaattaataaaaggtgaagctggacaaaatctgctggaaatgatggcctgtgaccgactgagccaatcaggtaatagtaatattaaactaatttaatttaaaaagaaaaaggaatttctgttaaggcatatcttatgataaaatcttcatctgtccaggagataatttgtcaaaattatttctttttgccgtatcagttaagagcaataggtatggaagagatgtgaaaaatagcacattctttaaaaaaatgaatatttgatattgtttgttcctaggtggagaggatttcttaactctttctttatctggctgctagagcctctatcctgaatatttagtcacttcctgaactaagtataattattggtttgccaaccatttaacaccagctgattctaaaaacactgctgtggggatataaagatgaagaagatacggatctgtcttaaagagctgagagcgtagggaggaagatagaagatatatacttaccttatattaggctcttggaatttgtggattttttcccccatttttggcttgggataaatcctaaaggtctgttgcgtattacctgtgattttgctaagatacaaactttaaggtagttaggtggccattgaatcaagcagtgaactgaagaaacataatgctttctataaggagcagttttgatataaaattggatgaattttgtaaagagcaagatgtaatattaaatcaaagttattataagctttggtgtatagttaggctgttggccagagctcacattgctcttttattccatagctcacttttttttgtgggagttaggctttcagtccttaaagtgactttctacttttttccttttctcttttccttctacccttgcagggctctcataagtgcctttgcgtggtgtcacagttagataaaaattgcctgtattttttttaatgtctttgatctgggcatcccgagggtgcctctgtaagtgtgctgagacacaactgtgtagtggtaaccaaacctaattgcccagcagaattaactcgaaggagggtttttaaaaaaa

SEQ ID NO: 24233 - DNA, 1065 bp, Homo sapiens
ggtagtcttcagcaccttacttggcttggcttacagtggaattcattgcctgctttacctggaatccgaaaatggctaaaacagcttttccatcatttgccccatgaaacctcaaggcttgaaacaaatgcacctgaatcaatatgtattttagatcttgaagtaagcaaagattttaacaaattaaatattctgaattttgtttaattttttttctaacttaacttttccttaaataaaacaggtatttctccttggagtagtatataccagccacttacaattaaaggagaaatgtaattctcaccacagctcctatcagccgttatgcctgccccttcctgtgtgtaaacagctttgtacagaaagacaaaaatcttggtgggatgcggtttgtactctgattcacagaaaagcagtgtaagtagtaaaacaaaaatattgctttcacttagtgcgtaggttttaccggggatttaatcctcatgtgaagatttaatttgtcatgtgacccattaacatatatgtatgtaagccctgaactgtgtatttagaaagcaattttagtaaattgaactattttttagacctggaaacgtagcaaaattgagacttctagttcagcatgaaataaacactctaagagcccaggaaaaacatggccttcaacctgctctgcttgtacattgggcagaatgccttcagaaaacggtgagttttaaagtataagcatttttaaagaacattaccttaattttttaaaatcatgaactttttattgaaagtttttttgttctgaaaacagcagcttggtcacattatgacagatgtgttttttattgctgcaaaatagttaatgtagttaaatataagcacttagaggagcaatgcctggcacacagtgaatgttacatattagctgagctgttactgttattccttaataattaagttctgataattattcagcctgaaaattaaaaaaaaaaattagcacaaggctttgtaggtaagaccattatagatctttctatatacttaaggtgtgttttgtgtcaccatgag

SEQ ID NO: 24234 - DNA, 1063 bp, Homo sapiens
ctgtttaaacattttcatagtgtagacattcaggtaacagagttcctttatgaatttattggagatgggaatttccagtttataaacaaagacatagagctatacactgcttaaattaattgccttgttatttaatggtaatcttgttttctaaattcactagctctcacacataagatatgacagagaagaataatgagatgtttgtctcttaagatcatataaaatctttggaaaatcatttgggttttatattctgagtataaacaatttgactaaaaactattctgtgtgtttaggcatcagaaattgttgaatatgaagaagacgcacacataacttttgctatattggatgcagtaaatggaaatatagaagatgctgtgactgcttttgaatctataaaaagtgttgtttcttattggaatcttgcactggtaagtagatgcagtacttgagctaaaagttttatttatttatttattatttttttaaaagacggggtttctctgttggtcgggctagagtgcagtggcacaatcttggctcactgcaacctctgcttcccaggctcaagcgattcttgtgcctcagctcccgagtagctgggattacaggcatgagccaccatgcgtggccaagctaaaagttttttgttttaaaaacctaatgatttcataaaagcactatttgtatagatttttcacaggaaggcagaagacattgaaaatgatgccctttctcctgaagaacaagaagaatgcaaaaattatctgagaaagaccagggactacctaataaagattatagatgacagtgattcaaatctttcagtggtcaagaaagtaagtagcaggttgttgtatgtacgttcttactgataacccactggtcaatgtttttgcgttggtcttatattttggtaatttcaaaaatactcagtaatatgttgttattaatgcacagaagggatatgtgtgtctaaatgcttatatttgcttgctttgtcttaggtttggtgtgtctttttaaacttgggaatctaggtatatgctcttaaaaa

SEQ ID NO: 24235 - DNA, 1041 bp, Homo sapiens
tctcctgcaacgggaattctatcgcccaggggtgatgattactttaattacaatgttcaacagacaagcacaaatccacctttgccagaaccaggatatttcacaaaacctccgattgcagctcatgcttcaagatctgcagaatctaagactatagaatttgggaaaactaattttgttcagcccatgccgggtgaaggattaaggccatctttgccaacacaagcacacacaacacagccaactccttttaaatttaactcaaatttcaaatcaaatgatggtgacttcacgttttcctcaccacaggttgtgacacagccccctcctgcagcttacagtaacagtgaaagccttttaggtctcctgacttcagataaacccttgcaaggagatggctatagtggagccaaaccaattcctggtggtcaaaccattgggcctcgaaatacattcaattttggaagcaaaaatgtgtctggaatttcatttacagaaaacatggggtcgagtcagcaaaagaattctggttttcggcgaagtgatgatatgtttactttccatggtccagggaaatcagtatttggaacacccactttagagacagcaaacaagaatcatgagacagatggaggaagtgcccatggggatgatgatgatgacggtcctcactttgagcctgtagtacctcttcctgataagattgaagtaaaaactggtgaggaagatgaagaagaattcttttgcaaccgcgcgaaattgtttcgtttcgatgtagaatccaaagaatggaaagaacgtgggattggcaatgtaaaaatactgaggcataaaacatctggtaaaattcgccttctaatgagacgagagcaagtattgaaaatctgtgcaaatcattacatcagtccagatatgaaattgacaccaaatgctggatcagacagatcttttgtatggcatgcccttgattatgcagatgagttgccaaaaccagaacaacttgctattaggttcaaaactcctgaggaagcagcacttttt

SEQ ID NO: 24236 - DNA, 1032 bp, Homo sapiens
agtagtgaaaaatcaaaaccatttgcattcggcaacagttcagccactgggtctttgtttggatttagttttaatgcacctttgaaaagtaacaatagtgaaactagttcagtagcccagagtggatctgaaagcaaagtggaacctaaaaaatgtgaactgtcaaagaactctgatatcgaacagtcttcagatagcaaagtcaaaaatctctttgcttcctttccaacggaagaatcttcaatcaactacacatttaaaacaccagaaaagggtaagtactttgttgttaaagttaagcacaatttttctttcttttaatgtttagcttgatgcagactctttgtaggatactaatgttgggatataaatgatgctttgtgaacacccccaaaatatttgagcaattttttttctcccttaataagttcacggtgaggtttcaaagagcaagagaacttagtttaagacatttcagtaactggaagatacttttatcatgctagggcagagcaaaagaactcggtacggtatacggactcatgcttgaatcatgcacattaacgtgagtctttttttaaagtgttcattttcatttgttcagtttcttttgtcactcagaaaacatgatattgaggctgggcacggtggctcactcctagaatgccagcactttgggaggttgaggtgggcagatcacttgagctcaagagttcgagaccagcctggccagcatggtgaaaccctgtttctactgaaaatacaaaaatgagccgggcgtcgtggtgcgtgcctataattagcagctacttaggaggctgaggcaggaggatcacttgagcacaggagatggaggtagcagtgagctgaaatcatgccactgcactccagcctgactgagtgactgagactttgtctccaaaaaaaaaaaaacaacgtgatattgagatgttctcattttatatgttgtatgtcagtcttgctcatgtattaaatgagcaaagaatgaaactacagggataaatgaatatg

SEQ ID NO: 24237 - DNA, 1025 bp, Homo sapiens
atctaagttggatattatttaatgctaaaaatatgtggcagaaagaaatgctatgggtatcaagaaggagtaagcattttgaaataaagatgtatccatatataacatgaaatgttgaaataattgtggagagaaaaaataattatgcctaaagtatctgtatgttacataattagtatttgggagcttgactttttttaatacagttttctctttctctacttaaataagttaatctgtgtaacacactttgaacagttctgggtaaataataagtactcaaatgttacctattatcattattattactatttcatgttgcactcacaaaatctagttgatctagatttaggatttagacatgagctacgttgaatgtagggtaaggaaagtgaaaattgcttttaaggtaataattataaatttatggaaattattttctttttaactgagttttatcattttttatataatgacctgggtataactctaaactataatctaaaggttttggactatgaaggttttcataacattggacccctagttgtgatctggtctgaaactatgctgtccagcacagtagcaacaggccacatgtacctattgagtacttgaaatggggctggtctgaattgagatatgctgtaagtgtcatatacacactggctttctaagacttagcatagataacaaaaattagccgggcatggtggcgggtgcctgtagtcccagctactcgggaggctgagacaggagaattgcttggacccggaggcagaggttgcagtgagccgagatcgcgccactgcactgcaacctgggtgacagagtgagactccgtctcaaaaaataaataaataggcatggataaaataatgtaaaatatcttaattttgtgtgggtgtatgtgggtttgcagggggcgagcctgttgcccaggctgtgagtgcagtagcataattgtaactcactgtagcctccaactcctgggctcaaacgatcctctcacctcaggctcctga

SEQ ID NO: 24238 - DNA, 1026 bp, Homo sapiens
aaggatatcaagcaagaggaactcacctactgctgttgggagagtaaattgatacagccactttggaaaacaatttggcatcactagtaaagttgaatctgcacatataccctatgatctagcaattttgctactacttatataccctcaggaaacttttttttgttttgttttgttttttttttgagatggagtctcgctctgtcgcccaggctggagtgcagtagcgcgatctgggctcactgtaagctccgcctcccggattcacgccactctcctgcctcagcctcccgagtagctgggactacaggcacccgccatcacgcccggctaattttttttttttgtatttttagtagagacgggatttcaccgtgttagccaggatggtctcaatctcctgacctcatgatccgcccgcctcggcctcccaaagtgctgggattataggcgtgagccaccgcgccctgccaccctcaggaaactcttaaacttgtacaccagaagccacgtacgagactgtagcatctgtatagccaaatcagctcaaatttccacctataggaggatgctgtatacagtgtttgcaaaataggatatacagtgaagatttgtgaacctgtttaaaagaagaggttatagaaattatgttaatataattacatataaaatataaaaggcaaaacaagcaaggacttttaagattaagtagtggagattaaacagcaaagcaaagcagcatgtaacacttacttgcattagtggtaaatttggtttaggggagagaggggaacatgattaggggcttttaaggttgctttccatttcttggcaattagtgtctttttatatcctttaaaatattttattttgaaatcatttcagacttacagaaaagttgcaaagatagtgcaatcaattgctgtatacccttcacccaaattttcgatgttaccactttaccatatttgctatatttttctttgtctctcttgaaactttttaatgttatattttgtacttaaa

SEQ ID NO: 24239 - DNA, 1018 bp, Homo sapiens
actctgagaatatttgaaacaataagttaataaagtttataatgcaaatgttattttctttgcagttgccttgccaactaatacgacctcatcgagacctcggactgagtgttgtagtgatgcaggtgactctcctttgaaacctgtcagctgtccaaaatctaaagcatcagacaagcggagtttacttccacatcagatcagtcagatatatgacgaattatttcagatacatctgaaattgcaggtaagaactaaatactgaatcgagaattcagaaatatttatgttctaagaaccaagcatttacgaaatttgaatataatatatttcattttaattactttagataagtttgtcaagagaaggacggaaggggacaaactcaaattatagggactaatgaagggaaaaatacagtggctgagagaaaatagagacagtggcgtttttatttgtaggtgtgtgtttcagactgtcttgtattttatttgatttccatcccatccttacttaagtaataaaatctgataaagtatggtttttgatgtagatgctctagctttattgttttaagtacttatatataaaaagtcttcttgtcaactctcatcaaaattgaactcttaacatttgcttattatctgcctttcgggttttttgtttctaaagtgtattttttttttttttttttttttgcgatggaatcttgctgtatcacccaggctggagtgctgtggtgtgatcttggctcactgcggcctccgcctcctgggttccagtgattctcctgcctcagcctcctgagtagctgggattacaggtgcaccccatcccgcccagccaattttttgtatttttagtagagatggggtttcaccatgttggctaggctggtcttgaacttctgacctcaggtgatctgcccccacttggcctcccaaagtgctgggattacaggcgtgagccacagtgcccagcctaaagagtataatttatatattaagcatccacgaga

SEQ ID NO: 24240 - DNA, 1131 bp, Homo sapiens
tctaagttatttcacttaggattaatgacctccagctccatccatgttgctgcagaagacatgatttcattctttactatggccacatagtattctattcatggtgtatatatatcacaaattttattgtaagataccataagtaatataataaaaaaataattggatacccaggaataaatctaaagagagatgtgcaagacatctctacttgaaaactacaaaacattattaaaagaaaataaaacctaaataaattgaagatatgttcatggataggaagactcaatattcttcctttccatatataggaagtcagttcttccatatatatatacatatcagtatatacacagacacatatacacatagtcccagtaatgcaatcccagttatagctcattgtactgcatacttaggattttatacttttctttatatgtgttatagttcagataacagtgtacttattaataaaaacattttcactaaaatatatgtatatgcttttaagacatctggagtcttgtacatttttcataaaatgaagtaaatgatcttacaaaccattaatattttagggaaaaacgacaacttcagttgtgatctaagttaatcatgaatgctgtctctgttttgttacattggttagtaatatcaaccagattagatagtagattgggaaacccttagtatgaaaccagttgaaggtgtatattgaaatatctaactttttctaccctttagttaaatgaagcaagtgaagaaaacaggaagatagacattcaggctaaaagagttcaagctcgtttagataatttacaggtaagttgcctgttcttctctacagacagaagtatgtttttagatgattacctttgagtttactcatttagatacaattgttctttaattcacgcatatatactgttgcagaggaagtacgagtttatgacaatacagagattgaaaggaagttcccatgctgttcatgaaatgaaaagtttaaaacaagaaaaagcaccagtttcaaaaacttacaaggtaagtttgaattatgatttgatatgattgaaaatttctcggctgggtacggtggctcacacctgtaatcccagcactttgggaggc

SEQ ID NO: 24241 - DNA, 1049 bp, Homo sapiens
ggaactgggggaggggatggggatttaaaactggaaacagtgttaaaagtgactgatccctgcttctagggtgaaaaagtccaacttacatttaaaatgaatgccagggcaacatcaaattataagcattcactacaacattatgtagaacttattcagtctattggtatggtcattttaccggtttgaataaagcacagaagctttacttccctttttatcccttaaccttttctgtatacgcttagaaccacattagagaatgttaccatttttgcttcaaccgtcaaacagaatttatagaactcaagaagagaaggaaagtttattgtatttacccatatttttgtttactatgttcttctctccttccagatgtgccacagttccctctttcattatatcctatctatctgtttagaggacttctttatctgttctttagagtagttatttttctttttcttttgaggcagggtctcactctgctgcccaggctagagtgcagtggcatgatcttggctcactgcaacctccgtctgctgggttcaaaccatgctcctgcctcaccctcccaagtagctgggattacaggcgcccaccaccatgcctgtctactttttgtatttttagtagagatggggtttcgccatgttggccaggctggtctcgaactcctgacctcaagtgatccacctgccgtggcctcccaaagtgctgggattacaggcataagccaccgcacctggcctagagtaggtttgctgatgacacaaactcttagtttttcttaacatattttgatttcctttcaattactgaaggatattttcactgggtatcagattctagtgtgacagttctttactttcagtacttgaaaaatgtgccaattctttctgccctccatggtttctgataagaaatctgtcatttgagttattttccccatatatgtaaggtgtcatttctctcacacacatttgtctttagtttttataagtttgactatgatgggtcttggtgttgatctctttattttagcctgt

SEQ ID NO: 24242 - DNA, 1022 bp, Homo sapiens
attattttgcctccttatggttatggttctcaagattacaatagactaggtggttagtgtgtgaaaggtcacttacgagaagcagggattagctcaaaataaagttcgccacagacctatctccaaatcttaaaaaaaaatacacacacgcttacatacccacaggtaaatggattctaaataagaattttagctgacacatcatagccacacattaaagcatagattcactaaagatcaaataatattagtatcaagaatttgaagccaatttaatataagaaaaattattaatcatttatcatttaactaagatgtttgaaataatatgtcaacatacattatatcatttaataacatgtaatgttcatttctgataatatgctaagaaaagcaaaaatgcaataagggatatttatgtgaaatagaagggaattaggtgctctctgtcaccacttgtgtgcagcagttttggacatctgtaatgagccatgaaaaaatgaagtatgaatattgggaaggagtagagaagaccgttaatttgtggagactctgtattaatcgagggctttcaaagaaatataacagggcataagaatatggataaataatggatggatgaataggttgatgaagattattgctgaagttaaatgtcagaaataaagaacttttattcttcctgcctatgaagacgaagtgttttaaaaataagatgtcccatatggcttaatgtataataccagttaaaattctaatatagtttgcgtaagttgaggaagtgttagggaaatttatgtggaaaaatttgcaacaaatgcgatgatttataacaagtaaaacagcaacactggggcagaggcttagccaactttaaaacaatcctaatatgtaatgatacaaaatgagtaataatttatttaataaatcaaaataggacaaagggaataggaagtccagaaatgaatcaaaattggcacttcatattatgtattgaattaatgactttgcttccctgtgca

SEQ ID NO: 24243 - DNA, 1065 bp, Homo sapiens
attgtggtactgcaaatgcaaatttgaataaagtctattagaggagatagtcaacagtcagtcacatttgtttaccattgtccaggttactctcaaattcagccaggtgcagtggctcatgcctgtaatcccagcactttgggaggccgaggcgggcagatcactggagatcaggagttcaaggccagcctggccaacacggtgaaaccccgtctgtactaaaaatataaaaattagccgggcatggtggtgtgcgcctgtaatgccagctactcaggacgctgaggcaggagaatcacttgaacccaggaggtggaggttgcagtgagccaagattgtgccactgtactccagcctgggtgccagagtaagtctccgtctcaaaaacaaacaaacaaacaaaaaaaacaccaacgctgtgcccttgttgttcaaatcaagtaaataagcagtatctaatggtgatcactactaaagccgtattgtgtttagtgatgcgaaaattttggaagtttggaaatgggtgaatctttgatgatgtctgactgaagagcatttacttgcttgaattttaatgtaaattcagtacttgttggtcagccagtacgatttattagagcgaggaaagattgatcaaagtgtagcaaatacttctttagctgttggtttttcatttttctaggtttgagattggaaacccattttaccatatatttaattttctcatgctatttttttctttttttttttaattttagatttagggggtacatgtgcaggtgtgttacatggatttattgtgtgatgctgaggtttgggcttcaactgaactcgtcatttaggataatggcatccagctgcatccatgttgctgcaaagaacattatttcattattttttatggttgtatagtattccatggtgtatatgtatcacattttctttatctgatccaccactgatgggcacctaggttgattccacatctttgctattttgaatacagctgctgcaataagcatgagagtgcaggtatctttttggtagaacaatttcatttccttt

SEQ ID NO: 24244 - DNA, 1047 bp, Homo sapiens
gaaaataaataaatagtaacacattcacatatctcataatttcaaaagtacaaaagtgaaaagtctgccttcagttactgtttccctccctggagggaacaactgcagacacacacacaaatacatacacatttttactttttcctttttatcacaggaatgctactaagttttatatatattttatatagatatatattatgatcagcattatatcttgaagatcttatataaatgcataatttcttcaattaaaattcattcatttaagcagaccacgattgatggatattttggctgtttctagtctttggctaatataaacagtgcttctgtgaataaccgtatacaaaacttaagtgtgtacatgtgggagcttatttggtagtagtgatttcaaattctgtcagttaattgatatatctccatttcattaggatcagtttctagagattcatctctttgtcttttggggaaaatatttccttgtttcttctttttccttgacattctctgttgatgtttttgtgccatagacaaaataattacctctctaagtcttcatggtctggactcattctggagaagaccctcaccaatcagccctgacagaaattctgggatctttcaaaccttcatgccagtcctatccactttctttgttcttaatagtccctaggcatctagaatatttcaggtcccttcagcttctgagaccatggagactgaagccatttcctcaggcagtccccatttaaggtgagtggttggacacacggtactcccctatccattcccaggtagaagctaaagagctggggtttttgcctgcttactccgtgatgagccagaggtagagggcggggtggctatagtgatcaacaccccaaattgccatgagtggccagagtttgttgggttctgtcagtgctccaagacagggtagacataaaccagttttctgggtagttcctagaaaactttggacattagacacatagggtacctctttctcttcctggggagaagctaggagctgggggattt

SEQ ID NO: 24245 - DNA, 1026 bp, Homo sapiens
atgagtaaaatattaccttattataaattcccttttcctcccctgtattataaatagtgcattatattgattaaaaagatacatgtaaacagattatattgttatattgtttatggttatttttaggttaattaaaggggaattataaaatatttattatgaaaagattctactgagtcactgggttgagaactgttccactagcttagctatgtttttatatatatgtataatttatataaataggaaacctggggctctgagaaattaagtgacttatttaatgtcacagggctagggccagggcagtgataagaggaataactaagtcttttagaagaagaagaggtggacacaagagagaagctccccgctggaagctagaactccagaactgagagattccagagtgggaattactggcagcactaatgtgtctttaggaattgaaaaagcaagctagaaggaaaaaaataaaagtcttgaaattctctcaggaatgagaagtagaaggaacaacatggttcaaaactggaaaaatggcagactaggaagtttacctggggagttgttagttacgaatatggattaccctgctccaagagtgtctttgtccttggactagcactcccctccccaagcctttggcaagttcctactcatctttcaagaaatagctcatcttgagtgcatttcacaccattcctccttccaaaaaggaatgagggtggacttgaaaaaaaatactgaagaggaaaattcatttgggtgtttttcaaagactacctaagtctattcatactattgcttttttttgtttgtttttaaatatttctttagccttatccagtttgagggatgggcaactgaaggtttttggttggtattgaatgttgctgtgttatgttccagcctttgagtcatcagaactggaataaaagccttactaactagacatcatacatttttgtcccgtgtaataaatagcatgttactatctgggagctgaggtgagttttctttaaa

SEQ ID NO: 24246 - DNA, 1940 bp, Homo sapiens
gagactggtttcagacttgcctcgttcagggcacatacagggaatgcggcatggtttgaatctcaggaagaaggccaaggaaggcagtggtgggcaccatagcacatgaaaactgcagggagactacagacctgtggatgtgtaggaggaagaggttatgcacagaggaataccatacaagatctaaggccttcagaagaagcttgggtgagattctgggaaattaagacatttacaggcagccagaggaaacaagaaaaaaagaaaaaaacagcatacacaggcccagacaggatgcatgcccagacaagacctgagatgaccttaagcacactccctacaccgttcccaaggctcaggtgcttgataagtagtgaaggcctttcatgtcagtcttcaaagactgggaggggtggttttttcaaatgtcagattttcagcaaaaaaaatcgtagaacacgcaaagaaaggatgaaacctggctcatccaaaggaacaaaataaatcttcagaaactatcctgtaaagacacacaaattaattggatttgctcagaaaagactttaaaacaactatcttaaatatgctcaatgagctaatgagaaataatgaaatcagggaagtgatacatgagcaaaatttctcagctatcttaaatatgctcaatgagttaatgagaaataatgaaatcagggaaatgatacatgaacaaaatttctgtcaacaaagaaacaaattatttaaaagaaccaaattctggaactggaaaatacagtagctgaattgaaaaatttactagaagagttcaacagcagacttgaacaggcaaaagaaagaatcagtgaacttgaaggcaagttatttgaaatgatcaagtccgaggaacaaaatcaaagaaaaaagaaaagtgaacagagtctgaaggacttacgcagtaccatcaggcagaccagttgatgcattactggagtccagaaggagaaaaaagagaaagggtggaaagataatttagagaaataatagctgaaaacttatcaaatttgaggaaagacacggctctacaaatcaaagaaactcaaggaatccacatttgataaacccagagtccgacatcaagacacattatcatgaaactgtcaaaagtaaaagacaaagagtatctgcaaagcaacaaaagtaaatgtggtatgtacatacggtagactattattcagtctaagaaatgaagttctgatacatgctacagaatggatgaacctggaagacattatgctaaatgaaataagccaggcacaaaaggatatatcttctatgattcctcttatatgaggtgcctggagtagagaaataagtagattggtgattgtcaggtgttggggaagagggaaatgggaaaattaaagttattgtttaatgtgtgcagtttcagaagaagatggaaaaaactctggagatggatggttgcacagtaatgtgaatttacttaataccacagaactgaaaacttaaaaatggttaaaatgataagtgttatgcatatttaacaccaatttaaagaatgaatataaataaacttctagaactcaaaaaattgaaatgaacctcattatttagaaatagccgtcattaatgttaggtgaacattattttagacacgttcctatggttgtgttcacatgaaaagatggatgaatggatagatagaaggaaatacttttacagaaatggcatgcattatacatgttatttaatgaaatagtattcaacaggaaaaataaaatggattagagtcataaatttttaaaattataagttcctagccaggtgtggtgtctcatgcctgtaatcccagcactttgggaggctgaggtgggcagatctcttgaggtcaggagttcaagcccagcctggccaacatgatgaaaccccaactctattaa

SEQ ID NO: 24247 - DNA, 1033 bp, Homo sapiens
agtaaatgacaagggaatttgtaactatataaggaatagctccctaaaaatggcaggtggagagccaatggaacatgagctgacactggctggccttacagccccagaattctaatagtgtgaaatgaggccaaagcaccaggagcagagaacagccaccccactctttcgctgaaaacattctgaggagggtgcaagctgttatcctggaatggcacactcatcacaagtgacatttgcagtctaattaaggggagactcactcatcatcatcacaaggcagggggaagggggcaccacaggatttcaaagaggaattaaaaggataattaagctctgccgtggagtatttagcttgcagggtaaaccaaataggttcgaaaaacagcagcaaacagacacagtaaatgatgatattaaatattcaggacctcattatgatcctctcacagtatgtactacattcgttggtgggaaattgcttgttggtgttaaagatatgactgattttccccctaaagcattttttcagtcatgcaacttgtaatttttacaacctcgctttataagtcagagactttgttttaatgtagtaataaacacagacctgccatcagggagttcagcagtgaactctaacccctggtgtgatcactagcctggctcctgagctcttggcagttacagggatagtacaataatatgccaagaacaatgccagtttattaactttctgcctataaatgttatgtcaaaccattgcagttattgtgaaaatgccaagtctgagtttttctgtttttattcccatttaaatggacaaaccacactgtgttgacttccatagagcacctcaaaggcctggcatttcctatagctccactttctttttgctcacctgaaccctacctgccccaattatagaatcactaactaacatctcattggcagacgagaaactgaggcagagagaggaaaagacaaggcccaaggtggcacaactagaagccagctccctcgacatcaagcccag

SEQ ID NO: 24248 - DNA, 1034 bp, Homo sapiens
agatgtcaaatcttcccagattgatatacagttttgttgcaactcattaaaatcccagcaaggcattttgtacatatagggaagattattataaaacttatatggaaaggcaaaggaactagaatagctaaaagatttttgaaaaaaaaataaaggaaaatgggagcagtccatttgatttcaggacttatatgttattacataatttatacaagaatcaagaccttgtggtattatcagagggacagacatgtagataaatgcaacagaacagcaaccccagaaaatagacctatacaaatatgccaaactgatttttgacaaagtttgaaaagcaattcaatggaggaaagataatttttcaaaaaaatggtgctggagcaattggacatccatagacaaaaaaatgaactttgacccaagtttcatatcttctataaaaatcaactcaaacttaaatgcaaaatataaaactatgtgaacttaaatgtaaaacataaaaactatgtggacttagaatgtaaaacattaagctataaaacttctagaaaaaattgtgggagcaaatctctgggatctaggactaggcaagagagatcttagatttgacacaaaagcatcatccataaaaagaaaactttataattagtttcataaatttgactcataaaaatttaaaacatcattctatgaaagaccctgttaagagactgaaaagataagctaaactatagaatggagaaaacatttataaaaccacatatccatcataggactagtgtctagaatatatttttaaaaaccctcaaaactcaacagcaaaaaaatcatacgataccattgaaaaatgggcaaaagacatgaagaaacattcattttactgaagaggacacacagatgaaaaaaacacaagaaaacatatttaaacaataggaacatgcaaattgagaccacaataagatatcataacacacttctcagaatagctaaaacaaaacatagtaacaccaccaaatgctggcaagcatatggag

SEQ ID NO: 24249 - DNA, 1049 bp, Homo sapiens
gcccccgccatccagaatcgcggggtggtggagctcctccggggtgaggcctggagaggtgaggaagcgtaacctctctctccccctttcctcctgttttggttcccaggtcctcccacacaacctctcccaacaggaaagcctcgggtgctgctcattgttcagcaagtgtcctggccacactgtggggagggcggagcatcaggagaagcacctgccaaaccgcaggcaggggcctgggcccaggagagactgggacaaggcaatccgcatccacagcctgacagccacttggattcaggaatgaacgcagcctttcatggagctagtcacaccggcctgccaagactcctgtgatcctcctctgtgacacagcgtgacagcctcgtaagaggaagtggggcctccagggtcctaccctggggaagccttgtctgcagtagagggggcagcatgagcccctgagaggggctgggattcggaggtgaggcgggggccttcaattttggtgggcgttgggactggcagtgaggctttgagcagacacagcacatcatggagccaacctggaaactgtccccatcgtctgcacccctgcggagcagtgcgaaggcactctgaggcacgtgctgagggtgtctctgcacagggtcccttgcctgcccagcaggtgtgctgggccttgctatgtcctgggtgctgagagtggtgtggactgagcaggtcactgtcccatggagtagggcgggaggcatcaagattccagcactggaaagaatgtttaaaagcccagagagcagcctgcccactaattctgcagatggctgtccacattcgcctgaattcttctagaggcagggagctcaccacccttccagtgtccaacttctttagtaattacacactttctggtaaatgtatcagaaccaagcacgtggtcttcaggccatagagtcagccctggccttcgggtactgatggacaccttctcaggtctgaaccgtagccaggccagagccagcagcataggtcggcgaggttccgtggtg

SEQ ID NO: 24250 - DNA, 1100 bp, Homo sapiens
gacgaacatatgccatgatgcacaggaaccttccctcccttcctccttttctttctttcttttggaaaagtcctgcaacagcctaaaggcattaggtagaaattagcgaaagattattggaaataaattaagttggagaggctgagcgcggtggctcacacctgtaatcccagcactttgggaggctgagacgggcggatcacgaggtcaggagatccagaccatcctggctaacaaggtgaaacctcgtctctactaaaaatacaaaaaaattacccgggcatggtggtgggcacctgtagtcccagctactcgggaggctgaggcaggagaatggcatgaacccgggaggcggagcttgcagtgagccgagattgtgccactgcactccagcctgggcgacagagtgagactctgtctcaaaaaaaaaaaaaaaaaaaaaaaagaaagaaattaagaattaagttggagaaggaggtgagagctgtgtaagtcagcagccagggaacggtggagaagagcaaaagaccaagggccctgtcagtggggactgacatggacaatcttcttttccaaatcccccaggacttaagggcttcttcactgagatttctggaaagagaatggtcctttaggagatgcacccaatgccaagtacatatgtgtttttaacacataaaccgtggggaaaacattcaaaccatagcagcatggaaatgtctcttcccatccgaggcagacaaggctgctgcttaacttgtggaactaatcagttaactggctgctagggagcttccagtctgcaggccttccagagatccctggggagcacgcctgtcctgcctcccgagtacaacagcacatgccctcgctcccgtaggaagagggtgggcagaatcctggcagggccttaagatggtacgcttgtttatcattgcaacaaataaacacccacaaaaaatccaaaggaacttcagtttcctggaacaccaagcagggctgtaacacctgttgttgggtgagaaagaaatgatagagaagaatgcctccgggtgtatttgtaaagtttctaaatgcatgaaagcaggtctggagcgatg

SEQ ID NO: 24251 - DNA, 1046 bp, Homo sapiens
catgaatttatgtgagtttaaatgaattaggattgaccacaggaattcggatcaggaggaggtgtgagagaatttagaagcatgcttgcaccggggcacctgtaaatgtgctgcagccgggctctctgagagcaagacctcaccagagaatcagggagttcgcagggagccatctttaccctggttcaaggaatgggatgctgatgcttttctctctctggcttcactgcacagatatttaagtacctgctgtgtaccatacactacagtggacactgggggctccagggacagcgattgcattggtctctatttataatgaaatgtaattttttttccatttagttaggtgaccagatatgctgcagaggaaaacatgtgtctatatctttttattctctgtttatctggcaggaatttctaatgaggaaagtggtattggtgtgatttggggcttagtgagtttgcagtgggttctcacctctttttgtttattcttccatagtctagatttgccaaatgaaggctttgcacttcttctttctgaatctttctgactttgtggtggggaaagaagatgatgaggcaggtccatcccacagctggaggctttctgagagcagcttggtgttgcgggcagcacctttcagagaagctgtctgctgtttgctagttctggagcagatgctctggaagtgccacatgctcaggagataagagaacttgctgctgtggctaggacgatggaggtcaggagtgtccagcacgttttctgaagattcttttaattttttgttggccatcaaagcacaccaccttaggtgagaattatttggatttatcatttaggatctaagatacattcatgggtgactgcattccatttgttgctctaggatgaacccagagatactggagagaaagaggaaagatgagggaggcttaggcacatttcagtaaatggttgcaggttaactaatctcattagacaccacccgtcctgatcagccgttgtttttgcgttcaaagactaatcggttaatcct

SEQ ID NO: 24252 - DNA, 1619 bp, Homo sapiens
tggtgctgcatttgctggcaaagtggcaagcaaattttgagtaatattctggacttcatgtattgtattgaactggatcttttagagaggggtcagggcagcccctgggcagcccgctgctgctggttcattctagtcttcctgttcatctgcagtgaggaagtgggtcactcttcctctgggtctgcacaccctgcctgcagactgcagctgtagggaacacacagaatgaatggtggcccaggtgctggggctgtggagctgtcaccatggccctgtgtgagtgctgctcttgaagactggcccagaacgagtgatgttaataattaattcagtccacacatatgtactgactgcccaccctgttgcaaatactgtgttaagcactggaatatacattgttcacaaaaccagaagtgatccaggcctttctgcaactgaccattcagaggacactgtaaacaaatagccaataggtatctcttgacatgtggtaataagagacatgaagacaaggggccacagcctgatgatggcaggggacgtggagtcatgggtgatgtctgtggatttaattatgcagcttattttatttatcaaaatgtatccacatctttactcttttatggataagccactggattccttaactctttataatcatatcccaaatctgcgtaacttaaaaattgcatcctattttctcttcccaagcacagccaaaggtaattaaaaccagatgtgtttgcatgagaaaatgcgtgcagagcatcaagaatgtagattgtgctaaattaatgtcgccttaacaaagatagccaatgagactgacctttttttttttactgagttcatgatgcccatgggttaattttgtcactagcagtcattgtctggaccaagtttgtagtctaaacatgtgcagtatgaaaggtgaatgctctcacacagtcacactcctaataggaagacaactctcttgtatcctgagcggcatcccccttgtgccttctgtggctgaatttgtgttgtggactatagcagagggaaaacttccaatgctagaaatctgagttttaaaaattaatttaaaaatgtgttccttatggaattgggagtgtatctgctgtctcggtttgacaaactaagctttgacttgtgtacagtaacaagagttttcctggatttaaagttgttgtccccagcatatcaaatgaggtgacgtatatcagatcctgtggttgagcctcacagtgcagaagggcacctgctatgggtcagcagcccattgaacaatggagtttaagacttgcagtttttgagcttttcaatcacctctttgccaaagaccaatgtgtccattgcttggcagtttgacatctggagtcgtgtggacaggggtctacatccaaaaggcagcgccactggggcttagtttgttcaggtttgtgttcctaggcagatggaggctgtttgtctcaaatatagctgctttaaaaaaacaggagggtttattgatcagaggtagtgactcatgacgttgaaactgtgcctacataactcacatgacaaggctggggtgaagaggacaggtctgcggaaggctttccacttagtcc

SEQ ID NO: 24253 - DNA, 1057 bp, Homo sapiens
ggaaaggcagtactttagtgtgaagtcattgttgttatgatgcagctgagtttgagcctgtcttagaagcacgttttgatgggcagaaatggacccagtctacagacaagggaccatctgcaaagacaagacagtcactgtgaagcttttgtcagaaaacccattcccaatggagggggaaggaatcagtggggcaaatatttcaatggaacagaaccagcatctaaacttatgcactgcagcgttctgctaaaccctgctatgggtgaggctgaatgagtacattcatttctaataaaagaaattacattaattcttgaagggaatgtaggtgtttaagctgtcactggaaacccatttctgagaagaagctaaaattgcatgcctttttttctctcttcttcttagtgatttaaaaaaatttgtatttttgctgaggtttggaaaggcaattacgctgattttgcccaaaatttggacagattagttctgctgagaaagaagtaacgaaggtatgaaaggacatgaaataactgaaacttgccaggagaaatattaaggtcaaaagcagaggaagcatgggctcggctcagtgtgcaatgccttatcaccgggtcacctgccccaggaggtgggcccgacagatgccctgtgtgtgtggaagctgccgctgtgaaagagtgtggcatagtaaaacatgagatcaccccagttattttatttctgacacactgggaatgaatcttgatctagtctccagggtgtgtacttgtctgctgtgcgttttgtgctgagctgggttctggtgcattttggctaaagccacattaaccaccccccgacccccgatgccaccatcttgctggagctgagatttcctgcagacctgcttcctgagggctgactcctggtctcccactgctctgggacattagcagtcgggacttgctacaccagttgcagggccgaggacaaaatgaagtgcaattataaaattattaagaatttcattacgtgaccacagagcattaagccaaatttgggcggcagccaagtg

SEQ ID NO: 24254 - DNA, 1050 bp, Homo sapiens
cgagctccagcttcctcaggtggcctttggagagtgttggctttccaaatcacgacttgtcaaaagaggctttccagatttcaggacatgttggattgatagccagccttcataggagtcatttttctgttgggttcataaaatagagtggagtgtgttctggtgtgctcatggaagctggggctctggcctccctccgggccagggcaagggttccatgagccacataaaggcattttgcaaactacaacttgctatgctgatgttcggtggtgttcggcattttgcaaactacaacttgctatgctgatgttcagtggtgttctcatccatgggcaccttgcatctatgcctattttatagtatttgtggaataattttcccattttaagtgattatagagttggaagttggatctttgttttgttttgttttagagatggagtctcgctctgttgcccaggctggaatgcagtggtgggatcttggctcactgcaagctccgcctcctgagttcacctgccattctcctgcctcggcctcccgagtagctgggactacaggcgcccaccaccacgcctggctaatttttgtatttttagtagagatggggtttcacggtgttagccagggtggtctcgatctcctgacctcgtgatccgcctgcctcagcctcccaaagtgctgggattacaggcctgagccaccgtgcctggccggatctttgttttgatgacacaattttggctatttgtgatttatttcaagcagtgcctggcctgtaactccatcttgaattgtaacactgttcccatgggaactttgatagggtttctagcagtacttgagaacaaaaagggagttcccacatcctgccaatgttgatcatagcacacgtgctggtgtgtgtgaataacgtagaatggaagatgttccagaactaggtggtcagccttcaaactgctaaagctttgttataactattttggtagctgtctttccaagatggtcatatgtattgtaacaagtgctgtattggatcgggctaag

SEQ ID NO: 24255 - DNA, 1048 bp, Homo sapiens
tatttaaagactaccaataaggttaataaaggtttttatttccctctgaaatcacacataaatgacatattactccaggtcatttttccatcataggatttgcatcatctgactgtgggaagggctctccttggtaaacacaggtggctccaggctcatagcaccccacaggaccttcttaggttttaggatgagagcacttgaatttgatgtcccagagtgttagaatgttatcagaggggatcatagtattgactggggatattcaccgtctcttctactcctcagctctgctggtaggtctagttttaaacttgcagtcaggccagcagagagcccgcattcctgtctcctacagtgatccttcacagcacctttttaaaaacttaaaattcaatattgcattacaaatattgcattcgctttatagactcccacgtgccatccataaaaatcatttaaaaaggtgaatatgtgtaatgttgccttgaatataaatgacattttcaatctgtaaaaataaaatatctgcatttccatactctctggacaccctctggatctgaaactggccttagagataatctcattgggtcttcaagaacatatgaggaaaaagatttccttggtctcatctggttgttaaaagaaggagattggaacttgggcttcctgaatcccagtctagtgtgcttcctagccacctgaaagggatataaagatgtgattcagttggttactgagctgcctgttttatcacctacaattgaatttaataggatcatcctgagatgccatacaaatttcttgatgtcatcaacagggactttgccctcatcatccagagggtaaaaggacacctttatcaggattgaggattgtatgggaggagcactgcaaagcatgtccaggattaaggccacacagctctcctaggagaccctcaggatggcttttctctgtggcagctgctcgtgtttgatttgcaggccgctaatacaaatccactgtttagtgacgagggagtacttgccttactagtaagtaa

SEQ ID NO: 24256 - DNA, 1026 bp, Homo sapiens
cttcccccctcctttagtaaggacaaatgaacttaggtcatcaacttgctgcctaagccacattaaatcatcaccctcaaaagctgagggaagactgtgctaatcctgcaaagaagtctttactaggtgtatcaagaaggttcagagtcattttgcaggaaagagtaactgctggtgctactggcagggccactgtttgcgttttctcattccctccctcatccttcctgctgcaaacaggagatgttggcggatgctgtccattgacagggtggttggagaaatgaggatggtgtgctcagagaccccaccacccctgctagaaggaaagttaagtttggatggaaggggaatagagagaagtcttaagacaggagctgtcaaactatgaccagcagtagttgggacccagctacacttgctcacagatgccttgtctgtgggggactgtgtggccagcaaaacccagaacattttgacccttgacagacattgccaactctgccttagagcactgtgctgcactgaccacaggagtgaaaaggccacacttggagcccacatagcaggtcccccatggcctggtggtatggacgagtggggaggctttctgctgcccccactctccccactcagatccttcttttttttagttacttaagaatcatcatttagcatgagtgtgttaaatgagtttatttcagcacatttcagtgcatctgtgactcaccctagacattcagtgctctacgtgtgcccaggctggatgcctgtgcaagaagaccatgttgtttgtgacatgggtggtcactagttttatgttttagtgtctgactttagctctgtcttcctttcctttttttcccgctgctattgcattattcatttttccttttcccccagtttgctgctcattctgtagatacataccttggtgagcctcactggagagctgtggcacctttcagagtggagactggtgggggcagagcttaggaatgggtcaggcacaaagaagtagtgcag

SEQ ID NO: 24257 - DNA, 1050 bp, Homo sapiens
gtcttcctggtgggcaactgtgttttttaagacctcagtgagagttgtctttggaaacaaatgaatggaacgctgcatgctggcctgttctctgctgtatcttcaggactcctgagccaaacctgatttcatcatcttctcgagggctcagtacacattgagctgtcacctgtggtgtgtggcctggaagaaaggcagctcatgagtttgcctaacaggactctcccttggtcactgagggctgagaagtggcactaggaaccaccactgaggcagcctttggaggagccagaattctttggagcaggattgctggtagatttgttagttgtaaggcccacatctcgtcatatgtactatttaataatactgagttgtgactttatttgtggttagaaaaccagctatgggacaaacagtgctggtttgtctctaagcatttaaaatcatttggaaagtgtttgtacttgctgagaggcgggtatattatttttgccaagttcatagtaccatccattggtggtatgaaattaatttctgagcccaccaagtttcaggaagggtcccttgctccatactatgatggtgatgatgtggctgatgatgctgtgctggtgaagaacacagctcagctccctgtggtggaggagggtgttgaattgtcggggaggaagctggagggagcttcttatctctgctctgtgctctcttggtcatgggtccattttcatttctgtagcttctaaggggtccaggctaaaggcataaagttgctttatgctgaacaaactgaccgagcttagcaagtaggatagctctccataagtttaatagggttgggcaatgtatttgaacatagcatgtgtttaattgttttcattgtttggctatatctctctctctatatatatctatatatataaccaaaatacatatgtataaaacaaccatacacacacacacacacacatgaccccccaaaatcaaataggctgatagattactcagaaaaagataagtcacataggaagtgggctatataaaaccaga

SEQ ID NO: 24258 - DNA, 1037 bp, Homo sapiens
aaggaatgaatgagtgggtaagtaatggctccagttacattgtaatgctttgaggctaggctggtatttccttgatatcaactactgcagtggtctacatataaagtaattctcaatttaaatgatttcttatttttaattttaaaattaaagtgtcaggccaacttggatatttgaatttctaggaaatagaatgctcaactgcctgtttctaatatatagtttatttccatatgcatattgccatataaaattatactgtttttcactctcatatttcataaaataacttaaacgtttcccatgaatctttgacattggtgtcttcatcatcacaggaccccattttgggtctcctaacaggtttcagagctcatcatccttccacatgactgtgtcgtgagatgtattttctagtcgtttttatcccaagccacaatgactaatttattcagcactaaaaattaactttttaaaagaaatctttagaagattgtgtacaaaactgtccagcactgtccaaaactgacccagaattgtgggtcattccttctgggttaattactgaatctgtgttaacttgccttcttgtatactgattctcaaaaagcacatcctgagatgactatcagttgagttagtttcaggcttgtgtattttctccatatactgctttcgtgttcttaataaagtaactgataagtgctttgcaaggtgagagtctacacagggaaccaaagagatggtgaactctcccttgctgctgggtgattttggaaacaaagctctaccttatatctagatgcatatagtagttcaactcccacacagtaaagatctggaaattgaagcctggagagggagaggtttcagtggccttttgaaggctgtgccttttgtgtataaaccaggactagaacatttgagtcttaccccagctcttcacaattcagccttaacttttatttttgagataaaaaaaatgagaaattaacttcttttatcctgcccgtccactcactctttgattctgaaaa

SEQ ID NO: 24259 - DNA, 1028 bp, Homo sapiens
gggggagctctggtcccctgtctgtcccagccgtgggtctgctcactgctcagagtcctgtgcggatagagctgggctgggaggctgagctgttgcttagctttgagcccctctgatccaggttgttggcttcccccatccagtgctggggtgctcctgtgcctccatgggcttcccagagagtgagctggtcccaccagaggtcccagcccacactgggctgcctgcttccccctgccaccaggaagcagcctctccaagtgcctcctgtgaatgtgcagcctcctattctgccagaactttctggttgggtttgcagagttcagggagttgtgccacatacaagaaagtatttgccaagcccaatgaggcagttacgtggttgtccagaaaactgagcaaagacagtttgtcattgaagctggtccctcagcgaaaaaggcctcatcaaacaaccaagaatgtaagaaaatatatacattttccatttatttccacctgaaaaatatgaaaagaattgtaggtgtctgtgaatatacccatattgtagcaccacctacctgattaaaatatggaacctgcttattatctgtttgtgtatttcgattccctttgttggggctgttacaccgtggagatagtaaaatgtgattagagtggaatatattcatttgtagacagtttggattgcatctgagatattttcctgattgttagaatttctctcccattgggatttaaagggtggttatttttccgtatatttatcaagtggaagaataatttgacagggacatgttatcaggtaaggcatctttcctaatcgatgtgaataaaatcccatgtaagaggagctcagtgtgtttgcatatttttttaaacaataaaagattggattgttagagcatcagagaagagtgaagacagctgtgctttttatcacagggaacctaaagaaaaattcttactttaaatccttgatccgaagaggcaagttaatttaacaaaataaactcaggacatcacat

SEQ ID NO: 24260 - DNA, 1048 bp, Homo sapiens
agtgagcaaggggtgtgtgcgagaggtagaggggcacagtgggctacctcttgggtaccctgcccagcacagattggaggatgatagctgtctgagtttctcaggctgctataacaaaataccacacactgtgtggcttaaacagcagacatcgatttctgtgagatgtttgtttctcatagtcctggaggtgggaagttcaaggtcaagcttccagcaggtctcattcccagtgagggctgtctccctggtttgtagacagccagtgtcttgctcctcacatggtggagacagagaacatttttcgtgtctcttaaaaggggactaatcccattcgtgaaggttccaccctcatgacctaatcaccttcccaaaggcctcacctcctgataccaaacctaggaagtacagcctttgacatacctaggctacgtggcacagcctgtgttccccggctgcagacctgtgcaggatgtgactatactgaacaccgtaggcagttgagacatagtggcaaatgtttgcgtagctaaatgcagaaaaggtacagtaaaaatacagtcttatgggaccccatggtatatgcagtcatcatggactgcaggtcttcacgtggtgtgtgactgtatttacatggtggccttaagcaccgtcttgagtttttctacacagttccacttaaaaaatggtcttgggggtccaggcatggtggttcatgcctgtaatcccagcactttgggaggctgaggcgggtggatcacaaggtcaggagatcgagaccatcctggctaacacggtgaaaccctgtctgtacgaaaaatacaaaaaattagccaggcgtggtggcgggtgcctgtagtcccagctacgggaggtgcttgcagtgagccgagatcatgccactgcactccagcctgggtgacagagtgagactccatctcaaaaagtaaaatggaatggaatggaatggaatggaatggaatggaatggaatggaatggaatggaatggaatggaatggaatggaatggaatggaatggaatggaat

SEQ ID NO: 24261 - DNA, 1046 bp, Homo sapiens
gtgcagagcctccaggctcccggcctccagccttgctcttctaggcaccgccgaccttttccacctggagatgccacagcctcttaaagtgagcttgtcccagcagcctgccccacccctacctggccaagctggaggcctcttttctcctggtgtccctgcactccggttggttcacctgctcacaggctctatttcttgctgcccctcctcacccctcatgcccactccatgaccaggtcctttagggccggctgagcacagaagaaaaacacagggccctgagttcacaggacaagagaaaagcttttcccctaagtgcggcctctcagcctgtcatggggtttcctatgtgctgtttcatgtcactcctccttgggccctgggtgctgttgggatagtgcagacctcgcagtggcccggggcccacccacactggcacccgggctgctgctggggacaaaggggcagcagcagcagctaagtggctgtggggacctgggtgggaccctgtgagctggagctccaggctgaagcagccgtgctcagggactctcagttctctcccctgtccctcagcacagaccttattttatatcaggtacggctctggcttcacacgtcttccttccggcggcctctgcatggctgcaagatgcacggtcctgaaatgatgctttagttttgcctcttctgcacttaaaaactcattttgcaaagtgaaaattttgctggccttgtatttgaagcctttcacagacagaccccagccccactctcccacaggcctccctgatctgtgacctagaacccacaggtacatggcctgggctttgggccttggccccttgcctgtgtgcaggctgtttcccggatctctctgtctccaggcacacatccaggtatctcagccgccacaggccagcagtcccacctctctctctcttatctctctctccccctggctaccccaggccacccttgctgtctcctgctagggtctcccctccctggtttggaagttgctctcctcctctttcagtttt

SEQ ID NO: 24262 - DNA, 1045 bp, Homo sapiens
ttgtgcaaacaggtctgtttacagcagttcatttttatgagttacaattattatttctggataattttggtgtatggtaatcattagagtaagctgtgtgtctgattaaagaatttgtctctaatttatgccaatttaaagatgtcttctgtgttctctttgtctctgggggagggaagcaggttgctatggagacaacataagaaaaagtgacaggcaagaaggcttggcagtttcgattttgaaaatatttgtgatgtaggtaattatatatgtaataatgttatgcagcagaaccatctgcctttggagagatgcatgtcatggaatttcatggtaaaacagtgtttctcttaggaacaaaatgttatttgtgtgctattaagatattgaaattgtggaaaataaagatgcaatggagccctaagattgtttccaggggtgcagttgctgtatgatgtaaggtgccacctatagaatttggaaagctattttcacatggaaacaaaacatttgtataggaagacttacctgagactgaattattttatgttgtaaattgctaaaatcaactgtattcaggtttataactgattttgatcagtttaaatggcacaattttcttttttaaaaaaaattaaactatacctcatattgtttggggaccaatttaacaaattggcctatggcagtttccctgtatcatcattttcccagggatcttggcttagttttgctctaatctggaattccttcttttactcttacacagttgagcattccccctcccccatttttaaattctggtgagatttaaaagaagaagaaactttagcatgcgatttgttaaattcaacaattctgcaaatatttacggaatgcctgtgctgggcacagtgctgggccctcagacacacatgctgctgcccccatgggctcagagtctgagcttaagctctgctgagacagcatgcaactgccctgtggcacctacctggctctgctggcagagcaaagctgaggttttagttcacatcttcatgtg

SEQ ID NO: 24263 - DNA, 1033 bp, Homo sapiens
taggtggagaaagacaagaaccaggtgagagccctgccttccctgcacggaccaggcttgtagaggggtgtgtctctcttcctcactgtttctgttctgggattatgcctgttatgggcactgacctctctttcttggctgcagtgccatttgggggctcagtcctcatttagctgaccttaatttggatggttcccaactttccatcaactggcattgcacatgactggctttgtggagttccacctctctcgctcacaccccattcacaatgaggatagaggggctaccgcctggagcatgggaggatcctgaacttgggagcttccatgagagaatgtatttgagttgttctcagactaccgtttttgctcagcacttttttggggggctcagtattatttccaaaacattttgtgtaattacataaggtttctacttctttaatttgccaagtaaaatgttaaaaaattttcaccatcacttaataaaacaaggaacattttagtattgcaaaaggaggaagaacagccatttttatccgacatagaattggaagctctagacagagaaattagggaaggaaaataaattattggcttccaaattggaaaaaaaaaagtaaaattatctctgtttgcagatgatacgatcttatgcatagaaaactctaaggagttctcagagttttcagagctagtaaatgaattcggcaaagttgcaaaatataaaattaaagctcacagttcagttgtatttctatagacttgaacaatccgaaaaggaaataaaaaattcaatttgcaatctcatcaaaaagaataaaatacttgggaataaacttgaccaaagaggtgaaagattggcacactgaaaactacaacatgtttttgatacaaataagtggaaatgcatctcttgttcatggattggaagacttaatattgttgagatgacactactactcaaagtgatctacagattcagggcaatctctatcaaaaccccaatggcgttttttagagaaatagta

SEQ ID NO: 24264 - DNA, 1052 bp, Homo sapiens
actacatctaggtacctcgtataactggaatcatagaatatttgtcctttgtgtctggcatgtcacttaacatcatccaggctcatccatgttttggtatgtgtttagattttttttcttttctttttctttcttttttttttttttttgaggcggagtctcgctctgttgcccaggctggagtgcagtggcgcaatcttggctcactgcaagctctgcctcctgggttcacgccattctcctgcctcagcctcccaagtagctgggactacaggcgcacgccagtatgcccggctaattttttgtatatttagtagagacagggtttcaccatgttagccaggatggtctcgatctcttgacttcgtgatccgcccgcctcagcctcccaaagtgctgggattacaggtgcgagccaccgcacctggccgattttttttttcttcttaaggcagactaatattccgtcgtatggatatactatatattgtttatccattcaaatacggacattcctcaacttgggatggtttgactttagagtttttgactttatgatggtgcaaaagccatatacttccagtagaaatctgtaaccctggccaggcatagtgcctcacgcctgtaaacccagcacttccgagaggccaaggtggggggctctcttgaggccaggagtttgagaccagcctggccaacatggtgaaaccccatctttactaaaaaaaatggaaaaattagctgggcatgatggtgcatgcctgttatcccagttactcggggggctgaggcaggagaattgcttgaacctagtaggtagaggttgaagtgagctgagatagtaccactgcactccagcctgggcaacagagagagatcatcttaaaaaataaaaataggaaagaaaagaaactgtaaccccattgtaagtcagtcttccacttatggtggggttatgtcctgataaacccattgtaatgtcagaaaatcgtaagtcggggatcatcagctatgtcaccagcattaagtacattttttaacttatgatattg

SEQ ID NO: 24265 - DNA, 1031 bp, Homo sapiens
aatgcggctagaatcatcccaaggcagaattgagattctaaccgctacgcacacacactcacagccctggatcctcctttgtgtgtgttctttcaacatggtgatggataattttcagaatggggtctttgggtacatctggtatgggtgaaccatatcttgacactgagtgacattggggtgctgccctgtcccatccctgtgtcatggccgggcctcctgcccccaccactcagggcagcccgtctgcctctggccagctgtcggagctggacttatccctccctggtctgaggaataagatgtacccttgggtcagaaccccccacagccctctgcaatgactgtctgacagcctttttcctagtaagctgcttcttgcttgtctaggtgaaatctctagcaattgcccaaccaaaaactgggtcttggagctgatggctacacatcccctgagggtacctctgaaaagcaagaccttttgaaggatggaaccctgaagagctggtgcagaagcaggactgtgcaggcaccatgagggcaagcacgaagccagctgtctgcacagacccaccagcatcccgcagctccacactgctttcctggtgtgtgggacgcagggagcccccttcgcctctaactgtgtgctgcactcacaggggccgagtagggtgtgtttcttttggtgatgatgtctacttgggctgaaggctcagagcgctcgttcctttggagaccctgctgcaggcgagtggtgagcacatgcttccgcacagacacagctgccaacggtcctcctccacaccagcgctgagttgtcatggagacaatacaggctgggctgtgtgtggtcagcagaggggcactggcccagctgggtgggtatgtgagaggatttatgaaccagcatcaatgcatctcagttaaacagcccccggtactgccgcacacgcaggacgtcaggcttggtgtgtgtgggttcccggactggtgttctgtcggcaaacgttctctaacatccctgacccggt

SEQ ID NO: 24266 - DNA, 1052 bp, Homo sapiens
ggatctggatttcttagaaagttaaaaagtcattattccttggaacaaacattatggagatttgagatttcaagttcattggtcctaaacatgttatcattttttttgtatatcaaaagtgaattcctaggtgtgtgcccaaaagaattaaaaaacaggtggtcaaacaagtatacaaatgttcatagcagccctatttacacagtagcgaaaaggtgggaccagcccaagtgtctatcagtggatgagtggataaacaaaatgtggcctgtgcctgcaatggacttttattcagccatcaaaggaaatgaaattgtcatatatgctgcatcttgtgtgaacctcaaaaacattatgctcaaaaaaagccagccacaaaaggtcacatattgtatgatttcattggtatgaagtatccagaataggtaaatccatggaaacagaaagcagattggtggttgccatgggctgagaagaggcggcaatggagcagaattacttcacgggggtagggctttattttggggtgatacaaatgttctgatagatagaggtcgtggctgcataacattgtgaatgtagtaaatgccattaaattgttcactttaaaatggttaatttcatgttatatgaattttgcatcaataaaagagctagttctaagcaccatttatactgtaatatttgtagattaccataatgtaaaattgtccccaccatataaaaatgttctagatagaggtagtggctgcacaacattgtgaatgtagtaaatgccattgaattgttcactttaaaatggttaatttcctgttatatgaattttgcatcaataaaagagctagttctaagcaccatttatactgtaatatttatagattaccataatgtaaaattgtccccttagaacatctcagaacagcttccaccattaaaaaaaaagaaaatgtgttccacgcttgtctgccttattatcaccacagcaagagcctgaggttgacctttcatgaagctttgcacaatcatcatgaaatgtggtttctcgtactttg

SEQ ID NO: 24267 - DNA, 1033 bp, Homo sapiens
gagagtagagatgaccaaggttcatgtttcggggagggtgtaagaaggggagtcctgagctgggggactcggcttctccctgaaaggagcagtgggcaaatggacagaatcaacagacttccctcgagcacctgtcaaatggcaggcaccatgctctgtgctgggataaagctgaagtcagccccacgccggcggtccctcaactgtccagagccctcaggactgtaggagggggcatggggtggcaggtcagccttctgtatcttcattacgtagttagaaacagttcccagaatttcagtcgcatctgtgcctggtgtgccctgcatttcggatgtgtcacacttggcctctccctcactgtacaggaacctggatgtgactctggaatcaggatcactgaggtttgcagatgatggtttgattggattttgaaatgattattttctcagtgtcatttcatttactgctctttatgtgaccccggcctcggtgatggaaatcaactttgtgttctcaattactacgactgtataatttcataagatttagtatctcccgtgaagagtcctacttctgctaggacattgggcagctgctgcatctccgagcagtccgtggaataccaagtgacaggcgctggtccgttgaaagtgcctccctgagacttacgtgtacactgtcgttatctatcaccctgcactcctccgcgtgcgtagctcagaactgactctgaattaaacaggcagtgcttgggtttggatgtcctctcccactcagggtgcctcccattcatgaggagccccaggtgtattgtgacaacaagatcattaccacaagcgtggctgtgggtggatgtgtaggttttgggaaatgattacttggaaaattaagttcttatacctggcagtcttacctcttaaaagtggagaaacagtggccaggtagactttgctgtgaattacaagggcatttcttctgctgaaaggcatttcaggccgggtgtggtggctcacgcctataatcccaacat

SEQ ID NO: 24268 - DNA, 1096 bp, Homo sapiens
ccatgtcttcatggtgaaaggcaagtccctagggatgcaagcccatctgtacccaactgaaacccatgttacccttcacctgtatcttgtttgtgggtattgcatcggccaaggcaaatcgtggggctaagcccagggtcaagtgtggggacgtgcactctgcagaagtggagggtggggatgagtgtttgctgggcagtagtacacccgaggctccgtgagaatgtctactttgagcagtcaagagaagacacagattttagacttgtaggtttcctcattccaaagttggtgtgcttgtacttgattttgaagttatctttcttccagggtgatgggggagcatgaaagtaagaggatcttgggaactgctgtgcccattaattttatggcaaatccacgtatcacctggaaaaccatccatgggatattgagtagtggaccaagagctgtggtccggattccatgcatacgttttgggaagaggctgacatgaagcgtgctattagcttgtcgagagccctgctgacttctgaatgtggcttagctcctgccacgtcctttgttcttccaaggttaactgctgcaaagggattgcagtggccagtggagggctagtgaaggttcaagcacactgacaattaggctaaatcggcagtggcaggttcttgcatggaagttgcatcacctgctggagtgactgtcccttgacctcctcctgtctactgggtcttcctccacctcactttaatgctgctatgctgctaatgtgaactctgaggctttaactggggaagtcgccaccgccccctccatcacccttgtcctacaggtcagggctggaatgaggagcacttgcagttgcctagtgggtgggatttcaaggaaacgggatacctttcttccccaccccttcaccttttcccagaaatggtctcatcactgtttccttttggaattctgtcattggaatttcctgcttttgcagctcttgccagcttgcgtttcttttgaaattcagtacgcttgggagcagtgacgcgaaacttcgcagacgctgacctcgctgacagagccaggccgggcaagaagaggt

SEQ ID NO: 24269 - DNA, 1048 bp, Homo sapiens
caggtgaagtgtcatattttaagatgtgctcatgagaggcatggatacaaggccaggcctccctggctgacatttgggtgcttgccatgggccaggccctgccctccttgctgggtgagcgctgtaccagttggtcatcgcaatggtcttaagcatcactgaggaagacattgaggcccagatagggactgtccttggccaaggcctcctagccttgagtaggggccccggccagcagtggggctcactgcctctcaggctcaacatcccagggggatgggaagaaaacattctgggagatgagtggagagagactgattctctgtaggtgatggcatgtgccttgagctgaaaggtgcttccggtttctttgtagcgatggggtcagctgctccaggcagctgtggcagcatgagtgaaacagaggggcttattccagtgcatgtgggggagaggagggaggtgggctcagccagagcagagggatttgaagagtggcagtggaggagatatttgaaaggtgtgttgggacccgtatgcagggtgccgtgtttggactttgttttgtagggcacaagacagttgaaggctttggaactgggaggaaagtgacaagaaggagtaccaggctgtgggacactggacactgagaaaaggaagaggctatgggggaagagaggggccgtgagacccggggcaagtgtggacttgggggacacagtagcggaaagcagcaggcctgggcagtcacctaactgcaggtgccaaggtcgtggtctgtgtcccgggagaccagcgggtgggtgtccagagatgggggcaccagaaccatgtgggtcatgtatatttaatgctgcctgcttgagaaagcaggggcttggcatatgttttaggagaaagttttatttcttgaaatggttaaactgataaatcctcagttatcccaaaggctcagggttccagaaaatggctccgttgaagggtgaatcccatagatcttataagagtgattgtaaccctgccttggtatagccagggagcagagata

SEQ ID NO: 24270 - DNA, 1047 bp, Homo sapiens
agagcccatacacgacacgtttccatcagtgcagaaagttccactggacagcactgctccacaataatgaagaaaaaggaaacctgttttactttactgagtataattagcagaaagtcttatttgatgacttttctctgggtcccccttgtcaagtgtgagtcctctgagtggagagggctatagtctctccatagtaaggcagaaagacgtgcccactgggaaacacccagcaatttaatagggccctgggtccaacaccaacttggagttcttaactaatgccaagccaggtaaagtgctttgttcattgagtcttgcaactccattagtgattcaaaacaaagtaaacctctgtccctatctctgtaggatagttgcagggaagcaatagcttgtgtctgtagaatgcacttgcttttactaagaggcagtaaggaactgtctcagtatgaaaatgtgcatatacagaacgaccatccgtttttggtgtaagcaaaggggaccatgtgtgcctgttgtgcactgtctgtgcagaactttcagaaactgtcagtgatgcacaaggacgtgtgtgtccagagaagagacgcctgtgcaggctttcctggcagtctataaaggggcgagctctgtctcagtccaggctttcccacccagggttcctctggggctctttcatctcattatgtctggctattgtgacatttagagtattcaggtgaatgccggttgctgccttggtgtggaagggacgtcgtcgcttttccaccctagaatgacctttgatcttacctgtcaggacgtgatctaggcatcaaagccaccagttcccagaacgtcacctgcgaccagcataggtctgtgtctctgggttgttttggagaatatggagccttttgagatgcattagcagaagtctttttggtctgactgtgtgagattatatgtgcatgcatcaggggcttttttcacccaaattgcaaagattcccagtatttagagattagatgtggttagaaaagtgcatttccagtatgcaattgt

SEQ ID NO: 24271 - DNA, 1308 bp, Homo sapiens
tcagatctttgccaggggcaccctgtcatgcccctggggtctcccctgaggagagacctctcaccagaggagctgcagtccactgcctctctggaggggtttgcctgcaccctcagcacctggccgatcctccgatgggtcttcctggtgctgtgactgtctgtgactagtcgtggatgccggctgagcctgggagcagcggttaccggaaatctgtggctttctgctttagctaaagagagaagactgcatgtgtttgccagtcttttgggtgcttctgtttagcatagacattggccaaggctgctggtaaagagcaccagagaggcgctttacccatgagagggaagcatctgcggcccggagccctctgcaagctgcctcatgggacccctaacagaccttcttgcctctctgagttcagggtagaaacaacctgctgatccgtctgtttccctctggcacgccaactctctcctgagagagctcctcctcctgattctgtgttctgagagttgcgcccaggggtgctgcacttgctccttccttctcagcctgtagctcagctctgacactcccgcgactcccccagcaccccgagcagggtgcaggtcttcctggacgggcttggggctgagtgcagcagaagcagcacaaggctcctttgctgcctctgcccctaaggagtcccaggatgtgtgaggaacagagctttctcctgtcccgagctccccgcagttcagccctctctggactagacagttctgcatttcttagctcactgtgctgtgctaaggaagccagggctgccccgtgggtggaacatcctctaatttgccaggcaggaaaggatggggcgatgagtcacccttctgagtgattcctgccgagcttcctacagaacatatccaggagcagccaccccgcccccagggttagtgtgtggaggcacaggtgctagtgtgggtggtgagaaataggactcggaatcaccctttttaacgtgcacagtatgttaattgtgtcctcacaaaagtgttgaagtgtttcttgccttatagaataaatggtcagaaaccagtggattcctttgagctgttttgatgggaggaaattaactgtgacagtgagaccttggtggtcccaacatcagcaggatgcagaagacagcctagcctgctgggtcatgtattcgtcttcggcagcctgggattgggaatgcgcgtgagtgcagagctgctcactgcctggtgccctgcagctccagtgctgcctcagtgcgttccaggagagacctcagtttccagc

SEQ ID NO: 24272 - DNA, 1063 bp, Homo sapiens
ctggccctggtccatttctccccgaaactgccgtagctaatcccttcccacctgcccatgtcccttttgctgcccctcagcatggcattctacctaccaggcaacacacagacacatacctgtgcagaaggctcctgcccgcccttccagaccatctgacatgttcacctctccgcagctttctatggccccatgtcacctttccaccaccaaatcaattcccccactgtctctttgcctacaggacttccagtgtgcccatgatggaatattatttgtgtgtatggccatccccccttcctccctgggcttttaggtccttgaaggcagggctaggtgccactggcccacaggtggggctctcacacgctagcttccttgttgggtgggccacaagacagcaccggcagcattcctcactggatggtcttgtacataaagcagcatggtacctgagagactgtgtggccttccccaactcccgcaggcccggctgcacatcgatggctggggagaggacacagctgcggggctctggctgaaggtgtccagggcgtgcagccggctgagcctcagatggcccgtcctgctcatgtttgcacccctagggattcttcctctgcgactgggagaggtcagaggctcagctggtgctctgggcataatggagtatcattcacatgtcagtgctctgctgggggagggaggttaatcagaggagagggaaagaggccattcaggccaactccactatgacacatttgcttttgaggttactggatcaaatcgggaaatgattgcttacattttagaaaaatttcctcataaaccaagtatgaagtcaagcaggtgcccgaggaccctaaatgggcagtcagctctggagtgcccaggtccatcactgagagcagctatatcacgtaataagcagcccacgttctcggaggcaccaagctgtgaatgcttgcttctcactcatactatgagtcaccggtagaagagggcttggctctaccatcctcacctgggacaccaacaaacaccaggctgagtctagccacta

SEQ ID NO: 24273 - DNA, 1065 bp, Homo sapiens
cacaacaatactgaaatcaggccttttagtaacgctaagtgacctctaagtggtcaagtgaaagctagagtcgaacatctctcactttaagtcaaaagttagaaatgattaagcttggcgaggaagtcatgtcaaaagctgagataggctgaaacttgtgccaaacagttatctaagttgtcaatgaaaagaaaagttattgaaggaaattaaaagtgctactccagggaacacacgaattataagaaagtgaaacagcctaattgctgatacggagaatgtttgagtggcctggatagaagatcaaaccaactgcaacattcccttaagccaaagcctaatccaaagcaaggccctaactctcttcaactccgtgaatgctgagagaggtgaggaagctaaaggaggaaagtttgaagctagcagaggttggttcgtgaggtttaaagaaagaagccatctctgcaacataaaagtacaaggtaaagcagcaagtgctgatggaaaagctgtagcaagttatccagaagatctagctaaaatcactgatgaaggtggcgacactaaacaacagattttcagtgtagacaaaacagccctatattggacaatgatgccatctaggactttcatagctagagaggagatatcaaggcctggcttcaaagctttaaaggacaggcagactctcttgttaggggctaatgcagctggtgactctaagtgaagccagtgttcatttgccattccgagaaccctagggctcttaagaattatgctaaatctactctgcctgtgctgtgtaaatgggacaaccacgcctgcatgatagcacacgtgtttacagcatggtttcctgaatattgtaagtccattgtcaagacctactgctcagaaaaaaaagattccttttaaaatattactgctcattgccagtgtacttggttattcaagagctctgatggagatgtacaaggagatgaatgttgttttcatgcctgctgacacagcatccattcttcagctcatggatcgaggatagtttagattgtcaagtgttcttat

SEQ ID NO: 24274 - DNA, 1032 bp, Homo sapiens
agcctggctaacatggtgaaaccctacctctactaaaaacacaaaaattagctgggtgtggtggcagacaactgtaatctcagctacttgggaggctgaggcaggagaactgcttgaacctgggaggtagaggttttagtaagccaagatcacgctattccactccagactgggcaacaagagcaaaattctgtctaaaaaaaaaaaccaaaaccaaaatcaaaaacaaaatgacaacaacaaaaaaactcaatgcatacctacacatagaaaaaaataattataccaaaatgagatatcacaattctacttttaaattttaattttaaccttattatcaaaaaacctttatggaagtacagcatacatacatactaccagcttgggaacaaattgaaattgcaaatgcaataattatcagaaaatgtctttctttgcttgtgcgtgatgtggtggcagcaggtgcggctttgagatgcagaatgatgctggtgagttcgtggacctgtacgtgccgtggaaatggtccgatagcaactgcatcattgatgccaaggaccacgaatccatccagaagaatgggaccaaggttgataatgtcgcaagcaggttttttttttttttttttgaaacagtttcgctctcgttgcccaggctggaggggaatggtgggatcttggctcaccacaacctccacctctgggttcaagtgattctcctgcctcaacctcccaagtagctgggattacaggcacatgccatgacgcccagctaattttgtatttttagtagagacagggtttctccatgttggtcaggcttgtctcgaactcctgacctcaggtgatctgcccgcctcagctttccaaagtgctgggatagcaggcatgagccaccgcaactggcctgatcgcaggcaggtttaacagccagtttaaaatgtatgctacctgcggggccattcgcaggatgggtgagtcacatgactccattttccaattggccaatgccaacagattgtattaaagaact

SEQ ID NO: 24275 - DNA, 1059 bp, Homo sapiens
ctgagaaatcttggtctgtaggtttttttcttcctgtacgatctttgcctagttttggtatcacagtaacactggcctcataaaatgagttgggaagggttccctcctcttctgtttcctggaagagattgtgtagaatcagtgttattttttatgtaaatattgggtagaattcaccaatgaaaccattaaggcctagagatttcttttttttacaatcttttaactatgaattacattttcttaaactttaatgagatgattcttgttatgtatttcatttcgtatgatccttggtaacatgaaatattcaaggaattacttcatttcagctgttaccaaattatgtgtgtaaggttgttcatagtgttttattttatccttttgattactgtgaggctgtactgctttcccttctttcatttttgatttcagtaatttgtgtctatttttgtctttgtaaatttgttagaactttatcaattatctttttgaagaacaacctttacttttacatttatttttctctatcatatttctatttttattgatttctgtttttatatttattatttattttcttccagttgctttgggttttactcttgtttttctagtttcttgaggtatacttagattattgattttagacttttcttcttttctcttgtaagcattttatgctataactttgcctctgagtactacttttcctgcaccccacaacaacttatatattgcattttcattgttctccacttctaatttcccttgagacttcctccttgacccatgaattatatatagaattatatatagaagtatgaggtctaatttttaagtgtctagaatttgtcctgttctctttatgttattgatctcaaatttatttctattataatcagagaagataccatgtctaatttatgtttagatttttttaattgtcaaaatttgtcttgttacccaggatatggtctatcttggtggatatttcatttgtccttaaaaaaatgtgtatttgctattgttgagtagaatgttataatgtcaagaaga

SEQ ID NO: 24276 - DNA, 1086 bp, Homo sapiens
tgcctgacaaagaggagaagcccaggagatgttgagagtcagtccagctctgcctgttagcctttcagacaaataaagttgaagaaggcaggtagcaagaaaaagatcctgacctctgctctgccaaagtgtttttaattacctggatctagctgtaaggtttgccacgtagtggtgacagctgaggtctagctcagcactactcagcagggaagccacacatgcattaagcacttgacataggactagtctgaactgagttgtgctgtcattattgatacacactggattttgaggagacaaaaaagaatgcaaaatagtttaattgttttcatatgggttacatgttgaaatggtgttttaaatatataggttaaataaaatataaacttgtattgcagttaaacacaaagcgtaaaatttaccatctgaaccatttatttctaagtgtactgttcagtagtgttaagtgcacttattttgttgtgcggccaatctccagaacttcttcaccttgcaaaacagaaattctgtactcattaaacaactccccatttccccctccccccagcttctgacaaccaccattctattttctgtctattaatttgacaacttcagataccttatataagtgaaatttatatagtatttgctcttccatgacaggcttatttcacttagcgtaatgtcgtcagggttcatttatcttgcaacatgtcagaatttccttcctttttaaggctgaaggttgttccagtgtgtgtatatcacatacttcatttatccattcatccatcaggagatacttgggttgcttccactttttggctattgtgagtagtgctgctatgaacatgggtatgcaaatatcttttgggggattctgctttgaatttttttggatatatacttggaagtggaattgctggatcatatggtaattctatttttaattttttggggaaccatcatgctgttctccatagaggctgtgccattttacattcccaccaacagggcacaagggttccagtttctccacatacttaccaacacttttttttttttttttttaacagtagt

SEQ ID NO: 24277 - DNA, 1045 bp, Homo sapiens
ttattagagatgggtttcaccatgttggccaggctggtctcgaactcctgacctcaggtgatctgcccgccttggcctcccaaagtgttgggattacaggcgtgagccaccacacctggccctacttttagcatctatgtgttcacttgtagtatatagaaatacaattgatttttgtgtgttggtcttctgttgtgcagtttgctgaactccttaattctaagagtttttcatagatttcctgggaggtctatatagttatgtgatctgcaaatagggacagttttatgtcttctttctgatctgtgtacatttctttttcttgcccagttgcaccagctagaatttctagtgtttatgttgactaggagtggtgagagcaaacatccatacctagtccccaatcttagggggaaagctttctgtttttaatcattaaatatgatgctaagtgtaggttttatatgggtcgtctttaaaagaatgaggaagttttaacctgtattcccagaatgctgagagtttttgtcgtaaatggatggatgttagattttataaaatgtttctgtaccagttgatatgatcccatgatgttaatttatattaacctgttgatatggtacgttccattgatttgcaatgttaagtctctcttggatgtctgagacaaatcctgcgtgggtagggtctgtaattctttttgtgcactgctggattgaatttgtcgatattttgttgagagtatttgcgcctaagttcttgagaggggtctgtcgtcttcttttaagactggtttttatatcagaaccttaattaggaagggttccctcttttattttcaggacgatattgtgtaaaattggtattgattcttttctcaatgtagaattctgtagtgaaaccatctaggccaggagattttttttttggcgggggatgggggcgggggtgggggggatggggggcgggcgggcatttagattatagattttttttttcttagtttttgtaggattgttcaggttgtctgtttcttcccagttga

SEQ ID NO: 24278 - DNA, 1030 bp, Homo sapiens
aaatctgggaaggtaatgggaggccgttttgggaaataatgaattcaaattacctgctgtcttcacaagggaattatcctctcttggcaagcgagtgtatctcactgtgctgctttaggatggatattaaccttttaaatgttgagtgtctttatttgcttaatgctattacaatgccttgtctaaagtgttagtcttttattgccacgagccttgcaaagcctgacaggatattttcccgtttttccagttagagaaatagaggaagttgtcgtgtagttgtcatgtattcagtccacttaagggcagtggggaagcgtttgagacggagctgtggaggctgaatccttgaaggaggaggtgagagaggcacaggtgagcgcaaagtcccagtgcatgtcccctcttctctcccgatgcagtgtcattcccaggtgaacctgccgggctgaacggcctggcccctctattcagtcggagttttactactccagtggattttggtaacttcatttggaaataatttcagacttacaaaaatgttgcaagaatgacacaaagaaccacccttttatatctgccccacttgttttcatgttttccctctttgcacacatgtacaatttatttcagaaaaaactacagacatgatactgcttttcctacactaaaaatacttcagtgtatatttcccaaaaataggagtaatcccttatgtaaccacagtgtaattatcaaaattcacaaatagtgttacaaaactattatctgatctatggaccttattcagattttaccacttgtcccaacaatgcccttctcagaaaaaaaaaaaaaaaagaaaaaatgtattttctggcctaagagccaatgtaggataatgcattgaattcacgtgttttacctctggttccgttaatttggaaccgttcctctgtctttgtcttttatgacagtgacatttttgaaggatcagggcagttgtaatttgcagactccctgagtttgatttatctgatatttctgcatg

SEQ ID NO: 24279 - DNA, 1012 bp, Homo sapiens
ttttggaaacttactgcaggttttgtgccttgacaacctctccctatgtgaggtttgtaaaaagtgtcctgtgacttaacacagaaacgcaataaacacacacaaaatagtttcatgagtgattcttcagatgcccttcccaactggttagttgatcaagaattttgggggtgggggttgcggagaaatcaagtttaaaattccttctgattaaaaaaatatagtggaatacaattgtctgccgtttccccttcttaatgtatatattgtgagtatttattagattcgtaggtcatattacttatcaactgagccaaatgtctgtgtgcaattgtgtttcctttaccttgtaaaattttgtacagcataaataagtaaaaaaatcactgtttttctcaactttttcaaaatcaaggattgtaaatattgtagattctttttctgtgtgatgtgtcctactgtttcataatgctgtaacttgtagaaatattgtatatttattttctgcttatttaatgtcttaatttctgaaaagtattaacatccctgtctcccactcccctgccgtcccatgaagttaactcctgagagttgtcgggggtgactggagagctcattgcagaccacgtggtcctccagggtggctctccaccttcgggtcctggtatttccagtcaagtgggtttcaattcttgggctttgccgcccttatgatgaagtgtgtgtttgatgccagtgagaaactcagtctggcaggctacaaaattctactccaagaaatacccagcaaccttctgtttgttccaaagcaactagcttatcatgcaagcaaattttgctgactccaggctttatctttaggaaaacaaaaaaaccaaagtattatcagcaggtgggaaagatttttctattgaaaatttatccctgacaactcagcgtttagaaaagaaataaaatgtgccacttccagaggtgctgcattgcagttgttcagggctagggccaggcagga

SEQ ID NO: 24280 - DNA, 1041 bp, Homo sapiens
cttcaggtcgatgccctccttctgatactccatctccttcaggggaggttggggccccactggactgggtgtcaagatgtgaaagcttatgggagctttaaggagacttcatggtggttccatgcaggtggttctgccatccctgctgatttagcctggtgcctgtgtgtgtccactcacgtacacgtggggtgggggaaacgtgtctacagatgacgctaaatcagttggggtctactctaaacagcattgtgtgtaagaagcatcctcaagctcccagttaagtaacttgactacttttatttgggaatttcagactatagaagctctcttatgttttatgtccagattctgtgaccactagttactgtatcagaactcatcaggtacccacttataaatagcactgatctggctgtatactgatccatcactaacctgttttctaggacccagcgtatgtagcatttgtattgcagtttccctggcttacttgtgttttgcactgatgaattttgacagggtaattgccactttacttgtgcaatactgctgtaaataactgcagatttttaaacaatcttttatgttaattttataaaaataaaactttcaactagttttggtgagcgtttgatttgtttgcacaaaatgtcagagaaacagctgaaattatatatgaacatgtacacgcccacacatctgctattatcagtcataaaatgtagctgtgtgtagctcatatatttttgcttgaagacgaatccgtgcagtacacttaaaagtaaacgagtctttaaagttttgatgtggctggtgcgaaaagtattctgcctgcacagtcagatatgactcagcacttgggtggggagttgtgggggcagggaagtgtactaggagccggctctgtactgtgttgatgagtgatatggcaggtgcccagccatcttaccccatcaaccccataatagaaagggcttgtctgcagcacctgctcagggtcaaaggggtcacccaaacgtgcctagaccctgtgtgtga

SEQ ID NO: 24281 - DNA, 1029 bp, Homo sapiens
ttgtggtatataattatttttatatattggtgagttctatttgttgatattttgttaataatttttttgtgtttatattcatgaagaatgttgatctgttttttctgtatttttgtctggttttggtatcagagcaatactagcttcataaaatatattaggaagttccaccctctcttctaatttctgaaggagattatgtggaattggtgttaattcttctttaagcatttggcataattctccaatgaaaccatctgggcctggagatttgtttttcggtagtttaaaaaattatgaattcaatttccttaatagttatagcctgattcaaattatctatttcatgtggggtacattgtgatagtttatgttttttgaagatttaattcacttcctctatgctaccaaattcatgtgtggttatttgtactattcacttatccttttgatgtctgcagagtctatggtgatttcccctgttttattcctgatattaacaatttgtcttctcatttttttctttgttggtcttgttagaggtttgttaattttattggtcttttcaaagaatttgttgtttgtttcattgattctgtattgctttttttttcattttctttttttatctattattttcttctttctgcttgttttgggtttattttgctctttccctgtgttctaaacttaaatgatggatttgagacttttcctctattttaatactataaattttccccagcactgctttagctgtatcccacaaattttgacatgttgcgtttttattttcatttagttcaacgtattttttaaaatttttttcttgacacttctttgacccatggactatttagaagtttagtttgcggctgggcgtggtaatcccagcactttgggaggctgaagcgggtggatcacctgaggtcaggagttcgagaccagtctgaccaacatggtgaaacctcatctctactaaatacaaaaaattagccaggcttggtggcacgtgcctgtaatcccagc

SEQ ID NO: 24282 - DNA, 1060 bp, Homo sapiens
gtacattcagctgttgttggatgaagtgttttgtgcatgtggtttaggtcttgttggtttagagtcttcagtcttctgttgccttgctgatactctgtctcatggttccatctgttattgaaaatggggaattgagatctcagctcttatttttgaattgtctgtttctcccttccgttctatcagtttttgcttcatgttcttttggggctctgttgttagaaatatccagggcctctttccctagaggtagacatttatttatttgtttgtttgtttgtttgagacagagtttcgcgcttattgcccaggctggaatgcaatggcacagtctcaactcactgccacctctgcctcccgggttcaggcaattctcctgcctcagcctcctgagtagctgggactacaggcacctgccactgcgcctggctcatttttgtgtttttagtagagatgtagtttcaccatgtcacccaggctgaggtagacatttatatacatggacataactgaagcatgggccagccctttttaaaactgttaccaaagtgctgagttgtttgaagagcctgagaggacatgaaacatgaggatggtgagcttcagggagactctcaggaagagtaccaccccaccttgagacggcaggtctcagtgacgtgaggtgggtaggatggttgaaaagtctgaaaacaccaggtcacccctgatgatggaagatgatcacacacaagatttacctgctctctttctgccatggttttgggtgttcatggtacacatgaagaagcatcctgagacagccaaagtccagtgttttcttgcccaccttggattctgtggtgctggatatgatgattctgttcttgtcccccttggctagctcagcctccattcatcctttctcctttccatctctggtaggctttccagatttggcaaataagaatacaggacacccagttaaactgcatgaataatgtcgtgacatacctatactgaaaagttacttgttgtttctttgaaattcaagtttaactaggtgtcctttatattctct

SEQ ID NO: 24283 - DNA, 1035 bp, Homo sapiens
ttataccatttcacatatattccattttctccttcagatatttttggctactgttgtcaaatattttactttaatgtatcttaaaataccattgctacactgttgttatttttgttcagtcagtaatcttttacaaagagatttatataaccaggaaaaacacatgtttatgcattatagttaccatttctagtggtcttcattttttggtctttatattttatctgacatcattctccttcttcctgaagaacttttttaaaaatcatttcttctagtgtggatctgctggtatggtattcagctcctgtagtctggggaaaaatatttattttacttttgaagtgttcttatttttatttttagccttcatttttgaaaggtatttttatgaggtatagaactgtaggttcacaattttagcttttgtttgtttgtttttactttcagtacattaaaagaagttgctcccctatcttctcgcttgcattgtttcccacatgaaatctgtgatcatcctaactttgttcctctgtatgtaatgtgtcttttgttcctatttttacccttatcactgattttgagcaattgaattgtgacaggctttggtgtaattttatttatatgccttgtgtttggagtttattgaacttctggggtctctgtatttgttgtttacatcaaatttggaaaaagtttggccattatttcttcacattttttttctgtttccacctatcctcttttttaaggactccagttacatatatattagaccatttgaagttgtcccataactcactgatgatctgttattattttccccttcttttatctctacattttattttggatagtttctgttgctatgtcttcaatttcactcatcttttttggtgtagtatctcatctgacattagtcctatccagtttatatttcatctcatacaccgtaatttttatctcttttttgcatttttatgtctctaagttttggaccatccagaatgcagttataattactttccttttttc

SEQ ID NO: 24284 - DNA, 1025 bp, Homo sapiens
aaaacatttcgtagtaaaatggtagcagataggggtgcctaattggaaacagctcatcctaagtggacttttcccctccgaaacattagacccctgacacacacacacacacacacctcgccgctgctgaagccagaccacctgtccctttccctcctctgtgcaatgcgtgtgctctgtcccactctgaaggatacacggaaggatcacgtttgacctcataccttctaaaaagaaacaatgtcattcactgtaaatacttttaaagatggggaaaagagaatatgatgtttgccaagaagtttaaggtttttctcattcctttttaaaaaccttatttgtgatattagtgatatggaaataaaagatttgtttccttatttcatcactacactgtaataaattaaagcatcctttccccccccggcagaaactgcttgcaagttttcctttttaaaagatagtctttcttcttgtttcctctatcatctagcatattcctctgcagacactattgaagttcatggtggatattgccctgggaatggagtatctgagcaacaggaattttcttcatcgagatttagctgctcgaaactgcatgtaagagtcctcggctatcctggaagggtttggacctcatggtgtttggtctttgcagggttagtgagaggacctgttcctgtttagataggcaaggaagctgcagtcagcgggggatggtgtggcttgctccgaagatggaaatatggctgggtgtttgggagttttcactgcctctgtatctgagagtctggttggcttccaaagctttcccttatgactccagttttaccttcactctctcactcggtaggaatgcaaggtgtgacccttgtgatccttccccagccatcagctagctttggacctagagttatgtgtacgtcagctcctcttaaagacagcagtgaaaatcataaaggcttttccctaagttttcacaacacttccttaggaagaagttttgtactttgaatacatgg

SEQ ID NO: 24285 - DNA, 1068 bp, Homo sapiens
ggccgacgcgggtggatcacgaggtcaggagttcgagaccatcctcgctaacacagtgaaaccccgtctccgctaaaaatacaaaaaattagccgggtgtggtggcgggcgcctgtagtcccagctactcgggaggctgaggcaggagaatggcgtgaacccgggaggcggagcttgcggtgagctgagatcgtgccactgcactccagcctgggcggcagagtaaaactccatctcaaaaaaaataaaaaataataaaataataaaataaagtgctccctgagagatcatgtgtttagacaggagaaagaactaccagctgtgacacacacacagcacacatcccatcctgacagggcccccgtcttcaaggccaggcagtatggggaagagacccaggcctcggagtcaataggccacgctctgcttcctaactggccctgtgagtggctatggcaattaatctcccccaagcactttgctgaccttattaaaataatttcttgtggcattgctggtagcttggtgatggtgatttgaaccttcctaatggggagtctcctccctgtataataagggccatgggcttggagaggggcattctcaccatatttagcaagaacatttcaggactgtgggcctgcgctggctctgtcatggagtgccatgcctgggctgggacaggtgagtgtggacagcaccctccctacacacacacacacagacacacacacacacgccctgctgcctcacatgggagagagagcctgggtccctttgcccacaggctttccgggtcccttctaagccaaaaagaaggacactgttttaatcagagcttcgtcccgttggtagtggttggtttttattgtggtggtagatgtataacattaagaagagaaacaagcactgtaaaacctttaaaacatcctgaaatgctaataaaattagttctagggtttcatggtagtttttaaaagtgccatgtttatgaagtgcctgcttctgaaaataaggaagcatttcagtcaaacaatgttgactatggaaagagttttgttgcagttt

SEQ ID NO: 24286 - DNA, 1034 bp, Homo sapiens
attctttgttgaccttttttttctttcaacacttaaaaggttggtcacttgaatgtcttctggctttcatagtttcagaaagatgtctgctttagttcttatctgtgttcctccacatgttatatgggttttgtttgtgtgggttgaggtttttttgggtgagaagggctggggaattgtctgccttcaggattttaactttatctttagttttcgtcattatgaatatgataattctaggtttgtgtgggcatatattttcatttctcttggctgtatacctaaagtggaattgctagatcatatggtaactctatgtttaacattttgaggaagtgccaagctgtttttcaaagcagctgcattattttataatcctatcagcaatatatgagggttccaacttctccaaactttttgttaacacttattattgtccacctttttgattttagctcttagtgactatgaagtgatatgtcatcgcatttatgagttactggaatgcaaactgccttgctggggactagtgttaaatatatttaactatggaattcaaactgtcttgttgggggactagtgttatttaactaaactgtgataactgaaattaatgtataaatagtctgtgcaaagtaagaactgcctattcattatgaaactaacaatacactgttatacttttttattttagcagtcagaaaaggaaaatatgggtgtatatattcttttatatttcccatgtatttactttttcttctttctttcctctatatatgagctaagaccttcctcctataggtctttctttaatatttcttataggataggtctgctgacaacaaattctctcaattttatttatgtgaaaatgtatttacttttccttcctttttaaaggatagttttgctggatatagaaatcttgattgacttttgtttgagcacttccaacatgtctttccaatatcttctggcttttgttgtttttgaggagaaagtagtcattaattgtattgttctcatgtgtgtga

SEQ ID NO: 24287 - DNA, 1068 bp, Homo sapiens
aaaaaagatgcactgtataagtctctgatgagggataaaaatcctttaaagtgtattattaatcttgagctttcagcaaaaaaaaaaaaaaaaaaaaaaattagttttgatttgcttctgattctcaggtttttctttatgttggaatgtaatacttctttcaattttattttatcttatttttttgagacagagtcttggtctgtcacccaggctgaagtgcagtggcgcaatctcatctcatttcaacctctgcctcccgggtttgagcgattctcctgccttagcctcccgactagctgggattacaggcatgtgccaccactcagtgctaattttttgtatgtttagtagagatgaggtttcaccatgttggctaggctggttttgaactcctgacctcaagtgatctgcctccctcagcctcccaaagtgctgggattacgggcatgagccactgtgtccagcccccattttatattttagtatttttttctctctctcttttttaccataagcatctgttaaacttttaaatcttccttaattataatattttaaagaatattctaattaaaacaggctaagtacggtggctcatgcctctaatcccagcactttgggaggctgaggcaggcagatcacttcagcccaggagttcaagaccagcctgggcaacatgacaaacctctgtctccaaaagttacaaaaaaaattagcagggtgtggtggtgcatgcttgtagtcccagctacttcggaagcctgaattgggaggatcgcttgagctcggggaggtcaaggctgactgcagtgagccatgattgggcccctgcactccagcctgggcgacagagtgagaccctgtctcctgctttttttttggagatagggtctcgctctgtttcccaggctggagtgcagtgacatgatctcggctcactgcagccttggctcatgcaacctctgcctcccacgttcaagcgattctcctgcctcagcctcctgagttgctgggttgctgggattacaggcatgcgccaccacagccaactaatttttttttttt

SEQ ID NO: 24288 - DNA, 1087 bp, Homo sapiens
ggagtcattaaggaggaaggaaggtaagagaggaccttctgtggaaggccttacgtgtcagggaaagtcactcggactcaattctcttgtgctgagggttcttctgaagatcctctttcatgatgtcaagaccctttcgtggttcccatctacatcttgaagaaattgagtgatttttcaaaatgtttaagagaaagtcccgtacctgcaagggacgatgtcaacacaccaaagttgttctttacttagaagctaggcctttgccattgcctgatggttacgacaggcatgattgcatgattccatcttgttcatcagtctctgcagccgataagtgcttatcaggtgctgcctacctggccaggctctgtatgaggccatgggttcacagtggggagcaaagagagacacaggccctacctttcgtggggagagactgtgagcagacagataccaggcagatgtcaattacaagcgaggacaagtgcttcaatggagaacaaaggatgttgaaaggtaacgtaactgagccaagggcccacgatgggaagtgatgttggaactgagatctgaaggccaaacgcaagttagatgggctaagggcggaataaggcagggatccgcaccttccctcaccaaatcaacagtggtgtgcccagtctcacccactgtcctttcctatcaggggtttgtccctccatggtgctctagacctttccctcctcccgctcctgtcttctcatctggcagttaacattgtcacctttttccctctctgatgcataattcttgtcagcatatgcagtcccagcagattttcccaactattcaaaaagatgtcctcccctgatgccacatcctgttccaatgatcacgccttctccagttcccttcacagccaagcttctggagagcagcttctgcacaagctgtcttctattcctctgttcccatccatgttccagtccattccaggctggctcccatcctgattgcctcacagaaactgttctttgcaggtccccagccaagtccttattgccacctccagcagcctctttctgtccccacccccttggacctgtca

SEQ ID NO: 24289 - DNA, 1300 bp, Homo sapiens
ttcaggaggccacatcactagcagtagggagaacaagatgtcatttgtgttcagtgtaagctgagtaaacaggcccttcctagagtgtcctggaaatcacagcaacccattgaaaactgccctccccaccagaacgtgctacgttctttcttcatgcctatgtgtgctccattcctcatttctacttggctcaagaaaacatttctgcagtcaggtgagacttttacaaaagaggagaaaatcaatgcctccttgaacatgatgagatgtgagaacttacaatgaaaaaggcaataatgatagaaattatttcttaggtacagcaatagttgataggatgtgagggtgttaccttggggtgaagtggagaaggtcccaggtgaattggctctcatggaaatttggaattacaaaataaacgtcctgggggttacccagaatacagatttaaaagtttgcctgtagagcaaaataaaacagtcagttgtagtcattaatccttgaggcccaacgcagccgatgggttggtgtttgggaaattctgagatgggagtgagatctgatcggatcctgggaagatgtatacccagttagaacgtgtagggttctgggtccctggcaagtctaggtgggcgggtgacagggaaagcatgggcatttttgtattgctgtcacatgctaacagaggtttgtaattatcttttggacccaaattatagagacattcacgagttttctagccctcacagtaacagagctaagaattcagatgtcaggaagtctgtgaatcttgatggattttctgagaaacctgactcaatggcatatataagagggaagtaagacttttaagaaaagaaaaagttatgcctcattcctcatgtggcttccaataagtatcttaggaacttatttcctttttaaaaaatattttttaaatttttaaaatttgattttaaatttcaaataaatttaaataaattttaaataaattttaaataaaattttacagagacgtggtctcactgtgttgcccaggctggattgcagtggctattcgcagttgtaatcatagcacactgcagcctcgaatttctgggcttgagcagtcctcccgtctcagcctcctgagtagctgagactacaggtgcacaccaccaagcctggctttatgtatttatttctgttcatgcggaatgattggttcagaactgttcctttcccttccatgatgtccttgacacagaaggttatgcctggctcccagtcaggcttcatacttttggtccatgtaagtgct

SEQ ID NO: 24290 - DNA, 2001 bp, Homo sapiens
tgagtcatgaaagcaagattgaatcgaaaagtgtaattgcattattagcgtagagtaatggtagcagaattcaagtgagtatggtgggggaaagcttcgtttagtaagcatccccagtgtctccaggcactaggctcagaggatgtggaggaggcagtcccgtgtacgagacagttcatgcatttaagtgctccctgtcgtgtttgggggttgaaggggtgaagataatgaaagcagtgcatgccaatgttcttgagaactgctctgccaagggattgtgtgggctactgcgggagcctatgggcggcgcaactaatccaggagtttgagaaagggcaggattagatgagttcaagaagtgagaaacgtgcatttcgtccaggggaagagtagagcagagtcacatgcttcggggaccctacctgtggttttgttgggtaagatttgtgttgtgggagatagggatacagataatgtggagagctttgattgccagtctgattcttgaactctattcggcaaataatatgggagccattaagatttattgtttagaaagactagaggggtgggggttatttgtattgtgcctggattgttacagtatcatgtctgtgagaaaaaattcctaattaaaagttaatcgggctgggtgcagtggctcacacctgtaatccaggactttgggaggccaaggcagaaggatgacttgagcccaggatttcaagaccagcttggataacatagtgaaaccccatctccacaaaaatttaaaaattagtggggcatggtggtgcgcacccaagtagctggtcccagctactcgggaggctgaggtgggaggataagttgaacccaggaatttgaggctgcaatgagctatgattgtgccgctgcactccatcctcggtaacagagtgagacctgtctttaaaaaaaaaaaatccaattgagaaattttagaaaagcactaatttaaaaataagccagtcggctgggtgtggtggctcttgactgtaatccctgcactttgggaggtcaaggcgggtggatcacttgaggtcaggagttccagaccagcctggccaacctggtgaaaccccatctctactaaaaaatacaaaaattagccgggcatggtggcacatgtctgtaatcccagctactcaggaggctgaggcacgagaatcgcttgaacctgggaggcggaggttgcagtgagccaagattgcaccactgcattccagcctgggtgacagagtgagactctcccaaaaaaataaatacataaataaataaaccaattatatgttaacatttttaagaaaaatattttccaaagcaaaaaagaagttagatgaattgcattattaaaaatctttttaatgtctggcttaatgaaaagacagctggattctcatgtctgcttgtgcattcagtcccttgtgataattgttttggttgaagtagatgaagaaaatttggccctgcatagaaaatgatgccacaacttagctaggactataataatatagtatttgaaaaagttctgtaaaacacagtaacataaataactaatacttataaagccaagggaaaaaatagttatcatattttttacttacaaaacataattttgccaagtttctttggagtgaattcctcctttctgtgagtcagaatttatgtgtctgtcttttcaaaatacaattgatttttattacttggggattccatatttgcaaattcacctactcactaaaatttacttctactccaaaagcaccatgcccagaagcagcaaaaaagttgagttgctcagtgtccattttcccagctgagatctaacaaggtgatgctcggccttcttgttttaagttcttaaactataaacagaggttgtcttcactatctatttagtgccgtgttttgtgctttttgttggtgattttgctgtttaaaatgtcccccaagcaaagtattaaagtattaaagttctgt

SEQ ID NO: 24291 - DNA, 1049 bp, Homo sapiens
tactcgggaggctgaggtgggaggactgcttgaatctgggaggttgaggttgcagtgagccatgatcatgccactgcactgcagcctgagcgacagagcaagaccctgtctcaaaaataaaacaaacccattttttttgctcatcctctaagaagcaattcctcatccattcagtctgattatgggattgcagcaattcactcatagcttcaggctctacttctaattctagtggtcttgctatttctaccacatctacaagtccagtagtaacatcagagatcactaatcacagatcaccataacagatataataataataatatttgaaatattgcaagaattaccaaaatgccagcacagagacacaaagggaacacttgtcgttggaaaaatggcattgataagcctgcttgaaatatctgaagtgcagttaaaagaaataatgcctgtacctgttttagagacaaggataatttgatatctgaactgatacagcagctgttgaccccatctggagggaatctggaatgttggatgaagcattctgatgtgattgtgctgtttgtttcctttaccaggggtcactcccattgatggagctccccaccgatcatacagtgagtgctaccctgtcctgctggacggtgtcatggttggctgggtggataaggatcttgctccaggcatcgcagattctcttcgtcattttaaggtgggcttgaggctttgtgaattgtcctatcccttgaccttaggtttttcagttcctttctagttttggggttaacccctgggcggtctagagtgatcaagtggtcagggggtcacaatgtccagaatgcctgtgcattccctctggtgacagaggcttgccttatactggcctcattggttggggtcagtgacagatatttgacccatatacattctttggcagtttcattgaggcacctcagtctgcttatctaactaattttaacttttttcccccttcttaatactagtggcatagaagggatctcaaaatacagatatttcagtaatat

SEQ ID NO: 24292 - DNA, 1082 bp, Homo sapiens
ctgagttaatattactgtgatggttaccacatggtgttttcccccaccagcattttttctatgtttattagttgctattctgtaagggagggctttcttttctattagttgttcatttatttatgttagcgtagatttatagatgcttgtttaattttgtgaatattctgttactacttattttgatgctcagaaagtgtatgagatttgatctagtgtacagttgagggttttaagtacattcatgttgtggagtcatcaccatcttcagaactttctcatcatcacaaattgaaactctgtaaccattaaacaatcattcctctttttttttttttttgaggcagagtctcgctctgtcgcccaggctgcagtgcagtggtgtgatcttggctcactgcagcctccgcctcccatgttcaagcaattctcctgcctcggtctcccaagtagctgggattacaggtgcacaccaccatgcctgggtaatttttatatttttagtagagatggggtttctccatgttgccccggctggtctcgaactcctgacctcaaatgagctacctgcctcattagtctcagattttatcttttttatagagaatttattttcattctcttttttttggttagcattgtggagcatcggaggatgaggacacttaagatctgctctcttagtaaatttcaagcatgcaatatagtattcttaactatagtcacatgctgtacatgagatctccagaaacttaattttgttgcataactgaagctttatactctttgaccaacatctccccgtgtccccctccaccaaacattctctcatttttaatgataatgcatctagctgtgaatccccatgagttctgacacatgggtttgttgttgttgttgttgttgttgttgttttcaggtttctgtaatttaggtttttatttctcctttcacccaggagtttgttggagtttttttgttttgtttttgagacagggtcactctgtcacccaggctggagtgcagtggcatgatcatggctcactgcagcctcaacctcctgggctcaagtgatcctccca

SEQ ID NO: 24293 - DNA, 1087 bp, Homo sapiens
gcagattccaatgtctgggtcatcttagtatcagtctctttgagtataagtcaagtttcaccatttctttgtatgcccagtaatatcggattgtattatgaacattgcgaggagtatgttttaaaccctggatcctgttagggtcctctgaagaggattggttttgtttgtttttagtgtggtgtttggccttcaattacattttaatttttttcattttatgtctttccttcttaatacacagtccatcacctggttcagtgcatgtcaccaaaaattctccaggggaagaggattggtttttagttttcactggtacttaacttggtgaacgtggcagttgaagtacattcttcagccttaggtgggctgctgtgatctgtcccatgcatgcatagttcaggagtccaccaaagattcggacccaatttatatgctgaatttaagggtctccctttgtggttctctcatttctgaaatgttcccccttcccaattgttgtcatgctcagaactctatttcttggttcttcaagccagtaagattgtgggtttctatctaagttgtagctgccacactgggccataaggcaaaaataaatacataaatacttaaaaacctggaaattcacccagtgtgttccttttgtccaagtaaaaattcttctcagcttctgacagcttttggttactctccagtgctgtatgtgtagttgggggtctgcgtctcatacttatgtgttgagggtggtctagtaagagtagccctttattactggaagctctaagtctataatttttttaaaaatttcacttgtatgtatttatattttaaaatcattttgtcgtgaaatgattctctgtactgtgaggtagtacacagaggaatctcaccccatgctccactacttagaattaaatacatattccgctgtaagaaagtaatctaattacgtaataattcctatccccttttcttccccgagtagtgatagcctgtaatttgcgtacttcctttctgtccccttctaaagcttttattacatcatacatgtatccataaactaagtatagaattgtttggggtg

SEQ ID NO: 24294 - DNA, 1025 bp, Homo sapiens
catactatccttttatagccatctctacctctgtcccccatttctaacccctggaaaccactaatctgttcttcataattttcttatttcaagaatcttacgtaaataggatcacgaagtataacctttgagaatggccttttcactccattcccttgagatacatccaggtagttgcatgtatcaatagttaattcctttttattgctacacagtactccatagtatgaatatactatgtacatagcatatatatttatagtttaaccattcaccttgaacattttggttgtttccagtttgggggcattaacaataaagctgatctgaacaatcaggtataatagtccccctttatctttgaagattatatcccaagactcccagtgagtgtctgaaaccatggatagtatatacactatccatatgtgctatatgtactatatgtcctctatatattttttctatacatacatacctttgatgtttaattaagcactgcaagaaactgacagcaataaatagaacaattatactgtaattaaatgaatgtggcctcaaaatgtactgttctcacatattttcagactgtgggtaactgaaactgcataaagcaaaactggctgggtgcggtggtgcacacctgtaatcccaggactttggcaggctgaggtgtgcagatcacttgaggtcaggagtttgagaccagcctggccatcatggggaaaccccgtctctattaaaaatacaaaaattagctgggtgtgatggcacacgcctgtaatcccagctactcaggaggctgagacaggagaatcacttgaacccaggaggcagaggttgcagtgagccaagatcacgccactgcacagcaacctgggcaacagagcaagactagagtctcaaaaaaaaaaaaaaaaaaaaaaaaaaaaaaaaggaaagcaaaattgtagataaggaggactactatacaggttattgtgtaaacataagtttcatttccctgggacaagtgttcaagactg

SEQ ID NO: 24295 - DNA, 1480 bp, Homo sapiens
gggaccccgggcgcgtgggtagagcggggtgccccactggccccccaggggcacgcagctattgttatttcccccctcccccgcaggatgaacttgcgtcctttctcttctccgccatggaattctgctccgtgcttttagccctcctgagccaaagaaaccccagacaacagatgcccatacgcagcgtatagcagtaactccccagctcggtttctgtgccgtagtttacagtatttaattttatataatatatattatttattatagcatttttgatacctcatattctgtttacacatcttgaaaggcgctcagtagttctcttactaaacaaccactactccagagaatggcaacgctgattaccagtactacagctgctaccgccgcttctggtcctttggtggactacctatggatgctcatcctgggcttcattattgcatttgtcttggcattctccgtgggagccaatgatgtagcaaattcttttggtacagctgtgggctcaggtgtagtgaccctgaagcaagcctgcatcctagctagcatctttgaaacagtgggctctgtcttactgggggccaaagtgagcgaaaccatccggaagggcttgattgacgtggagatgtacaactcgactcaagggctgctgatggccggctcagtcagtgctatgtttggtaagttctttttatgttttgtcctcttcgtggtgggtgagcaaatttgtatcatgggtggttccatttttgtgcataacctttccgattaacctttctgaatgtgccacttacataatggaattttgatatttacttaataaaactttactatgtttcaggttctgctgtgtggcaactcgtggcttcgtttttgaagctccctatttctggaacccattgtattgttggtgcaactattggtttctccctcgtggcaaaggggcaggagggtgtcaagtggtctgaactgataaaaattggtatgtttaattccaaacggcttcttaattttcgttttcgtcatatgttaccatggcattaggtatgggaggatgtgttctaacgtcgagggacagacccaagaattttgaactcttaaacatttaaagtggtttttggtttctgattttcattatttgatattttttcttaatgtgttctattccagtgatgtcttggttcgtgtccccactgctttctggaattatgtctggaattttattcttcctggttcgtgcattcatcctccataaggtaacctttctcccccgtatgaagacctttcatggagcacacccaatcgatttcaaacccagtggtacttttgcagatgtgattggtgtataggtatgcggccttggaaaattttaaaaagctctttgttctgtgcatttcttgtatgttgtggagttctctgaaagcgagtttttaatactcaagagggcagtcaggaaggaaaaattgaatactat

SEQ ID NO: 24296 - DNA, 1198 bp, Homo sapiens
tccagagtagctgggactatgggtgtgtgccaccacatctggctaactttttatattttatagaggtggagtcttgctctgttgcttaagttggtcttgaacttctgggctcaagccatcccctgcctcatcctcccaaagtgctaggattacagacagacatgagccaccaccacacctgacctgcattttcttaagactagtctttagaataaaaatacacaccttagtttcctaatcttgttgactgccctcagagtttgaccaccgttgagttagttattcaaggatgcttaacagttcttgatttctgtatgctattgtttttgttttggctatttcactatctgttaacattctctattaaactatagataagagttaaattttagagtggttttcaatgagtgctcatctctgctaatttgaaatggtacctttactttacacatgggtctgagctttcccttgtttcactggtcttaagctactaactttccagtgtattgattattgttggaagctgtagggttttactttctgtttttcctccccaagattttccactggaattgtgatcaagataacattaaaccttttaggctaaggtctttataaagtttttagccttcccatatatgtattcagatctttgctcccaatttttttttttttctgagatggagtcttactctgttgcccaggctggagtgaggtggcccagtctccactgactgcaacctctgtctcccaggttcaagtgattctcctgagtcagcctccagagtagctgggactacagatgcttgccaccacatccgggctaatttttttggtatttttagtagagacagggtttcaccgtattacccaggatggtctcgatctcctgacctcatgattgtcctgcctcggcctcccaaagtgctgggattacaggtgtgagccaccgcgcccagcctcctcccattctttcggtgtttgacttgggtgttctcctatagaattaatacatactaggtatggtagaattcttatttttagtcactggccttactgttccttaaacatttcaagtttttgccttagggcctttgcatttgctgatatctctgtctggaacattcagcgcccaaataatcaggtggtttgccccttctgtacccatagttaatgtacacagcttgctagcttacta

SEQ ID NO: 24297 - DNA, 1885 bp, Homo sapiens
tttcagcttatcagccccatggttgagctactttcccctacagaatgagtcagcagggagctaagaagggttcttatatctgtaaagggttgtaaaaataaaaacaaaacaacaatgtgctacagaagcccgtaaaacctaaaatatttacagaaaaattttgggacccctgacatagggtgttctgcattgctggttgttcccaagtgagagttgctggcaaatgataaagcaggcaggaaaaatgttcctgaatgttaattgaagttcacatacattcttgttttgagatgagttttttgggggtggaggaaaggagacgtggaacaaagtagtatggccacaaccaaaccaaaaaagaccccccttttttttcctaggagaaataaagtgtagtccttctgaaagccccttaatggaaaaaaagaatagcttgaaagaagaccatgaagaaacaaagttgtctgttggtgatattgaaaacaagcatcctgtttctgaggtagggcctgccactgtgcccctccaggctgtggtggaggagagaacagtctcattcaaacttggagatttggaggaagctccagagagagagaggcttcccagcgtggacttgaaagaggaaaccagcatagatagcaccgtgaatggtgagttggaattcctggtttcacttttgttacctgcagtggtgaggaggcttattgttttggatttgatgctttttgtattgaatgtcaccttggtgatcttgactaggtgcagtgcagttgcctaatgggaaccttgtccagttcagtcaagccgtcagcaaccaaataaactccagtggccactaccagtatcacaccgtgcataaggattccggcctgtacaaagagctactccataaattacatcttgccaaggtgggagattgcatgggagactccggtgacaaacccttaaggcgcaataatagctatacttcctataccatggcaatatgtggcatgcctctggattcattccgtgccaaagaaggtgaacagaagggcgaagaaatggagaagctgacatggcctaatgcagactccaagaagcgaattcgaatggacagttacaccagttactgcaatgctgtgtctgaccttcactcagcatctgagatagacatgagtgtcaaggcagagatgggtctaggtgacagaaaaggaagtaatggctctctagaagaatggtatgaccaggataagcctgaagtctctctcctcttccagttcctgcagatccttacagcctgctttgggtcattcgcccatggtggcaatgacgtaaggtcagttgacattgatcttagtgttgctaaccctatttttaaaccatttatccttgtcacaggcctgtgcttgtggtagtggtactcctagcatttacaggaccccaaataatacaaataggatgaggtaatagcagttattgacataataagacagtacagttttattcttcagaggaattacaaagaatgtttatttttgtagatgataaatataaacagatactcttcacagagaaggcttttgtccatcaagatgagattcagttctttggtagtgaattgtgggatgtaagatgtaagatgaaaaacttaaaagtttttcatatagaatgattttgtagtttggtttgtaaactgtttattggaacctgagagttgctttaagctgcctataggaggaaagaggccaccatttgcctggcattccctccatcagagctgtgttcatttttctgttgtgtatgttggggttccatttatgtctttagaaagaaaggcccttttgccagatgagcttgaaagctgtactttagacaacctggtagatcattcagcagattgggt

SEQ ID NO: 24298 - DNA, 1028 bp, Homo sapiens
ccatggggaaggatctgacaccgatcacaccctctaggtaagtaggtggagcaggttctacaaatgtcagtactcatttttttcagagatataacactgtcgagtgctaacacaaatctctaaagtaaccaagtttgtataagttcatgatgttcttattgtcattgttctttttagattttacttgtctggcccttaaacattttggtcagacattttacccatttagctctggtggtctctgaagaaaatgacttttctgagaaagctgtgtatgctaagagcggatagttatgtatacttgccttttatttgtcttgggagctaagactcaatgtttaccaaactcttcaaaataaaagtgcaaattttatttaatagtgggattccagaaaaacgtaaaactggaagcctttgaataaggaaactgggcatctgtggcctgatttaaataaagtagatcttaggggttatagcaaataaagatgtcagtggaggttttgtgactgagtagaacaaagcaggactgtgttaacttgaggtgtagtgttagcttctcaaaaaagtcaaactcacttcctgacaagaatccttttgtgtctgtagtggcttcagtattgaactggcatctgccctcactgtggtgattgcatcaaatattggccttcccatcagtacaacacattgtaaagtaagtgtaatgccaatgtgtgtctttcaaatggttcttctaatatgtagggtttttagttttacttctctgatactttgatttagaaagttttgtgcagttggagtcttgaagagttcataagttatttcttgtgtttattcttatttaagcaattaaatagatattctccccaaataatagaaacattgttttatatacagcttactgtagtttctggctactaacctcttcctttgttactttatcctccctcattgtagtctctttataataattttttttttaatctcaagagtcatttctacttggcaccattatgttttatttatttatg

SEQ ID NO: 24299 - DNA, 1051 bp, Homo sapiens
caccaaattgttaaatgtggtttcacttgagggggtgggaggatgggccccagaggggtttttataggggcctttcacttggtatttttttcattttgttctgtttgaaattttgttttttctttttaaatggagtttcactcttgtcgcctaggctgcaatgtagtggcgtgaactcagctcactgcaacctccgcctcccaggttcaagtgattctcctgcctcagcctcccatgcctcctgtgtagctgggattacaggcacccatcaccatgcctggctaatttttgtattttcagtagagatggggtttcaccatgttggccaggctggtctgtaattcctgacctcaagtgatccacccaccttggcctcccaaagtgctgggatttcaggtgtgagccaccacgcccagccctgtttaaattttttataagtatgtactacttttgtaatcagaattattagaaagcattttactgatttaaaagcttagacatgttcaaatgcctgcaaaactacttaacactcagctttagtttttctaatccaaaaaggccgggcagttaatctttttggtgccaatgtgaaatttaaacggttttatgtttttcctgtgttgtgaatgaaaaatatttctgagtggtggttttttgacaggtagaccatgtcttgtcttgtttcaaaataagtatttctgattttgtaaaatgaaatatacaatatgtcacagatcttccaattaagtagtaagggtttatccttaatccttgctaatttaagcttgcataagtcactttactaaaagatctttgttaagctagtattttaaacatctgtcagcttatgtaggtaaaagtagaagcatgtttgtacactgttgtagttatagtgacagctttccatgttgaggttctcatatcaccttgtatcttgaagtttcatgtgagtttttaccattaggatgattaagatgtatataggacaaaatattaagtctttcctttacctaagtttgctttcttgactagtaatagtagtagatatttc

SEQ ID NO: 24300 - DNA, 1024 bp, Homo sapiens
aatgggacaggcagtccgggtgggagagtggacctgaggaagtagctgcaggcccagactacttcagccacaccctgatcccctgggaccctcagggcacaggaggcagtgctggctccaacctcagtccaaggagctgtggaagcctcagaggtccttggcagagatgagccctcaattctcacctcaaaggcagcgattgaagttttctcttgtttgggtggcagaactataagttgtcagagggcaggtagtgggtctttggtttttctgcagtgccacagggctagcttaccttagaggccataagtattatttgttgagatgcatgaatacaagaatgtcttataagctctaggctcaattttcaactcccacagatgtgcaatgaaaacaattttccagactactttttttccctcttattttgaaagcaatacacttattttttccatcaaacattaagacaacagagataagcaacatagaagaaaataataatcacctgttattctactacgaacaatttggaatttatcttaagtctcaaaatatatatgtattaaaacacaaggtcatattgtaaacattgttttgacctgctttatttcattcgatgttaaattgtaaatacctttttttttttttttttttttttttgagatggagtctcgctctgtcgcccaggctggagtgcagtggcgcgatctcggttcactgcaggctccgcctcccgggttcacgccattctactgcctcagcctcctgagtagctgggactacaggggcccgccatctcgcccggctaattttttgtatttttagtagagacggggtttcaccatgttagccaggatggtctcgatctcctgacctcgtgatccgcccgcctcggcctcccaaagtgctgggattacaggcgtgagccaccgcgcccggtccctttttatatcatgttaaatatttcttctaaaacaaaattttaagttgttacagtgattttttataggtttgtatgctctat

SEQ ID NO: 24301 - DNA, 1030 bp, Homo sapiens
ctaatcaacatactttcttatatttcttgataatatgttgaatttacttttgagcatgttttgaagaggtagttagtcaatctttatgtcccttttgaagatatgatgaaatagttacatctctattatggaataacatgaagtggtttaaaaaatgaatgatgtatggtctggcacggtggctcacacctgtaatcccagcactttgggaggccgaggcaggtggattatctgatgtcaggagttcaagaccagcctggccaatgtggtgaaaccccatctgtactaaaaatacgaaaattagccaggcgttgtggcgggtgcctgtaatcccagctacttgggaggctgaggcaagagaattgcctgaaccttggaggcagaggttgcagtgagccaagactgcaccattgtactccagcctggacaccatgagcaaaacttcgtctcaaaaaaaaaaatgatgaatgatgtatttctaattctagtgagaaggaaagagtatcagtgcatattgtcaagtgaagaaagcaaactccagaacaaagcctatgtatgttcctatttattaaaaacaaaagccgcatatgtatacaaatgtactctatctttctgttataattttatgaatgcagatgtatgcaaatacatatattcatatacataagacttagtctaaacaggaatattctttcaggagggaatcttgcttctcctacagaaaaatacctaacatggcaggggcaaagataatattggaccaaaaaaatctggacctatgtctattaaattgctcacagtgtttatataatatcggtgaagggaagtaaaattgaggttagtgaaagagactccacgttttaccctaatacttttctactgtttgaattttttatagttataatacattcaggtataatacataatttatatataaatactatatatacatccatacacacacatatatatatgtgtgtatatatatattttaataagaaacaaggtctttctctctcacccaggctgg

SEQ ID NO: 24302 - DNA, 1061 bp, Homo sapiens
aataagctgcttggaaaagtttctgttctttagctgattttttagctataaaaatgtatttgaaaagctcataaatttcaggattgaaaagataattgaaagttttaaaaaaacctaattcattgaagtaataaccaaataattttcaatcttgattcaactgtgattcaaatcttacaccatttgcccacttctatgaattttatgtataaaattttttaagagtcagagttttttttcttgattaattggatgtatttcacagaatttccaactgctcacgttagttttcttccttttagagttgatctctctaatgtattagatcttcatgcctttgatagtctctctggaataaggtatgttttgtataatttggttacttttattgttatgtaccttttttccccatagttaacaggaatgatttgcacaattgcatccatgatttaagcttcctgccattcctttggcatacaagaccatacttaatgaggtatattcttggaagttttactaactggttgtttggaaatcatattgcattttcctgtagaaattatagtgtaaatgatagttaactttagaggctaatcgttaacacttctacaccaaacactatatctagtactctttctatgagaaaatgcatgaaatacatagaaaattttagcttagcgttttcacacaaataactctcttcactttatttttttattttttattttttcttgagtttttttttaatttatttatttattattattataccttaagttttagggtacatgtgcacaatgtgcaggttagttacatatgtatacatgtgccatgctggtgcgctgcacccactgactcgtcatctagcattagttatatctcccaatgctatccctcccccctccccccaacccacaacagtccccagaatgtgatgttccccttcctgtgtccatgtgttctcattgttcaattcccacctatgagtgagaatatgcggtgtttggttttttgttcttgcgatagtttatggagaatgatgatttccaatttcatccatg

SEQ ID NO: 24303 - DNA, 1032 bp, Homo sapiens
ttgaaattggctttggagtttacatatactgaacatgaaagtttataataatgatgatacaactttcaacattgtcattttttcttagaacttcagctgattgcagagatataatgattacattgttattaaatttttttaacacaagtaagtgtcaccattttatgacatgaaataaaaggttatgactgttattgatgttgatgttgacgacctgatcacctggctgaaggagtgtttgtcaggtttctccattgtaaagttactcttttcccccatttcatactgtgctctttggaaggaaatcactatgcacagcccacactaaaggaatggggagttgtagtgtacttttttgggagtggtctacataattaattgaaattcttctgcaaaggacagttgtccctttcgctttattagttcgatcatttatgtttatcagtgtggacacatgaatattttatactttgggttacaatttaatactgctttattttgttgctcaaattagcccagctttgaccattgggaactctttccgttatctcctgttcccgcctttgacatgcccccatcaatgtgggtttccgttatctcctgttcccgcctttgacatgcccccatcaatgtgggtttccgttatctcctgttcccgcctttgacatgcccccatcaatgtgggtttccgttatctcctgttcccgcctttgacatgccccctcaatgtgggttttgtgttttgtttttgagtgcctccttatttttctcctgcatttttaaataaccccgatccctattgaagctggcgctgggaaaactaacaatactccctttcccaggtcatccgattcctatgctgatggaggaaatgtgcctcacatgccgggggcgctggggaggaggcgtctgggattttgtggttgaataagacacctggcctggccctcctggagcttagtttagtaggtcacacaagcagtcattggtaaatttgggattcaaacaaatctgttaggctcaaacctgtct

SEQ ID NO: 24304 - DNA, 1050 bp, Homo sapiens
aatctagcaaggcaggccaacattcagattcaggaaatacagagaatgccacaaagatactcctggagaagagcaactccaagacacataattgtcagaatcaccaaagttgaaatgaaggaaaaaatgttaagggcagccagagggaaaggttgggttccccacaaagggaagcccatcagactaacagcggatctctcgtcagaaactctacaagccagaagagagtgggggccaatattcaacattcttaaaagaattttcagctttccacagcgcgggggaaccggaggctgcaggatggtcaagctgacggcggagctgatcgagcaggcggcgcagtacaccaacgcagtgcgcgaccgggagctggacctccgggggtataaaattcccgtcattgaaaatctaggtgctacgttagaccagtttgatgctattgatttttctgacaatgagatcaggaaactggatggttttcctttgttgagaagactgaaaacattgttagggaacaacaacagaatatgccgtataggtgagggacttgatcaggctctgccctgtctgacagaactcattctcaccaataataggctcgtggaactgggtgatctggaccctctggcatctctcaaatcgctgacttacctaagtatcctaagaaatctggtaaccaataagaagcattacagattgtatgtgatttataaagttccgcaagtcagagtactggatttccagaaagtgaaactaaaagagcgtcaggaagcagagaaaatgttcaagggcaaacggggtgcacagcttgcaaaggatattgccaggagaagcaaaacttttaatccaggtgctggtttgccaactgacaaaaagaaaggtgggccatcgccaggggatgtagaaacaatcaagaatgctatagcaaatgcttcaactctggctgaagtggagcggctgaaggggttgctgcagtctggtcagatccctggcagagaacgcaaatcggggcccactggtgatggtgaagaagagatggaagaagacaca

SEQ ID NO: 24305 - DNA, 2044 bp, Homo sapiens
tttagaattttagtcctggggtagtctcattccagagctcactgctctactgttccctaattgagatacatccaaggagagtggtcaaattattagtccagtttttaagagtgtccattttatacatacttaaacccaaagctactaatttttagtacaaatatgaaacatatagggaggtcttagtgaccagttcactgatttgattaacctataacacattaaagtgaaatatggatttgcttactgcttatttgagtattgcaaggactgataattgctgataaattcagggcagctcaaggaaatgatgctaattacatatatcttcaaaaggaaggcatacatatttctgaagctgcaatttgaaaatgaataatctccactgatgcattacttactgtaattattttactcactatgtattatgtgctcattaatgactgcacaaaacacatatgaaagtaaaaaaatagaagaacttaaagtaatcaagtatttatttcagtctcagttctgtgctgaacactatggtatatacaagaaaactaaggcatgattttatacttgaggtttacagtttagtttcaaagatgaaactaatatgtgtgaaataattatggatggcttactagcatttaattgtttgggcagattaataagggctgtagtatttggaggatgatttatgaagaagctgaacttgatcagatccttggaaaagcataaataggatgtgatagatatatgggaagaaggacttcaaatctaggatgtgagctaaattgaaagctccatagtggcagggattatttcttttttgtgcattctctattcaagtgatagcgtcctgcatgatatttaataatgcccagcaaatattttactgataaagggaagtcatgaaggagtttcaaagtatttgggggatgggtcagttaggaaattgccctgcctggaattcagatatttctgttgggagctgtgggacagcaagtagtttatttactcatcttgccttatttcagaaggattttaaatggggcagaatggtttgcgatttatttgatagacagtagtggattgtgtagatcattaagcaaaagagtgataaaaggtaaatttatgcactattagtctgggtctagtattttactttatacagctttattgagttataattcacatactgtaaagtttactcttttaaagtgtgtaattgagtagtttttagtatagtcacaaggttgtgcaactatttccagtcaatttcatttttttttaatgcctggatgccacttattggaatccaatcaattttagaacattttcatgaccccaaaaaaccctacacccagtagcagtcactctccgttacctctaccctcaacccttagcaaacactaatttactttctgtctttatggatttgcctattttggccatttcatgtaaatggaatcatacaatttgtggctttttgtgactgatttctttcatggggcaagtgctgactgctgtagtcgttgtcttcagtggtgatggacgtatagcaaagggactgggaaaacgttgagaatctttgaaagcaaaattaaaggaatgggtagagggataaaggaaggcctatggataaaggaaaatcatcttgggaaggaaatgtttaccaaatacttagtgagttttattcactgttaggtcctttaatccttatgacaacctcatgaatttagttttattcccgatgcattagggatagtctatgatcacaggatcacaggctagtaaatggtggaacaagcattcagtcatgtcttctttatttcaaggttcatgttctccccactagtgaaaaggagttaagattttaaggtttaggcttgaagggaccaggagaatgtttctgttgacacacagagtaggcgtccaggttcttcactcaacagtccatcagtatttttgtgtcaggttaaacattgacttgcatgtcatgagaaaaatgttggagggaattggaaaagttttttaaaccattgctgtttat

SEQ ID NO: 24306 - DNA, 1027 bp, Homo sapiens
cgcccgccaccgcacctggctaagtttttgtattttttagtagagacggggtttccccgtgttagccaggaaggtctcgatctcctgacctcgtgatctgcccgcctcggcctcccaaagtgctgggattacagacagttagttctgtactgtttaatgcaatcttccacatttttagctttaggacagaaatagcctttataaaatatgtaaatcttacaaatcatgctcctaaaagcaaatgtaaacctctaagtttgtcttaataaaatgtagggagtgagctattttattgcataatacaaaattaattttatgtattttctttccacagatactacatttaaaattgaataaagtactccagggaactagttttttttttttcgattaactctttgtttttttgttttttttttttgtttttttgcctttcttctttctttgtgctcaaggctgttcttgccttagctgcatcttggacctcaagacaagtaggagaacggacgttgaccggtacggtaatagacagtggagatggtgtcactcatgtcattcctgtggtaaggctattttacagttactgaacagaacatgaaataacacatctggcaaagttaaattatacgaattaatgttacttttaaaaaactttaaatgctgcactataatttggccatttgtccagttatagctatgttttgctcaccgtttaaaacttttataaacaattcaaaatgtttcttttactgtaggtttgtactgcaattaagaaaattacaaattgcaatatctggaatggaagtatattaatggctttcattctgttttccagttggatgtgtgttagccatttgatgacctcttttattcataattaacagatttcagactggtgtacagggtaactgtataacagttagttttaagtacctgaactttagtagatgctttatggtttgtacttaataaagcatattaagaaaaatgcatcaaattagattgtcagaaataacatttttcttcc

SEQ ID NO: 24307 - DNA, 1054 bp, Homo sapiens
gttcatgactgtagtcccagctactccagaggctgaggagggaagataacctgaccctggagaggttgaggctgcagtgagccatgatctcaccactgcactctagcttctctagcttgagcaacagagtgagaccctgtctccaaaaaaaaaaaaaaaaaaaaaaggttggtgggggggtgctattcctttttattgtttacttttcccgccttctttagaattagtagagtattttttattattctgttttctctttattgacttattagctatgctatatctgttgtcatttgtttgtttttggtggtggttgttgtatgggttgtagtaaacatctttaacttaccactgtctaattacaaataacattctactacttcataaataataattatacaacagctttgaccttctagtctttgttcttatattgtcattcattttacttttatatgttgtgaactcaataatacattgttaacttgtttcattttgagtggtgtattagtttgctagaactaccgtaataaagtactacagactgggtacctaaagaataatgtatttcctcacaggtctggaggttagaaccaaaaattgtgatataactacaatgtgaggagtgggaaaggataggtatcaggattttggcagggttggtttcttctgaagactttcttcttggcttctagatgtccatcttctttatatgtcttcacatagtcctccccatacatgtctgtgtcttaatctcctcttcttaaggacaccacttatattggattagagaaagcaaccctaatgaattcattttaactagataccactttgaataccctatctccaaaaaacagtcacgttctgagatagagcttaggacttcagcatgggaatttggtggggaggaaaaacacaatttacccagtagcaaaaagttatctttaaaagataacttttttggagacagagtcttgctctgtcgccgaggctggagtgcagtggtgcgatctcagctcgcttcaacctctgcctcctgggtttaagcgattct

SEQ ID NO: 24308 - DNA, 1083 bp, Homo sapiens
ttttattgctctgtcttcaaattcactattttttcttcactgtgtagtccactgtaatctcatctagtgtttttcttttcatctggtagatttttaaattttagatactgtatttttttcttcagaagttccatttgggtctttttatatcttccatttctctcttcctcatcctcattgttgaccttcttcattatatggagtatatagttgctgttttattgtccttgtcattcctctgtattgtttggtttttctcctcgttaagtgttgtgtttttccgcttccttgcatgcttataatttttgatttggcactctatacattgttgtgtattgtatttttggagttctttataagtatttaggattttttcctgggacatagttaagataccaggaactagtttgatcctctcaggggctccttttaaatgttattaagcaggtccgtaacaggtttttgtccagggctggtttgtccccattcttgaggcaatattcttctgaggactctacttcatgtcttgtgtttgaaaacatctttcaactttggctagtgggatcaggaactatttctggctatgtgtgagctctggtggtggttctgtctacttttttctagaggtcctttctctcaccttgatggtttcctcacaggagtgtgctgatcagtattcagttaaggaggtactctcttcacatcttcccagctccctgttggttcaactcctccccctccaataatttggcctacaaacttcagccactttggcctttctgacctttaaattctatatccctaacttaatgagaccagtttgagttctctttcctattgttgtggcctagtaactctccctaggcagtaggatagagtgtaacattcacgttatttgtttcccttttcttagaaagtatctctgccctactctgccgattgtcaaatgtctgaaaacctttctttctttcttttttttttttgagacggagtttcgctctgtcgcccaggctggagtgcagtggtgcgatctcgactcactgcaagctccgcctcccgggttcacgccattctcctgcctca

SEQ ID NO: 24309 - DNA, 1059 bp, Homo sapiens
gcctgcaaagaatactgaagatgacagagaggtagaagccaagctaaaggattatggtcataaaattgagagaagtgaatgtttcaagaagggagggtaaatagtgccagttgctgcagtgaagtaacattagaggaaaccttagaagtacttggagtttttcagcatctaggttattgatgatcataggggaggcgtttcaatggagtgatacgttagagcagcttgttacttatctcagtgagaggtgaaggtttggaaatcagcagtctggacattctgagagatggctatgaaagaaaaagacagtggacgagtaagaattcagttgcaagaataaggctcaagatagttttaaatttttaagagggcttactccagttacaggagggaaggaattaagtataggtacaggaaaatgaactaggaagggcagaagcacaggtaggtagttgaagaagttcatcatcatagttcatagttttaatttttttatgaggtggaatcaagcttatgttttgggagaagggactggactaaaattgaggccgaagcgggcagatcacgaggtcaggagatcgagaccatcctggctaatatggtgaaaccccgtctctactaaaaaaaaaaaaaaaaaaaaaaaaaaaattagctgggcgtggtggtgggcgcctgtagtcccagctactcgcgaggctgaggcaggagaatggcgtgaacccaggaggtggagcttgcagtgagccgagatcacgccactgcactccagcctgggcgacagagcgagacttcatttcaaaaaaaattgagggcttgtgaagaataatgactttcatatttactgttgaggggaattgagagggtgactagtgagtacatattaatagtatggggcatccattctttactcaaggtagcaggttagatacccaaaacttttagttgtgcaatagtgtcctctcgcctcccccagacagttgtgggaaaggaggaaaaggttttgataaagcagagattaaagtattacagcatagaggagagagcaagtcctgaaagctg

SEQ ID NO: 24310 - DNA, 1025 bp, Homo sapiens
gtttggggagtttcttcagagtttgttgtaagaagtggagttactggtatgtgcatttaaaattttattagctatttgtattagtccgttttcatactgctaataaagacatacctgagactgggcaatttataaaagaaagaggtttaattggacttatggttccacgtggctggggaagcctcacaatcatggcagaaggcaaggaggagcaagtcctgtcttacatgatggcagcaggcaaagagagaatgaggaagacgcaaaagcagaaatccctgataaaaccatcagaccttgtgcaacttattcactccatgagaacagtatgggggaaaccaccctcatgattcaattctctctcaccaggtccctcccacaacacgtggaaattatgggagtacaattcaagatgagatttgggtggggacacagagccagaccatgtcactatgttactattgccaaattattctccatagtggttacatcagtgtatactctcacagcgttatatgaaagtttccatttacccagatttttgccagctcatagtatatgtatgactttacatgtttgctattctgatagttataaaatggtatatatcatcataattttgagttttctctgatttcagtgtcttcaatctgaatctgttagagaccagtattagtggtttctaaaaggccttttgtttttgaactgaaaactttgtttaaccttttattgtgatatttgtcagtagtgatatgatctctattatatatccaacttatttttcagtttgctaatccagactttacacaacctatctcagaagttgtagatgaagtaattcagaattgtcctattgatgtcagacgtcctctctacaaggtatttatagcaaaattgttattcaaggtcttactttaaaaaaacttaaacacctctcataaaaaggatataatagcatttcagtactatatattatatctttaaacttttctctttttaaatattatatttattttctctccact

SEQ ID NO: 24311 - DNA, 1023 bp, Homo sapiens
gaagagtacagccatttattttgtagcatatccttcagcttgggtttgtttaatatttctgcttgagtaggttcagattatgtacttttggcagtgatgccacagaattgatattgtatcatttttagtgcattgtatcagtagacacatgatagaatttgtcctgtgtgtgaattttgagcttttggttgaagttgtgtctgccaggttttttcactataaagttattatgttttcctttatatttaataagaatctaatgaggagacactttcagactatcctgtttctcttttaagtttcagtcactagtttttagcatccattgtgattcttccctaaaacagttattactgtggtagttgctaaatggagttttgcaatttctgtcattccttctatgtttttaagacttgttttactataagcaagagttttcccttctcccacattcatttattcttttagtaatatctatatgaactcctgatttctcattttgtggtctatatctttaatatcactgtaatatcataatatcagtaataccactcatcattaattttaatcccacatttttttttttttcagatttgaccagtgggagttattcaaatggctcttaggtttttttttttgatgcagccacatctttttttttgcctacttctgtacttcccggcacagcaaggtgtttcaggctgatcttgtactttctcttttctggccctggaatcagccctttttttctccttttctttcttcaagacacccttgtcttattcctgttagtggagaacgttactaagaaaccaagctttgtgctcattgctgttggggtatcactgagtctaggccttctcagtgattagagctaggggtgtgtgtgtgtttatacatctatatctaattctctacataaattaaaaccatgaatttttacagacgtctccagttatagaaggttcactctagttttctgcccttccatattgtaatgcccttctctgacagtgagaaacc

SEQ ID NO: 24312 - DNA, 1022 bp, Homo sapiens
aggcggtttcaaccaggactcaggaataagtacaaagtgaaatactaatattgaaaaaccaggctaagccaaaggaatggacaaaaataatagtgtcccattaccagaattaaaatttgttcagaaagatgttgagttaaaatttgttttccttccaaagaatgttatataattagaatgagggtatgtttgccatatctgtacccatgattgttctctggtgatcccatcaaggaagaaagatgctgggtagaactgcaatattgtgcattagggaagtgacattcatactgctgtcttcatttcaattctttctgtgacacttaccgttctgggaatctgattttcacatcataatatgaatattcaaaatactactttacatatcacatatggtttggatttgagtgatttcttcccaagctggagggatttctctcaagcaaatctatgtattttcttttaaacatttttactgtttagaaatgtttagaaagaaattctaagtatcctgaggaaaagtctcaaatagatatgaacatttttttcccctctcagatttttgaaatagccaatctaattttttccaaactttgaaaattaattcacttaagcctatgggtactatataatgtgttattaaaataatgctataattcagttaattaactcaaatgctcagagcatgagagattctagttaacttgaattttctagataattgaagcttttccttaaaatctctgcttttgcccatctcttaaagtactttgaaatcataattgaaaaaaaatcataattgaatatcaactcaaattgtacagaaatatagatttataaaaagatttgaatttaccatgagaaatagtccaggtatttttccatagtccctatgtatgtttaaatatatctacattatatcctatagaattgtaactggaagcttgaagttgggggtaacctgcaacttagtccttgtaaactgctggatattctgaaaggtgctttcatacatcaactca

SEQ ID NO: 24313 - DNA, 1046 bp, Homo sapiens
cgactcatttttttttaataagtaaaaggagtaaactctaaaatgatgatcaaaagtatagtaaacacataaacaagtaacatagtttattatcacgtattatgtattgtacataattatgtgtgctgtactttatacgactggcattacagtagatttgtttatactagcatcactacaaacatgagtaatatgttgcactacgacattgcagttactgatggcactaggtgataggaattttttagctccgttataatcttatggagccactgtatatgttgtccttaattcacagaaatgtcattgtgcacgcattactgtatttgcatatgataaatattggagcaaataagtggtcttatcaactgaattttcaactcactgcagtctagaagagttggggttgaatgttttgaagtggtatgaaaaatagtacttgtgtgaatgagttgtaaatgtctttttcaatatatcagttaatcatatgtttatcaaatacttatgtttattctgtaactgccattatctgacctcatctgtttaaatatttgacctcattgaagttttcctgtcctagactccttaaagtcagatgtacggtcttttgcagttaagaaatcaatatagctttcccttttccagtattttttctttaagataacttactttccctataagggaacaccataaaactataagttgttttaattacatgaaagagaagaaaatctaaataatttgtgtcaggaagccatggaagttctcatttgggatttcagtgtttctaagtaaacttctccttctttgtcacagtatatgttctgtttatttaaacaggggcctcaaatctgaccctatcggaaactcaaaatggagatgtatctgaagaaacaatgggaagtagaaaggttaaaaaatcaaaacaaaagcccatgaatgtgggcttatcagaaactcaaaatggaggcatgtctcaagaagcagtgggaaatataaaagttacaaagtctccccagaaatccactgtattaaccaatggagaa

SEQ ID NO: 24314 - DNA, 1821 bp, Homo sapiens
tgtatgtctgtgaaataccactatgagttgctgaactacattgatttgcccgtcttggccattcatgtaagtgatgatgatgagctcattgaaaacagggtatgcttattaaatcctatagattgtaggattggaggtattgccctctcctggaaacattgttctgagtagtttgatcaccactagatgatggatcctgtgtgggggagcgctgctgggtgtggaggggtatgaggactttcgaagagtgcaagacaccatcctccttgaggggcttgcggaacagttggggaaataggacataggccaagggatgagctcgaaatagggtaacagttccacaatttgggggttctactgctagtcttcctcaagattccagctctaatggatgtttttatttaattctagggaaagcaaaagcaaaataagcgtacaaccacattcttccagttctgcaatgcagattcgggaacactattgtgtacggatgtggcagcgagaggactagacattcctgaagtcgactggattgttcagtatgaccctccggatgaccctaaggtaactggcatctttggaatatcttcagaatgactctgcattaaaagttcacttattctcccagttccctgacggaaactgcattccacattcaaggtaaagatccctactatacagtgactgcagtatttctctggtattgaaaagtacttaaggcttttcagggctcaaacgggctgtgccagaggattgaaaaggatcagtgggacttaagttatgaaaatgagatccttggaatgatctcttaagaacagcagatgcctgaaggaaataaaattgcttaaggaagtagataaacttctgtagtatatgtggtagaataagcttcattgagaagtattttcaacaaacactggattaaagccgttttgatgatgaagcacacataatactcattttattagatcgctgttaatgcaaacatcatgtccagccttttttttttttttttttttttttttttgggcctcaatcattggcctattgggggtgatgtgcacagagcgattgctggcccagctttgtgggggtgtggtgaaggtgtgtgtggcccagcaccgtgggactacaccatctcagtacagacatgcacatactcaggatgcagatacgcaaatgggctcatgtggaagtcactgcgttaactcagattttctttctccaccaaaggaatatattcatcgtgtgggtagaacagccagaggcctaaatgggagagggcatgccttgctcattttgcgcccagaagaattgggttttcttcgctacttgaaacaatccaaggtaaagatctgtacttggagaaagatttctcttggtgtagggattgttagcaagcaacatttctacatgtgtcagaggagtctcgagtctggccagtgctgttacaaccattcttatggcaattaagcaagtaaggttttatgtacttctagcccaagaagtgagcacagaaggaactgcccacatggctcggctttctagctctgttacccagcaacacctctgtgtcccagcctctcctttcctgttccctccagccctctttgaaaccttctccactcctttgaagctccctcacacctagtcatctctgcttctgctccccttctttcctcttacctcatgtgaagcagtggggaatccttgttcgctctagcctctgcctcctcccctgccctctgtctcctattcatcaactcttggcctacagtctcttccttgcggttggcgctttaccatctcaaatttctcact

SEQ ID NO: 24315 - DNA, 1031 bp, Homo sapiens
gtgattcactgggcaatcactgtcctttgaagtctaccctgtcctaaagtgaggatcaggctgtgtagtgtataaggtttcttgctattctagttatcaccactctgtgccctctttaaatgttttccatggagtggctttgctctaggatatttaaaatctggtgttttggaggtttttgtttgtttttgtttattaaaaccagtgtttctttctatttcagcttgagaaattgattgaaaagaattactttcttcataagtcagcccaggaagcatataagtcatacatacgagcctatgattcccattctctgaaacagatctttaatgttaataacctaaatttgcctcaggttgctctgtcatttggtttcaaggtgcctcccttcgttgatctgagtatccttttctttaatgaagttatcctgtgactaaggaacaaaagcttgacagaggggcatttggggctttgcagtggattggtatgtgttctggctcagactggaggctccagtgttcaccctggtcgatgtctgcttttctgtgctagcacaggacatagaggttggatggggtaagcagggcttaatcattaggatggggttacagggacaaggcagcttatgccttgagccttcaaaagacaaagaaatttgactgtcaaggagagacagagacagttgtgtgttccaggcagaaacacaggttaaaaaaatcaaaacttcagtgtttgctgaggctgcactgtgcagggtacttaggtgaatggggtgttttgaagctaaagagaggatgggacctttcaaggagttttaatcatcttagaacccctgaaggattttatgcaagaaagtggcaagttcagcaaaagaaaataaaacttaggtgttgcttaagataaaaggcaggagtacttccagttgcttcagttgtgatttataatttgtgcctttcagaagaagaaactgagcagctgaaatgaggcctgtgcttcagtgccataggggtaacttctgagggaactagagg

SEQ ID NO: 24316 - DNA, 1128 bp, Homo sapiens
taaagaaaatttcaaggtgattttacatttattctcatcatctttgtgcaattgtatagtcacctgcttgttttggcttactatctgagagtgtattatagttgagatggtatttcaacatctaaccatcttttcagtaaccaaacacttttatatagaaccatctgccgaaaaagaagtctgagcagttgagatggaatggaattcaaggtatagaggcaagaggatgggttttggaatcagacctgaagtggaatttcagttttgatactgcatgtcatgtgaccataagcaaattgctgaatctctttgacttggtagcctcatctgtaaaatgaggatgataatgtctacctttatgtttgttttgaagagtagagttactatatgtctggcagggagtaggccttccataaatgggtgccctataaagaataatgatgatgatgatgaggaggagagttctgtagctactgaaccttgctaaaagcaaccagatgatgatgatgatgatgatgatgaggacgaggagagttctgtagctactgaaccttgctaaaagcaaccagattatgatgatgatgaggaggaggaggaggaggagagttctgtagctactgaaccttgctaaaagcaaccagatgatgatgatgaggaggaggaggaggaggaggaggagagttctgtagctactgaaccttgccaaaagcaaccagatgatgatgatgatgatgatgatgaaggagagttctgtagctactgaaccttgccaaaagcaaccagatgatgatgatgatgatgatgaaggagagttctgtagctactgaaccttgccaaaagcaaccagatgatgatgatgatgatgatgatgatgatgatgatgatggagagttctgtagctactgaaccttgctgaaagcaaccagatgatgatgatgaggaggaggaggaggaggaggaggagagttctgtagctactgaaccttgccaaaagcaaccagatgatgatgatgatgatgatgatgatgaaggagagttctgtagctactgaaccttgccaaaagcaaccagatgatgatgatgatgatgatgaaggagagttctgtagctactgaaccttgccaaaag

SEQ ID NO: 24317 - DNA, 1022 bp, Homo sapiens
gtttctgtggtcactttgcaattggaatcgtatcttactcttttgcctttttttttttttttttttttttgagacggagtctcactccgtcacctgggctggagtgcagtggcgccatctcggcttactgcaacctccacctcccagcttcaagcgattctcctgcctcagccttccgagtagctgggattacaggcgcccaccactacgtccagctatttttttgtatttttagtggagacaggttttcaccatgttggccgggctggtctcaaactcctgacctcgcgattcgcctgcctcggcctctcaaagtgctgggattacaggtgtgagccaccacgcctggccttacctttttaaatctccagcaaataccaagaaccagacatattgtcagggcttaagtatttgttgaaggaaaatattatcttatagttttgcgtcgaagtatacctcatggagtgttttcgtttattcagttcctgttttcttacaaaatgtctgactttaactgtgttccttttagtgcctccctgcatttaagcacattcccataaaaaagtgatgacttactactgatattttacaaacttctttagtgtttagctttggtagactgtaactagtcactgggaaataacttaaaggtatcacaagaaatgtgatttttgcatcagagaaccatttgatttataagcaggattgtgtttgcatatgattttacacaggcatgattttaacagtctttcttgttttttttaaaaaaaagtacaagaagaggaaaagaggcccagacatactctgttgagctctcaaacagtggaacctcacagtgttgtatatattgctatcagactctgccatgcctttatttaaaggaaagaaagaagacatttaatgggaagtgacaagcttcttcgaattctccctctcagtgagcaactgagaaccatgcatactcaatggatttgatttttattggcaaatcccagggttggcagtgtggcagtttaaatttc

SEQ ID NO: 24318 - DNA, 1028 bp, Homo sapiens
tggttattttaaacatgcttttcaactgatgtgacagtagtgtctttattgccagaatggcacaacataatcatcctgtttttaggaagattagaatattttcattaaatagtctttttaataactaatttagcacttaaaattccttcccactaaatgaataaaatgttgaggtttgagaaataagaaagggatgagaatattttgggactcaatcattgacattttatatacagttatgtataattaatgacacaacattcaaagtgttctttccaaaactaagagaagtactaagatgatttcttcttctaacagtgcacttaaaatttaactgaaaattttaaatacctctacaccttgtttcctccattgtttctatgtgcagaatgagtcttacctgtagatttctgttgtgagttttcctgctttgacaatatgacctacagcctcattaaagggctagagtggaaaggagtgtcagtaaaaggtgctacatgctgaagactaaaacgggaagctggtaggggcgagactgatctacgtaagaggccagccagaaccttcagaacattgtgtgtatgatgagcttgttgtatacttttatacttctagattctcttagatttgtggcatataataaatattttatggtttggagtttagagagaacattacttaactgctaactggtttgatacttttttcaggtctcgtaggtatcagtagtagaaaagtagcatgaatcatttagtagcacgaatcatttagtccagtctgctaaattgtgaatcatacatttgaagagtattttgttgattataatttagaatgttgttgtaatcatttgcaatactttcttcattggtgttatcctcatttcatttcctttggaaggtaagttaaaaaatatcggtgattgatgtgaaataacttttttttttgtttttttttttttaagaatctttaaaatgcttgtggtggttgtagtgattcttttagcttaagtgttgccagtacaacattgg

SEQ ID NO: 24319 - DNA, 1043 bp, Homo sapiens
tttccattagtttttgaaattggtggcagttgtctgatccacaagggcaagatcttctgagtactctggggtgtgagtatgtgtgcacacgtgtgtgttggagtgagtgagagaatgtgtctgtgcatgtggccatgctttcctagaatgtcaagtagatatttttacactttgagttttaaagcaattactatcagactgagatcttgtatgccaaactttaatctgcttttatgttttcaggctgaaggtgtgaaaatcctaagaggatttcatattgaatatgtgtacacaatcttaactatcgtggtggaaaacatactactataatttattattatatcttccagataatgttattcatttagaacaaataaggtatattttttagaatcaactttgtaagcactataaaatctttaataagttataaggtctatgatgtgtttactttaaaaattgctgttaaaagcaacacgtattaaatatgtaattatcatctgggttaagagtctgtttttcttctttgtggtaagtcttagaatatggtactgtggattaatctaatgaaattaacatatgtggttgaagttaccaagaaacgatgaaaagaaactaaatatagttgacccttgaacaacaggagttaggggcaccactccccaacatagttgaaaatccatgtataacttttgactcctccaaaacttaactactaatagcctactcttgatgggaagccttaccaataagaaacagttgatgaacacatattgtgtatggtatatgtattatatactgttttcttacaatagtgtaagctaaggaaaagaaaatgtgtttactcttcattcagtggaagtggaccatcctaaaagtcttcactcatgctatcttcatgctgagtagtaggctgaggaggaggaggaggaggggttggtcttgctgttgcgggggtggaagaagatgtgcattattagtgggcccacacagctgaaaaccatgctgttcaagggtcaactgtgtgtggtatcggtgagact

SEQ ID NO: 24320 - DNA, 1034 bp, Homo sapiens
acttgtttctcttgtcccaaggatgggtttgccctaagcccattggtaccatgaagcccgctgtaacccttggtaggaaaagacaggcaggctttagggcagcccattggaagagcacagtgaatcggttttggggacattatgcagcttggtgtcaggtgcaggttgcatctgcaatccccagattggctaaatacttttgaacttcctacttgcctcaaagttaatacctccatttatgtttaattatttgagttcactgagattaaattcacctggggaatagggaattgggagttttgcttctagctgatgccccaatttatggggaatatatgtggagttaatttgctcctgcagaaaaagagaaaaggaagaaaagcttaaggatgatgttttttttcatttgatactgagccaaatatatttatttgggttaaaatatgtaattcccagaactgatcgaaaattcacaaggctgagcacgcctcatgcgtggcctgctgtggaaacgctattgctgaaggaaaactgttatcttgactaattctctttcgaaaagcatttactgtaatatgaggcaaatggctggtgagaaaagcagcaggcttatttttgttccttacaagctaagtggtacccctagagtaaaaatgtatgtctcacatttagagaaggagatagtagaattcaaccagtgaagggatggagtgaaagagaaaggccaggaaaggtctccaaacaggttttggaataaaacttagggttttcaaaagccccgctgatctgaatcttgggatgttaccaaaaaccagttgcatggccagaagcttacagcagtcagcatcatggtcggaagttacaggtccaggattattatagtgttagagtcctgagctcctggggctgcagccagtgattttagggccattataagcacattcagtgtctgactcctaggggacagttggtgggtggggtggcagggtgatgtccccatgaggtggctgcttgctggggatgtcactgcagct

SEQ ID NO: 24321 - DNA, 1039 bp, Homo sapiens
gtgacattgttgatgagaaactaataattttcataagttaaaggacatagcattcccttattataaaaatatgacctctaaattttgtttccataatgtttttacagaaagtttcaaattttaattttcttattaaaacatatagttacacacacaaaaacaataaaatggggataacaatagtgcccaccacgtagggttgctgtgagccctgaatgagatgacatgtataaaagtgctgggtagagtgtctggaacagagtgggcaattaatcaataccagataaaagttaaacaagcaaagaaacaaaatcctcatccctcttaaagtgcctgaaactcctaacactttgtgactgttggctctcagccctggctgcataattaatcacagtagagtgaactctccattatccgcactagtgaagggcagaggcatggataaaacaaggggtaatctaaaaatcatttatatatttggctttggaatgaagtcggagaaagacacacacaaacacacacacctgtcatttctgtcctggcaaaggcttcccaactgggatctctattgaagcctctggagactttctaggggcaggaggtgggggaaggtagcacttggcacttaacaaaggagatacagaatatacaaagcacttaagatttttttaaatatacgacatataaaaattgtcattactgttattaataatagtttactttcagattcttgacaggtgacaggctgttttcatccacacctcccctgtaacaaataacgtacttttctgctgctccacactgcccacccaaagagaattttgagcagatggaagatgaaatatgattcatttttatattcctctgaagtctttaaaagtgcttggcatatagtgggaggtcataaagcgttgaaattgtgaattaatgtcttttagggatatttctgtttgaagtgagtgttgcattttgacttgggatagaggtctccaccaggtctgagagctcccaaaagtcactgagcagctccatttcatct

SEQ ID NO: 24322 - DNA, 1038 bp, Homo sapiens
catattggaaaccattgttccaaaaaggtttggacgactaggtcaaatttctgtgctaatgaggatgttcagaccttgttgctttagaatcctcaggccgcgtttactcgatgccatatatttgcttatcacagccagcactggccatcagttcctaacacagctttcatctgcacccaccaatagccttgttacttgatgaactttatcctacacagaaaataaaaagagtccacagtccattatattgacattgtaattgataaatacctattgggaaagctgtccatctggcctccctttctgttatcacaagggagaccagagaaagaatagaacatgtgtagggaagatggctggacctttttattcacactggaggatgccaagaaaattatttggaacactggggctctgttccccatgatcagtttggtattgccaaatgcccttctacattttaatggagaacccatttacagtcactcaagcatcaggcatcttcaaattgcttctgtaaactttatttacacttagaacactggactatctatgcctatgcaagagtgtcccccttcgtatagtagaaaacccacaggttttagagtttgacagaactttaacaaatttcactctaccacttattggctaggcactcttaatgccctgtttctccttatatttctgggaaaacagaaccctcccccatctttttccatcaaatgcacctcatgattgagagccaacttatatagtacagatattttgggccaatctgaaatgcattggattgtctgataagaaagagcatttctaagcagatttcagttcaatccagcgcaattccatattcagctattaagcacacatcttatgtcaagcactgcccaaggtacagtgagggacacacacaaaggtgagtcaaatatacatcttaagtcagagagatgcagaccccactgggccaagctgaggtaagggctatagttggaattgcagctctggcatcataaatgattctacaggccttcactagga

SEQ ID NO: 24323 - DNA, 1037 bp, Homo sapiens
acatgagaaaaagaccacaggggaagaactcccagaaacatcccagccacagcgcaatgccccaggtgtatatggcccttggctacttcatgcccttgagggaaaatcggtattttcattttacacttgatgaaacaggttagagaaaggactggcgtgtccagtacctcccagtgagaagatactcagagtagaccccagatccaggtccttcctctttccctctctacacgttttcagtctagaaaagagttctgtgcgagaatttttttgtttttgtttgtttgtttgagacggagtctcactctgtcgcccaggctggagtgcagtggcgcgatctcggctcactgcaacctccgcctcccaggttcaagcgattctcctgcttcagcctccggagtagctgggattacaggcacgtgccaacacacccaggtaatttttgtatttttagtagagatggggtatcaccatgttggccaggctgtgtgcaagaatttatgttttcacttgtggcttgctgagccctggtgctggctgtgggcacatactcgttcacccagggacatgcactgttgatgggtccttgcactctgggctatcttgggccccgtttgctcaatgcaggcccctctttctgaagcgcttttcttgggctcactctcaattcgtcaaagttcggctcaggcccacctcctgcaggaatcctcccagtccccgctgtccgaagtcagtacccttgtcaggagaccttaaacactttagtccactgcctggccctcccatggggcaaaggtctccagggtgtgtgtgcacttccttggggcttcttaaggctcattccctgggattagggaggacatacagagcctccttgcacctacatttgtttacatattacttataccacatacaacgttatagggcactgctgcataagtgtacattttgaatgtattttacttataaagaaatagagcagtaataggaacatgtgcccctaaatgtaattttactgaccagacaaaaaaaatttt

SEQ ID NO: 24324 - DNA, 1050 bp, Homo sapiens
ggccgtgacctcactgccgtccattgcaaactcgctcaactggagggagttcagcttcgttcaggtaaagtagtctctagtctgccagccagcttcagcgtggccctggcccacctctcatgagtaagtgctctgcctttgagaactgcctgggctctgatcatctgcacagcaggaccactcggtgagatgccaggccttcctgacccagagggcccatccaagcctcttgataggggctgcctgctacaagcttaacctcccaacacatgaggaagccagacacaggcatgtgaaaaaattacagaccaggacactgagccctgggtccaccattctcaagcttctagaattcttgagctttccaaacaaaattgaatgacatgaagtcattggacattttgctggtctaggtaggagtcatcatctacctagacatccatctaggtaggagtctagggagtgagcgagcctagcccaccaccctccacccctcatctcaacctggctctgttgttccccttaaccccttgattcatgcagcgtggatgagacacaagcattaggaccccagtttataggggatgcgacacagctttttcccaaggatgccattcctatgaaaaaatccagaaaaaggaggtctgtcatcagatgaatttgagaaaagatttacttccccctaagagatcacaatgcactttggcacatcaaagattcgaataacatctacaacaaacaaacctttgttaatcagacttattggagtgttagcaccctccccctccttttttccaaataacagctatcagcactccacaagctgggcgctgtggcatgtggctgggatcccagctactaacagaggctgaggtgggagaatcacttgagcttgagcgattcttccaggagttagaagttcaagtgtccagcctggacatcatagcaagaccttgcctcttaaaaaaaaaaaaatactccacagaacatactctgggaaatgctgctagtggcaaaagtttctttttgcatttgttcattcaacaaaca

SEQ ID NO: 24325 - DNA, 1051 bp, Homo sapiens
aataaatgtcaactagatttggaaacatggaaacctaatggtgagaatttcagtaggatgttgagggtaaaatccagattgagtatgaataagaaggaaatggagacagtaatactggacaactcttctgagatttggctgtaaagcaagggaaagagaaaggatgggtaatgggaggggtatgtgggggttgaaggagggctggttatttttttccatggttctgacctaaacatgttttaaatgcttctggggaataaacaaggtgaaaaggaatgatggaagatgagagagagaatgatagagaatcacaaagtcctggaggacatgggaagagatggagtgcagagtacaggtggctttagaggaggagattgtcctttacaactaggagagaaggggaaaagaagtggctgagtattgaggggaggggctagttgtgatgacacagcatgtgacagttcccttctgatgttgtctgttctttttaaaaaaacagtcaatcccttctgctgagaacaggggaggaggaaggtttggctctgagggctgaagagggacaaaatggctgaaaataattgttggagaaaatgtaaagggagcagaccagaaaaactgatagggtttaaaaaacaaaaacaaaatttgattataaccattttttatccagagtgaaatataccaaattgtgtttcctgggaagtgtgcaaagtagatttttgtttagttaaattccattttccctcaccagtttctttaataattctaggtagtttgtcttagttcagtgtcatctctaatagtcactcagaaatgccttggcttcatttttgttttctctattcagaaatgaacagtcacaaatggaactttgatgcactaggcaaccaaaaacttccattgccaatcctcccataaagtgaataatcaacactcttgcttattgagggttgattgcatttattggaccagaaacctaacttatatctataattctcatatatgaagagtctattcttaaaaatctaattttagccaacatttaaaactt

SEQ ID NO: 24326 - DNA, 1051 bp, Homo sapiens
acagggctctaagctataacagacacagccccagcttcctaaaagcctctgagcaattacagcaaggctggttgcattccttgtatgcggccattctgaatcctatccgaccctgtcctgtttcccaccttgggacttgccaaggacagagcctggccctagtcatccatgattgctgacatcagtggggaaatcaggacacttctgggtcacttcctgtagggcacagattactacctagggcaccagggaccctggctttaggaagatttttttataatattgcgtccctacacacaggtcagaggttgatctcagaaaggtgaagaaacatgctctagggctttgtcgctaagttgggtggtaggcagctgccttgtaactgtcaccctgcacttttccttctcccatgcctgctgtgtgctggaatcattagcactctgtcctagatcccttgtgaacattgttctcctggcttaggcctcgcctctccccatcccaggttcatggttctgtgggtatgaacctgcaaggatgcccgacatcccagagcaaccaaaaacagacccaggacttggctgacttacagaaaactacaacacacaaagactccccctcctcagcccgcccccccccccctttgcaggcacacacacacacacacaaacacacacacacacatctggatacagccagaatacagggaggggagtctcagagtcatggcgctgatgctggctctgctcttcactgaccctcctagccctgctgcctcagtccccaccagtgtccacaatgcaaggttccactcagccttgcctggagctgggcgcgcacacacacacacaaacctgatccccatgtgtgtgtagatcacaggctgagttccagatcaatgcatgggtcctcacccggcgaggcctcctgcctgtctcctccccaccatgtccctatagtaacataatggggcctttattatcctccagacactgtgctaggtttttagagacattttctcatttattcccaattggggcatgtggttggtaat

SEQ ID NO: 24327 - DNA, 1062 bp, Homo sapiens
ttacttttttgagaattaggttttttttatcccacagaaaattgtagttattcatgtacattatttaataattattgaatacctaacatacattatggagtataattcaaaaatagttggcagccattaaattatgagagagatgttggattctatttagaaagattttcagcttggttttccttctctggaaattacatgtagattttattgttttttgtaatatgtataatgcacaaaacagtgcagtacacagatcttcattatataactcaatgaattattttatgtatacacctgtgcagtaccaccagattaaggcattgaatatctctctcaataaaaaggattcccttgtgctcctctaagtatagtcacgcatcacttaacaacaggcatacatcctgagaaatgtgtcgttaggtgatttcatcattgtgttgagcatcatagagtgtactcacatgtagatggtataacctattacacacctaggatatatggtatggcctgttgctcctaggctacaaacctgaacagcgtgttagtgaactggctattataacatgatggtatttgtatatctaaatgtatctaaacatagaaaaggtatggtaaagatacagtattaaaatcttagttaggcacagcggtaggcacttatagtcccagttacttaggaggctgcggtggaaggattgtttgaacccaggagtttgagttcagcctggacagcatagcaagaccttgtctctgaaaaataaatcaaaaatcaaaaattaaaaatctataatctatggcagtggtccccgacctttttggcaccaggaaccggtttcatggaagacaatttttcatcggacttgggtgtggggcaatggtttcagggtgattcaagcacattacatttattgtgtatttaatttctgttattactgcattgtaacatatcatgaaataattatacagctcaccataatgtagagtcagtgggagccctgagcttgttttcctgcaactatatggtcccatctgggggtgatggtagacagtgacacccaa

SEQ ID NO: 24328 - DNA, 1024 bp, Homo sapiens
ttgcatttctaatctaaggaagcacgtgtgcatcaggtcctagtataaggtctactaaataacagaggctcaataaaagtcttcaaattaatgaattctcttttgagaggaaatattttgaagtctttaaaggcattagtagggttcaagactaagaaagagaccacatggccttattactttgatttttactagggaaagttgtaagcatataaaagtagaaagaattgtaaaaatgaacttctgtatatccagctttataacagttattaactcatggccaaccgttttcatggtggaaatccactcaacacaagatgacaactcaaaaaaagctatagaaaacagaaaaattcaggtggactcatgatataataaaatagttattgaatgcctactattgatagacgtgtagagtagggttttggttgttttgtttcgtttttttctttttcttttgaagtaattgtaggttcacaggatgttacaaatatagtacagagaggtctcatttactgtttactcagcttctcccagcggcccaatggtaacatcttctctaactgtggtacaatattaaagtcccattagttgacattggtaccatctacagatcttttatagctatcaccagtttttacatgctgtcatttgtgtgtgtgtgtgtgtatttgcatggatgtgttactttttacatgtctagattcatgtaacaattatcaaaatacagcataaagtattatatatgatgttagctgtgagacttcatagatgttctttatcacattgaggaaagttctctattactaacttgttaaaagttatcacgaacgaatgttgcatttttaaaaatgattcttgtctgtctattgatatgatcatgtgacttttcattagcctgttactatagtggattaccacaaacaaataaattttaaacaaataaactaaatatggtggattatattgagcttttttagaatattctgccaagaattggtatgcatttttctttttttttttt

SEQ ID NO: 24329 - DNA, 1028 bp, Homo sapiens
gaaacaactggaaggcttcttaaaatacagatttctgggacctatgcctagagatttctgaatcagaaggtctactttggaactcaagaaattgcctttcaaataagtttccttgtatcactaatgctgctagtccaaggaactatattatgaaaatcactactctaacccagtatgctgttaattaacactactaagttatgacatatttttcttggggtaagtttatttaccctttgaagatttcttttatataactcaattcttacattatttatttcattaggtttgagtaaatatgggaaaagtcacatacaggctgaccgttatttcaacaagccatgtttgaatacatggttgctaaaatgcttaaatctattttatatgtttcactatttctctcttatctattcatatgtttccactgtaatatcttaattcaagctcttatttgcctgttgtgtaatcctctttggtagcctgctaaatgcaattttttgcttcttgtctcgtttaactctgttgtattttgagagggaatggcaaagagacctggggtgcacagaagtgtttaagaaagaagcaggagcatatgcagagatcaagagtgaagaaacaggaatgctgaatttgaagaactggaaaaaagttttagtattaaacctttatttaataaaaggagaaggggtaaaagatgagatttgagcattacatgatatcatgaaaagccttttaatccatgataaaaatcaaacttacctatgaatttatttatatgactaaacacaagacttgtattttacacatatccctgtggttatagtgtagccagcaactaatagacagttgggagattgttggaataaagaaattgctaagaaagtagtggttggctgtggggaatgaagaaaagaagatgagtgctagagataattcagttaggagataaagtcaacaggactggttggtttgattcagatacagtgagttcatgaggaaaaggggtaaatcaaggttactacttcaaa

SEQ ID NO: 24330 - DNA, 1072 bp, Homo sapiens
tgtttaacaaattatagcacttttgaaattgctatgtttaaccttcggttgtgtatttttgttttgttttattagattaccctgtccttctaatactgctgcccttttagcttcatttgctgttcagtgtaagtatcagcccatttttaggtcaaatagcatataactgtggtttgtgttgctagtacattggcttcaatgtgggagttctttagaaatgttgctatatagaaaatagtgactgcagtggaaatgtaatgaaatctccagttagttagcaattactatgatttttgaaaaaatttcctctgaaattgagaccaagaagaatgttaaatggattgctgtggcttgcttaagtggttatattagaaacataagtattttacatccagaaatagaattaatggcatcgctgatttgactataataatttaaaaatttgtttattaaaatgtgaatgttttcctttcattattagctgaacttggagactacgatcagtcagagaacttgtcaggctacctctcagattattctttcattcctaatcaacctcaagattttgaaaaagaaattgcaaaattacatcagcaacacatgtaagagttttttagttttttatttgataaacttcttaatggcattctttctagagaaatgtttgaaattctaatatgatggctgtatttaatatagaacaattactgttacctaaaataatattatcataaagaaatataggtgatctatgctaaaaaacgatttcatagaatatatgaagctcattttcatttctattcagagccattaagctatctgtaaacagatatttatttgctattgtgtaatagtctaaataattttagaatataaacagtatagtcacaatatagagatcagtctgcttagtaattctttctcagtttttaggtataaaggacttgattctccttggtagtgagccaagaggagaacaggaactctatataatactgaattaatttttaaaaaatatttctttaagaacagtacaggttgaacatccttaacccaagagtttgaaattcag

SEQ ID NO: 24331 - DNA, 1077 bp, Homo sapiens
aattttttttttttttttttaagtggagatggagtcttgctatgttgctcaggctgatctcaaacttctcagctcaagcaatcctacctgcctcggcctcccaaagtgctgggactgcagacatgagccaccacatctttataaaacattttaaggactttggcttttaattataatcaaaaccattagagagttttgaggcaataaaagacatgttgtgaatttacatttttaaaatataacaatgacttttgttttgagagtatactataagatactaagggaagagactgttggagtgatccaggtgaaaggtaatggttcttgtagtattggggtggtggacagtaatcagattttgaatatattttgaatatggaagtgacagcttttactcatgtgtactggctatgggtgtgagagaaaaaggatttggtaattattccaaagcttttggcctgaacttttactaagttgggaaagacctgggagaagtagatttagtagaagcataagtcaagaatttatcttgggacatgttaaatttgaagagacgtaaatcctcacgaaagaggggtaggcaattcaatttatagacctggagttgagaggaaaagtctggactagaaataatacatttgggaattgttagcgtatagttaatagttaaaatcatgagatgagagcactgaggaagtaaatttagtagatgttgaagagaacaggtcctcaaagttagaacacttcaatgtttagaatttgaagagatgaagaagaaccaggaaagagaaccaagaaggagcagccattcagaaaggagagcctttctttctatcaaagacacaaatgtgtgtctctgaagccaagtaaatcaggagcagtcagctttgtcagatgatgctgttaggtcaaataaaatgaggacagagaactggattagaaaagtggaggtcactggtgacttttcaagagcagttttggaggtgcagtgatggccaaagagtgatgagagaatatgaaaaaaaaaacaaaaacggagaacagtaattttgagggcttttgctctacaggacacag

SEQ ID NO: 24332 - DNA, 1033 bp, Homo sapiens
cagataaaccagtagaaatgctgactgaggatacatcacccaagcaaatctacccttcagaagtgaagtagaaataaagtctttctgagataggcaaaaactgagagaattcatcaccactagatggatctcacaagaaatgcttaagggagtccctacatctggaagtgaaaggatgctatgaactatcatgaaaacacacaaaagtataaaattccctgacagagcagataagatatatctagagtagatgagaaaaagaaaggagtcaaaggttattactacaaaaaaaaaaaaaacaaataatcaagggaaacaataagaggatgaaaggaataaaggatgtacaaaacaatcagaaaacaattagcaaaataacaagaatagatctttacttaacaacattgaatgtatatggtttaagttcccgttaaaacttagacactggctgaatggatgtaaaaaaagaagaccgaattctatgctacctacaagaaactcaacttcacctgtaaaaagcacaatagactaaatgtaaagggaaggaaaaatcccatgtaaatggaaaccaagagcgtacagaagcagttattttagacaaaatatactttgtaaaaaaccataaaaagagacaaggtcaatatcaaatgataaagggatcaattcagcgaaaggatataacaattgtaaatatgtacctaatactggagcacccagatatatgaagtaaatattgttaaagatagagaaacagactccaatacaatagtagttggggacttcagcacaccagattcaccactggacagatcatctagacagaaaacaaacattggacttaatctgcacggtagaccaaaggaacctaataaacatttaaacaacattttatccaacagctgcagaatatgcattcttcacctcagcacgtgaaacactcttcagaaaagaccatatgttaggccacaaaacaagtctcaaaaaaatttttaaatagtaattatatccagtattttctcacaccacaatggaa

SEQ ID NO: 24333 - DNA, 1098 bp, Homo sapiens
catggaaacatttccctagacaagcaatacttgaatctatgggcccttagaagcttgtattcttggcagttgaaagtaacataagaactaccacatttgggagctggaagccctggccattaaggcagacctcaatgaagctttggctgaaaaagagggatgtatgctctgatgcagtctttgtagacttggcagaatttagagcatttgtgccctgaagtatttctatgcagacatctaggctaagtgggcattgctgttcacttgcttcttttgcagttatattttataccatgttataaaatttcagaaagactctaatctctcctaggagaaacttctctttaagaccatacaatcacatcattcattattaatcccagctgacttccttggcactgatcatactttctttcagtttcacaacacttatttactaggtgtctagcagccaacctctcaataagcttacacctcctctacaagggagaacagatgtatccaagggtcactctggcagtaaatctctgtatcagttatcttgttatgcttgatcacaaatgagcctaacttaaagagacataacaaaagttctttctttcttacattgtatgtacattatgtgtcatctgtggctgtgctctaccttatcttcattctgggtcccagactggtagcattccctgtttgggacatggctagtctcatgggcaagggaaaaaagaagcataatgaaatcataagctgtttcatttttttctttttttttttttttttttttttgagatggagtcttgctctgtcgcccaagttggagtgcagtggcgcgatcttggctcactgcaagctccgcctcccaggttcacgccattctcctgcctcagcccccccgagtagctgggactacaggcgcctgccaccatgcctagctaatttttttgtatttttagtagagacagggtttcaccatgttagccaggataggatggtctcaatctcctgacctcgtgatccgcccaccccggcctcccaaagtgctgggattacaggcatgagccactgtgcccagcccataaactgtttcttaaagcttccttt

SEQ ID NO: 24334 - DNA, 1025 bp, Homo sapiens
tagctatcctctttaacacatagaccacctctttttttctgccaactacactatgcacaaaataatgtgaggaaaagctctgtctgctatagcccattattacattttccccagtaccattggctcccaattcactatacttcaggtatctcaaagacatttacaaaaacttggaactaattggtatacaaaagcatcatactgctagtgcacagagggaatatatgaatgtctgtcatctacttcactacataagtagacaaaaaagcaacttgagagaatgagcataactctaaatttgaacgttccagattttaaagctttgggttgaattatctcatcttcacaacaactctaagaaataatcagaacttttcattttcagatgtcttttcagaacttcagatgtctaattaatcattcatttcagaagcagcagagtaacttctagaccagtgttttttccactaatgacagtgccttattggattttattgactttgtgttgataaagaatttcagtagttgtgcttttatttcttcatgcctttaccacaagcagttcccttttttgtaagatccaaccccatcatttccttctcaacctggcctatcattcctcaaaattcactctcatatgttttcattgctatgttcccagaacatgtccatatttctatttcttttgtctcttttaccttaatcgctgtttgtcttctcactttgtgctatagtgcaagactataaaaatgaccatgcaagatgaaattgtgcaggatcttgatgattaataggaaaaattatggttgttcccatgacctttaaatttattgtcaaaacattaagaatttcctttactgtctcttataaaggtaaaaggaaatgaaaaaaatagtaaagctaatataggattttgtatcctgtaattcaaaacattagaaacactgagaatttaaatgttttattttcttgtgaaaactcattatgagtagtttaaacggtgcttgcctcctccccgtggtaca

SEQ ID NO: 24335 - DNA, 1041 bp, Homo sapiens
ccagcctgggcgtgagcgagattccgtctcaaaaaaaaaaaagatatatttgagtttaaaatattgttgtcttttgtgcattcgttgatggtttattattgtcattctatcattttgcattttaaggagttgctccagtaagcttctattccttgttcagattttaaaaacttaaatttaactcctttaaaatagtatttttccaactaacgtggtagatggaagatacagaacaagtaattgagtcagtgcattttttttctgttttcaaaatattctgtatttggcttactacttttataattaaaatattaaaatgatattgttcttctgtgttataattcagttttatgcacaaaagccacaagtagtttaacagaatagtatcggtaagatcttgcctatatttgtcttttttagtgctggaatcggaagaactggggttcttattactatggaaacagccatgtgtctcattgaatgcaatcagccagtttatccactagatattgtaagaacaatgagagatcagcgagccatgatgatccaaacacctgtgagtactgtactttatatacaagtgtatattcttaacatgatgatttttgttgccaatgcatattctaaatcatatttttatccttttttatcttttcaattccttgccatggtcaaataacctctagcacaggggtaagcaaactactgcccactagtcaaatctggcctgccacttgtttttgtaaataaaattttagtggaacacagccatgctcatttatctatgcctgctttgatattatagctgcagagtttagaagttgcaacagtaccatatggactgctatttctaaaatatatttaatatctggccttttacagaaaaagttttgctaacatgcaagttgcctggcatattaaatcttgagtgcttaaacaggcacagaggaacttgctttgtattatttagtcaagctgaatgctgagaatgatagtatccctgaactggagagtcttgatagacctgctttctgtgaaata

SEQ ID NO: 24336 - DNA, 1055 bp, Homo sapiens
ctccgcttgaattactctttctccattgcaattcccctgtcttgataaattggttctgtctaggcagtgggcaaggtgaacccattgggtggtaacaataccttgatgaacttaatcattgcaaagaggaggtgaagtgagggctggatctgaaagaggtggtgacctgaaataaatttgttaggtggggataaagaacatgagtagcaggtactggtgtagatacagatgactaatgaatttgtagtgggccagagctttgtgggtctgttttcactttcctgtttccagtttgttcattttcaatagctacaaggtgagaaaaacattttatttttaatttatgaaaataaacaagacattgaacctgtaatcaagatctcacatccatattctacacactctgaccatcctggaccttcttactgttgcctaaacatgatagacccattacaagtctatgctggctttacactaattagaattatgggtacaagatagtacagaggaagcaggatttattctctgtgggattattggaaggcaacactgatatactgattcttgagaaaccagaatcaagagttcattagaagggcgcagtgtggtaactcacatctgttatcccagcaccttgggaggttggggtaggaggattgcttgaggccaggagtttgagaccagcctgtccaatgtagccagacctccatctctacaaaaaaaattttttttaaagttcattagaggcataaaggacgttctaagcagaaagaaatgcattttgcaagggttcagaggcatgacttattggggagattataagcagataaaaatgctgaaatgggccaggcgcggtggctcacacctgtaatcccagcactttgggaggctgaggtgggcgtatcatgagttaaggcgttccagaccagcctggccaacaaggcgaaactccgtctctactaaaaatagaaaaattagctcagcctggtgggcgcctgtaatcccagctactcaggaggctgaggcaggagaattgcttgaaactggaagatgga

SEQ ID NO: 24337 - DNA, 1057 bp, Homo sapiens
taatgtctaataacctgccttttaaaatttaacaatgtaagtaatttttcaaattcttaagtatttgctttcattatttttcgtggatatatagtgctctattatattaaaatgctttaaccagttcactcttgttagatacataggctgtcctaattttctttgatgaaatttcttgtaggtaaatctacacacatccataatgatttctaggtgtagaattgctgggttgaaggcacatagttatttttgagacattatctactgtctagtcagattgcttcctggaagggttgtgctcatttgcactcactatggtggatgagaggctacatgaaatagtgcccaggtgaccagccatggaatataggacaactcccagttccatggttttggggagaaaatctggggcatgaaaactagttttttctcttactcagtatgtgatttgcatcaggctgtagtaggtatttgtgtcagttaagtctggaatatttggatattggatttctgggctggacagtgatggatgaactgtttactgctgtaggttgaagaattttctactgaaagaaaattgaattgttttttgctactggcaggcctagtgttctgttaatggaaggatgcagaccggagctgttcctattcggccatcttgccagcctagattgaaagattaaagattgctagattgaaataggcttaaaagtagatgtccaactgaatttattaaaagatgagagatggcacagtagcccgcgcacttgaaatctcaagaaaatattgcatagcatttaaaaaatatttgctgaacattttatttaaacatggaaaggtattttgctgccacactgatagttcagtgaattgcacttttggatcttggagaatggagagaagcagctaggcaaataattggcaagaaaagtaaacagttacagtgcagctttgtttacccactctgcctatctgcgtttctgaaattggattccttggctctgtgaactagttagccttcctttagagtgcttggaattgaaagcatgtcagagag

SEQ ID NO: 24338 - DNA, 1025 bp, Homo sapiens
caggaaatggtttgttaattccttaaactaaaataaaatattgcctagttaattgtatttggaattccaagtcataatcttaaagtactttaaatatgattgaaagcaaattattcatatttgtgagctggaaagcttattattaaataatcatattgagatggggaaaataaggatgttggtgataaagggagtgcagttgtctaaatgaagaccatcagacagctgtccttacttattatttatttgaaacaaaacgttaatacatttaaaataaatctgcccttattagcttgatgtggtagtggtggatgattctctgctgaaaaagacagtagaatattttcccaggtccgtaaggaaagtatatccactacgtgttattccacacaacatgatgctactttgaatgtgtttttctcattaaagacgaagggtaaagtcagaagcaaaacatgattaaaatctgataaagcatgagataccctaaggagactgagagagaatctgatgacaggaaaaagatactttaattatttagacttccaggttctttttttagattaatagtaaatatacaaatatggatactttgtgtcttattggagttaatcacttgagtttatcctttcccaaataaatatatgtggcttggtgggggctccttggggattatttgattcagtggtcatgttgggtgtatcacctgttcaagttatttgtctgtttgtgaaatgaattttgataattcataggatttttctctttttctcttgctcttagtttgtttagtacctgaaatctaatgcatttctgtggtgatctcaaggttttggtcagctttctgtgcagccagttcttccttcatggtggtggctcaacagtggttggtgattgttttcagtctttgctatgtaattatttttcactgttattttggcttaactaactgcagggtgccttgctcttgatacttgggtgtatttttatttcagttccaaataacttgtgattagtttataaga

SEQ ID NO: 24339 - DNA, 1034 bp, Homo sapiens
taaagaattgatttgcgaattcctgatgagagaaactggattggaggggtgttagggatggaggcagcgataggggtgaggaaagtaaagggctaaggctggatggtagtaaaattaaacttgtctattttatagaagttcccatatgcttcagaatttcatatcaaatattgcaaatacttgttctttttactgatatttgcaagatggatatatatgttgtttccagagctctcaggtatttataagtagctcaacctaaattaaataaattgtcaccaacctatttacactctacattttattatgcctaaagagtcagtgatgataaattcggaattagagaagtaataacctccagaagcaccttactgggtcaccatccttttgatcaaagggtgtcatcagtacagaacttaagtattatgtcatttaatttacagtgctttggctaattttatttaacttaattaatttaacatcttgaattaggttggttacattttgactgtttttacagtcaaggaaacttgtagaaacacagcaaagctagtgaccttcacactttcacgcatgaacataaatgagctcataagatcatcgtctctttttgttgcgtttcaaaggcgtttacctatcttggagtaagatctaacatttctgaccttgataggataatcatagataacatacttttaaatgaatttacagagaaaaataaattttatttgtcctactatgtgtataatatgtctgttttgaaaagcacctagtatacaaacactaatattgtaataccagtataattcaaatcatctttttttttttggaggggagtttatttaaagtgttggccaaaaaatgttatttataacacttggttggatctttttttaaaaatttcttttcattgttgttcactgttcaaaaggtacatcgccaggttggatctttttatttactaatgtaaactgaacaagtttgaaggtggttgtcccctattagttcatcgtgccccagtggtgggagctata

SEQ ID NO: 24340 - DNA, 2026 bp, Homo sapiens
ttttaatttaaaacaatctagtttggattatttggacattaaataccaatttaatgtcagtagtacatgtaaactttgcttctatagagctttgtctcccactttgtgctgtttttctcttacagaatatgtctctgtgcattgtatgcccatcaacatagatttaaaatttagaaaaaacatttttccagtattctcatcatttcatccagctttcacaatgattctgcagtgcgctttccttttcctatatgattgaaggaggtaattgagtcttctgcaccaatctggttcttaacctcaaatttaggaagattaggaaaagccttatactggaaacttaaacatgaaaataatgtttcttgccaaaagaaggaaaattttcttaaaagtaatgatgaatggcgttttgttttttgagatagggtcttgctctctcttccagtctggagtgcagtggtttgatcatggctcactgcagcctcaatctcctagactcaagtaatctcacttcagcctcccaagtagctaggactataggcacatgctaccacacctggctaatttttttatttttttttattttttgtagagatacagtctcctctgttgctcaggctagtcttgaactcctgagctcaagtgatcctcccacctcagcctcccaaagtgttgggattataggcatgagccactatatctacctaaatgtagtaagtctttatgctactactgaaaaaaagaatgaatgtcaaaatacactagtgtgtttgtgaaaacagtaccaactgggaatttgcgtaatataaaaatccaaaaggatttttccatttaaagcttctactagaaaataataaaaacatcttggatgttacccttgaaaatatttttcatttgcccttaattttaaaaatttattgtgaaataaatatatagagaaaagtttataaaaaatacagttccagtttgagtatctttcttcaggttaagaaatagaaattaccacttctttagaagttcttctggtctcttaatccaaattcatgccaacactctaactcccaagtgagttgccagggttcattgccttccccaatgccttattcctatctcccttcttccctgcgagaaacctggcttctatttggttaatatgtgctaaacagtttcagaattgctatacccatgccactgtcaacaacaaatctaagtgacatttagtatttcttcatggttctcctttttagacagagtatatagttgaagtattgcacttcaaatttacttggattagtaccctttcctcctcagtgtgattatggtatttatttggtcgtagatgaattttaatttttctagatattgcctgactctccttcattgaggattctgcatttgaccagcagagtatgagagtgcttctacctctcatagcctcactgacaaaggatcaagaaagactgggatttttgccaatctgaaaaacaatatatggtatctaagtgtgtgtttttttccttagagctttatcgaggtacacttggtgcaataaagtgcatctttaaagtgttttgagtttggacacagacccgtgaaaccaacaccataatcaagattcatgatgaatatgttccacgtagttttcatttaaatccctctcagtagcatatttgtatgtttaagagccatttgcattttttccataaattgcttgttcctctccccctgccccctccccatttttaaacaaggctgttggcctttttcttctctacttttaagaagcttttttgtggataattgggatattaactctgtgtatttaagctgcaaaaatatattttcagtttttcactgtttacttttagtatttttctgtgcgaaagttttaaaagtttttatataagcagattgatccgttttttctttaatagtttctggaatttaatagagttttcctcactgctacattttagaggaattcagctatccttgcctccagcactgtatgggttaattttcttac

SEQ ID NO: 24341 - DNA, 1056 bp, Homo sapiens
ttaattaggtcacatttgtcagttttggcttttgttgccattgcttttggtgttttagtcatggattccttgcccatgcctatattctgaatggtattgcctaggttttcttctatggtttttatggttttaggtctaacgtttaagtctttaatccatcataaattaatttttgtataaggtgtaaggaaggggtccagtttcagctttctacatatggctagccagttttcccagcaccgtttattaaacagggaatcctttccccatttcttgtttttgtcaggtttgtcaaagatcagatggttgtagatgtgtggtgttatttctgaggcctctgttctgttccattgatctatatctctgttttggtaccagtaccatgctgttttggttactgtagccttgtagtatagtttgaagtcaggtagcatgatgcctccagctttgttctttttgcttaggattgtcttggcaatgtgggctcttttttggttccatatgaactttaaagtagttttttccaattctgggtagaaagtcattgttagcttgatggggacggcattgaatctataaattaccttgggcagtatggccattttcacgatattgattcttcctatccatgagcatggaatgttcttccagttgtttgtgtcctcttttatttctgagcagtggtttgtagttctccttgaagaggtccttcacatgcctttacccaggtattttattctctttgaagcaattgtgaatgggagttcactcatgatttggctctctgtctgttattggtttataggaatgcttgtgatttttacacattgatttttgtatcctgagactttgctgaagttgcttatcagcttaggtgattttgggctcagcagtccttgagcccaggatatggtggtctgattgttggttgcacagatatttctaattcttcccttcattgcagacaaagttttgtttttttttcacttgaaactttaaaactctaaacttgtaaatagaactttttcagcctctgttcctgtctagaaaacctgg

SEQ ID NO: 24342 - DNA, 1048 bp, Homo sapiens
cttatattccataatatagactctcaattctgttgttgatttacatgtctgtctttgtgccagtatcagcctgtcttgattactgtggctttctagtaagttttcaaattcaatagtgtacattcatttttgaaattgttttggctattctagctgctttggctttcataaatcttaggattggctggtcaattctacaaaaaaaatcctgctgggatttcgatagtgaatacattgaatttacacatcagtttggggagaagccatcttcaatattaagtgttccaatctgtgaacattaaaagtctatttatttagatctcctttataaatgattttcagtgtacaagtcatacatagcctttattaaatttattcctaagtttctatcccttttgatgttactgtgaatgaaattgtctacatcaatttcctcatgagtttactcatttttcatgtatagatatacaattgatttttcttatattgatcttgtattctgcaactttgtggaacttatttatttaggttatttatttaaccttacttattaaggttatttttttcccttaggttttcaggtgggagggcagaccagtccctttcactccattttggctgggaggagaagtctactcaaagggttgtgagaaatgaataaaaccatttgagataaaaacttttccatgaatcttattccaacaaagaccttgttagtatagtccctcagtatccatggaggatagattccaggacctccctgagataccaaaatccgcagacgcgcaagtgccttatatgaaatggtgtcgtgtttgcatgtaacctacatgcatcttcccatatactttaaatcatctgtagattacatagaaaacctaatacaatataaatgctatgtaaatagttgttaaactgtatttttaaatgtttttttaatttttatttttgttttatttttgattcatggttgcttgaattcacagatgtggtggaaattgcagatacagagggtgagtagtgttttaatttttcaagttaaatttct

SEQ ID NO: 24343 - DNA, 2109 bp, Homo sapiens
taccctgataacaaaaccagacaaagatacctcaaaaaaggaaaactgtagaccagtatctctgatgaatactgatgcaaaaatcttcaataaaatactagcaaactgaattcaacaacatattaaaaagataagtcatcacgtccaagtgggatttatcccaggatgtaataaggatgggttagcacatgtaaatcaatcaagggtgatacattatatcagcagaatgaaggacaaaaaccatatgatcatttcaattgatgctgaaaaaacatttgataaagttcaatatccctttgtgattaagaaaaaaaaactaaaaaaactgggtatagatggaacatacctcagcacactaaaagccatgttatgacagacccacagctagtatcatgcctgaaagcctcctttaagatctggaaaaaggcaaggatgcccactttcactgctgttattcagtgtagtactggaagacctagctagagcaatcagacaagagaatgaaataaagggcatctaaattggaaaggaagaattcaaattatcatcagatgatactattttatatttggaaaaaactaaagaaaaagaaaaacaattagaactaataaattcagtaaagtggcaggatacagatcaacatacaaaaatcagtagcatttctacatgccaacagcaaacaaactgaagaaaaaatcaggaaagtaatcccatttacaatagccacaaataaaatgaaatacctaagaataaaaataatcaaagaagtgaaagatttctgcaatgaaaactacaaaataatggtatgagatatcgaagaggacacaaaatttgaaagatattccatgttcatggattagaagactcagtattgattcaatgtccatacttcccaaagcagtttgccaattcaatttaatccctatcaaaataccaatgatattcttcaaagaaatagaaaaaaataatctaaaatttatatggaaccacaaaagactcagaatagccaaagccgtcctgagaagaaaaaacgaaactttagaactcatagtacctgacttcaaattatactacagagctatagtaaccaaaactcatggtattagcataaaaacagacacatagaccaatgtaacagaatagagaagccagaaataaatccatacatctgcagtgagcttacttttgacaaaggtgccaagaacatacactggggaaaggacagtctcttcaataaatggtgctaggaaaactggatttccatatgcagaagaatgaaacttctatctctgccatatacaaaaatcaaatgaaaatggattaaagacttaaatctaaggtctcaaactatgaaaccactaaaagaaaatattggagcaactctctaaaacatcagtctatgcaaagatttcttgaataatatcccaaaagcataggcaaccaaagcaaaaatagacaaatgagatcacatcaagttaaaaagttcctgcacagcaaaggaaacaatcaacaaagtgaagagatgacccacagaatggtagaaaatatctgcaaattacccatctgacaatggactaataaccagaatatataaagagctcagacaactcaataggaaaaaaatctgataatctgattttaaaatgggcaaaaaatctgaatagacatttcccaaaagaagacatacaaatggcaaacaagtttatgaaaaggtgctcaacatcactgatcatcagagaaatgccaatcaaaactccagtgagatatcatctcaccccagttataatggcttttatccaaaagacaggcaataatgaatgctgacgaggatgtggagagaaaggaacccttgtacactgttggtgggaatgtaaattagtacagaagtacagagtgcctcaaaaacccaaaaatggaacgatcatatgatccagcaatcctactgctagataatatgcccaaaagaaaggaaatcagtatatcgaagagatatctgcactcccatgtttattgtggcactgttcacagtagccaagatttggaatcaacctaaatatctatcaacagatgaatagataaagaaaatctggtacatatacacaatgaagt

SEQ ID NO: 24344 - DNA, 1054 bp, Homo sapiens
tttggaaggcttcctcaaagagagggccagactgggtcttccaggaggaggactttgccagcagaggggttggggaaggaagggcaatctgggcagaggacctcatagggcaagtgctggacagggtgtggcatttctggggcctctggtatgtgggagagtcagcgtggggttgcctccaaggggtggctttgtggtccccccggatgactcctctgcctatccatggtttagcttcaggtcatgggacataaatgtgcagaggcccaggttctttccgaggctggaacatttgggatcctgatgtgcagcaatgagattgatcatcagctttgccttctcattctccccgtcttgggtttgggctcagtttctaaagttatatctttctgtctggtgggtggtggttctcagaatgctctctactatgatccccagtcaagattataggttgagattaagattatagtgatcttgcattctccatccatccatccatccatccatccatccatccatcctcaatccatcatcatccaactatccaaccacccattcatccatccatctacccatccatccatccatccatccttccacccatccatccatcatacattcattgactgcaaggattttaaaggcctttgctgttggtctttggtgtacccttcctccccatccatgaagccaagggtcatgtcctctgtaaagtatttcctaccacagccctaggctctcacttgtctctgggatttcccttgcttataacactcattaatactgccttgccattgtctgtttatttgtgcttaacacgtgtttgtttataaatgaattttgggaaatgtttcaagggaagaaaatggcattttcccattttctttgacatctctcttaaaaaatataagttaaccaggtagtctccagattgacctccttggtttgagaaagcaagcacaattattaattagtgattagttttaatatagtagagctgtattttaaaaaaaaaatctaagcatgtggtatagttcatttggaccccacacat

SEQ ID NO: 24345 - DNA, 1033 bp, Homo sapiens
ttttggaaagcctgccagagtgaacctgaaaggcagccatggataccaccctggggtacgttggtgggctctgcctgtgtcctggctttgcaggatctcagccctcttcactgtgctctgcatgaggaggcgggccggcacagagagtggtggcagcagctcaggcaggacccttccctgtgtcgctcagcccattggcaggtgtccagcacgtgccgcttgggttcagcactcttctgggcccaaggaatgagagctatgctgtgcgattggggcggacacttgccttgctcctcaccagctctgtgacctcgggcaaatggcttcaggtttctgaggcttggcctccgcatctgtaaaatgactggtgaggctggctgttttccaagcgtccttcctttcaacttagagttcttgattctaaggggtcgatcaaaggccttccttctcaaagacttttgccatcttctgtgaagacagaagatgtttctgttgaaagccagtgctctgggagagtagtgtgacttagtgcggctctgactgcccttccagtcgggaggctgtgagtcattgggctggagcccagagctgtcttagggggccttctgcctgtcccagccttaggctgtctgatgcagaccttgtggccacagggtctgtgactagcagcattcagatgctcagccaagcactgagtcttctgccttccagaggggccactgggcttgctggaccaggactcctcaaagttagaaggggagtggaagccagcaaccaagtaggtggtgtggccctccccacttcctccatggccaacgcccacggtgcttgcagactgcacagtcgtattttatgcctccagtgcttggatttgtataactctctcctgactggcctccctgctgtcaggccatccttgttttcggagtgacccctgtcaaatgctatgaggtcatgctactccctgacttaaactcccattgcctaacgcacacagatggagggggatgcagggtgatggaggctgggtttt

SEQ ID NO: 24346 - DNA, 1042 bp, Homo sapiens
ttgaaaacctatgtgcacacaaaactttgtatatgggtgtttatagcaatgttagttacgatagtcccaaaatggaaatgacccaagcatccatccgctaatgaatggatgagcagaacgtggtatgtatgtacaatggaatattactgagtcataaaaaggagtgaagtgctaatcaatggtatacacaaatgaacctcgcaaacatatgctaagagaaagaagccgggcataaaagcacaaatattgtaggattccattcccatgaattgtctagaatgacaaatccatagagacagaagggagatgaggaggtgccaggggctgggagaagagggaatggggaatgattgctatgggcttggggtttctttttggagggatgaaaatgttctgtaattagatagtggtgatggttgcaacagctctgtgaatgtactaaaaaccactgaattgtggactttacaagggtgcattttatggtatgtgaattacatctctgtttaaaaaagaagggagggaggagaaagaaaggatagaaggaaggaaaagaggaaggaagtgcgggggagggagggcgcctgtggcggcatgggggcctggtcgtgctgctgctcacagcccctgggatctccaagtgccttgtgcaccgctacccctcagggaggaccctgcttcccctggccaatgagcagccttcccatctaatctataggccccagaagctctaaaaataactgaagtggaagggggatgtttaatgacaaagtaaataattacattaagggtgcgagtttggaggggagctgagtaaatcaccgagaaagagcaccagcctccagctaacttccactcctttatcaccagattacatcctccttggaacctgaatcattgactgtggctggtggcaggctctgcagtggtgggggctgcggtcaggcaggtgctgagagagatgccctgtgagcatttcagggtgaccctgctggccccaactccaggtggatgagccccaggggcgggggccctgtgctgctgg

SEQ ID NO: 24347 - DNA, 1032 bp, Homo sapiens
gggaagtgcgtaatgtcagcttggcgaagtggcctcggtatgaagccacccccactgcctccgtggggtctctcccccagctcccagccccgcagtctggctgcgcttgtgccctgaaggagcaggccatgctcactgcccacctgtcaccccttccatcacatgcccatcatgacaggccccctcacttcaccccattggccccgctgatgagctcgctgtggaccatcgggggatctcctgcctcctcctcttacagtctcatcaccgctccgcctcagccctttccttccctggcttctaagctccccttgtgttctcctgcctgccccttttccctcaggtgaaggtcccaggctttgtcctgagtgctcttctcttgtcactggaaactcatcgcgggggcacctgggtagcaagaccctctcagctgtctctgcccagacccctatatctgtctcatcagctccaactgctcatccactggcctgcctggtgctggatgtcccaggctgtgtacacagtgcccctccccacccatcccacatcacctggccccgctccagactcctttgcgggcgtagcgtcctcacccactcgctcgtatggagcaaacctaagagacccggccggcctgagaaccatgtggcagggctgaggggatggatccgcacgggaccttctgaggacagcttcctgaggcctccatgtcctgccattacacatgaggcccagaagggtcccctggtttgcccagggcctcacatgggatttgatgggatcctgtttctaaaccccgtgctccactcttgcctgtgcttttccagggcccttggttcaagggccctgtggccctgtgcctgcatctggttgaggttcacagctgcctgaacactggggccttgcagagaggtggtgggaggagctggagagctccaaggagccccgctttcatccccgaggggtggcagtgcctcttccaagcctgcagggcaggggtgtggagggtgaagtctaacaccaggacagcca

SEQ ID NO: 24348 - DNA, 1087 bp, Homo sapiens
ccttccaggaaagctgccttgatgacagccctccctccatgtccccctcctggtgcttcctgcagacatcagatccctgtgggtgtcttctgacaagtcttacccctgcccctagggctaagccccaaggccaggagatgtttggataatctggccagggatcacaggagcgctccttcctgtggctgctggttcgcagatggccttgcacaagccttggctgctcagagctttgcactccagctgtggcccagcagtgtcccagggagggataggatgctgggtgagaacaccacaggcccttactgctgggcacgatgggaggctgcctggtgacggccgcctttgttatgacagagcagagcgttgggccgtggccaggctctgtccagagacagctgcgaggcttccaacccggctgggtggggtgggagggagctgtggctggcatgcatctgcatgcacccaacttagcaagttcagcatggaggagagagggagagaggggagaagctgagacagagaggggctgagtgcatgcagctgaagcagtgccctcgtcccagtctgaatgtgccagagccaggttgggcgtgagggtctgccgtcctgtttacatttactcgtgcctcctgtactgcaggctccagagctggagtttttattcagcttctgatgtttatatacacagttttcatgcacaggcccagaacccagccagccccctccctctgctgctgttcgatctgggaggcagtgtgcgtctccacacagaggagaccgctggactgcactctggaggaagtggggtcccctccgtgtgggaccttgcttgaggtgggcagaggtgctttggagtggtggagatttttatctcatgtatggtctttcgtgtctaatcttggcaaaagatgggattccctgcattgccgttttacagattagggacctgagtttcagagagcatgtactctgcgtcacacaggttggggaagtggctttgaacccaggcccatgggattccaatgcctatggcctcttgaccccaggcctttcgggaatgatttgagaagcaggcagttcagtc

SEQ ID NO: 24349 - DNA, 1073 bp, Homo sapiens
ggagaagattgccatctttgtcattttgagttttcccgcccatgatcacggcctttctccctatacttattggttattttatgtctttttgttttatcatttgtatcataagggtcttacacattttttgttacatttattcataagtattctgaagttttctttgctgctgtaaatgttatatatataaaatatacacacacatatatatatgtttaaaaattacagtttctagttcattattgctggcatctaggcatgtagttaaattttatatattgattgtatttctagcaatcttgctgatcttttactagttttaaatgtgtccctacaaattttatagacattttatttaatcttgtcatttacaaatggtgatagctttttcctttctttccaatttttctctctttagttattttcttgcctcttactgtgctgtctagattagcactgtctaataaaaatataatgtgaaccacatttaattttaaaatttctgatagccacattgtcttagtccactttgtgttgctataacagaatatcagactgggaaatttataaagaaaagtcatttacactcatgcaccccataacaatattttggacaatcatgaaccgcatataggacagtggtcccataagattataatcccatgtttttactgtaccttttctaggtttagacatgtttagatatacaaatccttaccattgtgttacagttgcctacaatattccctatagtaacctgctgtaggccagggtcaataggttccaggaagaacctatatcatatagcctgggtgtgtggtaggctatacatttagtgatgcacctagtgatgcatatctcagcacatatccctgtcattaagtggtgcaggactgtatttctcacagttctggaggctgggaagtccaaggttgaggaacctgcatctggcaagggccttcttgctgtgtcattccatcagcagtgagactgacccataaatttccattcttctccttatttagttgaattttcaactaaattaacctcataacatgtcctaaggaatgctt

SEQ ID NO: 24350 - DNA, 1029 bp, Homo sapiens
aaaaaaaaaaaacagacttctttgcttaaagttgatgagattgaaaccaaaaaaaattcaggagttactaaaggttatatggtgaaaaatctccctctcagccagccccctggttcccctccctggagacgaccaatgttccctgcctctcacatatcctttgcaagagattctagatgtatacacataaataaaacattatttgtttatatttatatatgtgtgcttacctataaatttacacacatacatacatatatatgttttttaatgcaattgtcagcatcttgttttttttgcatgacaatgtatcttggaaattggtccatatcagacctggagcgcttcttcatttgtttttatggctgtttggtattccattatgtggacagactgtaatttatttaacgagtctccctctgatggatatttagatttccaatcttccgctattttcaaacaatgccatgagaaatcatcttgccaaggtgcgtcccacatttgagagcatgtttgtgggatgcaggatgtagcttacagggagctcctggcatgccgatgtgagaaccgaccctccatagcaaggctgccccacatggcgtgggctggcctggcctctgagcttcctaagggctaaacctatagttacaagaattttcctaagcccctcagccacagatatataatgtgtagtttctgaatgagtgaatgaaaatacttacacttcagagaaattgtccttagcagaaggcataggacatagttttatttgttagacttacagaccatctgcctgtgaattcaaataatagttttcttgttgtttttgaaatgaatacattccatgagagctgcttactcagaccttcagtggcccagctggaagtctggttggggaatcattccctgggttgtacaagttggtgcaccagattaaagataaagtcatttatgatgacactaaaataatatgagcatcacatttggtagagactttgtttttgacgtaacccaagataagaccttatc

SEQ ID NO: 24351 - DNA, 1029 bp, Homo sapiens
gagaacgtgtggcatcttctgagagggaaagaggagctcaaggaagaggggaaaggtcattgcccttggaccttgcaggaagcaaggtgcaggggcgggcacatcgtattggaggtcatgagatttgggatcctctcagtgcactgggaaggacatgaccaggtggttgtgtggggacatggctctagctgctttctggagacaggactgggccaagagttctctattctgttccattggtctatgtgcctgtttttgtaccaatgcttttttggcagggaggtcacagaggagaccatttctgggcctggaattcctgagagtggcctggccccagtggggacagggaggggagagaagcaacctggggcacacttccctagccagtcctatgtttgtgagacctgggagggctgtggtcagggggctgggccctgggggcaacagtgcctttgcatttgaacacaaagtgccacttggtataatgggcacagctcagtcttggctgttcttgagttttaaacaaatcatgatccccaccttccaaacaatttagtttttttcccctagctagccccatcacaaacttttgaagcatgaaatgaattttgctggccctcaccaataggatcctttccctagataatggattttatgaaatggccataatcctcctaggtaatgagcaaaagctacactctccacttgggtccagcattcctcttcctgatttatgatagattggttaaaatagtaaactgatagcagttgcaaaatagtcatcaatcaccaggcagtgtcgcttaaactacagaaaggtttccagaagtgagatgctggaagccagagagagaacaatttggcaataccaaaggcataaagcaccaatgaaatcaaatctctgtatttgtattctgaagacagaggagtagagtggctcagggtactaaggaaggaaggaaatgcaagcaaacccgttccccaaggtcaaaggacaccccctcctgagctccaggctgcagggggccc

SEQ ID NO: 24352 - DNA, 1036 bp, Homo sapiens
gaaacactcagcatagtactagcccatggtaagggctcagatatgtcacttgttcaattactattcagtaggcttctctgaacgtgacaggctaaactcgaaacattaattagtcacttcatttgatggcaatagtaataaatgtgagtgacagacacgaaagaggctaccctcagtgtaccacccagggagagccagagttaagattttggaatatatgcttgcagtcttctgtgttgtatatagtgtgtgcacaattattcacacacacatacctgcctgctttttacaaaatgggattatattgtgcttgctacctcgtaacctttccacctgagaatggatactgtcattactgatgcctttccgttcaagtttttctgcagttgcagtctcaaactttttggtctcaggacccctttataccctcaaaaattattggtagcttcaaagagcttttgtttttgtagtgtgtatttattggtatttactgttctagaaattaaaactgagaaatttaaaagatattttaaacttatttaaacctaatagtaatagacccatttcatgttaatgaaaacaaccaatttttatggaaaatatttcccagaacaacaacaaaaatgtgaaagatggcattacttttcaatttgacagacctctttgctgtctggcctagtggaaggatgcattctcctagcttttccgccttgggtctgttgcatagcagcctctggacacccacagtgtctattcaagagagaagaagagtgaaaaacacaaataatgtattagtatagagatagttttgactttgcagaccccttgaggcagtcttggggatccccagggctctgcagtctacattttggtccgcttttgaatgcctacagaatgtttttgaccttcccacctgaggctgggctgggaacatccctccagcaaccacaggctccccgagcctcctcatctgaccgaacctgtgtccacagagcatctgagctctcctctctatcattgtgaaatggaccgacat

SEQ ID NO: 24353 - DNA, 1023 bp, Homo sapiens
tggtactagtggaggcacttagtggctgcagctgagtgttgggaagggctggagagtcagttgcagccaggtctggaggggctgtgtgcccagcttcagagcttgggttttgatcaggtttttgtgttagaatcctcattctggtggattggagggagccccagagtgaacatagagagacctcctagccaggcaggagataacctgagatcagtgcagtagttcctcacccgtgcgtggggaggcagcatgagcagttaggaggaggatggtgtccacagtggtcggatggcaccccagccaggccacggcgggctggacagcactctcaggtgacacgtggccacctgcctgcctctggctgcggccccaccacgggctggatgcctggatgaatctcaggctggagtcacttaacggctgggctgtcaccctgcagtaacccataattactacttaggagtttgtggacgaaaagcagtagattccaattgagtgtgttaaactctgcacgcgcctgttctaatgaggagcttgtaacctatgagagcccgtctgccgcgggaggcgggctcttgagccagagaagccagccagtcattttctccagcctctagctgagcctccacggccagccatatttcagcatttaggattttaagtgctggttaaaatgctcatatagggaagtgtgtatattttcatatttctgcacatcatgctagagacgagggtaggaataaatcggtgtggccagaggtgccgcttcaagctgctttattccctctctgtgcacagtgttaaactgggctgtgtctgacttcccaaccttcatcctgtagggggctgttactggggaaagaaagttgtcttaaaggaccctggagtgtgagggatggaaaagcgaaaggtttgtctctgcaaacaggtagtgctgagtggtcgccagcttagagcccgtcgtccagatgctttgttttctctctgttttacatgaatttccactgcacagccattggagtt

SEQ ID NO: 24354 - DNA, 1872 bp, Homo sapiens
aatgtctgcaaactgcggcctcagctcccgtacacagagcctccccatgaggacagactgccaccagacacacaggagagtgcagattgataaaagacatggactgcgcttcagtttgaggaagggacagttctccattgttttccaaaagaatttgctgtatggctcttaaaaaatgcaaatccccttagtacattttggaaaggacttgatttctagaactttttaaaacaaatgtatgggaaacatggtaagcaagcttgccagtgtacagtttcacctacaaaaccaaacaacaaaactcaaaccaacaaacgaaaaccctggggaggagattgaattccatccagaggagcgttctggagctctgtttctatttgtcggtagagccgagggtggcaggagctggccttgctctccagggaggccctgggagagcagacacatgcacgccctgtcctggcagtaagaagttccagtttggggaggaagagatgcagggcaagctttggggactccagcttcctttccagcaggtcagtgggcccagaggacgcctgcccagcatttctgaggaagtgggcacctggtcctgagcagctccgcaacagcaaaaaggtcccagtgtctccactctggagctccgtggacccacccatggccctgtgatcctggtgggtggtaggcatcttggcccaaaggcagggctggtgtacacaagccagcggttccgaggcaggaggaaatggcatgctggggctgtgtgctgggtggattctggctatggggagtcagtgaccatgaaatccaggcggcaggggggaaagcccgctccacagccctgtgcacatggggatgggaacgcaggactcagacaccttcctccacccagcacaggagttcccctaccctgccagcctgcctcaaagggagcatctactggaacctggttattccgagcaataaataggagccctgctaagagtttagtctcagaagaacgatggcactagtgacggtgatgtctgccacctccctagggccaactctaggccaatgcaacatgctttccatgacgagttcatttcctggggctgctgtaacacggtaccacgaactcagtggcttcaaacaatagaaatatgttctctcggtttcagaggtcagaagtccaaaatcagtatcactggaacaagatcgaggtgtcaccagggctgtgcaccctcagagacccccaggggagactctgtccttgcctttcccagcttctggtgctgccaactttccttggctcctggccatttccctgtagtctctgtctccctgtcgcatggccatctcatcttctgtgtctcagatcttactctgctgtctaaagaccccatgatggcatgtagggcccactcaggtaacccataatctcctcatctccaaatccttgtcttaatcacatctgtcaaatcccttttcccagtaagttcttgttcacaggttccggggatagaacatggacatatctctgggagatctcatgagccccccacgtgccttccctctgctcctcacaacagatttgtaagatcactgtcgtaactgttcagagacggcacatacgtgctcccaggcaggagtgagctgaggtgagccgggacccatgtcttctgcagtagtgtctgtgctcttccctggacacgctccctgctttattcattcattcattcactcattcgttcacgccctcactcattcattcattcattcgttcacgccctctttcattcattcattcattcattcattcactcattcgttcacaccctcactcactcattcattcattcgttcacaccctcactcactcattcattcatt

SEQ ID NO: 24355 - DNA, 1058 bp, Homo sapiens
tgtgacttattccacagtctccctcccattgagctcagtggctggcacacagacatgtggctgtcactgattctgaaggtacctctgagcacctgcatgacgccagttccatgccaagtgctgagcatgcagaagagcctcggacatgccctgctcccaggcagagcctgggaacctggcagatgcacctgtcagcttgagcctggaacagtgcacccttggggagcagagagaagggatcctgagccaagagaaggggcttcagggagggtgccacctgctgggctgacagggatgagaaggagtttgccaccacagtatagggtgcaggaaggcattggaggccaaggattggtgtaggcaaaaaggcagaagcaggttcgtgggatctacatgagcagggcagtcacgtctgctgaagctagacaaccaaactgcggaagactccctccaggcctggcacagcggcctcccaggggggtgtttgtgaaacccagatgtgaggacatctggatgtcacctgtttgggtcctggtttgtactgtactgtaagcccagttttcatgcactattgagcatgatcagtaattatctctggtttgctcagccaacagacaaatcatttcctccctgaaataaccagttccagcagtggcctttcacacgtccagcatcaatccagtgtgaagattgggagggcctcccgggcaatgctaggttagccctcaaagtgtggttctaaccctctaacagcagttctcctttcatgactgcctgccatgtctctggcacagttttggggactttcatcctcacgacaaccctatgaaacagacactattatgatccccattccacagatgaggaaactgaggctcggagaggttacagtgtgatgtggctgggattctaacccaggtttgtctgattctaacacactctcttttctttgcacaatgtcaaattatagactaaagaataaaaatgaaatcttggtaaatgtggttcctggtgacttagctgtggttttgcagctgcttcaccataaagtctgattc

SEQ ID NO: 24356 - DNA, 1035 bp, Homo sapiens
ttatgagtccaggactgaggttcggaaatcctgggttttttcaccccattactggatgacttggaacctgttcctttgcctccctgatcctgcctttcttcatcagagaaatcaggggtgctagtgctgtcagagggtacactgagctcgtacacttgctactagtactaaaaaccccactgccctgttcattgagaggcagcattgtgattacacgaggcacatgtgtccccagcttcttgtggcaggaccccccgtggccgtgtgcttaactgcatgaacaggtgcagacaagccaggctatggccaggctcctgcatggtgccatccacagagcactggctgcaaatttgacacagcacctactgacgttgccagctgggctctgctgaggggcgtgggtagcttcaggagaacagggagagcgccccttcagagttgatcctcgtacccctatccatgacacaggcctgcttctctccccagaaaccctacatctgcaagatcccaggctgcaccaagagatacacagaccccagctctctccggaagcatgtgaaaacggtccacggcccagatgcccacgtcaccaagaagcagcgcaatgacgtgcacctccgcacaccgctgctcaaagagaatggggacagtgaggccggcacggagcctggcggcccagagagcaccgaggccagcagcaccagccaggccgtggaggactgcctgcacgtcagagccatcaagaccgagagctccggggtaagcggagctgggcagcccagccacgcaaggcgactccatagccgtgcccagggccaccccttgccacggttgcgggctctgccctaaggcccccctctaggggcacagcgatatccctcctctctccaacttggctttcccccttcaccaccttgggcctcacatggaacctatcttgtccaggtcccattctgctctgaccaggctcctgctgggtgtgtggcagcacgctgggtgacagggatgccgccctgtacggtgggcctgcacagg

SEQ ID NO: 24357 - DNA, 1096 bp, Homo sapiens
ggcccagacgcagtccgagagtccagacgcatgccgactggaggaccaaagagattagcacgaagaaggatgatcttccacaaaaagagctatgtacagctataatggaaaatactcggtgaggagaaacgaaataaaaggcaatacagcgtagccaaacccgggttagctgcgggtggagttcaagagcgcgccgcggtcccgcccccgccagccccgccccggcgagaaaagcgtatgcaaattttcgagcggccgacgcgcggtcttctgggtaaaaccgagccgccgcttttgcgacccttcgggagcctcagaaaacaaagaattggggtgtcgtcgaaagctgtggaggctggaggtaagctagctaccagaccgactagggcgaggctcacgaattaattaccacaaccctaccaggtattggcgcttcctgcttgcagcccagggactttctattataaccatccttttcttggggttgcgctactgtccaatgagcgcatagtgagggcagtactgctaacgcctgaacaacacacccgcatcaactagagcttttgctttattttggtgcaatttttggaaaaatgaaaacctgttttcatagacttatcagttcaaacagcagtaattcgtaaataaactagtactttgtggttaaaccagtagagggtgcacaagacgcgtggttttagtgtcgcaagtaaagttctttcagtttttgcggtgattaaacgggaaggatttcaacagaacttcacccctttaactttacgccgatcatcaactgttctgtaacttccttatgctgagtcagcccagtagtctaggtcaagtttcaataggagacgaagtttcagtaggtctttgcacctcacataaaatgtaatccaggtcgggcgcggtggctcacgcctgcaatcccagcactttgggaggccgaggggggcggatcacgaggtcaggagatcgagaccatcctggctaacacagtgaaactccgtctctcctaaaaatacaaaaaattagccgggcgaggtggccggcgcctgtagtcccagctgctcgggaggctgaggcaggagaatgg

SEQ ID NO: 24358 - DNA, 1038 bp, Homo sapiens
agcctcccgagtagctggaattacaggcgtgcaccacccccccccaactactttttgtatttttttgtagagatgggtttcaccatgtttcccagccttgtctcaaactcctgacctcaagtgatccgccgtcttgggtcttcgaaagtgctgggacagcaggagtgagccaccgcatctggcccggaaagtgttttggagcgtagaaaaatgcaaattatagggctgccttcaaggatcccgaaggacccacagatttgccgcatcaggctcctatgcacgccggtaatttgatgtgttgagatgcactgcccagtgcgttgtttttactggaggagcttgtgtgcggagctccttgctagtgtatgtgttgggatgggagagaagtgcgggagaactatgagataatgccccctgatcctcagggtcttaggaggtatggtcggagaggctaagctaaagtatgaaagccgtgtgtaggcccttctgtgtagtgcagaaaaggtagaggtatgtgatttgaaagagtagggatgacatggaggatgcgactcctggttggatctataaactaatgtctttggaacgaaagcacatgcaaccttttgaaaatggatgggtgataatgaaagaccattccagagaagaaacaccatggtgcaaaggctcaagaggcatactggaagtacaatgaagagagcaatctaactgaaatgggaaaaaaagaaacaaagagtaaaaagtaagatttgatgagaaagatggaatcgatttttaaatttttttatctacacaacaaaatttattatcttaaccatttttgagtgaataattcgttagtattaagtatatttacctcgtgcggccagtctccagaattcttttcatcttgcaaaacaaaccccgaacccattaaacaatttctcattcgccattttccagctagccttggtaacctccattctagttctgtctctgtgaatttgactgtgtaccccgtgtaagtggtatcatacagtatttgtatttttgtgactg

SEQ ID NO: 24359 - DNA, 1025 bp, Homo sapiens
ttccttcagactgcttttatgggctgtcattgagtgtctgcggcttttccaagtgcacagtacaagccatcaatggatctaccattgtggggtctggaggatggtggccctcttctcagctccactatgcagtaccccagtggggactctgtgtgggggctcccaccccacgttttcctttcacactgccctagcagaagttctccataagggccccaccactgtagcaaacttcttcctggacatccaagcatttccacgcattctctgaaatctagtcagaggttcccaaacctcagttcttgacttctgtgctctcacaggcttaacaccatgtggaagctgccaaggcttggggcgtgaaccttctgaagccgcagcccaagctctaccttggcctcttttaaccatggcttaagcagctgggacacagggcaccaagtctctaggcttcacaaatcagaggggccctgagcccagcccaaaaaaacattttttttttctcctaggccttctgagcctgtgattggaagggctaccacaaaggtctctgatatgccctggaaacattttcccattgtcttggagattaacacttggctgcttgttactcatgttaatttctgcagcaggcttggatttctccccagaaaatggggttttcttttctatcacatcatcaggctgcaaattttctgaacttttatgttgtgtttcccttttaaaactgaatgcttttaacagcactgaagtcacctcttgaattatttgctgcttagaaatttcttcatccagataccgtaaatcatctccctcaagttcaaagtttcataaatctctaggataggggcaaaatgccaccagtctctttgccaaaacatagcacgagtcaccttcactccagttccgaacaagttcctcatctccatctgagaccaccacagcctggatttcattgtccatgtcattatcagcattttggtcaaagccatccaacaagtctgtaggaaattccaaactttccc

SEQ ID NO: 24360 - DNA, 1050 bp, Homo sapiens
agtatatggttaacaagataaagatgtgcagatgagccggggaagtggctgatgcctgtactcctaacactttgggaggacaaggcgggcggttcacttgaggtcaagagttcgaaaccagcctggccaacatggggaaccctcatctctactaaaaatacaaaaaattagcctggtgtggtggtggacgcctgtaatcccagctacttgggggctgagacaggagaatcgcttgaacctgggaggtggagtttgcagtgagccgagattgtgccattgcactccagtccagcctgggcaacagagcaagactccatctaaaaaaaaaaaaagtgcagatgagagcagcaattaaccaaaagtcaatagaaactgctgaaagaaaacacctcaaagagttgctgagagctaaattagctgaatgtggctggaattgtaaaagtaatcagaaagaaaggactggagcacattactgttgatgacttggtggttgaaattactccaaaaggcagagccctggtacctgacagtgtaaagaaggagctcctggccaggcgcagtggctcatgcctgtaacgtccgcactttgggaggccgagttacgtggatggcttgagcccagcagatcaagaccagcctgagcagcatggcaaaaccttgtctctatgaaaaaaaaaaaaattagcttgacatggtggcacaagcctacagtcccatctacttgggaggctgagatagcaggatcacttgagcccaagagtttgaggctgcagtgagctatgatcactgcactcagcctgggtgatagggcaagaccctgtctcaaaaaaacacacatgtaaaacaaaaaaggcaactgtggttttgactgctgctagttagtttccagagtgtcagaggccaagtacaggccaagcatcattagaaacagggtcatcttgctggtccaagtgcagtggtgtttacaaccaattgatcacagccagttacagatttatttgttccttctccacttccactgcatctcttgactagccaaaaaaagaaaaa

SEQ ID NO: 24361 - DNA, 1476 bp, Homo sapiens
ggtacggtggctcatgcctgtaaatcccagctctttgggaggctgaggtgggtggattgcttgagtccaggaatttgagaccagcctgggcaacatggggaaaccccgtctctccagaaaaaaatagctgagtgtggtggttcgtgcctatagtcccagctacttgggaggctgaccgggaggatcacttgagcccaggaggcggaggttgcagtgagcccagatcacgccattgcagtccagcctgggcagcagagcaagactccgtctcaaaaaaaaaaaaaaagggaaagaagttatcttacgattaaaatgggtagaatttttcataaaacaatagttgtcttaaaattagtgaaacatagtaatttcatgagaaattttgtattccaagtgtgctttttagctagtgtttgtaaataaatataatgagatacctgtctgtataggtagggcttaaatgcttatggatggaaggttatttgattgtatctcaagtgatgtagaggtggaactagcagagactttccaaaggataaatgtgggtagattgagcagcaagcacttggtaagtcttagtgtttgaacgtgctagaaatttggactgtcacatcactccaatcagccttgtggtctgtcttcttcatcttcaatttatatatatatatttttttgagagtttttgagacaaggcctgtctctgttgttcaggctagagtgtagtggtgtgatctcagctccctgtaacctctgcctcctggactcaagccatcctcccacctaggcctccctagtagctgggactacaggtgtgagccactacccctggcttatttttgtatgttttatagagatgggctttcaccatcttggccaggctggtctggaactcctgagctcaagtgatctacctgccttggcctcccaaagtggtggaattacaggtgtgagccaccatgcctggcctctagaattttgtattctaacattttccccttaattcctagaaaaatgtggatgaagaattttgccatgttgattgtgtgaacgaatggttgcacctcttaaggaaaaagcctcatttgatactgctaaaaggaccagtgggagggggcatgtggcagccggtcttggctagctcaggagcctagcagactttctgctaaatagacttccttccatcgcctctctctgcctttctttctcagcatagaagtggcaaaacaaagacaaaaccattgtatgtatttcatggtgataactaacttgataaatgggtcaagcttgtcaaatgtcagaactttatttgatacagcatagttgtaaaagtgaagtggctcttttttaagagttcttattatgggggaaaaaagcccaacaaagcaaataacaaacaaaaaagcagtgactgaagatattttgagactgcctgagctggactgcctgagctggactctaaaaactaaagtttttctt

SEQ ID NO: 24362 - DNA, 1031 bp, Homo sapiens
tctcaccacactggtgagtgtgtcaccttgcccctctctgcttatcttgtgaatgtgcctttaattaattaatttagtgtttatttgcacatcctgatgtatctgtcttaggacttgttttcttagactataagctatgccaagcttggtgtggtgtctatgtcagttactagaaagcctagaaaaatactactttcaaggaggcattgagaaatttaatatattatgataatgggtattttcagaaacctatttttagagaagctgtgcattaccaggaaatgtttcttatttttcccatatttctgtgtctagctgtggagtagagtgagattgtacaccccagtgttcacaagtaatgggaaagtcttcctttggctaggtaagctgagatccagatctgtagtttgctttaagacagtgaaagatcaccactgcattagtattatggctcagaggagaagataagcaattgacatgaatcattcaattactacatgcatttcctcgtaggggttttagactcttgaatgaagggaaatttagactggccattattttagtaggataaagtcgaaaaaaattaagatggcattaagttcttggatctgattttgttagatcagtgctaattttaaactaagtttggtgatcttgaaaatttggatttaagagtgttaaaagattacaacatgctgcctttattctcagaaatttttctacggttcatattttactgtgggagaactttaggcaaaacatattttttgttctttgtaaggcctttcagaaaataagtaagcagaactagtactagaatcatcagttcctaattcttcttccactactcatagtatttttgtcaatggggtttcataagctttctttatattgagacttcccttttatgtttttattattccaggtttcttaagaaatagctattaagtgaaaaaattcataggctaagttattaataactaataagataggacttgattatcattaaaaatatatatattatacataaa

SEQ ID NO: 24363 - DNA, 1915 bp, Homo sapiens
gaaaacaaacaaaaaataaaacaggtcagtaaacactgcaggtatagccgaagtctcctttgttcctttctttctttctttttttctttttttttttaagagacaaggtcttgctgtgttgcacaggctgacctggaactcctgggctcaagtgatcctcctgccttggcctcctcagtggctgggattacaggcgtgagccaccacacctggcctgaaaagtctcctttgttaaccactctcagtctccttatctacctcatagggaatcactattctagcaatttttctataaattttatgagttttaaactagcttctaattttctattttttttaaagaggaataattatacttcattttttccccctatgtcgtagaaaatttcctagggttgggagaggaaaaccatgaagataaagttggtttacttcttcttatgctccgggaaagaaaaaataatgaaaaggactgatttttatgtttcttttagagatctgcaccccgacctggagggacagttgaaagaactcagaaagcatcttgtagagagcaccaatgaaatggcacctttaaaggtttggcagttgcaaggtaatgaaaacagggagaggtcattggcctactttttggctaagttttatggctttaaaaaatgcaaaatttgaatttaattgtatgtagtacgtgattctgaaggtgcctcagattttaaagataagagtgattaattacgattaatcagggaagaaaggaagtccttttgtaaacagataacactaggtagaagtaatatatataaacaaatggcaagtctttctgtgtgaccatacataaacttgtaatacgagaagcaggtcatagtcctaagttcctatatatatacatttcttcaactgtttatctatagagtgtttaagacatgtcattgtggcaggatgtatgtgtttttctctgttccaaagaactatttttcaagtttttttccccaacgtcatttactaaaagtcttcatgctgtattttgtgatgtattgtaaatttagaaaagggaaaaggacttgggcctgatttagcctgtgctacatgcgttagtgtagcgttagtgtgtgccctagtgttttctgcagatatatcagaaacggctcaactgaatactccagagatctttgaagtgaataaaacctgaaattaaatcatgggcactctctggaatggttgcattcgaagatattcttaattaccatgaaaagagtgggaagtaaatttggattttgttttctgcttctcattgcattagattaatccacttttaattatatttgacattgttgcagatctcagtttccagactgctgctcgaatcttggcttctcctgttgagttggctttggttgtcatgaaggatcttagtcagaattttcctaccaaagccaggtaatgtagaataatgctcttctccttaacatcatacccagtcatcgtcatgttcacttgccaaatgaggtaataacaatatgaaaattcctagaaaattaagattctttttttttttttttttgagatggagtctcactcttgttgccgaggctagagtgcagtggtgcaatctcggcttaccacaacctccgcctcccaggttcaagcgattctcctgcctcagcctcccaagtagctggtactacagacgtgcgtcaccatgcccagctaagtttttgtatttttagtagagacagggtttcactgtgttggccaggctagtcttgaatgcctgacctcaagtgatctgcccgccttggcctcccaaagtgctgagattacaggcgtgagccaccacgcctggcgaaaattaagattctttatgaccaccaccactactattgcagatggtgctctgtgtcttgaagatggcaag

SEQ ID NO: 24364 - DNA, 1050 bp, Homo sapiens
agtcatttcaaaatttgaaacaaggcatcgcctcttggaattttagtttccattgtggctgttgagaaatctgaagcctttgtatgagatctcttaaggatcttttctttgactctagctatctgaaatttcataattatgtgtgtttttaaaaaaatctctgtactgttaggtggttcgtgggcccttaaaatcttgaaaatcatttcctttagctttgggaaattttcttaaattctttgtttgtgtttcttctctctggtttctctttcctcttttcctagaaatatgtatttatttattttttaaatgttgcacctctgactagtttggccttttaaaagtctcttctttcctattcttttctctttttcaaaaaaaaaaaacactttctggtaagagtttttaacctgtgtgtatcttttttcctttagttgtcaaatatttaattttcaggggttttttttgttctttttatggtgttcccgtgtatctctgaagataatggtgcttgtgttttctgtctgcaaagtctgtttcctcttaagctgcgtttttgggttttggtcttttcagtggtggaggccttccttaggtgtctggtgatcacactcagagtgaggcactaaggacctggttggaagtcctaatgatgtggctttgtgactgtaaggtgttctgttgtgaccatttcctagggaaccccagttacagtatctttgttccttttcttttgggttggtcagtccttgtcagtctccagaaaaggatccgtcagtcttctggctggtgggtgaaatctgtttgctagagctgtagaagcacagtagggaagagcgtttggtgacttgccttcgattccccattatgtgtgtggggtccctgtcctccttgtgcttgatttgccattgtccacagatgttctgttttgttcttttccagggaatgagccttcattttgctggagtagggggtagcaccgacctcaggcacctggctgtgggaaatcagttggggggctggggggttttgtcttaaagggctttatat

SEQ ID NO: 24365 - DNA, 1033 bp, Homo sapiens
ttgaactcctgacctcaagtgatccaccctcctgaacctcccaaagtgctaggattacaggcgtgagccactgcacccggccaatgtagataaattttgtataaacatttgtaaagaattagtttcagaaaattacaaattagtatgattaaaaatgacaatatgttacccacatgttcaaaggctgtttttcattttacatgctaacagatgcccagaccagtgcattaatcagtagaattaatcagtgcatgttcctagtctgtaactaaactctgtggaagattcccctgctttcctatagtaaaggtttacgactttttcttctatctttattaagcttgtcattttcttctttttgcatggttcttacaaattatttggtcaatttcattttcagaatgttgaaacacagaatgtgcttctctcctctgactcaattagctgtttttgtttttctacagatgattcttttattaggccagtaactttttggattgttggggattttgatagcccttctggacggcagttactgtatgatgccatcaaacatcaggcaagtatctatgacttcattttatatttttgtttgtggctgtagttgtcttcatgggcttcgctgtgcggctaggattgttcagtgggagttgggagtcctgctttcttaatgctcgagggaacggagaattgtatctctagagatctgccagctctcaagaaaagagatctaagactacagtatccaggctttgttgaacgggatagattcttatagagaaaaaaataaatagcgagatcctcatcatagacaagttttattgcatacctgttcatgttcttggagcagagttgctccaacaattgtgttgtgtactgtatcggggagatggggtccttaccacgacagaggtctggacatgggggcagtagcacacaggaatggtagtgtgtgtgtttagtagaagtagatccagatgcactgagggatacacacataggtgttctgaaaagatatgctgccattaatagt

SEQ ID NO: 24366 - DNA, 1021 bp, Homo sapiens
tactttgtgcagctacatctcacacttatatttggcatagatgagtattttccactcgattgatccaaaagaggttcatgtctcctagtggggaagttacttctgctccatactttgtgactctcattgcctgtacctgctctttggaaatttgactgctccctgctcagtttacttcccgttgtgtaagttgcattctggtgcagcctgtgttcagtctcttcctaaaacaacactgtcggagagtgaacattctttttgtaggttggttttgtcagtcttgtggtctctccagggtgtgagggaagcttcataaccactcctgctgcagctcacccgctagggaaggatgggaagcgcagtctctttcctcttactttcaaaggccgtgtgtctgtatgagtgtttcaagtggtcttttttttacccttattgttataggggctttacaggacagaagactgaggaagtgaagcaagataaagatgacataattaatattttctccgttgcatctggtcatctctacgaaagatttcttcggtcagtcttgttgattatttcattatatatgatgaatgaattggtcagtgttcttatttagagaggaaaggttttgtgggattctgctcattatactcctgtgtctttgaagcactctgagcattgtgactggcttgccatttatcattggatttgttttgatcccgccgtctctgtgaagttgaactatgtagtgagtgcttctggatattacaaggctgcagccctttaacgtcactgtacacattcatagactgtactgtttactgcctgccaaacattgcttaacccagagattaggaggttgacatagagaatagaatcagaacagaaccatggaatacttcactgccttgtaaagattcacaggattttagagccaggagagagcttagttcttacatgtgaacacttctgttttataaacaggctgaggccccgagtgtgaagggacttgtctaaggtcacacagctacag

SEQ ID NO: 24367 - DNA, 1054 bp, Homo sapiens
tgaaaaacagcgtatcatctggggttacaagatcctcttcctggatgtacttttcccactagttgttgacaagttcctgtttgtggatgctgatcaggtaggcccttaaaggccaagttttgacagtttgtattaaaagcaacaaattgcttctttttaaatgctattttttccacttatggaaaaggacatgcttattttacatttagaaaatatgaaaatatgtatcacatagatgtcatcactttttaaatttgcatttagcttatctcctttacatctttttctctgtctttttaacatcattgtgatgacataatgtgtgcagttttgtatctgacttaattcatttaacatgaaaactaaaaattagaaaattaacatttagcagtgcttgccatcatctctaattatctgcccaaaagataggagttattgtcatgggtaatagacgaagcttaagtggatacatggctttggcagtagggaacctccggatattcttccggccgtcagggtttgacttagtgaaagggaacatgtgattttagagcatacaaactcaaacagcataagtgtacgtctgcccacagccttccacttcagcccgagcgggcggaaacccaagtcagccacctgagtggaaggatgtaatgtgtgtgaaagtcactgggacagagacttcactcacctctttggaattctcttccactggcttagcctgaagtgtgccttcctgattgtaacatagccacatttaatccttgttgagtacttacgatgggcaaggcattattctacatctgtccatccatatgttaacttacataatcctcccagcaaccctgtgagataggtactgtcattatcattatctccattttacagatgaagaaactgaggcacagaaaggctaagcagttgaaatttgttttattcctactcccacacaccttgctaagaagtgtcttacatgttagtgagtcaaccaggtaataagtggagcaatcaaagtgcatctgcccctagtgcctgtgccactaaccacggagca

SEQ ID NO: 24368 - DNA, 1030 bp, Homo sapiens
gtggaggttgcagtgagccgagatcatgccactgcactccagcctggcaatagagcgagactccgtctcaaaaaaaaaaaaaaaaaaaaaaaaaaaattaaaacagtttccataaatggagcttaatttgctctgctgtccttaagccctcgtgggtttttttttaagagagtctcattctgtcacccaggctggagtgcagtggtgcgatcttggctcacttcaacctctgcctcccaagttcaaacaattctcctgcctcagcctcctgagtagctgggattacaggcgcctgccaccatgcctggttaatttttgtatttttagtagagatggggttttaccatgttggttggccaggctgatctcaaactcctgacctcaggtggtgatctgcccacctcggcctcccaaagtgctgggattacaggcgtgagccactatgtccggtcaagccctcgtgttctgaaccttgtcaaggctctgcctgaatgagttttcatctgattgtggggaccaagtccctgagtagagggccaagagctagggacagggggaagagactggcccaggtggtagggaggaaagaactcccagagtttcctttagccaggaaacctgctctactgaccccgtgacttggacagtcagacatcaccctgagagtgacaagtgtaaaatgactcccttcctcccccgccctccggaagtatatttagatacttgaaagcagtccttttctaaaatggccttacctatgtggcctgaacgattaaaagaaagaactcagagttacaagggaaaaagaaaaagagttacaagggaattgtagtctttttctgaatagaatattagtactgtggtattgcatttcatgggaatggaaatgtattggtaaagctacctgatggaagctttctcttggtaacaaaaatggagggtgtattatgtgcagttatttaaatatatgtattccattgttgcgtggtttttttcccccctcaagacagagatttgctcttgttgccca

SEQ ID NO: 24369 - DNA, 1099 bp, Homo sapiens
agtgggaacatatgacgtgatcaagaaaaaaaatcaggctgggtgcggtggtgcacacctgtaaccccaggactttgggaagccgaggcggttggattgttggagcccaggagtttgagaccagcctcggcaacatggtgaaaccccatctctacaaaaaatacaaaaaattagccaggcatggtggtatgtgcctgtagtcccagctactcagaaggctgcggtgggaagatcatttgagcctgggaggttgaggctgtggtgagctgtgatagtgccattgcactccagcctgggtgacagagtgagaccctgtctcaaaaaaacaaaatcaaaacaacccataaaccaaggtgttgaaatcattcaataaaaatgttaaaataattataaacgtttttctcagacataagtggatgcttttttattgccttttgatacgtcctgagtttgtgtgtgtgtgtaggtatatgtgtatatatatatttattaatttaattgacaaagattgtgtatattccaggtgtcccgtgtgatgatttgctacacatgtgcattgtgtgattatcaccactgaattaggacacccatccccacctgtgctgcacattagatccccagaacttatctttttttctttttttgagacggagcctcggtctgtcgcccaggctgaagtgcagtggtgtgatcttagctcactgcaaccgccgcctcccagattcaagcaattctcctgcctcagcctcctgagtagcagggattataggcgtgcgccaccatgcccggctaatttttgtatttttagtagagacggggtttcaccatgttgttcaggctggtctcaaattcctgacctcatgatccgcccgccttggcctcccaaagtgctagggttagaggcgtgagcccccacacctggcctatcgcgcaggcttaagtgcaatgttgcgatctggcctcactgcaacctccacttcctgggttcaagcaattctcctgcctcagcctcctgagtagctgggattacaggcaactgccactgcacctggctaatttttgtatttttattagagatggagtttcaccatgttggtca

SEQ ID NO: 24370 - DNA, 1163 bp, Homo sapiens
accagcctggccaacattgtgaaaccctgtctctactaaaaatacaaaaattagccgggtgtggtggcaggaacctgtaatctcagctactcgggaggctgaggcaggacaatcgcttgaacccggcaggcagaggttgcaatgagccgagatcatgccattgcactgcgcctgggtgaccgaggaagactgtctcaaaaaaaaaaaagaagttggaataaaaacattttggggtaactgaatgctgacagcattcattgtaggagacaagtactacaaaattgctttaaaaaaaaaggctcccaggggggtggccccaagagttggggttcagtgtcctccaagccctggtcctctccaataggcctgggatctgccccacctgacccgttctcccgaccctgaggttggcttcaatgctaaggaagcccacaatattgtcaaagagtgtgtgctggtgaagattataatcacatcatcaaccaagcatagtggaacaatccttaacacatctggttaagttgggaaaagcttatacatatattgtgacctgtgcagtggtccagaagagcgcatatggctttcatacagccagctcctgtttttgggataccacatctgatggaacctgtaccataagatgggagaactggaccatgaaccgtattgtcaacgtttttgccattgctagtgttctttaacttactaaaaatgttgggctaaagccattaacttaaagaatttgtcagtgtatcttttcaaaaaatgagtaatatttattagtgtgctagatgacaagcgtgcattatataagcaaaatgctgtaatcccagcactctgggaggccgagacgggcggatcacaaggtcaggagatcgagaccatcctggctaacatggtgaaaccccgtctgtactaaaaaatacaaaaaaattaacttggcctggtggcgggcgcctgtagtcccagctacttgggaggctgaggcaggagaatggcgtgaacccaggaggtggagcttgcagtgagccgagatcgcgccactgcactccagcctgggccacagagcaagactccgtctcaaaaaaaaaaaaaaaaaaaaaaagtaagcaaaatgaaaagcacttagtgctttctgacagaattatagatgtaattttaag

SEQ ID NO: 24371 - DNA, 1114 bp, Homo sapiens
acctatttcccgtgcccaaagatgacagccaccgggtcatcaccttcgcaaaccaggacgactacatatcattccggtgggtccacgggccatgccccaggaaagcatccccaccctgtgtacctcgtgctgcttgccgttgacccacagctgttccctcccaggcaccatgtgtataagaagacagaccaccgcaacgtggagctcactgaggtcgggccccgctttgagctgaagcgtgagtttgaggctgaatcccgtgtctggggtggggaggggaggctggctgtgccggggctgatgccatccctgcctgcagtgtacatgatccgtctgggcacgctggagcaggaggccacagcagacgtggagtggcgctggcacccttacaccaataccgcacgcaagagagtcttcctgagcaccgagtgagcacactcaccactcagtcaggacatggacttggaactcaggatggggctgtcatagacagacccaccagtaggaactgtcacagaatggcctgctgaactgggatgtggaactgtggcgggtggagaggtctgaataaaccgtctgtgtcatggccccgcctgcctctgagtggtcaggccaagtctgcagggcaaagcccatgggatccctttgggtggggacctgatggctgtgggacgtgcttgggcctggagtcagtgtgggggttaacagagagagagatttgatgctaacgtcccctcaagagtgagggtcatatgagctcttcagcaggcagatgtgggtagcagggccagcctgtgtcaggggcagcccaccaagttaactcactgagtggaagccgccagtgtgccaacgcggaggggacaggccacacccagtgctcagcagctgattcctcatgtaagtggcatcatgtggtatttgttttgtgtctggcttatttctattaacataatgttctccaggttcctccatgttattgcaaatgataggatttctttccttgtaaaaaataacatgccacattttcttaccaatccgtccaccaatagacacttaggtcgttttcatagtttggcagttgtggaaatgctgcagtaaacatgggagtatagct

SEQ ID NO: 24372 - DNA, 1010 bp, Homo sapiens
gctcatgcctgtaatcccagcactttgggaggccaaggtaggtgtatcacttgaggtcaggagttcgagaccagcccggccaacctggtgaaaccctgtctctactaaaaatacaaaaaaaggttggacatggtggtgtgtgtctgtaatcccagctactcaggagcctgaggcaggagaatcgcttgaacctgggagttgcaggttgcagtgagccgagattgagccactgcacgccaagcctgggtgacagagcaagggtctcaaaaaaaaatttttttttctcttcttcattctttttcagtaatttgatcatgatctgccttggcgtgactttctttaggtttaggtttattctccctctggttcattgactttcttggatttgtgggttcatagtttcatcgaatttgggaaaattttcacctattatttctttacataaagtttctgttatccccctttctcctttccttctggactccacgtgcacatacactagactggtatatttctacagagaactgattctttttcatttttttcatttcattttgaattatttatattgctatgttttcatgtctattgatcctttcttctagtgtctaccctgctattagtggatttttcatttcatatattttatttttcctctttataaattccattcaggttattttttgtatctttcattccactctgcatcatgttcatgttttccttttcatctttgagtgtatttgtaatagccattttaagatttttgcttctttcctgaactgttatttctgggccctttcctattgactaatttttctcctggttatgggtcacactttcctgcttctttgtatgtccagcaaaattttattggatgcttgatattttgaattttgcacaggtaagtgttggattgttttctttagagtgttttgccttttcaggaacttttggatggttgatcaagtagcctttgttctagaattaatttagccgtacttctaatg

SEQ ID NO: 24373 - DNA, 1035 bp, Homo sapiens
taccagaacatcaaagaggtacagaggctcctttcccactctcctgtccaccatcagcaccctcagagaccaggaccccgagcagggtccagcccccgggactactgggagcaggcactgactatgacatccacctgtgccctcctccaggcatccttatcaggctctcccatcttaagctttctcccagagccccttgagaggcctggccagcttcctccctcaggagcctcccctcctgtttttcttcagaattgtgccccactctacgacgatgccctcttcctccggactccccaggcacttctcgccataccccgcccaccaggaggggtcctcaggtacccggctccatccccggattcttccctgcccaatttctcaggctaaccccttcttcatccttggaacaccagtccgttccttgttcacttcgccaagtgttcgctggccctttcttcgaattgagctctgggaacccaccccaagatgattcaattatcccaagatgattcatttaccccttgcctctgcctctaaggcttgccctgccttctgagttaggcctttcctggatcctctaatcaaaccttaattcaggtggctcacccctgtaatcccagcacttcgggaggccaaggagggcggatcacttgagcccagctggagaccagcctggttaacatggtgaaaccctgtctctactaaaaatacaaaaattagccaggcgtgctggtgagagcctgtaatcccagctactccggaggctgaggcaggagagtcgcttgagcccgggaggtggaggttgcagtaagccgagatcgcaccacggcagtccagcctgggcgacagagcgagatcctgtctcaaaaaaacaacaaaaaaaattcagcaaataattctagacgccgccttcttgtcaggccgcacgttgggtgctgcggacatgggattgagccgccttcgcagcggagacttaaggcccttgtccttgcggccatcccttcctgtcttctatgccacttccgcattctt

SEQ ID NO: 24374 - DNA, 1074 bp, Homo sapiens
tgatgagtaaaagtactgggagactcatgttgaaactcgcttttcttttctcccaggctgcaaatttgctagatgaacaatcattttgtgaactgctgagaccccagctgggactactgaaaagccaagaaaagtagtgactcctacaagaaatctgttttattcccctcgagagaccattgcttttaaaataccccagaaaagaaagtgtagcagcaagacagagagggagagcaagggaaagagatgccttgccttttaagacatatactatgctattcacggatcaaattatgtgatgtctgggacttgtttaaaatagcagagaactgaaagaaatcaaagaggatctaaatatggagagagattctgtgttcatggatgggagggctcaacagagtaaagatttcagttgtctccgagttgatacataggtttaatgtaattcctatcaaaatctcagcaggatttttttctagctatagacaagattattctaaaatttatatggaaaggcaaaggaacaggaatagctaaaacaggaggccaggggaggaaacaaaaaagaatagctaaaacatttctgaaaagaggaattaagtaagatgaaccactctaccaaatttcaagaattattttatacccacagaaaacaagactatttggtatgagaggtggatgaacacattgatcaatgggacagaatagaaaatccagaaatagtgccaaacaagtacagccaaccagttgtttaaacaattgtggtataatccacatgccattgttattttcatattttgttattcttgttgtttttgtaatgaccatactaaggatgaactggcataccgctgtgatttttatttgcatttccctaatgattagtgatgtcgtatgtccttatttatatgctattgaccattcgtatgtcttctttgaagaaatgtctattcaaatcctttgcctatttttgagttgggctagtttttgagttttttgtttgttttgttttttgagttgtgggagtttttcaaaaatgtattctggatgttattcccttatcagatatatgat

SEQ ID NO: 24375 - DNA, 1681 bp, Homo sapiens
gccctgggacggaccccatgctgtccccaacagctggggtggcactctgccctgggcacccatgaccctctgctgtctctccctgttcagctgttggccggccctgctacctgacgcgccagaagcacccagccctgcccagcaaccggccccagcagcaggtcctggtgctggcggagcccaggcgcaagccatctaccttctggcacagcatcagccggctggcacccttccgcaagtgaactggtccctgcctgacagcacctgctgggccttcctgccagtggcccccagtttttcttccccgaggcccactcggcctggccttcctctgcctgcaagtgagcagggatgggctggggagttgcttgtgccaccaagacgtgccaggtctgtactcctgttgtctttttccctgctcctggtgccctgaagagaccagcaagggggcagaccccgcactcgccacaccgccgctgcagcttgggccccatccgccctctggacctgtgtagggcctcactgctggagcggggaaaccgcagctcagcccaggcccagctggggagaaggcgctacctgcgtgggaccctcttctctggaaacctaatcctcctttcatttcctctgggcaggactctctggccttctgtggcctgcaatgccaggccatgtgcccctctgccctctagttctccaagtccccagcccggccagtggtgccaggcagcttgccacttgggagggcagaagccaggaattccacacccttgtgttgcgcccggagcccgcccttcgcctcccagcccctcaagacaccgctggctgctggacaccctcttcacttgtgtgtgtgtgtgtagcggaaaaggacaagacggtgcagtcggctgcatactcccagtcgggagtgtggtcagtctgcctgctgctgtgcggtagctccagaaccacctcgttcctggttttgtttggattttggcatcttgtttttctaacaacaaacaatggagaaaaagaattgattcttagtgacacagaagattgccttacgctcgtgagcgtgagaagccataagagagagaccgaattctgtggctcagcacacaggactgacccacagcccaggcagcgggtgtgtggagatggcgccctgtcctgccaaggggcgccaggagcagagccagggcctggcgagctggcgtggagcccacaggattcagcagcatggacagtcactcttgcactattccttctccaagccagaaaccacatttaatttcataaataaatttatgaaaagtaacctggctgctagcccgttttctgtgggtgtgcgtgcattttcctgtggccagcagcctctaaaggtggggtgggggctcacctgtcgcagatcacaccctcggggatttagtggagatgataggctgaggcggggctggctgcagttgttcgcctaaggcgagcagggccaggccatgctggttgctgatggggaatacaggtagctctgccctcccttgcactcaagacccagaaaccagtgcttccctgtgtttgtttgactggagctggcccacgtgagtttggtgggtgagtagtcagtaatctttctgggcctcagcatccctggtgaaatgaggaagaacgtgtcttcccagggtcttctgaccctggc

SEQ ID NO: 24376 - DNA, 1049 bp, Homo sapiens
ttttgctgccttgtaaaactcttcaatccaccagtgagtcaaaaacttgtaggaaatttgtcagttactttttttcctcccctgtagtactcggtcctgctccagtctggactgtttttttttttttttttcctccccagtccttctgcacagctgcctttctgggaatttcctcccctgccagttgaagaccgaatcctactctgtcgcccaggctggagtgcagtgacatgatcattcatggcttactgtgcttctaccttctgggctcaagcgatcttcctacctcagtctcccgagtaggtgggactacaggcgtgcaccactatgtgcagctaacttcttatttttttgttgagaatgtctcactgtgttgctgggttggtctcaaactcctgggctgaagcgattctcccaccttggcttcccaaagtgttgggattatgctcaagagccaccatgcctggccttgattaatgatttgactgggtgtggaattctggcttggaaataattttccgttagcattttgaaggtattgctctagatgtcctgtgtcttgctgattgttgatcctttatatatgcttttttctttgggaagtttttaggttctcttctttgtccttgatgttatgaaatttcagtcatcctacctatggagaatcttttaaaattcatcatgctggacagtcattggatcttttgaatctagaaatgtgttatcctgttgcaggaaatggttttatagtattatttctctgctcttttctctgtggtttatttatgaaattctcctataagcagaatttttttttttgagacggagtctcgctgtgatgcccaggctggaatgcagtggtgggatctcagctcactgcaacctccgtctcccgggttcaagtgattctcctgcctcagcctgctcagtagctgggactacaagtgcgtgccaccatgcctggctaatttttgtatttttagtagagatggggtttcaccatactggccaggctcgtcttgaactcctgaccccaagtgatctaccca

SEQ ID NO: 24377 - DNA, 1034 bp, Homo sapiens
gaggtggaggctgcagcgagcggagatcattgcactccagcctgggcgatggcacaaacaaagaaacaaacaaacccattagaaatgtaaagaaattgaccacagaagttcaggagactcctgttactccacgtttttatattcactgtgtcctgtaaccgcctgcgaagttgcatggctgtgtttcagtcaggttttgtatttgtcatgactacgtagttctcagtaccttttctagtaatttttagcctgttctcatttttttttgtatgaaatatactgggaattcacattatggatgcaggaagctgtagtatgaatataaatatctaggatttgacgtgaatgcgtacgtgctttgccctctcatttttttgtgttctgggttaataaccccactgcacagatgtgatactgtctacaacattccttcctttttgtttcgcctgtttcttctgctgtactaagctacatgagagtagcattttggcttggtcactgctgtatccttagtgtctaggacaaggctggacacaagtaaggtgttctaagaatatttaatgaaaatatgatgctggtagttctctgcttcaaatccttttggaagtaaaatgattgttttaggatattttaggctgtaagttgcaggaaaccaaattcaaccatcttaagtgataaacccatcatgctgcttagtagaaagtcttgggtaagggtgggtttgggggttggtgaagtaagtggctcagcagtgtgagctctgctgtctctgcgtcagctgcccccagccggttcctcatggtcagaaggtggctgccagcacagtgagcagcagtgtgcttccctgttaacatcatcttagagacagggagactggcttttgtttgctggggattgtatgtttgagaacctaaatgtggtagagaaagattggggaaaaatgaaaaacatttcgtttcttggtaaggacagatagcatgaattgaaaaaaactgcaaagagagcaagaagcttcagcgtgcatgattttggag

SEQ ID NO: 24378 - DNA, 1027 bp, Homo sapiens
gatggtaatttgtaaaagtaaccttcctttatttagtttttcctgtagtatcttagttgccatagaaactgtgtctgcctttttctcattcacattttgaccatttatgtaatattagttaaattaggcaattataataagtgtgacctggaagcatccacagctgactctggcaaggactgagctcaatgcaggagcagagctcagcaggagccacaagagagtggcctggtcctgcagccaggggacctcagcatgacttgcaggggcatcagaatgtagattttccatgggaccttttcattaggtcagctcacaagttctattgtgttacatttggctagttggagttaacattactgagcattttaaaatgtcagggctgtgaaagtaaatgccgtaattccctagttttgaaatttaaacattgcaaaaataatcacttgcttccagtactgttacctgtaccagatcagcccttagatttacgatggtttcattgtactactctgtgccttttgagttttgtcattcatcatcctctgttgtatttgaggcattagtgggtataaatgcatactgtagccagagtgcctgggtttgtgtgcccttactgtccttaactgctgtgtgcctcagtttgcccatctgcaaaatagggataaaagtgcactcagttgagtaagagcattccaatgtatgtagtgctgtaagtggctggaaatgttcacctttgttaccactgcgggtttcacttctgctcttcatccacatgtgcacatcactagtgactagttttttttcttttctttttttgtgtgtttgagacagagttgcactctgttgcccagactggattgcagtgacaggatctcaactcactgcagcccccgcctcccaggttcaagcaattttcatgcctcagtatgggattacaggcatgcgccactacccctggctaatttttttttggtaattttttaagagacagggtttcactgtgttggccaggctggtctaaaacttc

SEQ ID NO: 24379 - DNA, 1050 bp, Homo sapiens
tcttggtttcctcccagtgtgcggtttcagggatgtcggccacatgatgtgcctgttgtggaggagggctgggtcgccagtgtgacaggagacagcagatcccttttgtgaaaggagaactggtactttgcgtgatgttaaacttcacaaaccgctgctcagaaatctgctattttccttctcttttaggactttatggacagcagcctgctaaccaagtcatcattcgagagcgctatcgagacaacgacagcgacctggcactgggcatgctggcaggagcagccacgggcatggccttagggtctctattttgggtcttctaggggcctcaaggtcttgatgtgcatagcttctgataaccctgtgtgcaataatatgatttgcagggcatttctgtttgtgacaaaagtttttaataatagttttaatcattcctttgaaagtagtgatgtcataattgtactaatccacataagtaccacagagaagggtttgaactgtgctattttgttcaaatgttgactctccgggggcactggctcattccaagactgttcttgtgcaactctcagaataccttatttgagcatacctgttttgaaaggcattttctttttagagttaggtgtagtgcttaagggttaatttattttcatgttatgccagtaatatagtgttgtatgcctattgagtgattgtggcaagaaaagctacagcttctttgcgtttaactttttcaaaccacagaccagaactggttgcatgttactttaggagttgtgggttggtaagctcccaggtacttcccgaggctatggtgtgagagcccccgtcctgccctctggggctccacaggcccctggcaaggccgatggctcaggatgatggggcacagcccgcctttgaacaatcatgcttcagaaatctgcctgaccctagctgctgctgctgctcactttattcttgtatggctttggtaggcatacttggagaacatatcccacattaggaattgatttaagcctgagagtttgagggctttaatcc

SEQ ID NO: 24380 - DNA, 1034 bp, Homo sapiens
agaaaataggtgttggagagtcgcgacgaagtggactctaggtgcatggcacgcagagacctgtgacgggggagggtggccatggcagggtcagagaacaggggtgtgggagacacctcttgggagttctcgggtttgaatttcctctcttggaaagttcctagaaattcctctgggcctcattctttcagtcgctgcccatgaaagcttttactgagcagagatgctctccccttcatcatctctagagctccgcacttatccagcagtccacagtttaatgctgctttgatcattttgcagtagtgcagtgttttcttgaccaagtgcattaggactgaggcgtttttctttaacactgcaattgatagctaggttaagaattgaggccgggcgcggtggctcacgcctgtaatcccagcactttgggaggcccaggcgggtggatcacgaggtcacgagttcaagaccagcttggccaagatggtgaaacctcgtctctagtagaaaatacaaaaattagccgggcgtggtagcgggcgcgtgtaatcccagccacttgggaggctgaggcagagaattgcttgcacccgggaggcggaggttgcagtgagctgagatggcgccactgcactccagcctgtgcgacagagcgcagagcgagactccgtctcaaaaaaaaaaaaggaaaagagaaagctggccgggcgcggtggctcacgcctgtaatcccagcactttgggaggctgaggcgggcttatcacgaagtcaggatatctagaccatcctggctaacatgtgaaacccactctactaagtaaatacaaaagacaattagccgggcgtggtggccggcgcctgtagtcccagctactcgggaggctgaggcaggagaatggcgtgaacccaagcggagcttgcagtgagccaagatagcaccactggactccagcctgggcgacagagtgagactccgtctcaaaaaaaaaaaaaaaaaaaattgaaaaaacttgggagatgttcctattgccaa

SEQ ID NO: 24381 - DNA, 1024 bp, Homo sapiens
tcagttctcagagagccagtcatggaggggacattgatttgagttttagacacataggaatcaatcatgtcttataccaatttggtaaatttcttaagacaacccagggaaatccagtcaattccacatgtgtcttttctgggcagagtcttcctcctggaacatgctccgctggtttcttttctgagcctcaggatcttgaggtcttggtggctggcagcgtgtcccagtgagggccctgggctcttggagggctctgggttgcatgtgccacacatagtgtgacttcagagtcactggggagagtgggtcccatcttgaagggcagtgagttgggcccttccaaggagctagagaggcctttaggccccagcaatactgaggggccacccaggtgacctggaggcccctctgcccgggcctccaaagcgaggacagtatggccacagccctggcctggctgcggaggcgggtgctgcgctggcccgcggctgctgggactgcaattgtttggattttcactgaccgtgctttgtttttgtttttttctcctcactcctgggctcgttctcattgctttctttctctctccgcttccccctcccgtgtctggtcctatctctccccttccccacccggccctcttgtcctctgctcttctgtctcttctgacatctctctgttccttttctcagctggaggttctgcactaccgactcagtgtctccagcgccctctacagccccgcccaacccagcctccaggccctccacgcctaccaagtactggctcattcgttcccttccccctgcccagagtgcatgtccatgcctggcaaagcaaggggccgccggggccggctgctggtgactcagaggctagttccaagcagagcgtagcccctgtgtcggggggaggcaggggtcagcctccagcctggcttggcccctggctttgtagactagtttggttgggggtgggggtggtggctttgtggcagaacgaggcatgtgggcatgtggcc

SEQ ID NO: 24382 - DNA, 1074 bp, Homo sapiens
tcagggctccccagacacctcagagacaccccagaatcctaagggcagcagtcgggtactctgccccggggaagtgggtgccagttcgtctcctgccttctaggtgagcagctattcctggagccagagctggtcatcccccaccgccagcaccgactcttcacggcccccacattcactgggagcttcctgtcaccctggccaccagcggtcactgatgcctccttcaaggtgaagagccacgtctacagcctggagggccaggactgcaagtacaccccaatgtttgggcccgaggcccgcaccctggtgagtggattggcggtgcctgtcctcagggcccctggagccatggggctgagcagaacccgggaagtgctgtgatctggcaggaaggagggaggctgggtgtagatttgacgccatatctccttcccccattttagtaaagtctaattttttcctgataacgaaggcagtgtttgttgggaaatttcaaatgtagaagatcatcctttagtctttaaaagtcctctggcagaagccactcctcctgacgctcagcagtctggctgtgcattgctcttggggctgcctgggtggcagcacaggcctatcctgctggtgacctgcccacgcctcccttgcaggtcctgcgcctcgctcagctcatcacagaggccaaacacacagccaagtccatctccgaccagtgtgcggagagcccggctggccactccttcctctcatggctgggctttagctccatggacaccagtggctcctacacagccaacgacctggacgagatggggcaagacagtgtccggaagacagatgaatacctggagaaggccctggagtacctgcgccagatattccgggtacgagctatggggcctgccccaccgccatcagggtccccttccctgaaggatccactccacccagcctgtggtcagccacctaccagtcccaggccccacacatatggacccagtgttgtgggaggcaggcccacaccccaagcgtcatatctgggtccccttgttgccactgttgtaggctggtggg

SEQ ID NO: 24383 - DNA, 1111 bp, Homo sapiens
ggtgcttctcagtgtaagatggagctcagagaagatgatgctcagagtaagattgagctcggtgattggcactccaaacattgctctgagcccattggagctctgagcaagaaggtgggaagtgagcaagaaggtgaagaagtgatacaatcccacagaacattacaagtttagtgggagccattattaaatgtaaagagaagaatgccccagaattctatgtggattgtcaggggacaatactcatttctgtaatcaggcatactttctttgaaaaagtttatcatatcaaacctcacaaggacaaccagaactctgtgatatccactctacaaacctcagatccctacagtgtagtaaaggtgatagccgagatagaaagacagaaacacactgtttgacgaccaatctttggaagttgagatggcaaatgtggatttactcagattattttcctgttagcacctccaggtgtaattttgacagtactttgcattgggctaatgacacaatggggaaacataaactgctgacactggacttcagcagtacagtaacagccatgtgcaaggccattgaaaaagtaaagactggtggttacattgccacatgtttttctgcatggcatcatcatcttaactatggactttatgtgctttcacagcaagatgtttctagtatttagaaatggaccttatgcatcgtatacttcataagagcttgaaaagctctcacccaggtattaccaaatgccagacatctctctatgtaggccattttctgccacagccagaattcattctgggtgacatgctgttcttggctgctaaggaagtgatatgggggagccaggtgtctctcgctgtctgtgagtctatgggaaaaaggagaacactgaaaggcactaagtttactgccacgtttagaggaacttgtgaaggcaacacaagagtgttgtagtcctatgtggccaacaccaacctgagtttttacaacagttattgcataatgatcacaatcacattcaagttcacattctaaatcttagattctacaaaaactctgtctgataatatcctatagaccttttggtagctaaaatcaatgagtt

SEQ ID NO: 24384 - DNA, 1045 bp, Homo sapiens
ttgacccagccatcccgttactgggtatatacccaaaggactataaatcatgctgctataaagacacatgcacacgtatttttattgctgcactattcacaatagcaaagacttggaaccaacccaaatgtccaacaatgatagcctggattaagaaaatgtggcacatatacaccatggaatactatgcagccataaaattgatgagttcatgtcctttgtagggacatggatgaagctagaaaccatcattctcagcaaactatcacaaggacaaaaaaccaaacaccacatgttctcactcataggtgggaattgaacaaagagaacacctggacacaggaaggggaacatcacaaattgggtctgttgtagggtggggggaggggggagggatagcattatgagacatacctaatgtaaatgacgagttaatggatgcagcacaccaacatggcacatgtatacatatgtaacaaaccagcacgttgtgcacatgtaccctggaacttaaagtgtaataaaaaaatatatatatatatatatataagtaaatggctgatcaggaaaaaaaatttaggaagtagaattcaacaacacatcaaaaagattatacatcatgactaagtgggaattatctctggcatgcaaggttggtttaacatatgtaaatcaatcaatgtgatatatcacattaacaaaatgaaagataaaaccacatggtcacctgaattgatgcagaaaaagcatttaacaaaatttagcaacctttcttgataaaacctcttaatagtttatgtatagaaggaaagttcctcaacataataaagaccatttatcagaaacccatggcctacatcatagtcagtggggaacaactaaaagcttttctactaagattgagtacaagatagggatgcccagtctcatcacttttattcaacatagtacttgcaagagcaatctgatgagaaaaaaaaagcaactaaattaaagaagtaaaattatctctgtttgcagatgacaagaattcattaattccttt

SEQ ID NO: 24385 - DNA, 1063 bp, Homo sapiens
atttgccataatgctgaagtcaaatgtgttgctgttaaatcagctttctttacccaattcacatttgtgcttaaaaaaaaaagcattacaagaccttgcatatttctgttcaacttatttttaacattcatttcattattgcaacatttattgtaagttgtatcagtttcatatttcttcatcttctatatatggagattatgccccagttacatctctttatctgtaagactagtaatatcaaaaaagaaaatgaatttcgtgtcttaaaatttatccttagtaaattctacattttctgttgattatcacttttaaaggccaaaccctctttttaggaatttttcctgaatcgcacccaggaatcacatgctgtagtttgctctgttttactagacttgaaatcaccctttcccatttatgtgaaaattagatttctgtttgtagggaaaagaaagagagatcagactgttactgtgtctatgtagaaagggaagacataggaaattccattgtgacctgtaccttgaacaattgcttcgctgagatgctgttaatttgtaactttgccccagccactttgccccagccactttgccccaacattcagctcacaaaaacatgtgttgtatggaatcaaggtttaagggatctaggactgtgcaggacgtgccttgttaacaaaatgtttacaagcagtatgcttggtaaaagtcatcgccattctcgagtctcgataaaccaggggcacagtgcactgtggaaagccacagggacctctgccctggaaagccgggtattgtccaaggtttctccccatgtgatagtctgaaatatggcctcatgggataagaaagacctgaccatcccccagcctgacacccgtgtagggtctgtgctgaggtggattagtaaaacaggaaagcttcttgcagttgagatagaggaaggccactgtctcctgcctgcccctgggaactgaatgtctcggtataaaacccgattgtacatttgctcagttctgagataggagaaaaaccgccctatggcgggaggcgagaca

SEQ ID NO: 24386 - DNA, 1050 bp, Homo sapiens
gtccttggtatgctgagtgctggtctcctgggcctactgttgtttctctatgctttgtctctgtgtcttatttcttttctcagtctctcatcccacctgatgagatatcccacaggtgtggaggggcaggccaccccttcagtgttcgctactttcagtgcttacaatgcctgtcatttatctgtagctcttatactttttataaaaaataattttataccaaaagccttgaaacttttttagagtagtagctttgaattgttgttattattttattctactgttatcggtaacctcccatgttaacactattgtttctttctgtttactttcagttggttggcagagaatttgaactggagatgaactttattatccaggatgctgagagtataacatgcatgacagagcttttagagcactgtgatgtaacatgtcaagcagaaatagggagcatgtttacagccattctatgaaaaagtgttcggaatgtacagactagcacagaagctggactaattgaacaagtattgctgaaaatgagtgctgtagatgacatgatagcaggtatggggttgtctgtcaggaaagtataacttaaatgtttataaagtttcacatacttctctttatattctataggtaatgtagatttgttgacactgctttgatttaaaataaatggaaatgtatagaaattttactttttatattaatggaaaacctgaaaagtgaaagaagaaaaacataattattatagtagacaaacataattactaacgttgttttctaaattttagaaaatctcagtaccacggagtgctatgaagtctatcagaaaaataaacagtatctttttatgtagtatttcattcagcttttacataattaaaatgccacaataggtattacagttctgtataatgagcatttcaccaaattcccctagttctgtgcccctcaatctggcatatatgcaactatgacaggaagtactaaaagccttagataagcatggtgtatcttttttttttccccacgtatattttt

SEQ ID NO: 24387 - DNA, 1026 bp, Homo sapiens
ggcattctttcaatagatacttattatttactgagtattggacaccattgtaggcactagggagttataaatctttgcctcttttttaaaaaagttaaatgttaaacccccagattaagcaatgcacagatacttttcttgtgggagattcacctaatcctggtagttctgaatcttgtttcctaagattggaggttttgttaatttctgatgctttagtaatgctggcttcaaggaatggaatgttgctgtactgttagttttggctcatgaaatgtgtctttacttaatatcccaaataatagcaaaaacaaggtcaaaacacattttaaaaactgctgtaaagagaaaatgcagagaaatgtgcaactgtataattagaattataagagataattcattcataatcaggtggcattttctagagagattttcctgcctgtgtaccggactccatctttgtgtcagagtaacaagccaactgaaagtcgagatgaaagaaaacaaggacagagtgcgtaggagttcccgtcacacacgtttaaggcttttttccccttccaggttcagggttctttcttgggtatatgacaatgagattgtcaatgctttttagggcacactgcctcctcctaacagaaatatcaccttaccctttgtgattaatggtacaatcataatagatatgatgaatccaaatgtggtgagggggaggtctttatatctttttcatatcttttttgttttcttgttgcttatgatctgatgtgtgtcttgtcatatacagaaaaaaaatattttgggtggtattttcaaaaatttgtttagattttgcatgattctaatgaaaatatttgttttatatttaatgtcagtaattgtagtttctattaaagaatatcaatttaacaataattcatcaatatatacttagaaaatagcttaaaaagcagtgacctgaataaatatattcattcattataatggtgtattctttcttttttaatgcaaattgattactttaat

SEQ ID NO: 24388 - DNA, 1022 bp, Homo sapiens
caagactatgcttctctgtgctctcactgtaccctggattttttacctctttcacagcacgatttgtgcagtcataatttattcatttaccatgagctccttaaagacgggcacaatgtcttcttgttcactgttgtttcttctttatctaacactgtacctagcccagtgaataactgttgaataggaaaaccgaattaaaagattggaaggcttgaagatggctgactacaggcatccagcactcaccttctccgcaaagaataaccaaaatagtgaatagataatcacaataatcacactttgaataaagcacttaagagagaacactggaattcaacagagaagggacaggaaacccctgaggcagggaaggagagggaagtaagtgaggtagttggctcagctgcaactggctgggagcggagagaggctcaccagtgcagggaaagggtaagagagaaatccccagtggtccccattcccactgcagaatcctgcaaccatacccacaggagaaccctctaccctcgtggccccagagactagcataggcagctgcctggagaccacatgatggcattgctccagacaggaaactcaccctggttcccatatacactgaagacctaagcagctatagcaaggtgccatatggagaggccagccctgaccagactgaatactgcctggggacccaatatcccctgcatctccacaccctggagccccagtgacagcccctgaatctacttggagggctttagcagtgtgacatcagttggacccagcaaagcagcagggtccccagcactctagcatacacagcgtcatgcaccccgggaatgggcagtgcagtgccctggagaggctgcctccaggacaaagagagccaaagtgaatgctccccagagcctgaaatccacctgcatatggctgctgccactgacaatgaccccatccccctcgagcagcagggccatcacacccttgcatgcaccctgaagacaggctttccctgc

SEQ ID NO: 24389 - DNA, 1033 bp, Homo sapiens
caacctaagccgagagggcttcatagatacccaggggcactgcagggagggccctcctctttctagctgaggtcaccgaggtgcagagaggtggagggactttctcaaagtctcaccagcaggcagcagtggcaaagctggacctcacatctcctctgtggtcccacaggaacaattggtaacagttgataacgggtgcctgcctgctttgtttatagcaatgatacaggaagagaattgatggccactgggcatctgttcctcactggagcccactgtgtgctcacacccagcttcaccttggaatgtggtagggagcaggttggtgtggcccagttccctcctaccatccccagctgggagaatctaagtgacgtatatcctttggaatgaggggttccctttctcatgtcaccttttaagtttgacatgataagaatccagtctgggctggattttacatttcactcttattaattctctgtgttttagggctcctggctcctctcagcattgatttcctttctttaggagcatggggtaggtgaggagtgacctggaagaggtatcaggaccattccttaacatttctgataatcggtgcctgtgaagacattcccgcagtgtctgcggagtcctagaaagagagcagaggccacacaaaatgcttttctgaacccaagatcgccatactttgtggaatcttcccattggacatagcagtgagcacccgtttcctttcctgccctcacctgttcctgattcggaatgcttctgccaaataaatagtcactggctacccaaggagtttaaagtctaagcctggtcaatgcacacccagaagagttaagttcagtgataaagggaaatgtagatgaacatactaattcagcccatgtgaccactttgggcctcagctgttaggttgagaagtaagaggggattgaatgcgctccaaagatccgttcagttcctaatgttgcttaattctatacatgtggcaaaaggcttgtaacataaattaaatgaaatt

SEQ ID NO: 24390 - DNA, 1044 bp, Homo sapiens
cgccccgccccacaccgccccacaccgccccacaccgccccacaccgccccacaccgccccacaccgccccacaccctggcggtgggctcccgagtggcctgagcctccccagtagccccagcctcccctacgggcaccaccccttgctctgctgcgccgggtcccattgactgcccaagggctgaggaatgcaggcgcggggcgtgggattggtgggcagctctgcctgcggccctggcacagatccactaggcgaagctagctgggcttctgagtcaagtgaggacttggagaacttttatgtctagctggaggattgtgtatgcaccaatcagcactctgtgtctggctccggggtttgtggatgcaccaatcagcactttgtatctagctgatctggtggggacttggagaacttttatgtctagctagagggttgtaaatgcaccaatcagcactctgtgtctagctaaaggtttgtaaatgcaccaatcaatgccctgtgtctagctaatctagtggggacttggagaacttttgtgtctagctaaaggattgtaaaaatgcaccaatcagcactctgtgtctaactcaaggtttgtaaacgcaccaagcagtgctctgtgtctagctaatctagtggggacttggagaacttttgtgtctagctaaaggattgtaaatgcaccaatcagcactctgtcaaaatggaccaatcagccctctgtaaaatgggccaatcagcaggatgtgggtggggccagataagggaataaaagcaggctgcctgagctggcactggcaaccccctggggtccccttccatagtgtggaagctttgttcttttgctctttgcaataaattttgctgctggtcactctttgggtccacactgcctttatgtgctgtaacactcactgggaaggtctgcagcttcactcctgaggccagcgagctcacaaacccaccagaaggaagagactccgaacatgtccgaacatcagaaggaacaaactccggtcacgctgcctttaagaaccgt

SEQ ID NO: 24391 - DNA, 1027 bp, Homo sapiens
attagagatgattaacaggtgtgttgaaataccagtattcatcaccactttgaaattacggtggttgttgcacctgttgctagatagtattatttaatgtgttaagatacaagctgcaggtattgccatttaccaattaaaaaaaaaattggggggccagacgcggtggctcatgcctgtaataccagcactttgggaggccgaggtgggcggaccacttgaggccaggagtttgagaccagcatggccaacatggcaaaatcctgtctcttaccaaaaataaaaaattagctgagcgtggtggcgggtgcctgtaatcccagctactagggtggctgaggcaggagaatcacttgaatcccagaggcaaaggttgcagtgagctgagattgcaccactgcactccagcctgggcaacagggtgagactctgtctcaaaatacatgaataaataaaataaataaataaatataaaaaatattttggtaacagtatttcaatatcattgatttcctctgcagtcctgtgtattttattttatgcattaaaaaagtctttctgagaaggagtccataggctgcccctagtttgccaaggggtacagtagaattgtggtgtgttctagaccctgcacacccactgctcccctttccctcctcttcatcaagagttgacctcctcctgacttgggctttctccaaggctgtcaggtgcgtttgtagagtgggtgtgggcttatctccaactttttatcttagacctggtcaaagaattgagctctattcttggctcactggtttatcatatccagggaggcaagtttgtcagaacgttcctctagcaaggccatatctgtcactacaaggtatgtgattcatttaaagccaaatgtcctaattatctgaatcctaaacagaagtctgatttcagcttcagtttcagtttttcaagtggagaaaacccacagacattctgcaggaaaatgccctaaatacacattaaccccctgttttcctcttggtatgct

SEQ ID NO: 24392 - DNA, 1012 bp, Homo sapiens
tggtccatcttctggtcagatggatgacagaattaattgtgcagctgctggacacggatagatcccattaccattttatagaccatatcacagtagaaagtggaaaatataggtcctgtcttcaacttgacaaccaaaaggtgaggacctcacacatgcagatgaatactttctctctgagaacagaccttttgggcatggtagctggtgtactgggaatactgggtcctcctgttaccgtgtcttgtgcacactgtctaatgtcatgcttgggataaccatgtatattagcttcccttattttcaccggacaaacgtgaaacttatgagggaaagtgaagtatgttgtctggggtgactcacataataagcaaggtggtcatataatttatcatccaaatcaggatgcttttgagagtgaagaggggtgctattgatgattatgctgggataacaggcataaaaggggatatatggtccccctactgataaggtacagattgggggttaaatgcaggtctctgatcttaaattgtgcctactttccattacatgctgttagatcaggccactctgtctgcaaatgaattggtaaggcacagatggaagaaccttctgaagatgagttctgctctaagaatacagccgaagagaaattctctaaggctaggcgaaaggtttttttggccagagaaatgtctactagagatcttctttcatgtaaaaacatggaaagggttttgttggaaagacagtttcttccttcataaaaatggttttccattgtttgtttaaaagaatgggtctgctttagcatttataagaaagacggagtaagagtcacagaatctcatatccagggcaaacatcttcatagcctgtggctgttaagatccagaatggtagatgaattctttaatagtaaggtgtgtagatacaaatttactactcttgtttttagcactctggccgtggctgctatcaatgaggcaattttgtgtatggtataatc

SEQ ID NO: 24393 - DNA, 1031 bp, Homo sapiens
gttgggatgagcaagtcctatgactgtgttcactgatggcatcctgtcctcctccttccacgtctatgcctggcagtccgtaagcttggatgggaaaaaaatagacgctgagttctaactgaaatttggcattttcttccattgtgaatatagggaacaaaccaaagtaatattagaaataccttgacctttgtcattaataaatccatatcgcactacagttgttgcagagatctctaaatattttttacactcatcactacttaaaaatggtggtacagaataaaaccatttttagatcttgttacttggtgtaacttaatgaagaagcactcataccgtatcacaatggaaaaatattgtgataactaaatctaatttgtttgccttgtaatctttggtgttttatttcatgcatttaaaaatgttattttgaggaaacatccacgggcttcatcagattgctgggggagtccagagcatgcaaaagttaagacacctgctctgtcgcctctggtctaaattttatcctgactgataatgcagtggtcctcaacccttgctgcccattggaatcacctgggggagttttaagaattctagcactctggccataccccagactaattaactgcagatctcaggattcccctggtgattgcccttggttccaggggattccagtgtgcagtgaaagttgagaaccattggtctaagtgttcatacaaactaaccttcttccctctcttcttcctttctgattctttaaataagaaattaagtttcatgcttatgatagaaaattcaaactgtgcaggagagcatggctctctcacctttccagaaaaaactattgctgacaagttttgtgcataaacaatcattgtagacatcacacatccatacattatccacgatgagattatactatacatgttatacacatggacacactgtatgcagtttttcacttctatcgtagagaactttctgagctagctgttgttccttgaaattaagttctctttctt

SEQ ID NO: 24394 - DNA, 1045 bp, Homo sapiens
acaccaagcaaggagatattattaataattgggaggccccctcccttgcttcttctgacaccagtgcctggagatttcctctcatcccctgtggtagatagaggaccacgcttgtgctgggtttgctccatcagccactctgcaggttgggcctctcagagattaagagaagagtggctacctccataatttgagcctttcagtgtatttaaaaagtgaaaaagtacatagggttagaaacaccatagacagttttaaatatttacattgaagacctggatgctttttaacacaaggaaacataatagaatacagttatgcttttcacaagataataataggagtcacaaaaatatggagacatagcacattataggtgtggcctggtaatgaatatatgttcaaagttatgtgacgaatgtcttctgctttcaatcccattgtttggatctctgtgaggctccaggactccattgggagagaggatcagaagtctgaatctgaggctgttgtgacttgggctggtgccaaatctgcaccccacccctgcatgttctgtacacttggattccccttgcctctaggccttctcagtcccaggtttggaaagattcaaggttggggcatgcctgcattttgcataattatgcagcccatagaggtgagtgagtgacatcccactcaccgccatgggacctcactcacgccctgtgggacccactcactgccatgggacctcactcacgccctatgggacccgcttaccgccatgggacctcactcacgccctatgggagccgcccactgccatgggacctcactcactcatgccctgtgggacccactcactgccatgggacctcactcacccatgccctgtgggacccactcaccgccatgggacctcactcacccatgccctgtgggacccactcaccgccatgggacctcactcacccatgccctgtgggacccactcaccgccatgggacctcactcactcacgccctatgggagccgcccactgccatgggacctcactcac

SEQ ID NO: 24395 - DNA, 1038 bp, Homo sapiens
tgtgggacccactcactgccatgggacctcactcacccatgccctgtgggacccactcaccgccatgggacctcactcactcatccactgtgggacccgcccaccaccttgggacctcactcactcatgccctatgggagcctcccactgccatgggacctcactcacgccctatgggacccgcttaccgccatgggacctcactcacgccctgtgggacccgcccaccgccatgggacctcactcacgccctgtgggacccgcccaccgccatgggacctcactcactcaagccctatgggacccgcccactgccatgagacctcactcactcatgccctatgggacctggttactgccgtgggacctcactcatgccctatgggacccgcccactgccatgggacctcactcactcatcccctctgggacccgcccaccgccatgggacctcactcactcatcccctctgggacccacccaccaccatgggacctcattcactcacaccctatgggacctgcccaccgccatgggaactcactcacaccctatgggacccgcttaccaccatgggacccgcttaccaccatgggacctcacgccctatgggacctgcttaccaccatgggacccgcttatcactcacgccctatgggacccgcccaccgccatgggacctcactcacgccctatgggacccgcccaccgccatgggacctcactcacgccctatgggacccgcccaccgccatgggacctcactcacgccctatgggacccgtccactgccatgggacctcactcactcatcccctgtgggacccactcactgccatgggacctcagtcactcacagctcttctttctgttgccaaatgttgcactgccaatcttccccaaaggaaataaaggaagtaaatgtaaaatcaatgtctttttaattttttacaaaataatgaactatctgttgaaaaaattgggaagccagagacttcactaatgaacgtggtaactatgtttgtctccaagttatgt

SEQ ID NO: 24396 - DNA, 1035 bp, Homo sapiens
tgcctgttcccgtctcccgctggctgccctgtcccacctgtgcctcccctgctacagcagcggctgctccatatgggcccccactgccatcactactactgtctccccaaatggatccccccaaagagcttttagagttttattcttaccccttctcttcccctttatctgcccttcactgtctgaatctgggctgtctcacatgataaccactaggcacatgtggctattgagctcttgaaatgctgcgaatctgaattgaggtagactataaatgtaaaatacacaccaaattctaaatatgaagaaaagaatgtaaactatttcatacatgtttcaatgttgattacatgttttacatggtgatattttgtgtatattacgttacataaaatacattttaaaaattaagtttacctgtttctatttatcttttatgtggctaccagaacatttaaaattacatctgtggcttgcattacatttcttctggagaacactggtctaaattcgtgtgtgtgtgtgtgtgtgtgtgtgtgtgtgtgtgtggtccctgtattcccaacatagtgtcctgtaaaaggccccaggattcatccatcccttcccttctcgcttcccttcctctttttttttcttcccttctctttgcttgcaatgtgtctgctaagtgaatctctggaggagagaatgttaaagcatttgaacggtgacaagattgctcagacagaaggtttctagtgctttataccagtccaaagagttaagacggttgtgttttctctgattacaagtgaacagcaaacatctgtcgaggagtttttacagggtatttgtactttcacatgatctaattttactatcttcataagtagtatgaggctgggcatggtggctaacgcctgcaatcccagtaccttgggaggcttttgggaggctgaggcaggtggattacttgaggccaggagtttgagaccagcctggccaacatggggaaaccctgtatctactaaaaattagttgagcatggtggca

SEQ ID NO: 24397 - DNA, 1035 bp, Homo sapiens
gttgggcctgggagcaacgggaaggaagtgaagtcatttttcagctttgtgttatcagaccattgcctagaagacatatttctggtgggagccttgttacctggtaactcattcaacttctgaatgctggcctcttgccctcatcttgtctcccctcctgcaggatctcccagggccctggactctggctggcaggaggcagaagcctgggccgctaggaagaggggagtaggagcctcaggattgtcttctgctctgacttcccttcagttttcaaaaaatcctggtgtggtctggaagaatagagtttatttttccttctagtaagggtgtgatcttggctgggggcttttcatggggttgtcatattttatctacttgtttgcatatcgagttcaatctggatttttctctcagcacttccggctctccttttgttagaatagtttcatagatttatttttttttaaatgagtaatagtaccagtgtatttttctttctagaaggaccttgctaaacatgtgtaaaataggagtagatatgaatatttggagattggtgaagtgataagaatgagaatacacatgtttggccgggcgcagtggctcatgactgtaatccctgcactttgggaggctgaggcgggcagatcacatgaggttaggagtttgagaccagcctggccaacatggtgaaaccctggctgtcctttaaaaaaaaaattagctggtcatggtggtgcacgcctgtaactccaactgcttgggaggctgaggcaggagaattacttgaatccaggaagtggaggttgcagtgagtcgagatcacgccactgcagtgcagcctgggtgacagagcaggactccatgtcaaaaaaaaacaaaaacaaaatacacctgctctccttaaagaaatggttctccttgcagctcaccatgtaattttcttgtactcatggtgttaggaccttttgctgaagactggcgggttgtcagctgaaactctgggcctgatttagggacttcccttaaaga

SEQ ID NO: 24398 - DNA, 1052 bp, Homo sapiens
gcaaaacaaaacaacaacaacaaaaaaacaaaacaaacgtgagtatggccacatttagcctgacagtcccttaattctgtggtaaggaggctgtgtcctccagcacggtgttggtagggtataagatgaaaagatgctgccctgagataactctccaccagggctgtgtggtagaactttctgtggtgatggaagtgttctgtatctgtgctatccagtatggtagccattagtcaactggcttttgagcacttaaaatatggctagagcatctgaggaatgaaatcttaaaattttctttaggttgaaataaccacacgtcataagtggcttccttggtgggcatcgctgctctagctgatggccagagatgactgattgctctatttagccacagagctaggatgtaagtcctagtggggctggctcatttgtgagtggagatttaagacatggatactctaatgcacattagaaaatttaatatattgcatgggattgtgaggttgtttcatgttggaattcaaagaagactttggtgagttggagctggaagtgggaagggaagttttttttagaggaagatggcatgctcatagcattcaggtcttctaaaaaaattatccagggccgggcgcggtggctcatgcctgtaatctcagcactttgggaagctgaggcaggtggatcatgaggtcaggagatcgacaccatcctggctaacagggtgaaaccccatctctcctaaaaatacaaaaaattagccagtcatggtggcgggcgcctgtagtcccagctactcgggaggctgaggcaggagaatggcgtgaacccgggaggcggagcttgcagtgagctgagatggtgccactgcactccagcctgggcgacagagcgaaactctgtctcaaaaaaaaaaaattctagggagccagcaatgttctgtaactcatgttctagggaagcagtgtgatatggaagactccaggcttgggagcctggcagatgtgtgttaagatggggatcaactatgcaagatagttagctttctg

SEQ ID NO: 24399 - DNA, 1030 bp, Homo sapiens
gagtttgggagagattctaggcaggaaacttttaggctgtaaaaacatctaaaactaaaacttctaaaaattgcttctagagccagtgtttcatagggcatgaatcaggaaaactagactaggcatttctaacagattctaatacagataattgcatatttaggtgatgaaagaggagagttaccagactgttacagcaacctagagatttgtaacctcaggaagatgtccacccccaggactgtggaggcagggtggtgggggtggcagctgatggaaagggcattgggtcctttggagagagctgtctccctagagaaggttatcccacccagcaaatggagttgggagagagacccaggcaccttcccctcccagcttctgatggtacctcccacaggccagcactactagaaaccaggtggcaagggagcttgggaaatgtagtttcctgtgatatttgtaaaaggacaaagtatgcagagaatggatttgagagcaaaaaggcagatggctgtggcacaaggattataacgttggtgcaaaggaagataagtcgaggagtaagagattgctctagggaaagaacttgaattcttgattcccttcccccgtgccacattcctttgtggctttgttaacacctgtgtcctctcttcatgtttctgtcatgctctttacactgcatgatatttacatatttgactccctgttaataactaacatttactgaatgtttcctgtgtgctttatctgcattaattcattgactcatcaaagccatctgtgaaggcaggtatagtccatcttcattattctcagatttctgtatttgtgaatttgtgtcctcattaatacttatttgtaaccctgaaatcaatactctgcactttcctggtcattcatggacatacagagtagaagatttgagttgcctggtgtccatgttcccagctgcggatgaacaaggccttcttgcttcagctcttatattgcaaataagtgttcttcttctacctggttagtaccg

SEQ ID NO: 24400 - DNA, 1104 bp, Homo sapiens
ctcggcctcccaaagtgctgggattacaggcgtgagccaccgcacctggccataagattaatttttaaccaatttcttggttttgattctaactgttgatatttgaaatattcccaaatgtggcaattaaacaaactgggcaattttcagtggtagagtcacaaaaattccttgttccatgcatgggttcactaatcataatattgttcttcaaggtagtaaaattaatacggttgctttcataatgaagaaaacaacataattacgtcactcgttgggctttagaactttatttggaaggaagataatatagaaattagatttgtgttcatgtatggattgacgcaatcaagttcatttgaagctagagtaacttacaagcttaagatgtgaccagtgagctgggtacactgtatagaaacttatcattggatttgagttggaaacaatagcattgcagtgcaatcttactacatcagtatattatattctgaataccattttctgagtagtagtagtcttgtctatagaaactgaatggatagcctgtttaatagttgaagtttgggccaggaggagctgaaattgcccttcatgccatggggaaatggagcactcagtttgaaggccctttgtaatgtggaactgttaaattcactttaaactattatttttaaaaaataggctgtctgcagccatcatccatggtgaggatttgtattctccttcttggatctgtcacgggctggctcgctcatgttgagcaaggcggccaagtttggagcttgatgtggcttccattgaggtgttacgtgggcagcaggccatgcgggacatgaaaaacgtttgccatgcagtttctgttggtcccagccgagacgaaaatgaacagttctagcaaaattgctaagtcagggatgtttgtctctgtaaagttgcttttttagctcacttaattttttttgtctgtgaaagcctttctcttttttaattctccccttcagtggtttctagccatcgtctctaattaaaataaagaatcttagctttattttttgaaacttatttgtacccactttctaaatctgcctttattttttgcat

SEQ ID NO: 24401 - DNA, 1054 bp, Homo sapiens
ctggtgtgcgtgagcctgtgttttaggaagaacttggaaaaacttcttaatggctgggtaatcttattttccgtagtggattttatttgtgacaattgtattaagaaatggactttattctgtgtgctgtgctggagaatgtactggaagaccagaggggtctaggctttgcagtgcctataactggcttgtgatctccagcaagtcacttaatatatctgagtgtctagaacaaatggtctagaaaaccccattccaaaaattccagggtaaaaagtcaggatgatcctcatgaaactaaaagcaactttttccccaacatattattcaaggtgtagttccctggaggctcctctgtagcactctggacatggtgctcttcggaagttgaatttgctcattgcctctgttgtttcttaaccattagttagacatttagtctctatgccaagctgtaaacaagttagcagaagtggaaatttttgtggagcatagaattaattggtttggatatgcctgtgcttgggaatttacctattgttggtgtttgaaagtatatttttcccctttctttgaaacgattttaggccgttgcttctggtactcaagtaccagtatggagggtctgaatgtgtggtatatggccttttctttcagatcttaaggcttaaaaaaaaaaaaaactatggatccaagggagctttttaaaacactctttaaaatacgtgttttgttttctatttaatgtaggattcattttcaaagcaaagtgatcatttaaaaatatgacagcccagatttgttaatgagctagcaaatggttgctgttaagtgcaaaattgttttcccataaggttcaactcctaatgatagtcgatgcttgtaagtgacatggatctttagctccgcttttatagtttagagcaagcttgtccagactgcgggccacctgtggcccaggacggctttgaatgcggcccaacacaaatttgtaaagtttcttaaaaaatggaatttttttttagctcatcaggtttccttactgttagtgtat

SEQ ID NO: 24402 - DNA, 1043 bp, Homo sapiens
tgggatttgagattaaagagagatttcttgaacctcctggtataacttgctatcctttggagtcaaagacgatgatgtcggccatcttgttaggctaaggaggaaaaggaaagtatgaaggatttgcttcttgatcagtagttcttagtcatgttccatgtaggacggaaaatctttgtattaaggaacatgttcagctgctgtaacagaaacctcaaacaatactgatttaaacaagacagtttagtttccttttactttaaagtcagctagaatggcatttctgcctgctaaagttatagggggctgggctccttccttctggttgccctgccacccccagtgttgctctcctttgtatgccctgaaataaaggagaaaaaaagggtaggaggaagggcaaggaggaatgataacccagaggttgggtagatttttttctactcctgttccacttggcaaaatataatcactctgccactcagctgcaagagataattatactctgtagtgagatactctgcaaaattcctgctcctatggaagaaagggagaatagctttgggggagcaataaggatccagtatatcccatttgggccttgtcatctgtaccagaagctactggtaactagaaatgaatttttaagcctgtatagccaagaagggtagcaatagtccttcttcttctggttcttcatattgaaaaatgaaactgattttataagctgtgtctgcctctgctagctcagtgagcctgttcaccagccctcagttgccctccctgaactttgccatcataggcaacccatgtgcactgtggaaggtgcactttccttgctgtcaagctctgtgtagctctgaagatcaccagcattctgatccagtgttcttcagactagcaagcagcttcagaattaccaagcaaggagcaggaagttggctgggagatgccttttacccttgagtctagctgggtgtgtgaggcttggctgttttggcccatctggtctccatccaaggtggctgagttaagatcttttg

SEQ ID NO: 24403 - DNA, 1038 bp, Homo sapiens
ttccaaaagttttcacatttgtcacactgtcctaaccctatcagctttgttgctatcattgtagtgaggcctgcctagggatgataagtgaaggatccccaaggacacattaagacagcacatagaatcagagttttcagactcttggccgaactttttttttttttaagcagaccagtattttccaaactttggacttagtttccaccatattcacgttaccacctatacttgttacttaacatattttcttcagtttatcctgcatcaactcatttattttaatttggtctcattctaattgacagcatatagcagcttatgaatttgatgtgcgtatgcatgttgcaacaaatacttaactattagtatgtatgctacggtgtaaatgtaccacactcagaaaaaaccttattagaccatcctgactgtttaggaagcttggtgcccaagggaaatagtctttgaccatcagccagaatttggttagtttcagcagataagagagtagctggtaagctacttaggaacattttaagtagaatatgtgagaaatgaggataggatatgcctttattcccagcaggcaaaaacatgcatttatttactatagttgttataatataaataacatagatgcatatgtataccagaaacatggtctttatcccatttgtggataaaagctaaggaagaacttgtattacttatgtatgaaatgcccaagggaacagagcctagacaagttctgaaacttaatatctagggaatgtaaacatttaataaaacattaccttacccacctatgtggcctttcttggctggacttctaaaaaattttgtttttataccatattctttgttttaggaaagcattatcttactcccagcctctggggaaaataaataaccgagagaatcaataaggagatgccccagtgttgtggtcagtgtctgtttttccccagtgttctgggagcagggtttcctggtgttctgttacatcagcatgaaggaggccttgtgcatgggaagacc

SEQ ID NO: 24404 - DNA, 1044 bp, Homo sapiens
aggcaccgcatcaggctctgtcctctgtgacaagagctctgctaactcaaggaatgtggtgtccactgcaaggaacaaaggtggttatgggttcccactggtgctcctagatcctttgttctcaagggtgggccaaaaactggcagtttcagcaacacctgggagcttgttagaaatgcagtctccttaggcctgctgattcagaatctggatgaccagatcctcacacgagtcacacaagagtgatgttcaaggagcagttataggctcagcctgtttcatgggcagcagtggtggccacatcttagagggattgtgttgtgggcatggtcttgccgtgttttagtttaagttctgattttctatcatttttttgataaattctaatacaaagtgatctagttatatatccatatgtcagtatgtgatttggttttttacctttctgtgggtattcacgttcaagtgtatagatcaggaaaagaattctttattatcttccatgaggtctcaggatgggaagataacagtgcctgttgtatacagtcattataggacatgctggagatagaagcagtaagacactgcttctacatttgataagtctggtccagggagataaatatgtaaagggaaaactttatctcaataaactacatctcgtgatagcataagggaccagagagaatagcctgtagttctttatcccactgctggggtgtcactaacagtgtactaggatagatggacaactttatatgataaagacagttttagagctttacgagacttttgacctcttctgggagctgtcctgattcctcttcaaaccgaatgatagcaccttttgtgtgttaagtagcctaaacagtcatttgtttagttaccacctgctggtgtgtagccttaggagaagagtgtttactgttgagtggttgttctgctctgccccttggctaaggattcctgctttccattaaatggaatgactaccctctctttttgtctttgaactcaaatggaagtcatgttatctttacatct

SEQ ID NO: 24405 - DNA, 1087 bp, Homo sapiens
agagtgtgtcctctctggtgaccttcttttatgatgtgtggtggccagcagcttcctctggcacccccttggggtgtcttgtagcggagtgttgccagtgtgctacctccctgtgatcagctttcctgcaccatagagggcaccacagtgacttttctgccatctagtgagttgtagttgtgtcttctccaacaaagtcagggtctcagtcccccacctggttattttcatggatgtttcatcttcttcatgggtgttttctcagtctgagggatagtggttactccttatatctggcctttctgtatgatctagagttccttgcattacttcttactagtcaacatcttgttagcagaatcccaggttgtagttaataattgtttatgttaagcttttcctgttcaaattagtatgttttccatctgctcattgaaccctaactgatagaacaaaccttacaaaaaaaatatcaggaaaaattgtggaagactcagaaatgggcaaaacagattaaaatctaatgcaaccttctaggttatctgtgtctttcattttctttggactgatttacattttggcaagttataggaaagtgatagtaatggaaatggttcttgttcatagaatggcacatgaattttgcccagtagaggtattattgatccctcccaaaaagcattttatatattaacagatcggcattcctgattgcctacacacatgtgtgtttcgttttctttggacctgttttaacatctttctggttcctgtattaattaatcagctaaataagatctttgccgtgtttattttatatttgtaaaagtcatagttttatgttttaaaatattctataactgataaggagcttacaggatatgcccatatatgttaaaaatgccacagaaaatggagatatgatttgttagaaagatgatttaaatgcattttaatgctttataactggacagacatggatgaaatcatcttatgaactaaaaagaaaaagtatcactattatgtatcgaaaacagaacattcataacatacccacagaatgggagaaaatatttgcaaataatat

SEQ ID NO: 24406 - DNA, 1051 bp, Homo sapiens
tggatggattgtgtatcccttaagtcatcattcagatacaatttctttcaaccaaactttgaaagactttcaggggctatgaagtcactgaagtaccctggaaaatatcggaattagaatcatttccagaaacttttaactattggttgaaatactcttatgcagaatgaagggacctaatgagcatgcttatctcagttgaaggctatttcactttgaagtcaactgggaaagtacttgtgattgcaaagcacttgttctaaagagagcactttggattataaaacaacaaaaactcaaacccccatgatgttgaactttgagcagtgcaaggtgtgtgttgggtagctgcataaggcgctttgctgtgtggaattactgctttatcagagttagatgtttggaaaacatgtatccaaactgtgtcttcatttttaacctgatggatcaaaatgtttgctttttgtcagcaactagaaagtaggaccagttgtcctataaggactcctagttcacagtgattaaactatgccatttatgtatataatgctcatctcagctggatatgtgtcagtaggatgtacatccagcttattcaaaagtaatataagttctgtacgtgttatgaaaaggagaattgtgccatgttctctgttatcctccactggaaattaggatctgatctgcccctgctcttactatcctagataaggtaaaaagcagtgcttctcatgtgaaaacaagtaaccttgcagtctggttataaacaccaattgattctattgttttgggattgggcctaagattctgcatttttaacaacctgccagatcatttcagtgctacctttccacagatgagagttcgagtagcaatgttatagaggtgctagttgctaaaagcattgtagacatcgaggcttttgggctagcctcaaatcatttctcatctttggagccaaatgcccaggagaggttaataaaagctgtattagttcagcattattctctacaagtccttccatagtgtgggatgatctaacaaggctctg

SEQ ID NO: 24407 - DNA, 1052 bp, Homo sapiens
ccttggccttgaaatggccctagaagctcccagatatggtcttgtcatggactgaatgtcctttgccactgccttcataagcagtgaattgcacacagagaggcatctttaggaaattaaagcaatgccattttgggggttctgagctggtgtatgcagacacactttcccctggagtcagtgggttagtatagttagggctctattggttgtgtttgcagctagctccttctccctgaacacatttcaggaaccatgtgatctcatgtgggagtgagttcagggaatgctgaaaaatattctcatctttccctaaacaaaacttaattaaggctggtgggggtgaggtgaagaggatggggaggaatgttctatggaagccagtaaacttagagccaattgtgttcctccctccagccaataaatatgacactggcacttgcatgctggtgagttttaacctttggcttcttgaggttatgttgctcttcttcttgcccttgtctctaactgccctcactttgaaaggaatctttgtgtacttgttgctttttctttaaagaatttttttcagaattctttttgaaatcagaaagagtaaaaaaatacacatatgggatgtaacttatttttcttttatgtttaatatagaaaaagttggaagctgtagacaagcaaaaaaagaaaaaaattacacataagtctactactccaggcaataaccacaattaacatttcagtgtgtatttttctgatactttgcatacacacacaaatatatatatacatatatatacatatatacatatatatacacatatatacacatatatatatacacacacatatatatatacatacacatacacacacaaatacttggaaaaaaattgcaaatggaatttagatcatgctgtgttttgcagagcagacttggtctgtagaagatgacctgttgttgagtgacaagagtctgatcattgaattgaggtttcagtggtctcactgaagtggtctccctgatagtatagatgagatgcaagaatggggtt

SEQ ID NO: 24408 - DNA, 1116 bp, Homo sapiens
aaaaaaattcaggccacctccactacctgagaggttgctttgaatgaatagttcttgcagaaaagaaacagggacccagaatttctaattctgttggactaattactgacccttcaaggaatacatggcttgtttcatttcgaaaagtgagactatatatatccctgtcgggaataatgttcctccccagccacttgatgggggaactcagtaacatacactgcagggctgtcctggggaccttgaaagtgcgtctactcagggttgttctttgtattggtgataggacatgctgaaattagacttgtttgttttaatcagaaggtgacagatcccacttgcttaatttggcttaatgaggtatgtgtatacagttgtgatatcagcttacatatggtattgattcaatagacattccacagctacagcatagcatatgcttcctcagatagtcccttgtctgtgctgtttcatcctttacctgttttcactgacaagtatttcaacaaactcactgtagagcctgagatcttaaaatttaaaaaaatacttggaataaagctgatttggtgagacatggaagagaggtatctgactccatgtttttgaaaaggttttgtaggtttgaagatttctggggttttgagagattttcctttaagctgtgcttttggctttgcatatccacagcttctaaaattaggcagcctaaataaaaatcagttgctagtttttgtttttcctttctcgcttacatcccagaaaaaggagagaaagcaatgcggggtgaagatggtttgaaattctttgggtttagaaatgacagaaagagggattcaattaggggtgtgactgaactgccctacagttcaggacagcagaaataatcttcatctcacagcctccttcttctgtacttcttttacccttgaacattcagcaagtctcacgtgtgggatcacaaaccccaaatctgcttatgtcaagcagagggcccatggcgtggacagagtcacccgaggacgacatgtctgggattgacagagcattataaactgcattttgatttgcattgtcagagttggacagctgcactcttagctggttttaagctgt

SEQ ID NO: 24409 - DNA, 1026 bp, Homo sapiens
ctacaatttttatttgggaggtggaaattagaggtaaaattctttggaagggaagaggatttcatctaggagtgtttggcagcctcatgcaaacatgtttgttcttatttgaattttgactcttgaaatactgtgatcttggcggtttaggccaagaggtggggtaaagaggaggatgggaaacagactaaactcatggaatttcatgtagctgggtaggccaagtcgactctagtttagttaccatgttttctttgtggctgtgtcagagaattggggatggacacatggaatttaaaaaataacacacaattttaaaagttattaccaccatataaaactagctggacctgggagtcagtttctggaatttatgggcattaaagaaatgccgaatattaaattacttggtttggtatcgagggagtggctgcctggctcttaacagtttttgtgaatttcctgttctttttatccttggcttcaagtttttattgatggaaggttaaatattctttttttttcctttgtagcatatgactaaacctatggttcttttgcttcctctttttttccccttgtcttgtttttccctttcaccccaggaattaattatagtacttgaaagaaaaccactttccttagtcttataaagtacataagagacagtaaaaaatagaaaatctttttatacaactgaccttgtttctgcagacattgtaatctattccacttaacctctctttcttctgttattttactttgttaagatagacttgacatttgattaggaaaaaaaatatgcattcaaatgttatgagatatagaatccaaaaaagggaagattgcagaaatttaaaataaatgtaaaagattacaaggtaatacaatgaataagttcatactatgaaatgacacaactttgatgacatggaaaaattcctagacacaatctgtactgactcaaaatcatctgaaggtggggtggagtggctcatacctgtaattctagcactttgggaggca

SEQ ID NO: 24410 - DNA, 1026 bp, Homo sapiens
ggatatgctatagagtgtctgggttcggtaaacttcctctgaagagtactgattttttttctagtaggcagttaaattactgacttactgccttgaacttaagaagacttgcttttatgatttgttagggtgtgtctgtttccatttttttccctagtcttggaccatctgaagtcctgggcctgatgtgaggcccttctggggtttcatggaaagcctgaaatgttgaccctttgactttttggggtttaaactgtggctgccctgcagtgagcagcagctgaagtcttgtgaatactttgaacttttattggagcctccctcacaaatgcttagttttagggtcgctcaagaagtttaaggtagtttatatacagactttggggttctcctctttgggctccctctttttgggaatatgctaccttaatttttcactactatgcaaaacttcattctatgaaacctcaagccagtgagactgtagccttttgtttgctaccttccagacttgatagtcccctctggggcacagccatataaatgtgagtcttattcagtgtagtttccagaaagaatttaaggatcaaatcccttctagtttctgctcactttccctcactctttagtgtcatattgtaagtgttatctgtgggaagattgttccaatacaagcttctctgctattgccaatgcatagtttctctgctttgtttttaaagaatcctaggttaactgttatgtggatcttacacaggtagtgtagtttagcagcgtgctctgggctgggaagctgtctgaattatctgttaccacagtgctgccttccccctggttttggtatgcatgctagctcttttctgttaggtacaatatacaataaccaccatttctaggttggcaaggaccgtatgtatttaacagttgctctcctatccggatgccatggctggagggtaagcaagggactgcactttattctggatactgggatggtgaatgggttttcaggtagtaatcccacca

SEQ ID NO: 24411 - DNA, 1025 bp, Homo sapiens
atatataaacaagtattttcaaagatcccagtatacacctctgggggtccatgagtgagtcttgcctgtttcccatgtcttgacttctcaattgctttgttggggagggaacttcctattgctgtggggccctggttctggaattcatgtacatgacttagttacagaaatcaaattactttttttatggtgcaaaagtaaagcattcctaaatgaatatttgccaagctgagtgactggtgaggtcattttcaatgggagactatattccatcatggctggcttcagtctgatttattgccatccactcctgaagccaagccagctgatggaggtgctggcaagagctgtgtctccaagcccattgtggagattgagtcggttcccagccatggctgagcagccaggccagtggcacgctcatttggctgcactttgcaggggccatctgataagcatggccacatgttcatatcaggtgtgccaagagaaatgctaccttgtctgacacaaaatagaattgctggagaactttatcttttgagagaaaatatctttagagtgtcattgccctgaatggagcccttgctcgtgaagttgataatcttagggtcggcaaaacaactgggtaaggagattgaatcagtttcctgtaacttcctggggtcaacagatactcatgttctttgaggtttctgagagtttttataaacctactttttcttctatttttttctttcctttttttaacctttaaaatggcaatggcgatggatttagatgcccttaatctatcagatgcctgtccagaactagataaaaagttaatggacctgtgttctacaggttgttaaaaacaagtgtcatctcaaacaacacctgtcatctttgctatatagaattagtgtatggaaaagtgagccttaataaaggctcacttcctaatatggtcagccattgctctgaaagaactgtcttctgtgtgagctcgcatgcaaactcctgtctctctctctctcttgcat

SEQ ID NO: 24412 - DNA, 1024 bp, Homo sapiens
tcgttcacctgggactcctgaccaaggaatctggatttaagattgcagagacagctttcagtggtggccctcttggtgaattagttcaatggagtgatttaattacatctctgtacttactgggccatgacattaggatttcagcttcactggctgagctcaaggagtaaggagattacttttcaattttaaaatcagaatacaaaaaagaaattgtaaactcttaaagtattacctctattagtgtataattttttgtcgaggaaaatgaaagtgataattcactaaacaggagataagaagattattttcaggagctaaatacatacactgtgaaaaggataatatgttttcattgtcgctgaaggctccagaggcttcataaatgaatgccagaaaattcaaactaaggagcttattctttgctattacaggtgcttccaacatctggagcacaaaacattattgactttcctaattccctgtctcttgctgaaattcataccactgcctactcaacatcaatcttgctaaatcttgaaacagggcaggttcctgtttgtaattcaatttggatagaataaatttcctgaaagccctgagctgatcctttttcaattagccaactttcagctgagtctgttaactctacttgggtttttcatttcactgaaatttgcttctagctccagccctcctgtaatcccttctatattggcatagctggctgagcagggacgcttccatcccctgcagtcacttaggattactgcccatggagacttcccacccaacagtcaagttgccatgttgctatatgtcgtatatttccagaaggaataccttgaatgaacattctagagctcattgagatgagagacatgttaaaacaatatatggtggctcccagcacttcgggaggccaaggtaggtagatcacttgaggccaggggttcaagaacaacctggccaacatggtgagaccctgtctgtactaaaaatacaagaattaaccgggtgtggt

SEQ ID NO: 24413 - DNA, 1057 bp, Homo sapiens
cccagggtcctcaaaaccctgtcgcttactacgcggctttttgctcatttctctctacttccttgctgtttcttgagtagaataggcacactccccctcaggacctttgcattggttgtcccatctcctggaacattcttcttttagacttccccatctcctccttcaggtttttaattcaaatatcatttcagtgagactgactgtgacctcctcttttaaaatgcaactccttccttccccaactttctcctccccttccctgctttattttcctccatgactttattgctacccagtatttatgtttcacttatttttattttctttttccttccctggaatctgagacatataatggcaggaattttagctgctttgtttattgctggaactctaacatcctgaagagtggctggcacatagtaggcattcagaaagtcttttattgatagaattaaactagaatgaacaatattgcctattatgtttttaatccatgcaacaatgtagggaaggagactgttgtacaaatttaagattgtagaaacttctttaggccagtggcctcatcttactttcttgtgtcttcccagggaacttactcacatttttgggctttcaagtggcattcagaccataatgattgtcagtatcattgatattccaaccctgaatttctcccaggatttggggctcacagccatttttatttgcatgatcaaattgaatgatggcttgcagatcaaaaattttgcctggcaaaacaggaattttagaaccaagtcaattcccattcatgcagataataagcctgttggctgtagcaaaggatcagttaacttccatgtacaattttatttttaggacatgataaccaaaggagttatttgtgattgaaacttccattttggcctttaacttgaatcaggagggctcttgcctttaagttctgtgcagaccactgaggattaggatcagcctcgtggttccttcagtctgagtctcagctttcaggagtgttactcttctaaggagtccattccctcttaaattg

SEQ ID NO: 24414 - DNA, 1023 bp, Homo sapiens
tcggatataggctaacctcacctacaaatacagaccaaatacaggtcactgtcacggatccttcagttgctcattgttgccttacagcagtgaccatgcattcattcaacagatgtttgctaatttcctatatgtgccacactgtgctcatcactagaatgtaaagatgacccaacagcatggactctgccctgtggaaattacctgctagcaagtgataacttccatcttttgttgaatgcccactatgtgctagtcactaaactaagcaccttttttctcccagataatctttgcagcttaaaagaggtgagtttttcttatcacccttttacatatgaggaacctgagacttagagatggcaagtcatttgctcagagtcccacacctagtaaggatcagcttgagatcacgacttgcaagtccatagtcaaccctcatgaggccgactcctggtgttagcacccgtgtattgagtgagtcggaggactgaggaggtgctacatgttctctgtccttctccttcatggtatcatgctctgtttccacagattgagccatacatgccatatgaatttacgtgcgaggggatgctacagagaatcaatgctttcattgaaaaacaggtaaggcttatcagaagtcagtctgtctttgctgtgtactgcttcctgtgacgccatagggctctcaagaacatttaagagctcactgtgtttctgtggctattttcctgctttgggagactctagaagctggataatagtagcactgtcatggtcacccaagagaaccagtattcccttggagtaggtatgttcttgatgacagtgtaaggtgaaatggaaacttataacaagagagatgggatgattactgtgaagatgcccctgaccatcagggtctgtgccctgagtgggttctgaggcccattctcaccttaagaaaggcaagaattgaaaccagctttttctaagcattattttaataatacatgttcagcaattctaaatgttaggact

SEQ ID NO: 24415 - DNA, 1045 bp, Homo sapiens
aagagcacacccttttctaagtatttttgttggtcatggtctgttctcatagcacatctccaatttatttgatcttttccatcttctcttacttccattgcctctttcttgagctctagcaatcagaactccatgtataatatgcaagatttaaagctattgtagggcctggcatggtagctaatgcctgtaatcccggcactttgggatgctgaagtgggcggatcccttgaggtcaggagttcaagaccagcctggccaatatgatgaaaccccatctctactaaaaatataaaaattagctgggtgtggtggcacgtgcctgtaatcccagctactggggaggctgaggcaggagaatcacttgaacctgagaggtggaggttgcagtgagccgagatcacatcactgcactccaacctgggcaacagaacgagactctatctcaaaaaacaataataataataataaaaataaataaattttgctttttctcctgttcatttcaattcattgttatactctggtcatgttttacagaagtcaaatcagcatatgtttcattgtgaagtctaagcaggtgtttatagcttacttctctttctgccttttagtttaataaagcaataattaatccaacaataatcttatgcccaagatccattagcattacttggaaatactgcagtgctgtccagtagaactttctgcatagcgcaagttttgtgtatctgtgctcttcaatgtagtaggtactaacctgtaaatttgagacgattagcctagatgatttttaaattccttttaaactataaattacctggttgaaattttattaagatctcactatgccaggcactttatatttgtcttgttttctcaggtaaagtattctcctaaggaagcagacgcagttaccaagtgacttgtccgaaattaaaactattacgtggctgggatttgaacccaagtcctttgcttaatcccaaactgtagttctcactttttcctgttctagtatatttcagaagtagagcacagtagc

SEQ ID NO: 24416 - DNA, 1034 bp, Homo sapiens
tcacctgagctcaagagttcgagaccagcctggccaacatggtgaaaccctgtctttactaaaaatacaaaaattagccagtgtggtggtgcatgcctgtaatcccaccttctcagggaggctgaggcaggagaatcgcttgaacctgggaggtggagctttcagtgagccgagatcacaccactgcactccagcctgggcaacaggagcgaaactccacctcaaaaaaaaaacagaaaagaaaagaaaatagagggttttttgaaatgtatttgttcttaaatgaccagagttttatcttttctgcagataatatcgtctactgcattatttttggctgcaaaagtggaagaacaggctcgaaaacttgaacatgttatcaaagtagcacatgcttgtcttcatcctctagagccactgctggatactaaatgtgatgtatgtaaatactgggttttttatttttctttgtaaatttgaaactttttcataatgtaggcctaacaaaaatacacagttcaattagtggtgccttccaaatgctgcttgttttattacctcttaggaatgcaatgccaggaagcagtctggcagaaaaacatataatgtatgttcatgaatttggatgtcattctgaattatagaaggctttgattccaggtgctttgttgattcaaagatacttttgtttcatattttgttgttcagagttatgatatatgtagagggtaagtcctatcacctccgctggaagctgtatttgagaccagaatataaataactccttaaattgtcaacagatgaaggaacagaaaatcttctgaatttacccctagatgagtagtctttttaaagtattgttccttttttaatgcatgtactactgcttatctctctgatacataaagctgcattttattttgctttcatgagcagcatttttttagtattttaattttcctagagtaatgttcctttccagacaactttatcatcaacattgtaatagaccttatttgaaagaactgttttaa

SEQ ID NO: 24417 - DNA, 1064 bp, Homo sapiens
tattttatttatttatttatttatttatttttaagacggagtctcgctctgtcgcccaggctggagtgcagtggtgccatctcggctcactgcaacctctgcctcctgggttcaagcaattctcctgcctcagcctcccgagtagctgggactacaggtgcatactgccacacctggttatttttttgtaatttagtagagacggggtttcaccgtgttgcccaggctggacatgaactcctgagctcagggaatctgcccactttggcctcccaaagtgctgggattacaggtgtgcgtcaccacgcccggcctatcatatgatttttaatgtgacatagtaattatttaaatgttggtcatccttttctaaaggttatatctttgtatgcaagttcatttactgtcaccattcaccttactcaatttactgaaattgaggcctaagaaagtgatggcttatctaaagtcatatgttagttctggaagaacctactaggatgtggtaggaagaacatgggctttggggagatccaagttaaaatctgtaggcctctgacttgctttgtaaacttgggcaaaagttcctttacctgttgtacctccattctgtagaggtggaatagtatctgagtcatatcgtgaatttgtcatttttttaatttcattactccattcccagatgttgaatagaagtgcgataaatcagtcacaatttcccattgtgacagactcttcgttacaaaactagtttgtgtgaaatacatatgcagttgaccctcaaacagcacgggtttgaactccatgggtctacatggatttttttcaataaataatattggaaaattgggaatttgcaacaatttgaaaaaacttgtaggtgagctgtagcctagaaatattgaaaaaattggatatgtcatgaatgcataaactatatatagatattagtctattttatcatttactgccataaaatatacataaatctatttttaaaagataaaaattttaaaaagttaggcacacaaacagacaatatgtggctctattcgcagttaaga

SEQ ID NO: 24418 - DNA, 1771 bp, Homo sapiens
ctttaaattaagagcctattgaagaaacattagttgaaggaagtactagtatatgtttaaaaatattacttgtgaatattaacttaggaaattggattttcaggttactgttgtgaaatttgagtcaactttaaattctttatcagagattaatattttttgtacaagttctcctacaactaaaaattctagagacatgaagtcagtttacttgaaaaatgaaatagtaacttttaaaacatttacaaaaactacaaatttgatatgtcatccaaaacaaatatttagaccagattatttgttgttgttaatgttaaaatgtgactgattctttgagtacaaaccatatatatgtttaatgtcattttgtctgactaacatttcaggtaactagaatatatctcactccattttaaaagtactgtttcatgttttagtgtctttttgttttctttgctcttttacaacttttagctaacagcatttcccctctattctctgttgcacagtgactgtttctggatcactgaatttagatacatgcctaggtgaaaactgctaatggcattttttaattattattttttccttctctacgtatttttattcggagggggaggggaaaataaatttgatttctgtgaagtctttttctcccctctggagatgagaaagttggtattatgctactttgctgcagaattggctaatgtcattttacagggaccttcacttctgtgatttctccttccctccccaccaggaaagtcacactgcctccaagacatctgatgctttgacactcttccttagcacaactctgctaaaccccaatcccttttgtaaaacctttatgttgatgatccacatggggcagcagggattacaggtgccatgaataaaaaataggggagggggaaagaaatttgaggacggttagaggggtggagttgagataaactgatcctaggtgagcagaggggaaagatatgtcagtgcttgtggatgtaattgggaaaaagggaaactataacaagagcatccctgttgggaagactaagaggcagaataaggggagggaaaacttttcagtgtcttaagctaattaaaaattgcctttctgttgggtatcagtgttgaagcattctgatcctccctagaatacctgtatctttcctaagttagtctttaattagattctgtaatttgaactaaaatacagtggagcctcctgtatctgtacccgtatgctgtttctaggtttattctctgttgatgcttaatagcatgatgaaaaactgagcagtttgtgctctgtgttttgtggggtgggggtttgttttgttttgtttttgatggaagtatttaagccaacttaaatatgactgaggattaagtctggcaggcaactctttgtattttgtattagacttcaaaatcttttcttcttcttcttcttttttttttaaatccaggagaatgctttattgcaacttttagctgactagatgcttaacttagtaacaagtttagcccttgtaactggctagctaaaagcaaatcggcttgtttctcagatctttgggggatagcaagaaacatttgagtgaatgttgttgaagattttcagtagtatagaaaatgatggcgctcttgtgatatttgtaagtagtaagtaaaatttactttttgtgtacaaatctttgaagtttttgttgtgttgagaactttttgattgtagcacgttaaggctgatagtattgtcttcgtt

SEQ ID NO: 24419 - DNA, 1932 bp, Homo sapiens
tcattgttttagtttaatagtcactagattaagattaggtaggcaaaatttttttttcggggggggggtgggggacagagtctcagtcgcccaggctatagagtgcggtggcgcaatctcggctcgctgcaccctccgcctcccgggttcaagcagttctctgcctcagcctcctgagtagctgggattacaggtgcctgccaccacgcctggctaatttttgtatttttagtagagatagggttttcaccatgttggccaggctggtcttgaactcctgacctcatgatccacccaccttggcctcaaagtgttaggattacaggcgtgaaccaccacacccagccagtaggcataatcgtaataaaaatagtttatatacctggtgctgaagtaaaaagatcacagaaaagtaatctgccttttatcctgtctttaggtcagaggttaggttgtggtttatgtggggttttttgacacaggaggagctacctcatttccattctgaaaagtaaagtttgttaatttggagagcaattgaataggaatcttggagaactgatatgttaagactttcaccatgttttgcagcagcttttttttctgtgtcagtcacaaaaaggcaattcaaaattaaagacatgaaggtgtggccgggtgcagtcactcacatatcttgagcacaggagtttgagcccagcctgagcaacatggcaaaaccacgtttctactaaaaatacacacaaaccgggcatggtggcgcactcctatagacccaactactgtggaggctaaggtgggaggatcacctgagcctgagacgtcaaggttgtagtgagctgtgataatgctactgctctccagcctgggcaacagaggaaaccctgtctggggggaaaaaaaaagacatgaagatttatctgaattgtagagtgaagtgatactactattcttattacttactgaaataattcacttaatgattgtgttccagaaaagaacattggcttagacagtagctttgagagagaagggcctctattttaggcacatactgtgatttttgtgcatatagctaattaattatgttaatggattatttaacagattcttttgttgttctgctataaaatttaatacagtaggatacttaagaaaaacaaagcttacattttgtgtacgagattttggaccagaacttgaagtgtatttaatgttttacaaccaagttgttaacagaaattgagtcaaaacagttttgttaatgttggacccaaaagtagaaaaatagtctttttttttttctttttttttcaaatgaggaagtaaaggtctgggcattagggtttttttcatccaaactggatgaaaaagctcatgagactttagcagggactagtcatgacattgtcaaggaaattacatcttgaaagattaatggttaaattatagcttgtctgaagtgtcgatcttaacattggcttagaatagtttacaaaaaagcttgctattacaaaatgaacctgtagtctctattaatagaggttcccccagtattgaggtggaattggcattattaatattatataatattctgatgtatttgactgatgaatatttgagagtggctagtaactattaatgacattattagttcatcaaaaccacactactttggaaaagtgggtcatttgattgtaatcagaattttaagaaagttggtagaaatttacaatgaagatagtttgctaatatattaatagtgttgatagctaggaagtatatttggaggaattttcccctttaaaaaaaaagtctgggtgtggtggctcacacctgtaattccagcactttgggaggccaagataggaggatcacttgaggccaggagtttgagaccagcctggtcaacatagcgagaccctgtctctg

SEQ ID NO: 24420 - DNA, 1787 bp, Homo sapiens
agacaccacttcttggttcatctttggtccagaattccattttagtagatagtgtcactggtgtgcctacaaacccaagttttcagaaaccatctacatcagcattccctgcgccagtacctctaaattcaggaaatatttctgttcaagacagccatacatctgataatttgtcaatgctagcaacaggaatgccaagtacttcatacggtttatcatcacaccaggaatggcctcaacatcaagactcagcaaggacagaacagctatattcacagaaacaggagacatctttgtctggtagccagtacaacatcaacttccagcagggaccttctatatcactgcattcaggattacatcacagacctgacaaaatttcagatcattcttctgttaagcaagaatatactcataaagcagggagcagtaaacaccatgggccaatttccactactccaggaataattcctcagaaaatgtctttagataaatatagagaaaagcgtaaactagaaactcttgatctcgatgtaagggatcattatatagctgcccaggtagaacagcagcacaaacaagggcagtcacaggcagccagcagcagttctgttacttctcccattaaaatgaaaatacctatcgcaaatactgaaaaatacatggcagacaaaaaggaaaagagtgggtcactgaaattacggattccaataccacccactgataaaagcgccagtaaagaagaactgaaaatgaaaataaaagtttcttcttcagaaagacacagctcttctgatgaaggcagtgggaagagcaaacattcaagcccacatattagcagagaccataaggagaagcacaaggagcatccttcaagccgccaccacaccagcagccacaagcattcccactcgcatagtggcagcagcagcggtggcagtaaacacagtgccgacggaataccacccactgttctgaggagtcctgttggcctgagcagtgatggcatttcctctagctccagctcttcaaggaagaggctgcatgtcaatgatgcatctcacaaccaccactccaaaatgagcaaaagttccaaaagttcaggtagttcatctagttcttcctcctctgttaagcagtatatatcctctcacaactctgtttttaaccatcccttaccccctcctccccctgtcacataccaggtgggctacggacatctcagcaccctcgtgaaactggacaagaagccagtggagaccaacggtcctgatgccaatcacgagtacagtacaagcagccagcatatggactacaaagacacattcgacatgctggactcactgttaagtgcccaaggaatgaacatgtaataatttgtttaggtcaatttttcctttacttttttaatttaaaaattgttagaatggaaaaattccttctgatctagcagtggtaacccctgctgttgctgccactgcttcaatatttgtaagtgctgctttattcttcattctgaaaagaagagattatagtaaacaagtctttatctccacatatgatagtgttataaatactgtaaaagcatggaaggtgcaaaactcagtatttctacaattgcagctaagaacattaggatgaatggctggctgcttctaggaatataagatgcctcaagcattcattatttatgatttgaatactgtagctattttttgttgcttggcttttgaatgagtgtaaattgttttcttttgtgtatttatacttgtatgtatgatttgcat

SEQ ID NO: 24421 - DNA, 1047 bp, Homo sapiens
tgcacacaaatagggacagttttactttctttccaatttttatacctttatgactgttattgtactatcccagaccttcagtgacatgttgagtagaactgctgcaagtagacatccttgccctctttaaatgtgaagtggggggaaatgttcaatgcttcaaaacttaagttaactgtaggttttttaataggtgtccataagactgagtaaattatttttttagtttgctgaacgttttttgtttttattgtaaatgagtagtcaagttagtaaaatcttatttagcatctattgagataatcatatagtttttcttttttattttctgaatatggtaaattatgttgattaaaaatttttttgttgtaaaatgtaagatttaccattttaacgatttttaagtgtaaaatttagtggcatttagtactttcacattattgtgcaatcattactaccatccacatccagaacttttttcatcagctcaaactgaaactacccattaaacaagaactctttccccaccctcagtcccctggtaaccactcttctactttctgtccatgaatttgaccatcctaggtacctgatataaatggaatcatacagtatttgtttttttgtgtgtgtgtctggcttatttcacatagcataatgtcttcaaggttcatccagggttatagcacatgtcagaattttcttcgtttttaatgctgaatattaatattgtatgtatatatcacattttgtttatctgttcatctgttgatggacacttgggtcgcttctaccttttagctattataaataatgctgctatgaacgtgaatgtacaaatatctgtcaggttcctgctttcagttcttttaggtttatacccagaagtggaattgctgaattatttgatggtgctatttttaactttctggggaactgccatacttttggctggctacaaattttgtttttgttttcctgaaagattttgccgtatttttgaaggatagttttgctgaagagtgctggcttgatgcttattttttt

SEQ ID NO: 24422 - DNA, 1054 bp, Homo sapiens
cccacctgggaccccttccttgttgcttactaatcaggactccacactttgcatcatttagtcctcaagtttttaacgtttaaaaaaaaatgcttctggaatttcagtaaaatgtaagaaaagttaagtaaacactttaaaattatatggggaaatattttggggcaaggtatctgtctaagggcctagaaggctgtcctgtggagccagtccccactgtttcccttgttctttcttttctactttttgagtaacaaattctttcattaaaaaattttagagacctttaattacaaaaataatgtaaccacaccaaatgatgcatatgtataaaaaagtgatagtcccttcctcatcacttctccattcatctacttttcagaacaacttttaacagttccatgtgtgcacattataccttgaaaaaaagatgagtaactttttattacagttatctttttttaaaaactgtatcttggcatgtttgcaagatagaacataaacatctattgttactttaattcttgctttgtagtctgttgtatgattatcataatgtgtttatacatgttcctattgaagaatatttactttccagtttttgcagttaaggtactgtggtggtaagcattgttctacatactcttgcatgtttgcctttttttttttaaatttttttttatatttgcctttttttggggggggtcactatttccttcatatgggggttttcctcaaatatctgacgatctctatctactcatttgagagtgaggaactaaaattcgtgggagtcataggatcaaaaacttttttatttcattgtgtggtcacagagtgtcagtctctgtaggcattttcatttgagcccaccaatctccttgtgaatagtcttgcatatttgtatgaatatttctgtaacagatttctttttttttttttttttttgagacggggtctcactctgtcgccaggctgtagtgcagtggtgcaatctcagctcactgcagccttcgcctcctgcgttgaagtgattctcctgcctcagcctcct

SEQ ID NO: 24423 - DNA, 1055 bp, Homo sapiens
ttgttagatcacagtgtatatattactgaaatatatggatatccagtatgttactggttaacatactggttaggaaatattttctagtacctttggaagttacaggggttattattaatactgaacaaaggtaacaccctaaatacatattaagcatgtagatactgttaagtaccggggctgcaaagatgaatagaacaatagtctttgcttttcacaatctaggggagaaatagacatgtaaataaataattagaataaggtatcgttcttgtatttgaacaagatgctgagaaataatcactaactgtttgaaaataatcaaaggcagattttctataggaattaatatttaggttgagttttgaagaatgagttaaaagtatactgaaagaatgaagtagagaagagcagtaggaatagcctatgcacaggtgtataaagaaagcacacctctggggaaaaacaagttgttaggcataattgtaatacaaggaagatggaaggtagctgtaggggtaaaactggaaaggaaaagggtcagatctgtaagctttgtatttccaccaacgtgagaaacttggctatcttggaggtgctcgtgttgaaacatttgtatattataacttctaattatgttacatttttatatccttttaatgtcaggtttttaaaatttttatacaatatgtgtaatactataatacataattggaaataaaaatatatggaggtgtataatcagatttttactgatagaggtcactgttacagattatggaaagctgttgaatattttaagtggaggagggaacaatagcagatttgtattttaggaagataaccacgtggaagaaggatggaaggctattaaaacagtccaggaaacatattgtgaagggcttaattaaggcagtgatctttatcttactgaggtctttggccctccaaagttatggcttagactctatcttagttacctaatgtttattgagtaggttgaaagataagtggaaaggatggttggtgccaaattatgataattagtaccatgc

SEQ ID NO: 24424 - DNA, 1624 bp, Homo sapiens
ttagcaagtggacccccagatctgaggtgttgtttactgcatcagaaactacaggtaaagatttctcaatgacatggataaatgtggtcttgatttaatcagattattctaatactaaatgtaataatgggttacatgctgttctcatggtgctgctgtaggttgcctatagtcagtagtcactgcaattcacaaggtcctgagaagtggagagtgaaaattaaatattcaagcagtaggtagatttttatttttctgtaactaattcaactataaatgttatttctcttttcttaagatgttaaattgttgtattgaaagaaagaaggcacgtgatgaggggaaaaagacaagtgcttcagatgtcactaatatatatccaggggatgctggaaaagcaggagaccagttggtgccagataatctaaaagaaacagataaggaaaagggagaggtaggaaaatcttgggattcctggagtgacagcgaagaagaattttttgaatgcctaagtgatactgaagaacttaaaggaaatggacaagagagtggcaagaaaggaggacctaaggagatggcaaatttaaggccggaaggacggctctatcagcatgggaaacttacactgctgcataatggagaacctctctacattccagtaacccaggtaggatgcactagttctttccattttaatttattttgtggtttatataacttcatcctagtagaagatagtgctttgagtaaggaaaattatccaaaaagtctatgtttaggccagatgcggtggcttacgcctgtaatcccagcactttgggaggctgaggtgggcagatcacctgaggtcaggagttcaagataagtctggccaacatggtgaaaccctgtctctactaaaagtacaaaaattagctgggcacagtggcgcacacctgtagttccagctactggggaggctgaggcaggagaatcatttgaacccagcagtgggaggttgcagtgagccgagattgcaccactgcactccagcctgggcaacagagcaagactcttgtctcaaaagaaaaaaaaagtgtttatgtttaaagataaagatatagactgtttaaagaaactaaaggtaaggatttcccaatgacatagataaatgtggtcttgatttaatcaaggacctttaaaagattggacaaagtctatgtttaaagattaaagaaatctaaataaacttttggggcttttaggtttgccatttctgtaattgagaaatgttttgaagtttaagtagatcacgtcatcatatataaggtgatttataaactgagcagtgaatgctcagatgtttaaaaaagaaaatccaactgcacttatgtatgtttttgtttaacttgtggacaaagacttatggataggtgcaaaaaataaatcctcttttgcaacccagaactcattgttcagtatgagttttgatacatataagaagggatattatgatacctgagacagttaactgatgggaatattgatagccataaaggttggtcccagaccaggcacaatggctcaagcctgcaagccccacaccaaggtgggagtattgcttgaagccaggagttcaagacca

SEQ ID NO: 24425 - DNA, 1023 bp, Homo sapiens
atgatgcttttctctatgctgctggacttcattcttactggtccacgcagatgcaggcggcctgaggccagtgctgtaccaagtagaagacggttcctaaggacagagtttgtctgttttctaacaaagaaaaattctacaaaggagaggttgggcgttacaaaggcattgtgaatctaataaaaggaaagtgtcgctttctgtggcgttttctttcattttctcccgctgaggcatttcagtctaatttcatgtggttttgtgctgtctcagctctaatgtttgcagcctgctgagcctaacaaggcagtggtctcaagaacattctttgtgcctttttaaagtactccattttatttttatgatagttatgtatttatttcacagatatatttaagtacccactttgtgtcaggtacagtacaagcaatgaagataaaacagaaaccaaaacacactcccttacagggaaaactgacaccacgttgccacaaaatgttgagtatagtcaactctgctgtgtggatcggagggcctgcatttatcctacaaataattgaatgtaatcctacattcatgtattcattggcagtacggagtaataaatgcagcaatgtcataaagtgttgtaggagtttcttcacccaggctttgaggatcaggaaaattaccccagagggtgtgattttgggattgagaccagaagctgagtaggcactggggaaagcatggggggcgtatgggaaatggcttgcagagaaccaggcattcctccagccctgtgtgcaatgaaatcatgattttcattgtgaagtgctttatttctccacctcttcaatctggtctcggccatgtctttctttggtcaacagacagagacttgacaagtccttgcacattggggcttgccctcccttcttgccaggagccttgaagccactgtgaagaaggccactctagggtgagagttggggcaaaaggtaactgacaggagggggcagaaagcgtattacaagcagagga

SEQ ID NO: 24426 - DNA, 1090 bp, Homo sapiens
aagtagctgggactatagtcacgagccatcatgccagctaatttttgtatttttagtagagacaggattttgccatattggccagggtggtcttgaactcccaacctcaagtgatctgcccacctcagcctcccaaagtgctgggattacaggcgtgagccaccatgcccagcctaggccttcattttagtgagcccttattttattttattttattttattttattttattttattttattttattttattttattttattttacttagagtctcactctgtcgcccagggtggagtgcagtggtgcagtctcggctcactgcaacctccgccttctgagctcaagcaattctcctgccttagcctccctagtagctaggattacaggcatgagccaccgcacccagtgggttctcattttaaaaacgttcttgggaaagatgcttccttcatacagaactactgagtatctgtttgttttttactgggaacaacccaaatgtccttcgctgcgtgaattattgaactgtgatacatccataccatggaatactatgctgccttaaaaaaggaacaaactgcagtcacaccttgtttaacattagggataaattctgagaaatgtgtcattagagagttttgttgtgccaacatcatggagtgtgcttacacaaaactacatggtatatagccttatagatatctaagttatatgatatgtatggcctgttgctcctgggctacaaacctatacagtatgctactatactaaatactatagacaattctaacaccatggttaagtatctgtatatgtaaataaagacaaggtatggtaaaaataaggtgtaaaatatttttaaatggtatacctaaggcacttaccatgaatgtggcttgcagcactggaaattatggtaggtgagccagtgagtgaatgcaaaggcctcagacataattgtacaccattgtaaactttataaatgctgtatacttgggttccactaaatttataaaatatttttctatctaaaaaattaacttgtttgcagtaactttttactttatgaattttaaaaaatttttaaa

SEQ ID NO: 24427 - DNA, 1053 bp, Homo sapiens
ttaaataagtagaaggaatacactctaaaataatgataagaagtgtagtaaatgcataaatcagtatcatagtcatttattaccattatcaagtattacgtgctgtacatatgtatgtgctatactttcatatagtcatatgcatatagcagtgcagtaggtttacaccagcatcaccataaacacgtgagtaatgtgttgtgttatgaaggctgtgataatccttaggtgctaggaatttttcaccaacatagtcttatgggaccactatcatttatgcagtccattgttgactgaaatgtcattatgcagtgcgtgattgtattgatacagcaactagaatggatcccaaaagaattgcaggcacacctaggagatactgcgagttcagttccagacaaccatgaaaaagcgagtcatatacatttttgggtaccctggtgcatttaaaagttaggtttactactgatgttatcatttgaaaaaaaaaagagttttatacaattctgtagtctatttaaagtgtgaagagcattatgtctaaaaaatgcacatatcttaatttttaaatattgctaaaaaattttaatcatctgagccttcagcaggttgtaatctttttgctggtggagagtcttgcttcagtgttggtggctgctgacccatcaagatggtggttgctgaaggttggagtggctgtggcaatatctgaaaataagacaacaatgaaaacaatgtccacgttgatggacacttcctttcatggaagatttctcgatagcatgtgctgctatttgaaagcattttacccccagtagaacttctttcaaaattgtagtgaatcctctccaattttcctactaatttacaactaagtttgtgtaatattctaaatcctttgttgctatttcaacaatgctaacagaaatagacttaccaggagtagagtccatctcaagaaaccacattctttgctcatccgtaatcatgaacaaataatgatatcatgagcagcaattcaagcacatcttcaggccccatttctgaatctag

SEQ ID NO: 24428 - DNA, 1036 bp, Homo sapiens
acttttatctagccaatgcatggcagtaggttagtaggagatgcaggcaaactgacaagtttgtttttcctcatagaaaattagaaacaaaattagaagtgggagaggctgcccgctgtagctgcactagcagcaggaactgataactaaaatcaaagaaggaaagagaattataaaaggtattaagtagtttaaaactattcgggaccatttagcacagaataaattgtccatgtacctagtagaatgaaaaactgccaaggttattctattgcactctggtattttgtttttaaaacaataatgaaaaaaaaacagtgcaacagtcatctagaaaatatacttattctttgactatgccaagtaattaagatattacgaaataattgagtgtacattaaaagttaaatcacgttgaattgcataggaacactgatagttatttcaaactcacattagtgaagtagtatataatttatagttttgtcgttttacattgtggggtattaggagaatcttttcaaatggaattcctagagtgattgctgtttgagatcggggggtgtatctttctggtttctttctagttctatagctttttaaattttttgagtgaaatgtcaaaaattattgtaaactgatttgagagttgttttcattatctgattcattaagcttcagattttaactcagtattaccttgaaggcaaatgtttattttaatatgaaaatgatagttcatttgttgatgctagtatttatgactgtatcataaattaacatgagctgcttagagtctaattgcaaaattgaaaagttagcataaattatccatcatataaatgaaaaataatttcagtttatttagtaaagaagtttttgtgtctaatgtgcaagggattttgctttcagcattgtaagatttaatagtaaaatatatgctgtaataattatgaaagcatacctacatctcttttaacttatggcatgacctaatccagaatttttttttcttttttggggggtgcggggaggg

SEQ ID NO: 24429 - DNA, 1070 bp, Homo sapiens
ttctccctcttccccagtcctcagcaaccactacttttctgtctctatagatttgcctattctggacatttcatatatgtgtaatcatatagtatgtggtcttttgcaactggatgctttatttagcataatgtttttggggttcatccatgttgtagcatgaatcagtacttcattccttttcatttctgaataatatgcgtttgaatggatatatgacgttttattcatcagttggtggatatttgggttgtttctgttttttggttattgtgagcatcactctgtaaacattcttggacaagtttttatgtagatgtatgttttcatatctcttggttatatgtctaggagcagaattgctgggtcatattggtaactatgtttaaccttttgagaaactgccaaacagttttctaaggtggctataccattttgcattctcatcaagctgtggattaggggtgggcccctatttcaatatattaataactggtgtctataaaaaggggaaatttggagaccgttattcatacaggaaaaatgccacatgaacatgaaaatggccatttacaagccaaggatagaggcctggaacagatcctacttgaccattttaaggaaccaaccctgccaacaccttgattttaccctcagaactgtgcaaagttaaatttttgttgtttaagctacccagtttgtcatactttgtcacagaagccctcgcaaactactacataagtggtccatgtccattctgtcctagcaaataggcaaacttcttttgttttgatgacacacactcctgctgtgacatacagtagtaaacttaaaagtaaaataagtcgggcgtggtggttcacgtctgtaatcccagcactttgggaggccaaggtgggcggatcacgaggtcaagagatggagactttcctggccaacatggtgaaactctgtctctactaaaaatacaaaaattagccaggcatggtggtgcgtgcctgtagtcctagctactcgggaggctgaggcagaattgcttgaacccaggaggtggagattgtagtgagccg

SEQ ID NO: 24430 - DNA, 1077 bp, Homo sapiens
ataattctctgacctttcatttgctacacaagttcagttatctcagtattaaatgtcatgtagggtagtaaagtatcttccatgtgtaatgatgtgtctgtatgctgtaggaatacataagcaaatattgccttctactttgtggcccatgtacttgcaaacaaaaaatctttcatttgatttctgttagtgattagatgactgtgttacagttaccttcagcctctcaagaatctattttgtataacttaattagcagctgaaaagaggagagaaaacttgtttatatactcaaagggaaagaagaacttttttggaaaaacaaattatggattgcattgtgcatcccacacctaatgctagaatcagttcccctttacaactgtctgaggacctaggataaaaattagttctcccaaagttgtagaaatgagcacaagaagatagaaattaagtaattcacagacttcgttgtagagattatgtgtaataaagcttcttgccagtattgacaaagtccttgttgctcttacatgccatcaaatgtacaattttattgttccaggtcctttgctcttttatttagctttgttgtcttaattttaaaactattttcgtttttaaaaaatcatctagcctgaagtgtcacaaaagtattttcaacgtgtgtgttgtagcctaatggtgggaagactcatttaggcaatgacttgatcaaaaattgcattttgacccctcagaaaagtcaatatacttattagcattttttatttacttttcttgaggccaaaaataactatacattgttttttaaaacatgcctatactgccagaaattcctggagttgcgacatatttttttagttaatgaggaatataaaatgtttgttgaaaaatgtttttcaagtatgtcagattcagataaattgggtttcatcaaattaaaaagttttatattttataggatgccatcaagaaagtgaaatattttcacagatggaaaaaaatattcacaaaccatgtatctgataaaagatttacaggatgtttactagcaaaattttattttattatttt

SEQ ID NO: 24431 - DNA, 1012 bp, Homo sapiens
tggtatgaagaataaattagaaggcagcagaaccattttaaaggctggagaccagtaagaagcctcttggggaaatctaagcaggaactaataatggttgcctatattaaggtagtagtgaggatggagcccagagatactgtatgaagaaagtggggtataagatccttgagagcattgtctgtcctgtttccctgtagatccacagtaggggaactctcatgcgtccttccttatactcataattccaattccatttcccacctgtggaacatttcactttacctttaacggtcttggtgccttatttctataattatctgtgtagtctttgaggctggaactttggatacctcatttcaccattggttgtggactgttgattgacctcacctgactgactaataccacaatctttcctcaccacttattaatagtatctcctctctatgacatgttaagttgaagaggatgatttaggattgtttatttgcttaatgcttgtttacttgcttttggtgagtggtgaacaagagtagaaattagtatttttgcccctatcccagttgaccatgccgaatttcctacttctagtggcatcaacattcttttatttatccaggttttcaagtttctgaatttttattagccttctaagttttactttgaagtatctctccactgtcttcatttttctttcccagttaactctctgaccttaactcatggtaccttatgtctaaattattgtaaaatctctcagtttatgttcttaatttctttgcatcattatcctcaacttagattcataagaagtatattgactctaagccttgacatcaaattatcttggtgaattgatttttcctcagaattttaaggactaaatgagataatagatgagtgctttgtaactgtatatcccatatctcttgatttattccctccttttaaaaatccttccatcttgctgggctcacacctgtaatcctagcactttgggaagcccaag

SEQ ID NO: 24432 - DNA, 1026 bp, Homo sapiens
tccttttcctgccacattcccttcagtatcttaggataatgtatacatttcaggcttattcaccagtttgtacttctgattacattttctcatttcatccactttcagattttccttcttattacctttcttccctcctaaacctctagcctctccccatctttccttactggcttctgtggcctacacactttttcattctgacaaccttcctctaacttcgcatctcctggtaactttattaccaaatcatgtatactcattgtgatcttccactttcctcctcaatccttaagggttcagtgttccctagggattctacaccccccccccttttcaatgaaggcttgtgggcaacttcattaacattgataactcaaaacttcaatctatatagtgattctccaccaaataaataacattagctgacttctttcctgagctccaagtctatatatccaattttctgttagatttctccacctgaatgtcctgaagataccttaaaattaactgtaggcaaaactgaaatcatcgttctgccatcaaatccattttcctcccagatatatttcctatatttagtggtagcaagcactacctgcaccttcagtgtgtcctctcataactcttccagctctcacagcccttaccttttccctgaccactcatgtattgaattggcttcccccagttagttacttgctattatattaatctattcatttctacatggagtacaggtagtggctgataccaagggctctggagccaacactacctgagttcatatcttaactctaccccttactagtcttgctactttgaaaaagctgcttaatcttcctctgcctcagctgcaaactatgtaatactgcttttatggggattaaatgaattaatacacttaaagcattgggagtagtgcttagtaaataataaataactctttaagggtttgctgttaatattaccagtttcacagcacatattgcaatcagttattatcttgtatattttgtctct

SEQ ID NO: 24433 - DNA, 1049 bp, Homo sapiens
tgtgcctacttttagatggttttggctcacctgctaaaagatcaatataccttgagaaaagtagtttacctgttagtttgagtctcatatgtagggcccctataaaggattagtaacctttaacttatgaccattataaaaatatctaacctcaattacagatttgaaaatttgaaagcttggataagctacaatgtggaataaaaggcagaaggtataaatcttaagaccttaggaaagttgtcattcttgtttttttaacaagtgctactaaaagcagggtatcttttttaaaataagtgacccagataatctaaaaatcctctgcaatctatagatgtacgtcttaaggggagagaaagcctaaatttctatcaattgctagtaaaattgttagattctgttatttcatgcagatagtggaaatttcagtggcagtgcatttcactgaagaacaattgaaatattcttatacctgctctttagctcaaacacagaaaatcaatttaaatgtactgttttatgaactccaaataagttgcctcctttcttgtttgtttgtttgtttgtttgtttttgagacggagtttcactcttgttgcccaggctggagtgcaatggcacaatctcggctcacagcaacctccgcctcccgggttcaagcaattctcctacctcagcctccaagtagctgggattacaggcatgcgccaccacgcccggctatttttgtatttttagtagagatgggggtttctccgtgttggtcaggctgctcttgaactccctacctcaggtgacctgcccacctcaacctcccaaagtactgggattacaggcgtgagccaccgcgcccagctagttgcctgcttttgattctcgtctttattttttttacagtaaggcaatatgtaaattataaaagttactgaaaatactgtctcacaataaccccaaaagcttggatgaggctgggcacagtggctcacgcctgtaatcccagcactttaggaggccgaggcgggtggatcaccttaggtcgggagttc

SEQ ID NO: 24434 - DNA, 1052 bp, Homo sapiens
gttggttaatgcaatatcattagtgctgtcttcttcctgggctatgtatgattctccggaggagctttttgttttaagaattgattgctttatagtgttacggaagtagatcatcattgctgttacttgggaacagaagacccaatgcagaggcacccaagttataaaacatacacagcacatccgttacatcttctgcctatttttaaggctaatcctaaaacaactagctgagttcagctgaaatttatattttgatggtgatttgcctatcgaaaggaatttcagtttgatatgaggcagcaacaagtctgtggtaatgagtagcagtcaacttcagatggcataaataatcctttttggtccattatttttctttctttcctgaagccagatttctcccaggttcttatctatgaatgatttaatttgcatggttatatttaattcatctatgccttttctgatttatggtcttttgtccttatagctgccatatcacttgctggaactattggttttctcccattttaaatagtctttttgtaaactaagtaaatactttagtatttttaaatgatcgttcctataattaaaagtaaattagtgaaaatagatgtgtttagaaagggatcttttcttcttatagggattaaatgttactaaaatgtgagtctgatttagttttcattaaaatttaaattttcatatcccttcgtctttaatattcttttcagttagtctttttccagtcagttatatcatgactaaagtaggatagtaaccattaagctatgagctgagctagaggtgaatagaactgttaattcatttaaccagtacctctcaacattactcagagctgctggatacacaagcacatatacattagcaggcattttgactaacattttgactggtgactctctaaggttttcaatacagtgtaacctcagttatttgaattatatgaatgatgtcaaaaagctttagagctgtctttatcaagataatcaaaagctaggctcagcagagatgcttataatatactt

SEQ ID NO: 24435 - DNA, 1065 bp, Homo sapiens
aaggtgacttatgaatggctaaccagaagcaaagatcaaaaccacctaacttggattgagaaccctagtctagggatgatattttgatctcttagtaggcatgcctttaaaagaaatgatgtacttagcatattttctgtgttttgcttttcagtttattgattgatagtgaaaagtatttttaaaccaaatacaatctaaggccacttaaatgaaatttattaaaactcagcattgtttttgttttagcactttgcagattttcttcaagcattcagtgaaaacaattttgatctcagtgtataaaactatcttattgattttttaatgaactcatttctctgtatgcttctcacctagatgtgtacttcccagatgtttaataaggtatttattcagccttttataactctaggagttgaagtggaattttatcattggtttctttagagctttcttaactgcttatcactattggaggctccctgactatgtgagtgtgactcactgaggaacccataacctccacctccactgaggctgtttactgctcttgatattgtgtgaaactcgtcagggttaccaccagtttaggagaagcatctctgcactggcccatctgatgaatagtagtcatacttctctttattgttgcagtcttcagtgatcatgattcactaactttctgtgctagatatagttcatgcttagcatagccatgcaggataacttccaggtccttaatctgttacccttaggagttgtctcgttgttagtttacaggttctcccctttttagtatgttactagccttgtattgtacatgtgacaaatgttcttccaaagaacattgaatacaaacattggtcattttagccaagttagaattttagttccaagctacctaaaatttaataacacagtccacgtcaaataatgtaaactagtatatgatataatttcaaaaggtatcaaaagttattctctattcgtgggaacattggttgtggtactgctcattagctttatatacactggtgttttattcagaaacaattttctgaa

SEQ ID NO: 24436 - DNA, 1025 bp, Homo sapiens
tttgtaactggtgttaggcatatcacttaaagccactgagtttcagttggactcatttgcaaagtatggaatttttactgtgttgtctgttgaagcctctgtgtactgtaaaactccataattctttgtgtctcatgtgagtcatttctagttctaaaaggtagaataatagagaattggtttgtaacagcttggcaaccaactgtcaataactggagtcaatgaaagcaactatttcaaaagatcagattacttaccagtttcactaataaagatttattactttaaacctttatcataaaatgtatgctttgaatactgtgaagtacactgcatataaggagtgtggtatagtataaagaaactttctgcaggtagtaattatagtgaagattttaggtttacaaagccctagctgttttctgtgtagcttttattattcttatgactcttgacaagtttgtagcttcaccatatacatttaatattttgcaataattggccttgttcctgagctgttggattcggggccgtagcactgtctgagaggtttacatttctcacagtgaaccggtctctttttcagctgcttcctggcttctttttactcaggtttccactgcttttttgctttttttaatgctgtatgaaggtgttaacatttgtttatatttttcattaattgtaatacctttaaatcatgcatcatactcagaaatagggattagaatttaagtgacatctttggcctaatataatttacctgttaaaaatttgtgaaagctattgcttatttcttttccaaagtagatttggatgacaaattcagtttggttttgagcttatctaaaaagcttaatgttttaagcataccaaactcattagcagaagtcaaatatgtctctccctattgctacacaactttttagggatattgttatatatgaaagcatgacatcaaacggacctaatacacctaaatgcatttgaagctacttggtctcggttcttaccaacgatataat

SEQ ID NO: 24437 - DNA, 1051 bp, Homo sapiens
aataattaatttaacatgagacaaaaaggaatgattctctaaatcttccctacctacttttgaattattcttcagtttagatttttacagcttttattcctcaagtaacttctaaacttttcccaattgtttttaaaaatccacagtgactatttttactgcctaaggttttgaatggctattgccaaacttgctgttttagatatttcttgaggccacaagcaacctatataacaagcagtcccctgagataggccaacccagtttacaaggtagaagaggtatgtgttggaagtgtccctctagcatatcctgtgtattttattttttgaataatttccaggtcttgggagtgtgctgactttggcatcttacgtggtatcagggacaatatgagggatattgaagaaaggatctttaaaacttgcatcctcctgacttctgtttttagccaaaatggagtaatatagactggatttaactcctaccttaaccaaaaagccagaaattatgtgaaacagtagtttctagatattggacatgggacattgaagaacagtaaaccctgagagggagaaacaaaagaagtgagtcttaggattgccccagcttagtgccacaagaatgtttcccagacacagctcagggagggggaacccaaccagagtctctgagttaggagatggagttgggacttaaggaagccaaggtagctagagtttacagggcagaatactgaagagaagagagctctagagatctctggagggacctccttgagtcttagttgaagagattggtgcatatgtttgcaaacactacttgaggccaggaaaagaaccactcaaaaggagcagacacaaacaatccctggaactcacccaaggacagtaatcatttgtagtcctaccagccactggcaaaacttcataatacaggaagcaacaagtagaggacttaaaaggacactatctcaatatggaggaaaattggtcctagattaaaggctgctctgtttggctctaagcttcctgttgcccgccccccaaaa

SEQ ID NO: 24438 - DNA, 1061 bp, Homo sapiens
aaatgaatgatcatccatagaataaaataagaattcatgagtccatactgataaaaatcaataaatggaaaatgaaactgtcttaccttagtgtaatataaagtgataaatgtagaatcgtgaaattaaaagatcaccaccaagaaaaccatcaggcaagagtcaccactagaggctacaaaactagtgggtgaaattctgaggaaaagcataatttttttttaaagtatctccctacaagatacttaaaactacaaaggaaaaaaattgtaatttacagtggagaaacctgataggcaccatgttaacaaagcagtcgaagtaaatatcaccaatactgtgatgagagatagacgtcaggttccttctgatgtgatccattgagaaggacacattacttctctggtgttcctttcccaaatatataacatgaactttttaatgaggagacagcagacaaacccaaattgagggacagtctacaaaataactgatcttccaaaacaaatcttcagaaatgtcaaagtcatgaaagaaagaagagactgtgctgttctgcttcagattaaagaagattaaagagccatgacaacaaaatgcagcccttgattctagtctggattctggacttgaagggaaacatttttcttatcttttgctataagggacattagtgggacacttggcaaaatttaaattaactgtagattagataatactattgtattgttaattttctggcttttattctactttgattatattataaaagtccttgttgttaggaaatagacactaattattttgggttaaaggaatatcatgtgaaattcactttcaaacagttccaaaaaacacagtgatatatatgtatatatatgggtgtatacacacacacacacacacacacacacagagaaagcagtgtaataaaagttaagatcatttgggaaatctgggaattcttttacaatcttaggaactattctctaatgaaattatttaaatatgaaatgttacagtatttaatatgaaaaaagagtgagttcgctgtatgtatt

SEQ ID NO: 24439 - DNA, 1031 bp, Homo sapiens
gtccaaacattcctagaaggcactcttgaggtaaatcagttaatttaaaaaaagaaacgagagatttttattaacaaatattaatatttggaaactctagtacaaattattggaatagttaaataaagttataggtcttgcctttcggggttttgtgtatatatatatactttcttcaattaagtttttactgatgagcatgtattacatgtatttagaatataatgactcttgaatgtttgcaggaagactgttagcaatctcacaaaggagtctctgtctgtcccttgacctgttccaaaatccagctagcttttttagagctttagccagttaatccccaagactaagtaggattagtgtcactctaggagtatgtagatactggactcatgaaaccaaaacacttacagattgcttagagctttcttcataactctgaagtcagaacttgtgattttcttaggtctaagatctcagtaataatataccaacttaatggaaaatttgaaagatgtctttatagttggaagacgtgatctcaagagtacactttggttcatagaactgttcaagtgggaaacgttttaggcaagtggtctttagttagtgacattttcatggatgaattaaagaatattgtagagttgatgttaggagacgagagattactactacttcagctaacaaattaatatgattttcaaagtattgtggctgtgtaaagtaagtgaaacaaaacgatattcatttaatacttgggaaggtagaataatctgacgagactgaagtaaaggtatctgttcactggctaatgttgctaggtaggtaggccaaactttgttaatgatagacgccattttctgccttttttggtgaatgtagaccacagaagcctttaggttttgagcagttgagatttattttacatcggaaagactggctgtatgagggtctgcaactctttgcttctgagttcgtgttgctctctttaagtgccttcgcttaggatactgccgatacaaaggata

SEQ ID NO: 24440 - DNA, 1031 bp, Homo sapiens
aaccagaaaaagtcttaatgaaataagaattatatttttctccttcaacctgattgctgtgaaagaaactggtagttgcaggaaaatacttgtgattggtacagtaaattttattaaaacaactcagtatttagaaaatacttgcattcatctagtgattttgtttgattttgttttacagtgaagcctgcctacagttttcacaaatctgtatcctttcagtaaagaatggcttatatatatacatttatttaccttccttttggttaatttatgaaatttagaaattattcatttttatttaggaaatcatacattcttttttatggaaactttattactaagtgtcctcatttaaaaaaaatgttattataggaaatttcaaacatatataaaagtaactcaatggtgtagtgcaccccatacattgagataatatattgcagctaaagataggatagggagtttttaaaatgtgaatatctgaaaaacaatatagatcagttgggttggaatgttacaagtagcttgcaagaggcagctggcagcaagatggatagaaaaggaagttatgatagaggagaatgtagtagattcttcactagaatatacctcataaattaacatgtcacatgtattaatactacaggtataatgatgcagtacttgaaattatttaataaatgttagattatattgtgaaaatcacaaagatcatttgttttcctttgttaccaatagtgtttcgtaaaactatcctttcgtttcacatgaattgttagacttcattaaactgtacagatcctgtagtgtgtgttccatccagtttctttattggagacagtggaattcccttggaagtaatagcaggaagtgtttctgcagatgaacttgttacaagaattcacaaggtccgacaggtaagaaggaacagaactgttgtttccgtaaatggtacgtcaggaattggatttttttttttgagatggagtctcgttctgtcgcccaggctggagtgcagtggtgtgatc

SEQ ID NO: 24441 - DNA, 1045 bp, Homo sapiens
tcacctgtttttgtaaatagcatgaagttacaggtgccagtagccagtacctaatacttgactgacttctttacctttctttatttttttatttttttgagatggagtctctgttgcccaggctggagtgcagtggactgatctcagctcactgcaatctctacctcccgggttcgagcgatttttctgcctcagcctccccagtggtgggattacaggcgcatgccaccatgcccagctaatttttgcatttttagtagagacggaattttgccatgttggccaggctggtcttgaactcctgacctcaagtgatctgcccgccttgacctcccaaagtgctgggattacaggcatgagccaccacacctagccatcttttaccccagtctcaacacataatgaatatcaccataactttgttgaaagagaaagttgctgtcatattaaggctctaactatatattgcttaatatattttaaggacgttatactcaataattaatcatttctgtctactttggacaaatggctggtagaagtttgtaacttttttctttgaattctaatttgagggaaaatcaatagtgtgctttaacaaatgtttttatggtcttgccagcttgcaggtaaattccataatgtgattatatcatacttaggattatacattttggattcatctatttatgagcatttcgtatttctctttttatagagtataaatcaacctgtattttggtctctactgccatggtaagtttagattcttatctattaattaaaatccaatttattttctgcctagatgcatttgctaaaaagtgaaacatcagtagcaaatggcagtcagtcagaaagttcagtgtctactccatctgcgtcatttgaacctaacaacacttgtgaaaactctcagtccagaaatgcagagctttgtgagataccacccacttctgatacaaagtcagatactgcaacaggtaacttttaatgtacctttttgagtgcaatagaagctccttcactacattttaatatttaa

SEQ ID NO: 24442 - DNA, 1032 bp, Homo sapiens
agagataaactagcctgatttgacaaataaattttgggaggaaaaattgataggatttagagatggatgagatttgggggtcctggggagaggaaaaggctgacttccagggccagtagttcttgtgcctaaggtgagagtactgggggaggagcagttttttattttgtagtttcagggaagggggaggtattggtcatttttcaattggagacttactaaacttgagactgagacatataagtagagatgcctagtagcaattggatgtataggtctggagctcagcaaagaggtttggactggaaataaatttgggaatagtgtacagtttataattgatgtctgggagtgagggatgagattgcttaaggagatagtatggagaagataaggggtcttatgagtaagccctatgaatctttcacatttgaactttggtagaaagaaatggaacaaaagaggctgagaaggaagaagctagaggttggaagaaaattttgttggtatcactgaagccaaggcaatagactgaaaaagaagggagtggccagttgaatattttgaatgcaactgggaaattaagtggcaaactaaagagcatacgctgaatttagcaacatgaagaaaattttatatttctggttgtcaatacacccataaactgtttgatgatgaattttgtattaatctgccgaagttacaatcctaaattaaaataaaatattaaatctataatatgaaccatatctgtcttcctgagttcagacgtgtttttagtatcatctggctgttctataagtatctaaaacttttcacagcttattcattcatagtatgtattttttaaatactcactatttatcagacactgaatgctagacttctaggtatgggattagaattcagagactagggaccatgaacgattaaacaaatatttgtttttcttgtgtgattagtgctgtcgtggcagtttattcaggttgccttggaagcacagagcaggggcatcaggggaggctttcaagg

SEQ ID NO: 24443 - DNA, 1051 bp, Homo sapiens
aacctgtcagactttgaagggaggttgccttttgcttggggcagagagctcacactacagaatagctatttcacttatgcctcaaggacccaggtaagtaaactataaggtaaatgaaggtatttgttcacccccacccttttttttaaaactggggtcctgtgtaaatatattaccaacgccagttacttcagtgtacacatccctcccttcctttcccccagctctgttggcttcccctttaaatagaaatatatataactaagaagaaggaatattttttcctgtccttagccaatttttttttcttgaaggttcagctgttgccattactgcatctttaaccaccccctcttcttgcccctgcacattcttttctatagcagtggtgtccagctctgccacttagtctaatcagtcttctgaaagacacagctgtttctatttcagagacgagcctatccatttagtacacattttagtcaactttaagtaaactggttttgagtaattaaaactacaagatggactttctgttttcacgtgtaggtcaaaattagctattccattaattctctcaaaacacgtaactagcccccttcctttttcattttatttttaaaccaacactgagtgttgtgctaggctttgccttacagaaattaataaactagagatgatattatacttaggtaataccacagccatgcacataaactctatagtaaaagacaataaatgaagtagactaatgagggtgtatattagtccgttttcacactgcctataaagacatacctgagaccgggcagtttacaaaagaaaggtttagttggacttacagttccacgtggctggggaagcctcacaatcgtggcagaaggcacatctcacatgacagcagacaagagaagagagcttgtgcagggaaattcccgtttttaaaaccatgagatctcatgagacttactgtcacaagaacatcacgaaaaacacccacccccatgatttagtcatctcccaccaggtccctgccacaacacatgggaat

SEQ ID NO: 24444 - DNA, 1051 bp, Homo sapiens
ctgttgggtttttttttcctcctagcttttattcataagcgtctgttttttggcagcctgataattttttattgaataactgtcattgtaaaaattgtaaaggctccagatgataatcttttagacaggatttattttttcttttcttagacatgttagtgtgggagctgataacttttatccaatcagggactaaagtgaatcaagactgttttaaggctatttgtacatttgatttgtcttcatacagtctagttttactttacaggcatttcaatttagagtcttaaattcttgggacactgtctctggcaaatctcaactctaatccttgtcttgtttgcagtataagacgtctgaaaactttgcctcttggcttcctgctgcatgcaaagtcagcatttggcagaagtcttaaagagcacctcaccaggatcttagccccttggatatcctgttttatctccagcgccgtaaggccaacagaatctttgctgatagtttcaccccatggcagtggctctgtctgggtaaagtgtggattctcgctcttgcattatgcttagaatctgcaaatattcttggggagaaaagtggctgtagtctgtcagcccaatttatttatttatttttgttcgcttttttttttttttttttttttttgagatagaatctcgctctgtcgctcaggctagagtgcagtggcacgatcttggctcactgcaagctctgcctcccgggttcacaccattctcctgcatcagcctcccgagtagctgggactacaggcgcctaccaccacgcccggctaattttttttttttttttttttttgtatttttagtagagacggggtttcaccgtgttagccaggatggtctcgatctcctgacctcgtgatctgcccgcctcggcctcccaaagtgctgggattacaggcatgagccacagctctgggccttgttttcgttttttacttctgtaatgacttgaaatgtcagcccacctttaggttgttctcccttctctagaatcttgtgaccttttgtcc

SEQ ID NO: 24445 - DNA, 1046 bp, Homo sapiens
acatgattgggggctgcatgcaccggtaatcagaacggaacagaacagtacggggattttcacaatgcttttccatacagtgtctggaatctatagataacacaagcagttcagtcatgggttgatttttaactaccaggcccagggcgtggcatcgggctgtctgcctgtggatttcatttctgccttttagtttttacttcttttttctttggaggcagaaattgggcacaagacaatatgaagggtggtcttctcccttagaggcaggatgagaaatgttgacatccttcctgtcacaggaggacattgactggacctgttggaagagggaacacagtgcttatggctacaccagtctagagtggagtttctgactccttgagttaggacagagcagctcctggttcaaagaccacagactctcacttttctcatagtctctactaaattttcttgaataaatgtttcttcatttgttctgtgcttccagcagtgtttttatatttttcaccaaattttctggggagtatgtccatggaactcctcaagttgtcacgctgaaagtttttttcattagtggttcagtctctgctggttatgggggtctgttcacattttcggtttcctcttgagtcagttttggtagttccacatttgtgaattttaaaattttttcttctgttactgatttatagtttcattcaactgcaatcagagaggatactttgtataatttaaatttttttaaattcgtcgagacttgttttgtggcctcggtagcatatggtctgtccttgagaacattccatatgcacttgagaagaatgtgtgttccactgttgatgagtgaaatggctgttaggtctagttattttatactgctgttcaagtcttctatctctttattgatcttcctcgttctctgcatcattgaatgttgggtatttctgtctccagctattattgtagaattgtctattctctctttaattctgttagtttttgcttgatatcgtttggggctctattatttggtgtatata

SEQ ID NO: 24446 - DNA, 1036 bp, Homo sapiens
ttctaacagataagtctaataatcattactctttcagtacatttatttaattaactatgaatttgcctaaaataaatattcaacttttgtttctgctcctgtttctactcccaagtctgtagaaaacaatagtggtctgtcttggagaatgttccacatgcacttgaaaataatgtgtgttctactgttgatgggtgaaatggctgttaggtctagctagttgttttacactgctgttcaagtctcctatttctttttttattttcctggttctgtgcattattgaatgttgggtattgctgtctccaactattattgtagaattgtctattctgccttcaattctgttagtttttgctagatatagtttggggctctattatgtggtgtatatatgtttatacttgtcataccttcttgatgaattgacccttttatcaatatataatatcctttatctctcataacaatttttgtcttaaagtcttgttttgtctgtggtagcatagggttctgcagacttcagtatatatattgtcatgtaatcttgaaaccctcttacacctccagagtgcactacttatgtagcttattctgattgtgcctcttttagtaagttacaaagcagcagcatctggtcactaatatcctggttaggttatgaagaggtaattatgcataccattggatacagtacaagaacagctacctgggaggaaattttatgacatagtacgtctcggcaagaagcactctgttagggatgaagtcttatcagagaacctgttgtctgagatagacgtggagttttgtagaaagtctgtatttcttcttacagagtattcattgcctgttacattccattctatgttttacttgacgaaaacttctggagtctgacagatgggtaactagtatttatagttctaactttgcaaaccttttggttttcatgactatgtcaataaaaaggtgaaggaggatgaaccagatattaactgatgtcattatgtttccatgatattttgtgatttta

SEQ ID NO: 24447 - DNA, 1045 bp, Homo sapiens
ccaagtgacaaaatgaaatggtaagatttttgtttgctttgaatttttgttttttgtttttgatgtgatcatcagctgctcatgattttgttatcatttttcctgaatgagtattaatgtaatttcatattagattggtagtatgttcctaatagtgtggggaattataaagaactgtgaggatgttgacaggagtgctgtttgtgacattaacacatgatttcagtgttctctctctctctttctctctctctctctctctctcgaatgcttttcaagtattatattcctccatgtgagcttattgttttattttaggtgcctgagggtaaacccaaagggattagatgatgaaagtaaagactacttgtccttatatttgcttttagtcagctgccccaaaagtgaagttcgagcaaaattcaaattttcccttctgaatgctaaaagggaagaaacaaaagcaatgggtaagtgatttgcaaactaagtgaagacatttctgtataactacatattatgacttcttctgcacctttacctagaaaagtctgggacttttttctgctaaaatctgcttaacctgaaacttttaatttgaccattatttaaatccagcatagagctataattattttactgagtcttagacttcgtaaaacatgtaaaaatgattaataatattacttcttcatgtcctaaaatgacatccagttgtcacttagaaaaatagttgctgttagggcaaggtgcctggttcagtgcttggcatatataatacgtgctcaggaagcatttctctcttgcctttttttgccaggtaataaaatctgaagaacaatgagaaagagatagagtgccctgatactttgtcactagagttttttgagcagtagattgaacactgactgaaaggagccatttttcttagtttcagggcctattaatttcagtccaaaattcacatatatagccagctgaaatgcagtagcctgagcttcataatagaagagtgatgtaggaaatgtacgttgtgtgtggcagg

SEQ ID NO: 24448 - DNA, 1034 bp, Homo sapiens
tcaagctctttttattagatacacatgcatttaggatttttatgttttcctaatgaattgatctgttatcattaaataatactcttctgtatccctgatgacactctttgtcttgaagtctactttagcaatattaatatacactaccttttttaggcttacattctgatggtacacatttttccacactttcacctttcactatcaacttgatgtttttatatttacagtgagtcttttgtggaaaacacatatgttggtcttagctttttatccagtctaagaagcttgccttttgattggtgtgtgtaaactataaatatgttatgtaaatgttattgtgtaattactgataagtatgaatttgcatctactatcttagtattcttttttatatgtcccgtctgtttttcattcttttgttcgtctcctctcttatgtgtttttttaaaaagttttcaatatcctaatttatttcttctgtttcctttttagctataccttttttcgtttttagtggttattctagacattacaatgtgtatccttaatgaaaaagattagtttacttaatgttgcatcatttcatgtaaactataaaaaatacacaactgtttaatttcatttattgcttccccaccctttgcaccactgttgtcatacactttatttttaaatacattataagccctacaatatcctgttgtagttattttaaatagttaatatatttttttaaaaaataagagaagaaaaatgaaaaaaaaaatttctatttatccacatatttactatttcaatgctctgtacttattcctgcacatctgagtttccatgtagtatttttgcatgtatttatagagcgctggcagggagtttgtgaataagttaatgtttgataaatagaaaactaaagcaaatatacaaacaaaaatatacaatcaagaaatagccatatcaacaagtttggaatttggaaagaggaaggtaaattccagagtgaagagttcagagttggcagggtttgtctccag

SEQ ID NO: 24449 - DNA, 1029 bp, Homo sapiens
gagatataaaaccatcatgcccagcctatatccaaattttctttttatttgtttttgtttgtttgtttgttttcttatttctttctttgtttttgtttttgcttttttttagatgcaggttccactctgtcacccaggctagagtgtggagtgcactggtgcaatttatagttcactggaacctcaagcactcttcctgtctcagcctccagagtagctggaactataggagcatgccactacacctgactaatttttaaaaactgtttgcagagacagaatctcactatgttgcccaggcccatcttgaacacttgggttcaagcattcctcctgcctcagcctaccattatatccattttaatcagaatataatatttaagcaaaaatggaatgtctgagcttctacagaaagcctcctttttcctgcctcttccatttcttgattttatttgtgataattattttttcttttattttctcctcactttattctttaaaatgcttctctttccactaattctgtatttttcttcatattactttttctttcctccttccactcaccctgccattttttttaaataaatggttttccaaatagatgtgtgcaaataacagggagtcaagagtaagatcaagttactttagatagtgtttgttttagaaatagcagtaaaaattcactctataattgttctgtggtcgacaggtttatgcaaacctatcccccaaaccggaggaagctgaaaggcccaagtaagagactgataaatccagtttctcagaaagaaacatttaatagggagtgagaaacagaagtcatgatgtcctggcaattgacaacaacaagattagatagtgaatccccccgtaccattacccaccgcgtatgacttatatgtaaaacatagggaaggattatgtggaacaattgaagtcaacctctcagggaacggcaagaatgctatgtgaatctgcctaagggcaggatttatggtagcagcagttaaaatagaaatcttaaag

SEQ ID NO: 24450 - DNA, 1030 bp, Homo sapiens
ggcaatttttgtgtaattttatggatgaggaataatatcctgaaaggtaaaattgatcacacttaaaatatgtaagaagtaaaattgaaaggtctgttagcaagaggaaaacagtattaaaattcaatgttctaagtaaaaatgtctgattatttccttcctgctttgcctgctttctcatggtaacaaaacattcgtctgagggctataattagggaggggtgaactatctgggaaaatagagaaattgttttgtatctcagccctaacactaagcagagcccagacttccttaaagatagaactgatattagtcagcagcctttctctccttagttatcatgagttcacaccctcttgtaatccactatcaggacatcactgatggagacaatcccttttgctctgattcccacttaacgttttgtctaccctggcttcatagggtcagaagtgttattatcagagtgttgtgtttcaaataacatgtaatgtccataaattctcaatgttaatagctagaacctcacttaaaagacaaaaggagttatcttagagaccaaagacactattgtcttgaaccacatatgattaaatatttaaaatgtctaaggtgtgagagatagaaaacttatgtagttcaattaatactgtttaagtaatagaagacaaaggagagctatagtcatgttgctgttactagtttatatttgttgagtgtttcataccacataaaccatagtatgagagagttattgacacatactaatcccttcctaaaatataccaactcagcaagtagtcagctctgagctttgaggtttggctaccttccctcactttaagagttatgggttccttcacaggggatctattattgaaaagctttccagttagaagtaaattgtaagacaggtccttcatgtggggagcaacactgggaaagtcacaaagaaaaatagaagatttggtaagaaggagagcgcttttattgctattgacacagtgaattgaccttattccctcccaa

SEQ ID NO: 24451 - DNA, 1026 bp, Homo sapiens
gcattaggatttgtggttcccctcttcacattatttttaagacaaattgattaaatgatgtagcatactttgtttttcctaattgaaggacctcaactttctgttactataactttttgttttttttgagagggagtctaactgtgtcacccaggctggagtgcagtggcgcgatgtcggctcactgcaacctccacctcccagtttcaagcaattctcctgcctcagcctcctaagtagctgggattacatgcgcgctctacaacgccccgctaattttttttgtatttttttagaggtgaggtttcaccatcttggccaagctggtctgaaactcctgacctggtgatccgcctaccttggcctccctaagtgctgggattacaggtgtgagccaccgttcctggcctgttattgtaacttttaaagtatcaattagcttgcagaaactgagatatgaagagaataggaagaaagggaaatttcttatctgtgttttttaggctagggaatatgaataaaaggtggcaaaggagtagtgaagacaagtaaaaaattcctagggacttgatttgaatttaagggatggaatttatagaaaaccaaatatagccataatccgtttagttataatttccattataattaaacaataatccacttagttgttgaaatcaaccaacaattaaggggaccctactatgttcgtctcattgtgccaggtactatggagcttacaaaaagagtgtaaagtttttaattgtctaagaaaacagtcactttggaatgataatccatatgctctaaaaatacacattctgaaactaaaaatgcaatataaaaacatgagatacattgattactaaaattaatgatatctgacaccaagtgactttttttttttgggaggcttggcttatcttttaggacttcactaggttagggatgcatttcagattctactccacctagtcttagttcttggccttgtttctttctgaatttattgctgctaaaataaaacca

SEQ ID NO: 24452 - DNA, 1092 bp, Homo sapiens
ggaaatgtttgtgatgaggtttttgtgctttgttttatttttgtttttcaaatttctcactcttaacattgctggttcctcaaagatgatttcacattatcttcatagcaagcagaagtgatccatttttactctttctgtgacagattgatgttttattaaaaagagggcctgcatcttcctaagtaaaataaagcactaaacaaacccttaatgtaggtagtgtcttttcagtgtaattgacacttttaggttggtttttgcaggaactagtaggaactattgtgtgcatgtttgtttccttaatttttttagaagctctgttctgattttgagaatttaccttttatctcttattcttctaaatttatgcccgattttgtttttttgtgcatttaaaaaactagcctataaattctgttgcaagtattggcctctagctgcagtcaccattatcccttctccccgcaaagaagaacatctaatgttagaaatctgttttgcacagcctagttaaaacttgtatttacttgtacctgttttgatgtaattcatcttatgagttagggccagagaactgcatggaactattttaatcttaaaacccgggcatttgtagatactctacacattttgtggctgtaggcaaaaagaattttctgttgtgtgttaggtatttttgaagatgcctaacttattctgggcaatatacagtgtatctttcatgacagtaagactaaaatattaggaagataattagcagtgaagtgaagcataggataattatgtatagaagcaagctttgttttctcagaagtttataagataaaacatttagaaacagctaactacccaacccaataaaccaaatcatttttatcttttagtttcttatgcttagggaaaacaaataagggactgtggaaggcaaaagcttcatctctgtattctaatttgacaatgcatttgatacctgtggcctttcagcatagatattgtataccccttgtttttattgggtagttaatatagtgtcctgagttttgttctgttccaacagtttactcattgttttctgattaatctttaaaa

SEQ ID NO: 24453 - DNA, 1029 bp, Homo sapiens
cagttgcttttgccacagaaattttagttcctcctcaaaatactcattatgcagccctccaaacccttctgttgcttttctctggaagctttccaaaaggcttcctgcatcttgctttagttgcagatagggaactgagagaatgctttcaatggagggttgcattctgctttgataggatttccttgtgatttgtagatgctgtattcctatttatatattatgtttgctctatttttaaaaaactatagcagtgcacgtttctttcatttaccatatcctgttatctactatgatgaccacttcttttctggatttttattcgtacttctttgccagtcagtcagttccagaacacaaatgattttttatctcagatcaaagggatgaattgttaatatgtttaaaattagaatgaaccagtttggttaaagaaatatttacttacatatttcctgtatgtgctttgtatttgatatacctatctgcaatgtgtttaagaatgactgccggtatctctgagattaatgaagaaaaaatttaaacagtcactggagaaagtaatagatcttcaggagaggtttttgctgatatatagtcataatttgctgtttctggcacttttcaaatcatcctcctcgaagtacacactggatgaaacaaatgaaatattgttaggagtatttcgtagttcacagaaaatcttagtggggaatattactgagactgatcagaaagattttagatcttctctcctgtggtacatatatagcaataatgctgaacattattatgaaactctgaattcaggttgcctgccttgtgatcactatagataattagtaatctaattatggcaacattgaagttaatgtcattcatatgtgtttactgtttctgtcagttgacttttcagtatactcactttttttctcattttcagagttggtgtgtgtcatgttctgcttatttatagtattattattatttatctgtaggacccaggaccacccccaccttctccattac

SEQ ID NO: 24454 - DNA, 1047 bp, Homo sapiens
catcttacatacatgttttatggctaggtcatcataactcagaaatagtctcaaaacagaagccatatgtaccaaggtggttctttgtgatactggggaaagcagttagctcttttaatgcctgcctttgcatctgagaaatggaattgttaatataacaatcattatgtttgtctggagtggtggaattaaatgaatgcatagtagatcttttgccagtgaaaattctaatagaaatgttaaataaagataaagattccaataaacaagtctaattgagtggttaaattttaatatccccctacgttgtcagagaaagcaaacaaaaaaacaaaagagcagtatactttgttttagaattggtatttagaggtatatcaccagacttgacttactttcattctactttgagtgtttaattatttcagtttttgtttgatgcattttcagaggcaatcgagacttcaaataattggtttactgttgaattgtttttaaggttggctggacttctcataaaactctgatctaatgtacctctgagctattcttgtgttttgttttgttccgttggtggtatagatttatgatgattctgtcttccccatctcttgcttatataccctggcagctcatgatacccttggtactgacgtcttggctggatttggtgttgcaggctctaccaccatacttagagagtggatgtttctttttccaaagttatcatataagcagtttctttgtcttaatatacctagattttaacctttttacctcctctgttcaatcttacctcctctgttcagtctataaactgtttacatagagtttatgaactgtattacatttttttttggtagctgtaaaccacagtttagttttcagagagaaagtgtattctgttgtgccaagattcataaataagataagggaagaaattatttccatgtgtaaggaagcataaagctcagagaaaggcatttggatgatattaacaagcccgacaacagcaacaacagtagctaacattttattgtatgcttt

SEQ ID NO: 24455 - DNA, 1058 bp, Homo sapiens
actacctcatttcctttgtcagaaatgaaactattatgtacagttctgggtataccacttgagggtttcatatgggagcatgttattgtaagaatattaaggtaaatggctttaaagctattattttgtctacttaaatttagtaatttgttaattttttaaagtactaattgcacttattgtaggttattactattttgaaaataatttcagctttctctaatacttattttcctcctgcacttacaattaatcagtaaatatacttactgttgtattaagggcccatacttataagaataaatggaatgcatattctcttataaatgcttacttgtgagtcttgccctatgaactgcctaaaaacaaacatttttgttttgttaacacatccttctactcttggcacaatatctggtacacagtagttcctactggtagcttgtcataatccatgttagttttagagttaggcatatttgaatttctttacttccatatgtggaattcctttcctctccttttcttgtcctcccttgccacaattttcactatcatgaacattttttctttatctctactgtggctctcattttatctaattaacagccaaattaaatactgttaacaatatggtactcatagtaacaagacatattcccttcttatacaggaagcagtttggcaaaagtgatatattatgaataagcaataatgatccaacacattccagttaaaaatatacttgtaaaaattgttcaggatgcacttaaatttcattgaccggtgcaataggttgttggaatgattaggccgcttttaccagctctataaaacaagtgctacttaggtgacatgtttccctgactttgtttttttggtccttacccagacaattatcaactttccagttttctatggatatgaagatttactcctagtcatcagtgggacccccatgaagtcagccagaaagcctatatccaacttatgtacctttgcaaacttgtctggattttgactgtatgtgcaaaacagattgtacttagcgattcatt

SEQ ID NO: 24456 - DNA, 1030 bp, Homo sapiens
caacaggaaacatcccacctacaatgcatatggcaaaggagaaagatagtgcagcagactacagacaaaaataatagctgagagctgaaaacaagtattctgctttacaaccttagatctgtcatctcaaaaatagagataatctttcttcaaaatataatatggtgatgtgagcatattttaatttataagaaaaatctttttctttaggtatcccatatcatatttttgcattctttatagtggagggtacagtgtctcctgtatgttttaaaccttattatttttctggtgtatatttgttgttttgtcttctagggacacatactatttttactttactaatgtgccaaattttaagaaatttaatacttaaaaaaccgaatatgcaaagttcgtaaagtaaatggtgagaagatttcactgaagaattgctttaaatagaaagctcttctgatgtacttaagtgtttgtaaagtcacttcctaccctgggctaaaagagacacaagaaaactcgaggcttaaaatgttggaaatcactgttgcttgaatagtaagcagaaatgagggtaaatcatttctgaaattttaagtataaactaatgaaaaattgctttgctatagaaattgcattttcatctaattgaatatattcattttattaagtgggttactactgtgtattctttaatttcattatcttcaagattaatttatagagtctatatgaaaatactacgtggaataggagttatattttataaggagttgctgtgttttaaggagttatgttaaaatcacattatctggtgagtatcagttaaccacaagggtactggccagtcagttatgtttcaaaatacctgttacttagtttgagaaaaagtgactttgggcacatattcctgcttcttattttgtaaaagggaatgctgtggtttgtaatactaggctattgtctagtttgattcaaagcaccctactccattcagcctgggcaagatagtgagaccccatctctacaaaaa

SEQ ID NO: 24457 - DNA, 1046 bp, Homo sapiens
tttgtgggtttatttttctcttttgttctagcctcagttttgttatctctgttgtaatgtttattttcttatggtataagactgttattgagtttttttttttttttttttttgagatggagtctcactcttgtagcccaggctggagtgcaatggtgcaatcttggctcactgcaacctctgcctcccaggttcaagcaattcccctgcctcagcctcctgagttgctgggattacaggcatgtgacaccacacccagctaattgtgtattttcagtagagatggggtttctctgtgttggtcaggctggtctcgaactctcgatctcaggtgatccacctgccttggcctcccaaagtgctggtgttacaggcctgagacaccatgcccagcagagatcttttttattgtgggcatttacagctataaatttccctcttagcactgctttttctgcatactataagttttcatatgttatgttttcgtcttaatttatctcaaagtatatctaactttccttctgatttgttctttgacctattgattatttaggagtatgttgttgaatttccacatattcatgaattttccaaatttccttctattaaattctcatttcattccatacagtctgataaacccactttgtttggtttcaaactttaaaaaatatatcggtgtttgttttctatgccataaacatgtgacttatcctggaaaatgctgtgtatttactttagaagaatgtgtattctgtcacttgagtccaggaggcagaagttgcaatgagccaatatcacattactgcactccaacctgggcgacagacccaagagttcgtctcaaaaaaaaaaaaaaaaaaaagagagagacaatgtgtattctacttggggtggagtctcctatagatgtctattagtttctaggattgttcaagccttcttttttcttgctcatcttctatttagatttgtatgttcattatcaaaagtgtagtgttgaagatgccaactgttattgttgaactgtctatttctcctgc

SEQ ID NO: 24458 - DNA, 1040 bp, Homo sapiens
ataatcaaagaggattttattttgatcgttattcctttacaaagtgttcttcccctgtatcataaccctgctttgctgttcgtgatgttaagtctcactgataggtaagattattgtaattatcagtaattggtaatagcattcaaatgatcagtcgctcagtggccatttctttttttcttttagtgtttctctttttaagtccactttatgcttactttagcaaatctaggaaatatttaaaattagaagagtttggcacatttgtctttcctctacccttcccccaactctttccctctacataattgacatcatattgtgcatctagtttttcttactcattgaaaaagggaaatctaccatatcataaatatgttttcatattattaaaaattgtcaaatgtaatattcctttatatgtgtacatcataattagccattcccttaatgttgggccttaggttgtttacagtatttcattattatattacagcagtgagtgtgtgtgtgtgtgtcatctgtgtgtgtaatactttgtcaacatctctatttccaaagactagaattcttgaaaatgaaattcttgaatcagtctatgaaaacttttaaagctattgattcatatcataaacataatttttaagaaaagtgaagttgatttatatatcctagctggcagtatatcacaatatctagactgtatctttagaaagctttagattttctcctctttaaaatctttaattttttcaggtcctcaggattttaaatatttcccatgggttttttttttccgtttttatttccttttgtttgagtaaaatatatattcatgtaccttttctttacatctatagagggcttacttttttattcataaatatgtaaggatgtattttatagtatgcatagtaacattgcattgtcatgatgtctgaaaatattttcccattttgtttacatattagattgaaagcagaattattatagaattgctcaactaattctctttttgttgccatcttaaccttaagatg

SEQ ID NO: 24459 - DNA, 1068 bp, Homo sapiens
tgcttttgaaaaacatccaaattttaattgatgcaagaaattgaaataaaataaatggcagggatagaagttggggatcgttagggttctttccagattgtgttactctaatgcaagtgtcagcacactttttctgtaaaaggccagatagtaaatatttaggccttaggaacctggctcaactctgcttttttagtgcaaaagcagccattgacaatacataaatgaatgagcattgctattttccaagaaaacttttttttttttaatacaaaaacaggcagcaggtcttagtttgctgactcctgtgctacacatattttggatgacactgcctatgtgaacaagggctcacttatttatttttttaagtggagatcttaatggcctctctattggtggcctttcccaccactgtacaatttacacgtcctgaaaagcctgttaatataccagttataatattgctgttttcttattttccaatatctaagccctttgacctgtggactctgcccaacctgttcctgagccaaggtatttaataatcctattcttggatggggattaatctgtctttttagtccagtaatcacgtgcctatattgagtccataagtgccaacaagctctagttttctcctaccattgccaccctgtttgctcagattgaagattgataatatgtctaatactagcaaacttgtttctcctgggttctggtgggactatagcttcttacacccaagcagggagtctttatgctcttgctctttcatatatagggtgaatctaaaggaaacatactattcccaccagctgtcttttttctttttttttttttttgagacagagcctcgctctgtcgcccaggctggagtgcagtggcgcgatctcagctcactgcaagctccgcctcccgggttcacgccattctcccgcctagtagctgggaccacaggtgcccgccaccacgcccggctaattttttgtatttttagtagagacggggtttctccgtgttagccaggatggtctcgatctcctgacctcgtgatcccctcgcctc

SEQ ID NO: 24460 - DNA, 1063 bp, Homo sapiens
ttggctctggtggggcatgaagcctctaggtcagtgcagctccctcacctgcttgatgtaaatctcaagttgtacctaagctgcgatctaagaggccaggaaaaaaaagctcctagatagctatgtgaaccactacatggaacctgcagagactcctgcagaagaggaatacctgattctgccctactcacatgcattagttcttgtcctgtaatattctgggtggacaggtgctcaggatggcctatggttgtcccgtgaatttgcacattcagttgaacctaaggagacctcttagtgggcattgaagatctgactaccttttgtttcttggatcttactgagagagaaatgtaatgaaagaatggaagcaaagatttttgattggttatttcacagtgatgctgtctctgtgtcatagtacccatatgttctgaatctaagagctcttgtcacacaggattgttgaaggaatacttccagcaggtaacttctgtggcaaaaagtctggtgtggctgtacactacagtatttgtgcattcatcaaatattctcctgatcatgtattgataggttccttttttctgtttttatgttttagagactatcttaagaagtcaggaggtgactggtgataattgtaactaattagcacttagtggatacattatttcactcttcactatattattgttctctgtatcatgttgataagattcttctaattttactaataatttgattcttttgtttaagattggacctttaaggtcatttataaggaagctattcagtccttgattataattttaagtaatgcattataaccaataggtgagagaaaatatcacagttttttaataattgaaaaacacttagactaaaaccagtttttctagtagtacaggattcattcatttaaatttttgtctgtgttacagaaacaatgtgtcttctcttttggaaaattaaaatgtatggatacatgagaaaaaaaattcagaatatctgattcccttactcagagatacccagtgttagcaagcatgttttgcattccaaa

SEQ ID NO: 24461 - DNA, 1078 bp, Homo sapiens
gtgtgtatggtttctgaaactttactggccctgaggatttctagagagagatatttgtataccattagtagtatagtcatgtgactctggagtcacatattttgtaactgttaaccataatagattccatcatcctgaagagacaatacagtcaacctccaatttgcatatcagttttgtcattcagaatctgttttctcatagaattttttttacatggtggttatgcatggtgatattatgtttatttaatgtacataaggcataatattagttctatggaacttatgacagtgttttaatgcaaaatatttttaaagtatacctgtctccttacctgaccctggctcatccccaaacataaacaaacccctaccacagcctttacataatttctgagactcacttatcccactcgtgcaattagagtaggaattggaacaggctcagactactgctagagttacatttacccaacaggatacagaataggggtgggattctttttgtatttcctgtcttcactgttctcttcattcttttcttctttagatcttaggaagtgccctgtctaaatcctttcctctttatgctacccgtagttctggtatttatttggaagtaaatgggactagacttccatctgtctttactacctcgcctttatctttaattttgaattacccatttgacccttctctatctctcaatcttcctttcataaggaaggctaatggtttttgccacaataatgacagaaaagaggaagcaaaaatacatgataggtgattgcagttattaaaaaaaactgaggctagaggtagagggaagatgacagataggagacagggctgacctgcagctcccactcggatgaatagaacagcatatggagactcacaccatggacttttgctccaggaaccaccacaggagtataccagaaaaactgaaagaaatcaccaatcctttgaaagcagcagcaggctgctgcaaattctgtgagactggcaaaaaactctggtgctgtctccaaattgccaccttctggctggaggccaaccaactcaggacatta

SEQ ID NO: 24462 - DNA, 1033 bp, Homo sapiens
taaaaaatacagttgctaggtaaagagtattcccatggccaggcatggtggctcacacctgtaatcccagcacttttgggaggccaaggcaggcgggatcacaaggtcaggagttggagaccagcctggccaacgtggtgaaagtccgtctctactaaaaatacagaaattagccaggtgtggtggtgtgcgcctgtaatctccgcttctcgggaggctgaggcaggagaatcacttgatcctgggaggcagaggttgcagtgagctgagattgcaccattgcactccagcctgggcaatagagtgagagtccatctcaaaaaaaaaccagagtattccaattttaaaatttttcatccatattgctgaactactttctcttaaggactctataccaaaatggtttaatttaattgttagagaaaaccagtaaggggtgtggctggtttaaatactgtctgagaattccacataacctctcagcatgctgaaaaattgttggttaaaggtctggacgtgagaataagttacttactgtgtgctgtcattagaaataacatattaggaattaccagtataaactgaaaggaatacttatgtaacagcacaggatattttaccaatatataaaagctatgagctataagataggtttgattaatgtagtttccccttcttttttcttaaattggaaatgtctttattgctgattctaataacgaaaataatgtgtacattgaaaaaaaaagtctactagtatacagagaataaaaattcctacctgtaacagtactccttatagataactactgaagtttgtgtgtatgtatatatgtatatgcatatgtataaagtatctgcatatacatacatatatacaattatgtatatttaattttttaaatttatgaaagtgggatcatactctaatcgttctgtacaagttgctttttaaatatctatcaatatactggtaacatcttgtcagattactacatatagatttatttcctatagataatcatttagatca

SEQ ID NO: 24463 - DNA, 1034 bp, Homo sapiens
atcatggttaaaatcatatttttacctttttaaatttattcctcatattaccttagttgactttctaaaagataaatatgatcataacaaacatataattcagtatataaattctgatgatattccctctgctggaaatacccttcccaatttttcactttcccattcatacttcagggctcatctttggtgtcatcttggaagtctatctacaacctctctggtttctccagcacagcctgatggcttcctatgcttaactccttttaatacttatcactgtgtagtgcaaatgccttacttaattttctgtctctcttactaggcttccttgatgtctgggactgtgtagctaacacaagggctatggctgccacttaataggtcaataaatattgaaagaatgaataatgctataaaatgttttgtttctaaatatttttttaaaggtggctatgaaaagttctttgctatgctgaaaaggaaagtaaaaagaaagatttgtagagtcccatgattagcttagaaggaaatgaaaaatacattggtagtataagtacatgctttcttctctaaaaatccctctttaaaggaagcagcaattattaataaaataaagatgtgttcaagagatctgtttactagccagccagtgcatcatggagaattgtaggttaagaagcaggctgggcgcagtggctcacacctgtaatcccaagccctttgggaggccgaggcaggcggatcacctgaggtcaagagtttgagaccggcctggccaatgtggtgaaacctcgtttctactaaaaataaaaaaaaaaaaaaatttagctgggcgtggtggtgtgtgcctctagtcccagctacttggggaggctgaggcaggagaatcgcttgaacccaggaggcagagtttgtagtgagccaagatcgtgccactgtactccatcatgggtgacagagggagactccatctcaaaaaaaaaaaaaaaaaaaagtaggtgtctttacaaaggaaaagttactaaagattt

SEQ ID NO: 24464 - DNA, 1045 bp, Homo sapiens
cgtattccatggtatatatgtaccacattttctttatttagtctatcgttgatgggtatttgggttgattccatgtctttgctattgtggatagtgctccaatgtatatacgcatgcatgtatctttataacagaatgatttaaattcttttgggtatatacccagtaatgggattcctgggtcaaatggtatttctgcttctagatctttgaggaatcacccacactgtctttcacaatggttgaactaatttacactcccaccaacagtgtaaaagtgttcctttttctgcacaatctcactggcatctgttgtttcttgactttttaataatcaccattttgactagtgtgagatggtatctcattgttgttttaatttgcatttctctaatgatcagtgatgatgagctttttttcatacgtgtgttagctgcatgaatgtcttcttttgagaagtgtctgttcatgtcctttgcccactttttaatggggttgtttttttcttgtaaatttgtttaagtttcttgtagactctggatattaaaccttgtcagatggatagattgcaaaagctttctcccattctgtacgttgtctgttcactctgataatagtttcttttgctgtgcagaagctctttagtttaatcagatcccatttgtcaatttttgcttaacacagtgctgttaactccctggttaaaagaccctactttaaaaagcatgtctacatatattactttttatgcatataatatatatgctatacagatatgtattattgatccttataatagccttgtacttttagtagaacaggttgtagcatcctgaacccaatgacaaacagttgtccaaggtcacacattaattagagttggagcaaaaactaagtcttaagtttctttgtgggactgtccttttttgttcataccacatttctatgtcatggactgtaaatgacagcacaaaaaagcaatgcataaatctttatatgcacatttgcatatatacacatatatgcatgttttttgtacttaaaa

SEQ ID NO: 24465 - DNA, 1074 bp, Homo sapiens
tatgagaatggacatttgggaactcctaaaactgtagaatgtagaatttaaaaactgttctaacctcttagtgactgctcagctgctagtttacacagctaccataatagtgaagcttttggcttttggcctactatacaactggagaagaggatgggattagtgcaaattaaaatgccacaagattcgctcttcatatggaaattcagccacttttcttgaataaatattctttggattattttaagtttttaatttccagagttctgaaaaaggtgattttgacaatgtttgccagtgttattacctcaaagtttctaattcaataaatctgagttagggcctgggaattatttttcctttattaatattctccctagtcctttgtctattcctttttagatgtttttgttcttcttcctttgcctactccttaaatatatggtatttcccaatttctatgggttttataaattctcttgatcccttatacattgtctatagatatgacatgcttgatagaaccagctgaaacattttccttgtgcaccagtttaatgtctcagagacagcccctaatttagcatgtcttaaaatgaacttatcatcttctacatttatttttctctctatatgcccttgtgggcaacactgtacagttcttcactgaatcattaattaattaaataaatatttctttatttattttattttatttttaattatactttaagttttacggtacatgtgcacattgtgcaggttacttacatatgtatacatgtgccatgctggtgcactgcacccactaaatcgtcatctagcattaggtatatctcccaatgctatccctccccactccccccaccccacaacagtccccagagtgtgatattccccttcctgtgtccatgtgatctcattgttcaattcccacctatgagtgagaatatgcggtgtttggttttttgttcttgcgatagtttactgagaatgatgatttccaatttcatccatgtccctacaaaggacatgaactcatcattttttatggctgcatagtattccatggtg

SEQ ID NO: 24466 - DNA, 1044 bp, Homo sapiens
tacaaaaaatagcttggcattgtggcttatacctgtggtcccaagttaccctagtggctgaggtgggaggatcacttaagcccaggaagttgaggctgcagtgagccaagattgcgccactgtactccagcctgggtgacagagtaagaccctgtctcaaaaaaaaaaagaaaagatttgttttcaatataaatgtcatggatttctttattatcccagctctctataacatatatcctatgagtgtctctctacaaaaagaaactatcatatgcggtatacaaagtatgactaagaaataaagtgatttgatttttaaactactacatcatgccatccaaatgaatgttaagtcttccaaaataatcatcttaggaagctgtacatttatcttatgatagaaaaattccttaatcgtttgcatatcctcttttaaaattacctcctcaatctgaagtgcattattttgactatattgatagtttcctcaccttctttaaacttttgctcaaatgttacttcctcagtaagaattactctgaccattctattttaaattgcagtcccccccttaccttgctttctttttcccccctaagatttaaattttctaatgcatatgtaatctacatatttattgtctgcccacactagaaactacgcaacaccgaggcagggtttttgcaatctaatagaggtactttctcaaagagtttgtagatatacaatccagtttttataaaaatgtagcacttaaaagcaagtctaattcagacttaagttgtttttgaacagaaatgtgatctggggctgggcgcggtggctcatgcctgtaatcccagcactttgggagccccaggcaggcagatcatgaggtcaggagattgagaccaccctggctaacacagtgaaactccatctctgctaaaactacaaaaaaaattagctgggcatggtggcgggcgcctgtggtcccagctactcgggaggctgagacgggagaatggcgtgagcctaggaggcagagcttgcagtgagccgata

SEQ ID NO: 24467 - DNA, 1044 bp, Homo sapiens
ctactatccaagaaagatattttgctatgtcatagctatgaaccaaaataacctagcaccaattgattcaccattatattataatagatgctccaaaaacaaatacataccaagggaaaaaagccctgatgatcggactaggtgaaccataggcgcaattaactactcaatgcagggatgtgtgtagtgtaatctatcacaggatactttgttagaagtgagtcttgaagtagaaataataaaaaggaaaaaaaaacagtaatctaaaaatgaaatgattaaatgttataaacactaaacagaattttttaaaggctgatgcttatggttcaaagacttttgaataaagaccaagacttctctgtgttttctatatatttagtaagttctgtaattaataaatcttatcctaacctgcagtgatctctctcatctgaatttccagaggcttcatttttctgtattatatctttgacaaataattgtgtgcagcccctgaacaactcttctgctgttttctgaaactatttatttaaatctcatatggttattgaactacttttgtgcttacaacttcccaaactataagcttcattcattacagtgccttgctaatagtagaaatggccaaaatagtttttttatttgactcaagctgatacaaactcattcttttccagaataagaaaaattaactttactcctatttaatgtatagtacatttatctcataaaactatgaaaagcctttatagcaaatattaacaatttctccttttatgaaacttataatgagttcttctttcaatataggttatgagtggaattttagattcatgttctagagatttggtaagacaatagtgctcatgagggtaagatgacatgtttgtgaaaatgtccagaaacaggtattttcttacactgtgggtaggtataattagtacaactcttggaaaacaactaatcaatgtatgtatgccatacctacattggatacctaccaaggtatgccatacctacataaaggataaaaagatatta

SEQ ID NO: 24468 - DNA, 1059 bp, Homo sapiens
tttttatttttggtacttgtagtagaaacggggtttcaccgtgttggccaggctggtctggaactcctgacttcaagtgatctgcccacctcagcctcccaacatgctgggatttacaggcatgagttaccgtgtctggcctctttgcatatcttataatattttattgaaaactggactttctagatagcatattgtagcaattctgaatattagtcctcaatatttgtcattgttgttggcctgtttattcatttaatgacttccctggactattttaacaaaatctattcaccacctatgtgaagcttctgatgttactcttcagagcacgcagcctttcccatgcatatagtcctcctgggatgacagtagctatgacagactccctttgactgtctctttccttgatctgttatgctgtttgcttctattggtatcatacctacctgttaagctctactaattgctggggtaatgctttattgtttccaataataccccagggaacaaactgctgtagtctgttccaattaaattctgtcccctatactgaactaattttgaggccattctttgaagtttattctgactccaggaagattgttcttaactgcctctttgattctctctggcaaataccttcaagttttggggagtgtttttctgttttgtttaataactgatatccagtcatttcctattgttcaccgagatgacctactacttagcttatttctctcatggagatactagcctccttttgcataccatcagaatcttcattgtttcaagagcactcttgggcttgaattctccctcactctattctcaataaagtcagttctcttggggagagcttcggagttctctgttcttatgatattctcctccccctgggcaaaatcttggaactactagcctgaagctaaggttaggaacagcagcccacttttcatgcagtggcaaacctgttttatgagcagagcagtgtgcagaggagtagcctctaatctcttggcttgcttctcccagcatggaacctgtgccctaagggtg

SEQ ID NO: 24469 - DNA, 1048 bp, Homo sapiens
ctatttattatgtaaatatgtttttaaaaagtgggtgtcattcacacaacttaagtcacaacgtgttaatgacggagaagaaaacagcattaatatgacagcaggaaactgaggttctggtaaataaaaatacataattagccatgaattcaagacttcagagctttcaaaatagccacactaaccagttcataattttgcatgtttagatctggctaaaagaatatttttggcaatatacaataagtcacaattctctgaaatacaaatttgccatgaaaatctaataaaaatgagagagaaaatttgttctcttaaatcttatattacttccattgaatacacacctaacatagtagaacacaatttcagtagtgattttggggttacaattttcacatgtaattccttctgcaggtaaataaaaatataaacccagaacagtaaaaataacataaggtaacagtaaaagcctaccaaggcttttgtttaggtaaacatttatcttaacactggagcttcggaatcctgagaagacccttgggataaagtgacagacacaggtttgattcttcctggtatttcaaacaatgcccccataacctaaggacaattttttgaggataaatgactggctaggagcaccaatgtcctcaggccttgcttggggcctgtaatctcacctaatcattattcactatcccccagaaaagcctcaagctaaaattgtgattgctatttagaactaaacttgcaaattcatttttgaacatccgttcttctgccctcatgacttcattttttgtttaattcatgtgcaccattacatagcagctgcactaagcattaaaacctacagcaacagtcaatgtgttctgagtgctggccttctttattcatttataaaaagatattctgataacaaaaatgcctaaggattacattgcataattcatgcaactggatatctagtcattaaaggggataggaaatgcagtgatagtgggcaatagttcagtaaactcagaattttgcaatacagttttta

SEQ ID NO: 24470 - DNA, 1078 bp, Homo sapiens
catgaagtctttgtccctgcctatatcctgaatggtattgcccgggttttcttctagggtttttatagttttaggttttacatttaagtctttaattcatcttgagttcatttttgtataaggtgtaaggaagggatccagtttctgttttctgcatatggctagccagttttcccaacagcattattaaataggggatcctttccccattgcttgtttttgccagttttgtcaaagatctgatggttgtagatgtgtgatattatttctgaggtctctgttctgttccattggtctatatatctgttttggtaccagtaccatgctgttttcattactgtagccttgtaatatagtttgaagtccagtagtgtgatgcctccagctttgttgtttttgctaaggattgtcttggctatacaggctctttttacatttcatatgaaatttaaagtagttttttctaattctgtgaagaaagtcaatggtagcttggtgggaatagcatttgaatagtattgaatctataaagtactttgcaatagcattgaatctataaagtactttgggcagtatggccattttcacaatattggtttttcctatctatgagtatggaatgtttttccatttgtttgtgtcctctctcactctcttgagcagtggtttgtagttctacttgaagaggtccttaacatcccttgtaagttgtattcctaagtattttattctctttgtagcaattgtgaattagagtttgctcatgatttggctctttgcttgtctgttattattattttgcaaccataattaaccatgtacattattgtgtgaaaagggcttttgcatttggtgttccctctacctgcaacataaattcactgagatgacaatttaatccctctttttcttaaattcttgacgataatggcagctgatcagtagggcctcccttgccatacttattttaaatagcaacttcccatgcctggaatttttgctctggtttccttattttttttcttcatagctcacgttgttaatacacattatatattttaattttcttaatttttaa

SEQ ID NO: 24471 - DNA, 1062 bp, Homo sapiens
gattttgctaaagcatccctaaagtgtgtgatcttttagtaagaaattaataacttagagtggaaaagaagggcacagaatttcaagtcaaggcctgtttattacatcaggcagttttcatcattttcttatacttaacgtgagagccatttttggttctgaattcctaacttgtaggatttcaaagtagtagctccatcaggaattaaaaaatgactttttccctccatcagtgttgtgattctcttattatacatgtagtgaacttcctataaaaacatcaacatattaaagtcacccttgatattggtgattgaatacactattgaaaaacctgctttggcttatattcatttagcttatatcatatacatatgtaccaaatactgtggttgagctaaagctgtagacatagaagatacagtccccattctcaacttgtttaaaacaagcaaactggaccatgataagctaatataataaatatgacaaaagtaagtaaaacactctatggaactatgtagtaagagctgctagcccatatggggtagttatgaaagtcagtgattttgattacccaagttacaaacagaaaaatataaatgaattttggatccaaatcacgttatctaaagataaacagcagttttaataacattaccaatacactgaatgactaggatatgctaagtgttaacaacaaatacaatcttatcatctacattagagatctaaaataataataatgaagattttttcctaagaaaatatttgtcttatttcttctgattgttgggctctttattgttaattggtatacaacaattcaagccacacaatcgaccttttcagagtgacacagcgaaaagaatatgtgtttattaatgaaaatccatgctttactactagaaacacaagtcaaattcgtggcctactaatgatagatcatgaggttcatccttatgtaaaggacagtaacctcatggttacactgtgagccctcactggtgggaaaagcattatgatatgttgtttgagaaagatagtagtggtgaatttgga

SEQ ID NO: 24472 - DNA, 1045 bp, Homo sapiens
gagggctgtgaggactgccagcactctgtcacctctcagcgggaagaccacttgagcctaggaatttgaagttacaatgcactatgaccatgccacagcaccccagcctgggtgacagagtgcgaccctgtcactaaaacaaaataatattgaatcctcatatattaaagatgtattttgataactggatctaaaaatgttttgtactttggggaaagtgaagtatgtatccaaagaattgctttaaatacatatgctgccatttagctcagtttcttcttatttacccatatctgtagatcatcagcattactaggacaggtttttcatctttatactaacactcttctctagtaaggatggagtaaagaaccctggaattagtcttgaaatttgattctcttgtaaaatgatgccataactaagagcaaatcacctgtttcttgagtcttatttataaaataatataaatatctaccaatatatcccaagattgtgaggacctaataagcacatgattgcagaggctctctgagaactgtaaaacattacataactgcaaggtgacattgtatatttcatcactttctgtgaccagcaaggtgagatgtaagaaaagtataggagaacatgggcttaaatcgttagaaattactgattccagccttggcttcctagttctttgatgttgtttgttgttgtaggtgtgtggttctcactgccttagagcaaaagtttgttttttgagagagagagggtcttgctctatctcccaggctggagtgccgtgttgcagtcacagctcactgcagcctcccattcctgcgctcaagtgatcctcctgactcagcctccaaaataactaggaccactgatgtgagccaccacatccagctaatttttatttttttaatagagaatcatagtctcaccatgttgcccagggtggtctcgatctcctaagctgaagcgatcctcctgtcttgcctcccaaagtgttgggattatagacataagccactgcgcctggcaaaagtttttacta

SEQ ID NO: 24473 - DNA, 1091 bp, Homo sapiens
aattggccatactgagtcaattacagtttaggttttccagccctccctctcccccattggttttcaggagggtttctgctagtgggtttctgttcccgtaagttgtgattctgtgtattcacctctgtctccagttttgggtgcgatgcttttgccttgtgacctcacagatttaagtgttgtttattttcagtttgttcagccttttatatgttgttaagatggggtggcaacttctaagtttcttctaagtttcttacgtgcctacctggaaaccagaagtcttacttacaattttgttttcagctttttttccactcgatgtttagacttttttccatatcgtcgtctttgtaattttttattggttgcataatttttgaggttgatatacttaaatttcttctgattgagacaattggatttataactttttagagggtttaacattgataacactgcttgcatttgtagctttgtttttttaattcttagagttctataaaaactttaaaaatctcttgtggaatttttagtgttttaaaaatgtcttcagtagtaatatttgtctttgacagaatggactttaatttcagaaaacccattcagagccaagtatggtcaataacttagatgttattttggttttaaagaagtttttgactgtaaaatgtaggactcttttatacaatttataatcttattctgaagacagtttcagagagcagttcctcaaatgctttctttatttttattggaatatgtatgctccctaaggattaagataacttattcatttatttttttaaaaataaatttttctcaatatttttgttttataatttttaacttttacagcttttaatagatataatgtacatatttatgggctacattgtgatgtagtacatataaatgttagtgaccagatcaggataatagcatgtccatcatctcaaacatttatcatttctttgtggggaacattcagttatccatcaatgctgtagaacactaagacttatgccacctatctagctgtaactttgtatccaataacaaattaattttttttaaagtctcgttttatc

SEQ ID NO: 24474 - DNA, 1052 bp, Homo sapiens
caatgttataatattttattgatcctttccatatgactagtattggtgcttccataactaaatttgcttgcttggatctttaaggcagtcatcttatgtcaaatcttgctcagatattaaggtactcatcattttaaatggattttaattttaattacttatacattatttcagttcagtgagggaaaaattatttacaaaagaatattctttagtgaggtattttatatatggcacaggtaatttaaaatggcactgtctttctggaaagcagttaagcagtgtaagtcaggagcctaaaaatatttatgcactttgatttaataatctcatcttttggaattgttcacaagaaaaataattagaaaaaatgtcagtgatttttgagcaagaatgttcagaataaataagatgtctctgaggtagactataacacaggcattaaaatcatgattttgaaggatgtctagtgccataggaaattgtacattatataatatcagatttagaaaacaggatacagaactctttatgtggaaaactttgaggtttgtttaatcatttatatttatacatgtgcatagaaagcaaaagaataaggaagtttacaacaaaatgctaacagtggttatatttgggtgctgcaattggtgatttttatgttctttatcctatttttctatgttttccaaatttatcatgagctatgtgttgatactataattagatttttaaaataaactttttaaacataagttttggtgtacctgtgtggtatattaatgtgctaattgttattaacattctaagaagttagagttgcaaataaactttttacagtagattgttaaaacttttcattagtttacccatacaaatttattattttaccctacaacttaaatcttttaaatctctaaggcattacaagctcttcagagcattttcctttggcaagtgactttgctgcatatttagcctatcagtttgccccccccccccgcaccattttgatgaaaaataatatccactgtactattcaaagaaataca

SEQ ID NO: 24475 - DNA, 1048 bp, Homo sapiens
aaaaaatttttttgattattcatgtgtgatcctattcaacagaaaacttgggagagttaagtaaggtagattgaggctatagttgccagtctaaactcctttaggtcatattgattagatcactcaattgcatgtaaatgttgattcattaattggtatttcttatgtctgtcttttcttcccaactacattccaggactttgtaacagagatccttttcttattttcccctatattcactgtgactcttagtgcagcattctgcattatagtagatagtaaatatttgttgattgaaatcattgggagaaaggatagcaagcaataaagaaaacagagcaaaattactctaaagtacatgtattatcatgtcatttaatttttcttgactctaatattataatgacttccatggaaatgtctttgtgttctctaaatcaacttatcagtgatctacttaaatatcaacgaatgaaattttgtttacatttctttgagaaaagtggtttctgtaacttagctgattttttcaacaaaagttgtagatgtcttgttttcatttgaaacacacttttaacacagttggtcgcagtagaatttactacatctgaggatacatagtatcttcagttttctgaatacttgtctgatttctagcccatatttttatagatggatttactttaggcgttgaatctattggcttaaactatggtttgtggttatgttagatgaatgttgttctctactttgatttgtaatcagagaataaagtattttcacttcagtgttttatgaaaccagcagtaaaaatcatttatagtcttgcagatggtcctgctttcttattaaggctataacttagtcatcattattattaacatgaataaatcaaagtttttttcattacatgctctccataatatagagaattaagagtggtctcaaagatactaagtctgaataaatggtaaaatactcatgttagaactgtattattcaacaaaaactacatttaggcacttttcttagcatgtgatggagatta

SEQ ID NO: 24476 - DNA, 1035 bp, Homo sapiens
gattttaaaaaataattctttaatgggatcatgagcatgaaatgggatcctgcatcacttgttttaactatttattttgccatgtttacattttgtatcttgtaaaaataaatccaactttgtgtctaaaaagttaaagattcatagctaggaaatgaaattcttgtaatttttttctaaaggaactgtaaagttttcacttggttcattttgtttcacaatttgactagatggactttttggtaaatactttagtggcatttcactgtcaaatatgaagttcaaggcaaaatagtattttctattactgtgcaggggaaagggatggatcgatacatgcaaatttaatgtagtaactcacttttccatatattttgaatgtatatttctatttatgataccaatttataaaaaataattacacagaaaaaatggaataggaaaaattatgcatctagcacatttaaactgtgcaaatatgaaaatttttcgaggattacattttatctgaaggctgcatattttaactggctttaaaactgtaacacatcacataaaagatactttaccaggtatgtattgcattatatcattgcaataattattggaagtctagatatcgagccatcccaggtgttgggcggggggagggttgtggcaagattgtcttttcaattttggagagttttcctgtggctacaaggcaagtaacgggttggaaaaagtctgactgtaagcgttggacaccttcatagtgtagtgttttagtgactttttttatacggttcttgtaaattagatacgtgtagtggtgtttcagaatgtttgtttatgcactagttcagacaactttccctgttacttgttcttgataagtgaaaactgcagggaaataaaaaatacatatcaaaacatggacatgctgcatatgtgtttatttcacaatgtgcacacagtataagtgaaaatttaagggagatgatagcacttaacagcacttttcatgttcacatgctttccaagcattaatgaaaa

SEQ ID NO: 24477 - DNA, 1046 bp, Homo sapiens
gagaaaaaacacccagactcccctaggatatatcctagagtaacagcacttgcttgctcatgtgttttttaaaattttcttaataaatatggctcttggtaaagactggcttgaggatctgtttgaaacaatgttttctggtctagacatttatccaaaagagtttgaaagggggaaaatatacacctctttgatagctacttccttagtaacattgcgctgtccaaatggtagctgcacgtgactactgggcacctgtaatgtaggtagtcaaattgggataagcagtaggtataaaatagccatcaaatttcaaagacttagtacacaaaaagtaaaatattttactaatatttaaaaatattcattacatgttgaaatgatagtattttggatatgttaggttaagtaagttattaataaaatgaatttcacctctttctttgtacttcttttaatgaggctgctagaaaatttaaaattacatgtgtggctcacatttgtggttggcattgtatttttcttggacagcacggctctaacatttagatgtgatattctgatttttttttttgcctttatttcagtttcactttgatatatggagagtctattgtgtgctaagctcagtcctaagcatcatggatttactatgataagacaagatccccgctatcaataacctaagtccaattgggggaaagcaaatttaaaaaaatcgcttcgtatcagtgcccaaagacaagtggaaagaaaacatgggtggagccaaacagagaaagcacattcgattctattcagggaaacctcaggcagagggacaatttgattcttactttgaagctggggtaggaatctgcttagaaaatgtaaaatttgctttttttttttttaaattcaacttccattttcgatggagggggtacatgtgcaggtttgttacttgggtatcttgcacccaggcagggaccatagtacccagtaggtagtttttcaccctacgcccccttcccgccctccccacgctagtagtacgcttcggttac

SEQ ID NO: 24478 - DNA, 1046 bp, Homo sapiens
tcaggaggtatttgcagctgtctacaggaagcattttgaatatcagttagtgtctaatatatgtcaggtgtgtcaaaattatagcacttctgacagcaattatctcacctttgtacagggtatgaaatcaaggcttaggtgcaaagccattggataccatacctgagaccacacagccagtaagtgactaaacatgtaggatgtcctaggatgcagtgtctgagcacagccctttgggtcagtaagcccagtgttgaagctaattctgctattgacccattctcttgtttacctctcccctctgagccccagtcttctctcccacagagagatatataataatgcctactttcaagaatattgggaggattatatgagttgcttcagtttttacctagcacaagggctggcatgagtccaggtaaaaaagtccgtgaccgatggcaggctatcggtgattgcaagttctgcttttccttcgtcttaaataatctcacagtattgcggcttgaaaaggtcatagtagtagatgggactagactgaatataatgcactgtaagggacagcactgtcatataagggagaggattaaataaagtagaattagaattacattttgggaatgaacaaataaaaaatgctgcaggtaatttgggcttccaggaagtaaaaagtaatataaattatgttttcaaatgaaataggtcggtctacattcttttatcagagtcatctagattctgctctctgtgacagcagggactgagtttgtcacagacattagtttctcatcaaccactgcacaactagttcacagtaggtggtcaataaataaatgcttatcaaatgaatgaacagatgaatctaaagcttattgtgtaaggttacttggaaagttagggcagttgctgaacattgatgccattacgtccagaagtttggttgggtttggatctggtttgctttccaaactattattggaaatgtgtgaggtttcgttcctttccctttatccccaagttagttaatggattatttaaggatg

SEQ ID NO: 24479 - DNA, 1108 bp, Homo sapiens
ggattgttaaatactggaaaatgctcccaagatcaggcttccttttgtagactatttctgggaaatgttgaaagccgtttttggatggtgtaacaggtcccagcttagagtacatgaccgctcgtaaatgtaaccattctttcatggaacctttattgtaactgattatttcataaatccttgtgaatgaatctaattctagcacagacttctcagatactatagagttaatcttattaagcttcaatttggtgattttatatttgaagatttaattttttgaaccatacattggtgttgagcaataaaattcgatgtgaggtgattaaatggcctcacaatatgaaggtggagttgatatatgggaagttgatgcttgctgctgataacgataaaggaagaaggtatttttatgctaagttctaaaatagagctgatgaaaatgctaatgaaatcaggagtgtctgggtgcttcagtattgaaaaaagagtctttacctttgggaatctgaactatgattgagattgagattgtttttaaatactcaattggatatttttgagattatttttggattccagacattggatgtcctagttaatttcattgatagccatcatttctatcattctggtttttttcatataattatgagttcatcattagggtgataagagctaagggagtagttgtatgactttggatgagtgactgtacttctttgggcttcatttttctaatttataaaatgacaagataagctcagacagtatcaaaaattgtcggctcagaaattacttgacttctgcacatttgttttagatttatccttataggtacaggtacttttcttattggtcatgactatgaattgatatagtaattcttttgatataggaaaatgaacagatcaagggaatttgtttcagtggttttgtatttttattcctaaaatgccatttaattttcacaaggtccctcctggtagggctctgggatgggggaaaaatatgactattggagccttccccagtccacagttctagaatatgacagctctgaaaagccagaaaacagaaaaacccatatatccccagctcaatcatg

SEQ ID NO: 24480 - DNA, 1080 bp, Homo sapiens
tgtgtgtgtgtgtgtgtgtgtgtgtgtatgtgtgtaaagtgctaagaactgtgcattgacatccaaacatttcttgtacaaaatttccctagcaaagcaaacctgctttgacttaatttatttgttaaatgttgcactttgtttatgtatgttttgtttttggtggggaataaggagagagaggacgacaaattctattgaagtatttattttgtgaagatggcaattttgcatttgtttaaatttttttcattctttaattttgttatcagtgccagcccaatatacctgctctaccattatttgcggtctgataaaagggtccttgtggggcaggttttgcaaagcttatcaggtaataacatatgccacataaccttgttgatatgtttgcttctgatttgggaagctaaacattggtgtttgagaggattgccaattattaattgtcattaccactactctccattactttttgtttggaaattgaacaaaggtcagtaatggtttttggctcttgttaatatccatcataaaatagattgttttagattctttccagggtgatttttccctgggtaccccgtttctacttctaaagaattgcttggcactttcatgtttcaaagggaaacattcgcttgtagttccattttacttgatctctacaagggactgacaacatttgctttacttttattcacagagaaagttggctttgatgtctcttaaagataattctgctagttgctgatcagccagtcagttcacctagcttcaatctttataggacttctaatctaattttcctatagtgtgactaaaagggaggcaaattattggaacggattattcaaatggatccttaaatattgctatgtataataagccagttattatatcaggaccatgttctctgtaggccactttctaaaaaagccacatatgtgcaattttcaggtttttagactattgctccctgtactttaaatgtaaaaaccacacttctgaacaactaagctcatgaatatgattttggttatatgcagcttttgactagcatgtattgtgtctttttct

SEQ ID NO: 24481 - DNA, 1599 bp, Homo sapiens
tagtaaacaattctcctgatgctaagtccaaagagcgataactttggtagttgcatttagtaggaaaccagcctctaccatgaactgctttgaaatcatgtatcctattttcatctgaaatgtgaagtgagtgctgcactttgtttctgctttatatggtagacattggtggacattggtgctggacttttggaatcagattgggcaaccaaggatgccgcttctcatgatcctctatcctcaatatctagttagcaaagaaattggcaaaaagacatgatcactaatgctggaagaaagcagaagtggagggcagcatattttcctgttttcagcaacaatactgccatgggctggccaggatcactggaagaatgtgagggaatgaggtagagagaaatgccttgggcagtcatttatttcacaaatatttattgagcatctactgtgtgccagacactgttctaggtgctggggattggagcttacagtctactagatggagacatttatttatgttttgtctaataagtcaggcggtgagaagtacagaaataaaaaataaaatagatccagacaagagtgcagtcattagaaacaaactggatatagtgctggaaatcatggcttattctctcttgtttccagcagagctatatggtctaagcaggtagggttttgggcaaaaaggacaggtgttcatgtggaaaaagacagttaaatgttaaataactcaattttataggatttctttcatgcagaatttctttgattgtttgttataactcacattgttcctaaatatgatttataatgacttacaaaaacatggtaccaggtcatgagaaataaatgtagaaacatgagcaaagggaaaataagggtcatttctttcatcattatgttccagaattgtttagttttggtagcagggaaaggaagaaatacggtggttacaaatgtggtgattcatgctcagggttcattatttaaaagaagagaaaataaattttgatgcctcaggaacttgtactttcttttggtgtttaaagaatcaattttatttgatagaaaaagtggtctctttactaaggacttgtatgaaatttatctcctgaattcaaagaaaactaacttcttttgggtcaatataaagtacaccaaaagttaacagatcaaaagtccaattccaaagttaaataatatgctacagatacaaattgatgagaggttatgtttggacccattactgcctggaaaaaacagaaacgcaaataaaattttaaagtgttgaagtgttttgcagaggtaattttaactacttgcttttattgagttttcttgttgttcagtacaataatttggatataagtcttgtgtcagaaatgtaatttgtaaattacttctcccagcgactgccttgtcatttttattcccttaacaatgtcttctcagagcaaaagttttaattttgataaaccagtttatcgattttttaatacatccaacttttattgttgtattgaggaattctctaactaaccaaaaagtcttgaacatttctattttcttctagaagtttcatgttttatgttttac

SEQ ID NO: 24482 - DNA, 1037 bp, Homo sapiens
gagaagaaaacgagaagcccccataagcccatttggtgtccattcttctctattggcttgtttcaatggaggcttctgccttgatggaaatgctgtctgccaccccatacagtagccactgttcttgggaggctattgagcacttgacatgtggaaagtgcaactgaagagttgaattttttaattttgatgaattctaattaatttgtatttaaatattcgcatgtgtctaccagctagtgttggacagaatagttttatgatttctataatatggaggtatgatagatacctttcattcgtacatacatacatacatatggaggtaagatagatacatagttaaaaaaaacaaaataggatcatactgcacattgtgcttttatattccttgtcttgctaacagtatatcataaacataattttaatgaccgaattgtattctgttgaatgaatgtaccataaatagcttaacaaagtcttcattgtacctttaggatatttccaatattttgatactataaacaacattgcagagaacgtgtttacagctaaagttgtaacattcctaattatttactgaggttaaattcttaaatttgaactattgggtcaaatataatacccattttcaaacctctcttccaagaagttctatcactgaacattttcatcaatagtatatgaaagtatctcactgttattatttaattgagatataatacacgtaccataaaatgtacctctttaaagtatacgattcagtggtttctgatatatttaaaaagttgtgcaaccatcatcactacctaattccaggagggttttatcactccaaaaagaaatctcatacccattaacaattgcttcctgttcccacctccccccattccctggcaaccactactccactttctgtcttgatggatttgcctttgcctgctctggacatttcatatagatagaatcctacaatatgtggtctcttgtgtctggtttctttcacttggcatatgctttcaaggtttgaggttcat

SEQ ID NO: 24483 - DNA, 1061 bp, Homo sapiens
gtttttgattttagttgcagttacttctagatagatctaaaacatcaactttaatgccattaataggaataattatagcacatatcagcctgattctccaacctacagagcagaggttgagttagtgataggatgataggtgataggaagttctctgaggttttctccctgcttccagcaacacgaacctgacttctaagggcacgcacaaaggcttttggcaatcaactgtgaatcaaggtgtgctgatgggcccttccagcctcagagaagagtaattggggtgaaaaaatgttattataataaaactataatattgctgtgattctagaaggtagctaaatgaagggaggttccctctttgaagaaaaatgtgaactaagtggtttctctgggcctaccacttactttcctgggaaaaggattaatttgagttaacatttattgagcttccagaatatcctatgaaatgctttaaaagtttaaaatacaattttttttctgaatcggtaattgactcatatgcttcaacatttaaaggcaacaaaagaatgtacagtgagaatcccccaccccatttttcctcctccaggcagctagtttttttctgcaaggcaacccatattagcagtgtcatatatattttgttaatatacaatatagtgtgctcagtcagtgttaataatcttaaagaaaacaaaatgccttttctctttttaaggacttcgtatttcataaaacatggtgagccaatcagtcatatggagctgtattttagaaacttttattataaatccagtgagtatataattcctagatgctccattaactttatgcttttgatttttaaattcagaaatcttccttctcctctatttccctcccattttataaactgttctcaaatctttggcactcactgttgcttccttatggggcagtgccagcgctgattggataagtagtaaacaaatattatagtaatagaaaaatgtagacacagacaatcaagtgtagattgactgtttctatttagatgggtctatatgtttatggctgtg

SEQ ID NO: 24484 - DNA, 1071 bp, Homo sapiens
atgttgcttttatttggatggcaataaaaatttaagataggcatattctggatcatttggatgactaccttataactgagtactgtgacatggtttccgtgtctgcatctacattaggtttgtgttcaaattagtgtcaagcaggaccactttcaatgtggagtgttcttaagaaaaaatcacggtagatttagtttgatcccagagcactgtttacattcaaagagcaaatgcccacacagaaggctgatgaagaaaggtttcacagtagttccagaagggaaggtggcaggaggattcagtcatcacatggaacaggagtaaatgcttgctgagctccagagaatccatgccacagtgatcagtaccatacagctcctcatttgggcagcagtgtggtttcagcagaacatcattcagcatgttaaattaatccttttaacttaacttgaatgctattggctttatggttttggttgtatttatttatgcatgttctgtggtgttggtagatgaagggtagtatgtctaaggattttgggcctggttttatgttgattgttttctaagtaacaccctaataatgataattagagttaacattatgggaattcaagggaagatctttaaaaaaagatctgtacgtaactaaagttggacaattactacgcggaggaaagggcactgaactgataattttggcctttgtgtcctcttcatgagaaaaggaaagaaaagagaagggagggaggaagaaaagaacaatttaaaaatgctgtacacgcctgtgatcccagcactttgggaggccgaggcaggcagatcacgaggtcaagagatcgagaccatcctggccaacatggtgaaaccctgtccctactaaaaatacaaaaattaaccgggcatggtggcacgcacccccagctactcactcgggaggctgaggcaggagaatcgcttgaacccaggaggcagaggttgcagtgagctgagattgcgccactgcactccagcctggccgacagagagagacttcgtctctaaatacatacataaataataatttaaaaa

SEQ ID NO: 24485 - DNA, 1031 bp, Homo sapiens
cagttgttcaagaacgttactcatcgtcagcagtggctctttccttatctttttttatctctggtaggctgattactctgagtgcaaaccttttcactgttccagagaggagcctgacaaccacattctccttctcaaggtaagaatggcagctgttacaacagccctcggcttttcatttgggagctctggttaagttgttgggaatggactcctgaaagtcccgggaccctgtgtttttcccatctccttggcagtttgccaggtttcccatcctaagccctcactgctcactgtgatcctgcggtttggaagcctggcttgtgcttaagttacaattctggtgaaccaaaaaggggagtccccatgctcagcgaatggttggtagatcaaagacttctctgcttaccacagaagctaatttggtcaattgaaagagaacttcctcagagtaatcttctcagtgacagatgggggtgcgtcgggggtgtggagcaatgttcaaaagtgtctgcattaagtgaaatacattgccgaatacacttagaacatgtgtgcactaattattgagcatttgtagttacagaatctttgcatgttaagccttagaaaatatttactgatctaaaacaggacgagagtgttaccccaacaaagaagagagacagcatagatggacgtgggcacattgaaagttatgtgtttaattgatgattgctttttacttgatgcattttgtcttttggttttaggtgtggtgcttactgcgcaggctgaccaggttagtgtgtcaggcctgattccatttttttaggtgaagacatcaaatcagaggtttggtttttctgagggcaggtggcaaatgccaaggaatgcctgtgtgaggcttcggggactgggcctggttgtctcatggtcttcttcttggctatcaaggctatcaactaccagcccagaggccttctgcctgtcaaacaggcctcccactttgcatctgatggctggaagagagggaggaaacatgcaaagga

SEQ ID NO: 24486 - DNA, 1029 bp, Homo sapiens
gagagagcctggaacatcccaatgccattcttcaaatgcatttccagctactcatttggtggggaaatgcttttatttttccattgttggatctctgtttccatcaaatatgtagccatgtggctaaggtggtaactaacaaagctggctggggttatgtttttagtatcttggcagtaaagagagatgtttatttggttaccttagctctgctcccatttggctatttccttctgtctcttattccccttcactttgtttctttggcagccagtagcattgctctttgtaaagaaaatggatgtaaattaccaggggaaatgaaacaactcatacattgatttttggcttagaggcccgacattttgggagtcaacagcaggatgctttgctttgggatctgcaagggattggagtagatggctaatgctctgtgggcaaatctcatgcctgccaggtgcttcttcattatcccttccatgcaatgagcaactttagcaggcgatgtgcagagactgtttataggactgatggtggttcacgaaatctgctgcccaaacaagagagctcaaactgcatcttctccttacacaacctggcactgtatcccttctgcaagagttttttttttttttttttgtactattgaaagtgaatagaactggaagtaaggtaatgtttattgagcacttattatatgctaggcattgtaaaacacactttgtacttaattaatgtaattttcactgtattttttataatttactctgtactatatccctaacatttaagtattactgtcctgatttatagaagagaaaattgagattccaagaagtattttttttttcaggttaaacagttcctaatagttcttaagttgaggatctcagaaaaatatccttgactccaattaaatctaaaatacactaagtcttaagactaactcgtgttccattaggggccagaggtttaaatactcaggctgagaagcaattaggcttccagcacagcctttccatgtggatt

SEQ ID NO: 24487 - DNA, 1055 bp, Homo sapiens
catttttgccatgagcattgagttactactgggagatgttgaacttgcagtgtaataaatattggaggagaaatgctttgttcactcgtcttgtggtaagcaggactgattgtattaaattacagacaattcggatgttttctgattttgcatgggctcgatctctatggcctcatcaaatcttcacagcaggaaggcatcaagagagatcctcttttttctcctgttgattataagccaaagggaacaaagatttccaggcaatatggaaattcctttgtgacacaattgtaggggaagggaaacccccacattcttactggtccaaccagtgcaagctgcgattcgatcatttcctttttttccctcatgtctaggagtttattctaagaaaataatggggcatagaccatataatgtagtagcaaggatgttgctcacgcattatctagaacataaaaatttggaactccctgaaatgagtaataataagaagttgaaatgggggacatggccctttaaaataacctacattttgatctgtattgataagattttatagttaaagcaaactgggttaaagagaaaccaacttctaacatatggaaacacttctttcctctaattctctcgagaccttgcgctatttctcagatacctgtccacaattttcccattgactttaatagcttgaggagaagctagcagattcagagaaggcctagagcatttggccagttggcaaagtgcgagtaccccagagccccaggtttcaatgtttgcttccttctcttcacccttcttcagcacccagctttcacatgcttgctttatacttcttaaaacctaaatgaccactttcccctacagtgacacattcttagcatgtccaggatacattgagcaagccagcctctctcaaaggcagttcttttgttcaccttatcttctaactggctgaagacttttaaaacctggcatatgaaaccaggctgcttcaattcaaattttgagtctgccactttctataatacaattataggtgacaattgatc

SEQ ID NO: 24488 - DNA, 1093 bp, Homo sapiens
tcaatattatgtgagattcatccatttcgttagatttagttgtaatccgttcattctcattgttatgggaacagatactataatttattcattctgtcgctaattgacatttttacagcgtgtttgtacaaatagttcttctatgcacgttctaggacttatcattcttgttggatgtatattgaggaatagaattttagcttcatagaatatgcataggtttacttttagtagtcctggcaaataattttgagaagtcatgatagtatatgaaaattgcactactggtagaagtgtagtattatttctcttttaaatttgatgagactattcaaattcaatggaagatatgttatagacgtcgtagaactaaattaaaatgttttaatttggttcaactttgaatggaagagcttagctagatatattcttcctacccatccatctctgctggtaatacaagagtttattagagattaaatgcctgctattgtgtgcaatgccctgtgttatatgttggagggaatgcagacaccaacaagaatgggcctgattctcaagattataatgtataatacaacagtagatctcaaccaggagcaattccctcttccctgcccgaagtatatttgtcaatgactggagacattcttagttgttactattggcagtgacattggcatctagtgagaagaggctgttggatgctttaaatgtcctacaattcacagagcagtctgcccaaaacaaaattatctagcccaaaatgtcagaagctgaaaactcccatttctggaaagatggaatggatgtacttttctattcctcctgctaagtatgacaaaaaattctgaacattatttattaaaaagcaaaccaaagacatgaagggactctgaaaggtgtaaagaaaatgacagactagggacttcaagactcaaggaacaacacagtgctgagttcactaggttttctttcagtctcatatattctagacttgaagctaaagaagtcaacatcctgcaaatgccataggcactggcaaaataaccccccaacagaagtttgctctctagcagaaggaccaggaagg

SEQ ID NO: 24489 - DNA, 1032 bp, Homo sapiens
taaactatcaaattttgctactggctgcctgccctgatcaaagatttggaaaagtgtggtaaagacagctggttgttaaataaaactatttacaaatcctttagttttcccttacatagacacatatgtggcttttacctgacagaacctcggaggtgattcccccctcctcacctttttgattcactgtagaaatcaaacaaaaatgttagtagggcagcgaggcaggagaatgtcagttacccgaatggtgccacaatggaaggagtcataaggctacagcattcaaagaatctgaagcatttagccaacttagaggacctggtgggaagctaattcaggatttccttgcagagggaccttgtataacaggaattatttcattggccgactttgtattcatctgaagcctgtttatagagcaacctagaaacttgcgcagccaggctgtaacagagctttgggaggacgaaagggactcacaggttgctgtgtgctcttggaaaaggtttgtgactccaggctcttggcagggttaagtaatttgtctatgatccacagacagtacaggcccacttcgttctctgctaagaccaagaaatctctgaaaacacagttttttcataacatatttggggatagaaccagaccggaattgacacaaggctatttaacgttttagtgtgtgcattagtttgctggagctgccataacaaagcatcacagactgggaggctgaaacaatagaatttcattttctcacagttctggaggctagaagtctgagatcaaggtgttgaaagggttggtttcttccgaggtctctccttggcttggagatggtcatcttctccctgtgtttttacttggtcttccctcttgcctatctgtgccctaatttcatcttcttataaggatagtagtcatgttggattagggcctatgctaatgttctcattttgacttaattacctctttaaaaactgtttattaaaccaatcacattctaggtactaggggtaagcacttcaa

SEQ ID NO: 24490 - DNA, 1034 bp, Homo sapiens
gttgttttattttctctcagtatatcctcccctctaatctgaattttgtgtttttgggagaagtttggtatcagcattggttctctgatctgttctctggatatacatttaattttatgattgatgagtatattgttttctctagttttatatttgagactttaaagagtatcacctattctatacaaaattaaaactgcttgtttttcagaggcaaatgctctagaattgctttcaaaattgaatgataccattaagaattcagacaaaaatgtacgtactagagcactttgggtgatatctaagcagacatttccctctgaagtggttggcaaaatggtgagtatagtttttgggtatgccatcttaactatatgccaattaaaagaaaaaactataatgccaataaaaacagttcaggcttatttcatttgtatttatttggttcgttttttaggtatccagtataattgattcattagaaatactgtttaacaaaggagagacgcattctgctgttgttgattttgaagcattaaatgttatcgtaaggtatgcatttggatgttgtgcaaattgaagaatagttttcataaatttagctgaaggagagggtttttgggatttaaatgagagacagacattaaaaggggggaatgtcatttacaccaaacgactcaaggacaaaaagtaatagaaaaaagatggaagtagatatgtgtgggttactaggttttttgtttatttttactgggaccatgttcaaggtgaagtcttggttatgttcctgctagtaacatacacagttcaggtttgaaaaatatcttaaagtttgtgtaaggatttaaaaaataatgtaaactcataagtgggcttgggttgtttaggaaggcagtcagtgtttagcagggaatagagtaccttcttcatttttgttgtaacaggcatgccaacgcataaactcttttaagtgtaaactctttgatgacatttctgtcttccctgttttttgttctttaaaattttcttgttga

SEQ ID NO: 24491 - DNA, 1776 bp, Homo sapiens
ttgctttcatttgtagacacccaaagtggcaaagaattggagtcacacaacgtgcatgtttccagctgaggtcaagcaaggttacgctctgcctttttgttttagttctcataccttaaacaggtgtcctttttataatccatgtaatgccacatttttcacttttctgtgcttttcctggtggtttcactgtttaaatttggaacctaaagcttgggtccaggtgctttctagtttgtgttcctaagcaaaggaaggctgtgatatacccaatggtgaaaataaactttgttcaggcatgatttatagagctactggctgtgagtttgatgttagtgattcatttgtataaaatatcttctaatagacgttaagcaggttatatattgaacagctgacaaaagtgttgtgtccagagaacctaaccctgtatttcccatgggagtgatcactcagtatttgccaatttagtgttcaaggctactttatataatagaaaaccataactactatgaataatgagagagaatcaactgtatgttcaatgattaagccaggttttgggtggtagggggtgtgctgcttttattgtggtaaatatacatgttctaaccatttgtaaatgaacaagtcagtggcattaaatctattcataatgttgtaagcatcaccactatctatacccaaaacctgtgcatcatccctaacaaaaactgtacccattaaagagtaaacttcctctgccctcctcctgcacccagacatcaccctttggtaatgtctgttctacttcctgtctctgaatttgcttattctaggtacctcataaaagtgaaattataacatatatgcccttccgtgtctggcttatttcactaagcataaagtttttttatttttctctgagacggagtttcgctcttgtcacccaggctggagtacaatggcgtgatcttggttcactgcaacctctgcctcccgggttcatgcaattctcctgcctcagcctcctgagtagctgggactacaggcatgtgccagtatgtccggctaatttttgtgtttttagtagagataggatttcaccatgttgaccaggatggtctcgatctcctgaccttgttatctgcccacctcggcctcccaaagtggtgggattataggcgtgagccaccgtgcctggaagcataaagtttttaagatttatccatgtcataacatatattaaagttggattcttatggctgagtaattgtatgtatataacacattttgtttatctgttgagagacatttaggttgtttctaccttttggctattgtgaataatgttgctgtaaacaccagtgtacaaatctgttggagttcctgctttcagttttttgggtatatgcttaagagtggaattgctgggttatgtagtagttctatgcttaactttttgagaaagctccaaactctttttttgagacaaggtctggctctatctatcacccaggctggagtgcagtggcacaacctcgctcactgcaacctctgtctcccagtctcaaaccatccttccatctcagcctcccaattacctgggactaccacccagcccggctgatttttttttttttttttttttttttttttttccatattttttgtagagactgggttttgccgtgctgctcaggctggtctctaactcaagtgatccgcctgcctcagcctccaaaattgttggattacaggcatgagccacttgaaccagccagcaccaaactcttc

SEQ ID NO: 24492 - DNA, 1035 bp, Homo sapiens
gaggcggaggttgcagtgagctgagatggcgccattgcactccagcctgggcaataagagtgaaactccatcaaaaaaaaaaaaaaaaagtaaatacaccattctcagccaggcatggtggctgacgtctgtaatcccaacactttgggaagctgagatgggtggatcacctgaggtcaggagtttgataccagcctagcaaacccgtctctactaaaaatatgaaaatcagccaggcatggtggtgcacacctgtaatcccagctactcaggaagctgaggcaggagaatcgcttgaacccaggaagtggtggttgcagtgagccaaggttgtgcccctgtaccccagcttgggtgacagagcaagaccctgtctcaaaaaaaaaaaaaaaaaaaaaaagaactatacccttctttttgctttttgataggtaacaaaaaagagaaaccaggttctgaagttttgactctcttattaaagtctttggaaagcatagtaaagtctgaagtatttcctgtatcaaaaacgctggtaagtataatacccgtatgttggactttaaaaaccattttctgaagttaaattttatatagaagatatttgcacaaatctagtttgggaagacttttttatatcaagcattcatcagcagtttagtcctattgcaataagtgccattctattaactgtagagtcatttgaaacctttttaatagtgactataacaacagccacaaaagtcttcaacgtggtaagaaaaaagtatccgccatacagagaaaaactagggtaaaggacatgaaacttgaactgaagaaactcagatgtcctttaattttatgacaagattgctgaaaactactaatagttggtactttgttttcaattaactgtttttaaccaagataatgactttggtattaaaaccccttttttttttaaacccgtgtagtacaggaagaaaagtgaattggatatgattttgaggatatgggcatctcaaaataagctccagtggaacaaacaataccctt

SEQ ID NO: 24493 - DNA, 2287 bp, Homo sapiens
caggaggagcaaatggacagtgacattgtcattcctcaagatgtcacggaagactgtggtatggctgaacatcttgaaaagtcctccctttcgaataatgagtgtggttctcttgacaaaaccagtccagaaatgtcaaacagtaataatgatgaaagaaaaaaagctttaatttcatcaaggaaaacatcaactgaatgtgcatctagtacagaaaattctttcgttgtcagcagtagttcagtttctaataccactgttgctggaactcccccataccctacaagtcggaggcaaacctttattactttggagaagtttgatggttcagaaaatagaccttttagtccatcccccttgaataatatttcatcaactgttacagtgaaaaataaccaggaaaccatgattaaaacagattttctaccaaaagcaaagcaaagagaagggactttttcaaaatctgattctgaaaaaatagtgaatggaactaagagatcaagccggagagctggtaaagctgaacaaacagggaataaaaggtctaagcccttaatgagatctgagccggagaaaaatactgaggaatctgttgaaggcattgtagtcttagaaaataacccacctggtttgcttaatcaaacagaatgtgtgtcagataatcaggttcatctttctgaatctacaatggagcatgacaatacaaagcttaaagcagcaacagtggaaaatgctgtattattggaaactaatactgtagaggagaaaaatgtagaaattaatttggaatccaaagagaatacacccccagtagtaatatcagcagatcaaatggtaaatgaggatagtcaggttcagataactccaaatcagaaaacccttagacggtcttcaaggcgacgttcagaagtagtagagtctaccactgaaagccaagataaggaaaatagtcatcaaaaaaaggaacgacgtaaggaagaagaaaaacctcttcagaagagtccattgcatataaaagatgatgtgttacctaaacaaaaactgattgctgaacaaactctacaggagaatttaattgagaaaggaagtaatttacatgagaagactcttggggaaactagtgctaatgcagaaactgaacaaaataaaaaaaaggcagaccctgagaacattaagtctgagggggatggtacccaggacattgtagataagtcctctgagaaactagtcagaggccgaacacggtatcaaactagaagagcatctcagggtttgctttccagcattgaaaactcagaatctgatagttcggaggcaaaagaagaaggttctaggaagaagagatctggaaaatggaaaaacaaaagcaatgaaagtgttgacattcaagatcaagaagagaaagtggtgaaacaggaatgtataaaagctgaaaatcagtcacatgattataaagcaacttctgaagaagatgtaagcataaaatctccgatttgcgaaaaacaagatgaaagtaatactgtaatatgtcaggattctacagtaacttcagatttgttgcaagttcctgatgatttaccaaatgtgtgtgaggaaaaaaatgaaactagcaaatatgcagaatattcctttacaagtctacctgtgccagaatcaaatctaaggactagaaatgccattaagagattacataagcgagactcttttgataattgtagtttgggagaatcctcaaaaatagggatatcagatatttcttcgctttcagaaaaaacttttcaaacacttgaatgccaacacaagagaagtaggagggtgaggagatctaaaggttgtgattgctgtggggaaaaatcacaacctcaggaaaagtcactcattgggttaaagaatacagaaaataatgacgtagagattagtgaaacaaaaaaggcagatgtgcaagcacctgtaagcccatcagaaacttctcaagctaatccatattctgaaggacaatttttagatgaacatcatagtgtgaattttcatttgggtctcaaagaggataatgatactattaatgattcattaattgtttctgaaaccaaatcaaaagaaaacactatgcaagaatctcttccttctggaatagtaaactttagagaggaaatttgtgatatggattctagtgaagcaatgtctcttgaaagccaggagtcacctaatgaaaattttaaaactgttggcccgtgtttaggagactcgaaaaatgtttcacaggaatctttggagacaaaagaagaaa

SEQ ID NO: 24494 - DNA, 1050 bp, Homo sapiens
ataccaaaatgaaaaataatgaagaaatgatgatcggcgaggcaatggctgaaactggccatgatggtgaaacagagaatgagggcataactaccaaaacctcaaagcctgatgaagctgaaacaaacatgttgactgcagaaatggacaactttgtttgtgacacagttgaaatgagcactgaagaaggaatcattgacgctaataaaactgaaacaaatactgagtatagtaaatctgaagaaaaattagataacaatcaaatggtaatggaaagtgatattttacaggaagatcaccatacttcacagaaagtggaggaaccatcacagtgtctggcatctggaacagctatctctgagctaataatagaagacaataatgcatctcctcaaaaactaagggaacttgatccttcacttgtgtcagcaaatgacagtcctagtggcatgcagacacgctgtgtctggtctcctttggcttctccgtctacgagcattttaaagagaggactaaaaagatcccaagaagatgaaatctcatcacctgttaataaggtaaggggaatgaggctaaatattaaggaacccagtatttggttgggatattttggccatacagtgacctctggtgaatgacaaaatattacaattatatggccactcatttgattatttaccataatggttgctagggaaaaggtaggtagaagaaaaggtttcgaaaaaaggagactgaagccttttagataagtctttcattttacaacactaaagatctttatgcagctgtgcacattgttcacctttggcaaaattgataaggctcctagcatcttttctgctccccataccataatatcatatgaggaaacagatttaggaatgcaggcaacactgccattgataaagcagatttagtagttgtgtgttggaacattatgctgttttacgttttacatacatgttccagaccatatctaattaaaaaaaaaaactcatgtgccttcatcaacttgtagatgtgatcttatttagttatttatatccc

SEQ ID NO: 24495 - DNA, 3046 bp, Homo sapiens
tcccataggaaaaagtgttaaaacttctcctactacacaatctaaggtaagctataggctttaaaatatacatatatgtataccgacacagaattacatgtacatgatgtgtcataaaatgaactatatatgtgaaaaacttcttccttggtttaaaatatattcttttgtctggtacacggtaagcagaaaggaagagaagcagaaaggtaagaggcagtaatgatccagcaagtaattgattaggtagtagattactctttttatgttttttgaacttttaaagaaatgattgcagtctaagttgtaaaaattgtgaaattatagtcatctagggttctgagtgtttttttctctcctttcttctatctagcataataccacttcagccaaaggatttctgtccccaggatcacgtagccctaaatttaagagctcaaagaagtgtttagtaagaagtgctttagttttcatgtcactttatattttcatgttcagtcagttgacctctgtgtaacagcttctgaaatttattctaagatttcagaaatggccaaagaatccataccatgcccaacagaaagtgtttacccaccattggtgaactgtgtggcaccagttgacatcattttacctcagattacatcaaacatgtggtaagtggttatttaggcttcttgcttatattccaagatgccacttatttaagaggacttatctgattgcttggttctcatgtttagaattgattggcatgtactctcacacacattttatttttgaaataaaaatgcaactgagaaggtaggccagataaggcaatatgaaaaacatttagtatagtaagatgtatgcataatatttcaggtgctgcattgaacccttatatcattatcttgtttaatccaaatataaaccttatgaggaatatgaatatcatttctactttataggatgaagtttacaaagattaccagcaaaaccacacagctgttaagtcatcacatgtaagaagcatgagactcacatacataaaacttgttcatcagctgttttgttttgtttctaattacaagtttgtttccttgatgttttaagtcttggaaacttaaatgcgtgcatgtagatcgttcactatatcttgattaaaagaattatttcaggtagtttgtgatgccttgagatagtttctctttaactgaattatcaagctgccctgtcgtagcataatccccaataggagatgaagtattcttaaacttctctgaggaatttaatgatgcagtaatatgtatcagacataccaagtccatttctgattaaagttggggaggggattatgtgtacttaagaattatctattaatgagatgtatgtagaagcacaaggcacgcagtgggctcattcagttgccagtactgttgcttataccagacatacacatcagattcgaattttgttttaaattacacatacatgtgcctgtcttcactgtgggctaacctcagttatgattgagcttaaatggggaaattgaactggataaacccttgcaaatagcatataaataaaactatataattataatttcctgtttctgttttgtttagggcaagaggcctgggacaactcattagagctaagaatataaaaactattggtgatttgagtactcttacagcatctgaaataaaaactcttcctatccgttctccaaaagtgtccaatgtaaaaaaggctctcagaatatatcatgagcagcaggtaaaaacttagatattagctatgatgtatattaataaatgatgtagcagtacagttacagaagtttgttaaaagatcacttcataatggcacagggaaattgattcatttattttgtactgtctttatgcattgcacctcagataaatttttaaattgttttttcattaaattctgttcatccccttctctctttcatttccaccattcggtatttgattccatggctgctactgctaaaacctagatgttcaaatccaaacatctaccaaaaccatacagatttgtaggtcacagtattttggtttggatgcctaccacatttgtgacttatttttcttatttttcctttttgtcagtattgtgcatatgaacattttgggtcatgggcatttttcaagattctgatgaaagctaagattcttccctgctgtaaaactatatagaaaattttgtatataatttcagaaggattcacagactactgaaacccattcagagaccctctatccattgacactacaggttgagtattccttatctgaattgcttaggaccagaaatgttttggacttcagatttatttcgattttgagatatttgcattatgcagctacttgccagtttagcagccctaatctgtaaatccaaaacgctcattagagaatttgggcatcatgtcagtgctcaaaaagcttcaaattttggattccattccatccaaaaaagattccatttttggagtaggcatactcaacctgtatcagaagttttgaataaatgaaaaatagaataagcagtgttctgaatcagaatttctcagacctggggtttgccagccactgaagacttctgctgtattcttgaaggtccttgattttatattaacttatttgtgatcttctaaacattcattaactggttactcagaaaaccaatactactagtaattttctgtctcacagattgaatttagtttctaaagtattttcttactcagtttccatgggtcttgggaaagtctatgagaattaggttttttttaacagcttcattaagatatgatttacatcgtgtaaaattcacctaccctatgggtgcagttagtttttaatatattcacagagttaaataatattccccatgatctaattttgaatctttttttttatcacccagagaagaaacactgacccattagctatcactcctcatttccactgtccagccaatgcctacttttcctctatagatttgcctattctggatatttcataaaagt

SEQ ID NO: 24496 - DNA, 1061 bp, Homo sapiens
agcggcagctctggtagatttttttgtgtgcttgtcctcatgaagacttaagcctgctctctcaatttgaaacctaggcacttggactaacttaaaagatcatgtaaaaaatttaatttttgtctggtatagatttaattgtggttttttttttctcttttagatataattgatcctgttgctttagaaattccattatccaaaaaccttctggcacagattagtgctcttgctcttcagctggattcagaagatcttcataattattcaggaagccaactatttgaaatgcacgagaaactaagttgtatggcaaactctgtaataaaaaatctacagtcacgttggagatcaccatcccatgaaaattctatttagtattttcagagaaaattgaaggtttttttaaacatcactggatttcttgattgaggaaacaagttctgaaataatagcacaatttcaaagaagagactctttgcaaagttgataacatttcaaaccctgaaggacagtgacttattatgtaagttcaattttgtaagttcattatgtaagatccttttttttttcataatatgtattcttggctgctatgcgtggtttttcaggaaatttaattatcttactgagatgtgaaagcaaaactagtaacagaacttacattttatttcatgctttcttaaacccgtgcatattctggtgaaacatgtaaaatactttaagtaaaattgaacatttttatttgaatttttgctgaactgataaaggtgtttatatttttgtttgttggtttgtttaattcatgtttgttgggactgaggtttaggaagtttgttactggttaaaaacctcaaatgaaatgcgaaagaatttgaatttttcctgcatatgtcaactttggacagctttcaagaaaaatgagaaaagtttcaacttctggcggttaaaatattaatgcagaatttactaagattttattcatttgcattagcaaatattcatgcagcagcagttgactgaaaatttattcttatgagacgtatagtattcatttttaa

SEQ ID NO: 24497 - DNA, 1029 bp, Homo sapiens
ttaaaaagaaagtataaatgggttaatttttttcttccaactttgactttaattcagtaagaaaggcctaggtttcatctcatattcttcataattgattttcaagaagttaatttgtcattcagcctaggaggctataaaacagcagttagttggcattattagactaaaacttgggtggggggaggagactgtttcctcattgctgcaacccatggtctatcctattcctaagccattagaaagaccttgtactttgtatagaaacattagagtgaggttttgatttttaacatagtactctcaaactttgatgtgcatatgaacaagtggattctgattcagtagatctgcattgggccccgtgagtctttttaaacacagtcccaggtgattcatgcagatgcctgtgaactgcgctggtagatgggcctaagaggcttcaggctgtgttttaggttttggtaagccaggcagattcaagtccttttataactgtcaattttgtgaattggggatgcagactggttttgaaggcttaaagttcaaaaattataagaaagttaagaattttgcttaagagccttttaaaaatatggacgatttattttttaagtaggcagactaagaatttcaagttataaagaatcttattgataaggcaaagtagacaaagtattttctcatgagtatttgtgggttatgtttttgttaatataaaagttgatttctaagtattagaatatatttagtctctaaataaatcttgccttctattatggatcatcgttattaataaacatggaaaatcaacactacccctaatattaatctggcagttaaatttagtagtgctataatgaataagtcagtctagcagatatgccctgtcattatactgcggacctctggtcacttaattttctgttatattatgtggttgaaaattcctgtttcatcgtaaagtgaaatttgaaagatggagttgaataatatgattctcgaaaagtgagtttttcttggaattct

SEQ ID NO: 24498 - DNA, 1930 bp, Homo sapiens
gaagtgatgagttgaagagaatggaaaaggcagattgagctggaattttaatgcatagtacatttagtagagagacaagctgtcctatatactcctgtatacttcagaaatagctgatagcctatagtctctgagagctattctgtacatagcacagtattataattgatgttcataaataccctgagagattatgttaaaatacattattaatactcccacaaaagcagtaagttaataagtatttccaacaaaaggcagctttgtttcttaaacggataaacaacatataactaggaagatcatcttcaaaataaagtgtcatggaactgaaaatagagtatagtctaacaattattttgatacactattgaatagctaacaagtgtctaaagaattttttatttttatagaataggaagtttctaaaagaaaacaattaagagcaaaattggttttgagtatagaaactgaaggatggcagtcttaactcctaagttttttacagagcacagattggtaaactagcatgccacctgttttttgtactatctgtgagctgagactggtttttacattttttaatggtgaaaaaagtcaaaagaaggacattttgtgacacatgaaaacatattaaattaaaatttcagtatccagaaataaagttttattggaacagctgtgcttattgtctttagctgctttcctggtacagtggctgagtttagtagtatagcagagtctgtatggcttccaacagtcaaaatactgcctggccttttaaagagtttgtcaatcccttttatggaggaaggttttgctcatgcatggcatgttagtcaatttagttatttgcttctagctggcagaatgtggtcttgattacttaatttctgttacccctgtgttttccagaatggcttctcctgattttacttacgtgttttactattgctcaaattacagatactaggaaacactactactttataagtacacttctttttcctacttaaactctcaaactacagttacgtatttgccatgatgttaagggaccttgatggtctgtgaattatcagttgctttctgcactacctcctgtagatagacctgactgatagcacttacaaaaagactgatagatgccaaatcagtcatttattaaccctctaatattgttgtcccgatcatttggtaaacgctaagagagcttagttttacattcacaaagtatttgtatttgataagtcttaaaaatgatttaagttgaagcctaacagaagtacttgttcattcctcagttacctgcaaataatggaaataatggtgcagtcagttttatttgattgtgtaatgctttatactaggggtctcaaacccctgggtggcattagattcttacaggagcgtgaaccctattgtgaactgcacatgcaagagatctaggttgtgcgctcattatgagaatctaatacccgatgatctgaggtggaacagtctcatcctgaaaccatctaccccaacacctgtgtctgtggaaattgtctccacgaaaccggtccctgttgaaaaaaggttaggggaccactgctttatacagtgtttgaagtaggcacacttacagttactatttctggttctttatgactgttgagggggggcagaattctatgtttgattcacagtaaaacttttcatgaatcattgagggttaactgttatcacttgccaatggaaactggatattgaaacatttttttaagaaatgcacttttacctgaaataaaactataaaaactaaactctggtacttgtttttgttggctacattttggttttttgttttgttgttttcgtgagatctgaaatgagtatgaatagtttaattcaaataccacaaagtgtatgttatattcctccacaaaca

SEQ ID NO: 24499 - DNA, 1748 bp, Homo sapiens
tcacattgacacagaaaaaccataggcagcttgagaacttaggtaacagtggagagtctaaaccgaaacattgactgcaggatctgtaagtcctgcagacaagtgtgatgctttgaaatgcctaaatagcttcaacgtagttggctgggagcattccggtcctgccagtcctctgcacagtgccatacatccagccttcatcaattgcttgaacatttatgatggcatctccatccttgaaggacacctcatctgcatcagcagccatatagtcatacatggcacggaagattttctattcgtggggatggaaaaggggaaatattatatgttggatttgcaacagttaacacacatctatttgtaagatctctcatgactgactccacaaacttaagttgaacaaaagagaatgtgcaagcatcaacaaagtaaaaggaacccacaaaataggaaatacttgcaagtcatgtatctgataggcaattaatatccagaacatatgacgaactcctacaactcaatgccttcccccaccaaaagaggcaaaggatatgaatagacatttctccaaaaaagatagacaaatagccaaaaagcacacaaaaggatgctcaaaattagtcatctggaaaatgcaaattattaaaaccacaatgagataccccttcacacatgccagaatggtgatgataaaaaagacagacaataacagacattagaaaggatgtggagaaattgggtccttcataaaccactggtggaagtggaaaagagtgcagccaccttggaaaagaatttggcagttatcacatgttaaatacagcattaccctatggcccagcaaattccactcctaggtgtatacccaagaagaatgaagacataggtctgcacaataatttgtacatccatgtccgtagcagcattactcataatagccaaaaagtggaaacaacttaaatgcccaccaactgatgaatgcataagcaagatctggtatatccatacagatctattattgggtagtaacaagaatggggtagtaacaagaatgaagtactgacacatgatacaacatggatgaacttcaaaagtaaaggacgccatgcaccaaggtcagtatattgtatggttttatttatatgaaatgtcttaggtagccaaataatatagtgacaggaaatggatacctaggattggatggagcagaaaggggatggagaatgaatgccaatgggcaccagcatttgtttgtttgttttaattcaccagaagagttttgaatacagttttttttatggtgatgaaagtattctaaaattagattatggagatggttggaaaaaaagcttaaaatcattgtacactttatgaacttcatactaagttatgtatgcatgaaattgtgtgtgtgtgcgcatgtgcgtgtgtgtgtactgacagaaaagacagaatatgctgctaattttatttatggcctttttctacctttcgaagaggtcagtcttgtattttagagaagaatttgaaaacccgtagcactattgcatgtcatctttcactctgggaatttgggagcatacgagtagtaaaagtttctcaaagctatcctccacagtgttaaaattgtaataatttggaggtatataataagtgataatatcaaaagtttcttcctaggagcagccactggttagtagttttggatgtaacctatatggttttttcttgcattttgaaattca

SEQ ID NO: 24500 - DNA, 1058 bp, Homo sapiens
ggaggagccagtgacacagggaaaccagtgcagcagccataataataacaataatgcaattaagttctgcttgactaggatagcatttttttttgcttgagctttcatttaccctgctgattaataacacatggtgtgaattaatctttagaaaaataatgtcccatcattaacatggtggatttgtgttcttgttaaggctagcagttgcaaatatagtatttagacaattatgattgtacatcccaagcttcttggggcagggttgttgtggctacttttacactactgtgtgtcgcagttactgggtgcaattccttttaaaattgtttacaatattctaagcctctcaatcaagaaacaaaaacaataccaggctgaccttttattgagtagagacaaagcttttgggggaccaggtcagcttgggaaccctcttcctagggacgcatttggaccattgatgcgttccttgtcccaggtcagctccacttgctctttgacaatctgtgagaggagttgaaaccttccagatcatctccgtgggccaatagaagtgcgcagtgttggtgatttctcttgttttttttttttttctggagttgtgtgtgtgataatctcaactttgcttttcttcatgagttgcttaagaaatcagttcaaaccatttaattgtggacatcaatcttgaaggacaagttttaagtggcagatttttaagtatgtatgtggagggcaatggaaattgtgttggcattattgataccagttcaactttcttgtataataaagatcatacgggtgttttgggaggaaaaccagatagtaataccgtatagaaaagtgtctaagcacctcattgtaagtatggctaacatcaataattaacagactgtttcaagctaggagaacagttcctcccaacttccagctctagaatatttaaggcctcagagagaagtaaacaaaaattaaaatgacaaaagtccattttatttcttgttaggaaagccttaagagagaacaaatctattcaatgactataccctccctcccca

SEQ ID NO: 24501 - DNA, 1095 bp, Homo sapiens
atctaggatagaagttgatcaaatgcaaatgtttggctccaggaagagactggcaacagtgtaaagtgatgaaatttggggagagatggtatgcgtggccttaaatccgtaagtgataagaagtactttggcttgtggcctgtcatttagcattggcctgggaggcaggagacctagtttctagaatcatatttgctgcaccaacttggacaagtgaaactctttcctctggcccttggttttcctcctttgtgaatgggaataaaatttggcacaattgttaacatagtcgtgagatgatggaaatcataccacttgaaaacaaaatttccagaacataatacattgtgattcattagttgacattggcttttgaagagctttcaggtggaaatgtgtgtaggggtgttctgtgtggtctaaagagtagaattccccagggtcagtgactgaaagtcatatgagcatagggaaaaatattctaacatgtagagttgttgaaaatggatggtgagttctccgttaaagttattcagataatctgtgtgacaaacactggtgattggaaggccctttgcagcccaagaagataggaagtacattattggctcgaaagttgccctctttgaggtgagtctgcaacttgcaggttctagacatagaattataacacctgagagtggggaaagatctcctggtaggtgcttcctgggcttaaagaagaaaaagatacgtatgggctgatgtttgttctggaaattcatttgactttataagaactgttgcttaaagggtttggtcttaatgaacagtgctcttctttttcatatttagagcttggggaatagggacaaggtaaagtgggctctccagccctcaggtttaagcaagtaatagatgtcaaaaaagtagctaatacaagaagcactgattatagatgattgcccctcctttgcaagaggacgctgtaactggagtacttttaggaacaaagcattgaatccttataaaagaaggaacagcctagaggaacttaggagggaaggtgagttacaagctatacagttgcttggcagatctcatcttgtagagcgg

SEQ ID NO: 24502 - DNA, 1053 bp, Homo sapiens
ccaatatctattccttgtagtaattgctaagattggaaacatttgctttttcaaatttttgactgcataataaacagtggggaataattaagactcaagaagatactgagaaaagggctaaattttagcaggcatactaatatatttgggtctatagtctcattttttttccaggtaaaagcatttatatggaaagtactacatttgtaaaaggcttttttttattctttgataacttctaatgtgtatctcttgagttttgcatatgttgtgagaacttggataatgataataatcaatttttacaaacttctgtttgaaatttagtttgatatggtcaacttaatttttactcacttgaaaacttccagtaaaatatacatgaaaaccaaaaacacagggcagccttttggggtgtgtgttctaaattgtggcttatttctggggctttttatattgtttcaatatactctttcaccttgctaataactttatagataattatccttgtttattgtctgtttctacctacatctgcgcctcttgacttcagtggcaaaataatatcacaacagaaggtggtttgatattttgtttctaggtgtctacattttacatggtaggccacacaagatagcatcattctcataaaatcatccattttcttggttttagctttctgattaacagtttaactatgaaagctggaatgacttaaactcaggggttttaatccagctttgccagccatgtccttaagatcccctgcattttaaccccaccatccgcaaactagattaactatcactgttaccgtcttagagcattgatatgggataaatcctccaaagggcttttgagggaaatgttttatatgtaataatgtgggatgaggaatatgaggaattacactcattttagtcttgttactataaagttatcaaacagaatatgacaagttacactcaatgccaaccatacctataaatactttttttcccattagtacacataatatattctcattgtagaatattagaaaacaattaggaa

SEQ ID NO: 24503 - DNA, 1034 bp, Homo sapiens
ttgctacgcagttaaattacagtctattgaccttaagtatggctttcattaaacagtaatgtacttgcttgatgccctgcctttggtatttcattttattgagtttgcctgaatccctgctaatcctcaaaatttgtgggtctggtaaggctgttggctgaatgaagagggtagaggtttattggtgcacttactgcgtgccgattgtctaggccactgacacatgcaacttagcctctgtggctggacatgtacatagttaacagtaaagcatttctctctttccctagacaggaccatggggtctgagttagtgtgaaagaatgcaaggatgtggaaatttgaacctcagggttgttcttactgctgctgtgtttcccggaaaacagccattgacttttcttctttctttttaacatggggaaggcatttatagcataatggagtattgtttgattatttatatgcatttccttgggtctttttgcttttagagttttgttgatttgttctttgctgtgtattgtggggaatagggtatgtgtatttgctgtgtattgtgtggggaatagggtatgaagcctatagggaagaagggtggatggagaggcactaaaagtacagggatttgacttattttaacaagaaaaaattctgatgactaaagataatttgtgaacatgtagttatggcttcataccttttgtcttagttcaggctggtataacaaattagtgtagatgaagtggcttgaacaacaaactttgatttctcacggttctggaggttgtaagttcaagatcagggtgccacccagtatggttgggctctggtgagtggcttattctgggttgtgtgctgctgatttcttgtatcctcacatggcagaaagagaactaggaagctccccggggtctctttttataagggcactaatcccattcatgaagactctgctgtcatgacctgtttcctcccaaaggccccaccttttaataccatcaagttgggggctaggatttcaacacatgaat

SEQ ID NO: 24504 - DNA, 1058 bp, Homo sapiens
tgtggtaatcatttcacaatataaacttatataaaaaaatcacatacacctttattatatatataattcttgtcagtcatacctcaataaagctggggaaaaaatagaagtgtgtccataatattcaataaataatacagtcatgagccacataacatttccatcaaaaacggacaacaaactggtctcacaagattataatagagctgagaattcctatcatccagtgacattgtagctgccttaacatagggcaatgcattacccacgtgtttgtagtgatgttggtgtaaacaaacctactgtgctgcaaatggagaacacatacaattatgttcagtatataatacttgataatgatcataaacgactaagttactggcttaaaaaaataggagtgtggtgagggagagaccaacaaatagggcagagagagaggtagttttaatttctgggagagatgcggatattaaatttacctcccttggaaacactggaaggaggataaagcaagagggctctgggaatctagtggaaactttttaggtgtggacacttccgttaatcctttttttttttttttttttttgtagtttagggggcaatagtgtattaggctctaactttgggttttgtgatttccttttataagataaatttagttttcttttttggagtttaattgtttattgtaatgctaattgtcttcatgtagcatgttgtaagcttaaaatgttccgtaagagtaacctggcgtggtggtgcatgtctgtagtcctagctactagggaggctgagatgggatgatagtttgaacacaggagttcgagaccagcctgggcaacataataagaccctgtttcaaatcaaaaaaccaaaaaatatttcataaaaggtagctgctattaataatggcataattataataatatcttactgttattatatatccagaatggttatagcaaacttggtgctctttgaaaattaccacagcagctaaccctggaaaccaaagaaagccattgaggaaaccctagccatccccaaacttagag

SEQ ID NO: 24505 - DNA, 1359 bp, Homo sapiens
gggagctaccatatgttatacagatctcatcccttacatttctagagttgtactgtaggaactatgtctagtaaaaatctcactcttggcttatatgcatttggaattaccctttcatataataaagaaatagggtattgatttctatttttgtgaatgcttactttgtgtatatttatctttttaagttttcgtagcagctctgcaaagtaggcattttatctttattttccaggtgaggaaactgattctgaggagtaaaataatttgctcaaagttttgtgatagtggcagtactcaggttggaaacaaggattggctgactccaaagtccattttctgtttgttacttaagttgtacttacacattttcctaaatttatttttctcatgacttgtcctcactccagagtctggattaccagcccctgtggtctagcagaagtttgggatgttgaggtagggcctgggcattggggtgtagacatcgatattgctggccaggataggggctaggccatggaatgactgtgggtagaactcagctggtggggagatatggtccatttgatggctgacattagtgagagggcaggagagtactcttgatcagtgattggtttcccaggacagaagcaaagccttccctcaggcttcctgagtgaaagagcatccttcaaacatcgtgcttgaaaggtggactcttctcctcggttcagtggaggcagcctgcctgggtcccttgagtgcgccttcatcctggggcatcttgggatttaggaagcttgtatctgaattttggaatgcaagggcttctggtgggggccattatattttcagctaagattggccttccctggtccagagcctgcacacgtttctaaaatctttttcaaactctctgctgcttcattaaagtaagaaaaaatagctacactctagatttggtttcttgtttcttcaatgacactttgtctcctcatcctaacacagtaatcaactaacctagtaaactaacccatgttagtgtagctaatatccataaatgtattagaggaagaattcttttttagcaagaaactccgaggccatgctccctatctttgtctaactccttggtgactttagtaatgagaattttaatctagaggctccagggagacaccctccccacaaagtgtgggattgctcctgtattctgttaatgcctatttgttaaaagagttaacagtgacccttgaaccatgaagcaactctttttggtgctaaaagaacacaagtgcccaagaatgcagcagcatcgaaactggggatgaagtgatttgttcttgacatcagttggcaggtacattctcttgc

SEQ ID NO: 24506 - DNA, 1054 bp, Homo sapiens
caaggcttctttttggttgaaatctaaatgctgtttttcaatttggacttaacagggagggtgctgcaaatgaaaggagcattttttttttctataaagcctaacacagtgttagggtgtcttagtccatttgggctgctgtacagtaacagagtactataaattaggtagcttctaaagaacagaaacttatttctcatggttctggagactgagaagtccaagatcaaggcatcagcaaatttgaggggaggacctgcctcctggtttggagacagccatccttctgctgtatcttcatatagcagaaaggataagtaagctctctgggacctcttttttaggggcactaatcgcatttacgaggactccgccttcatgatctaatcacctcccaagagccccatctcctaaaaccattacatttaggggttaggtttcaacctatgaattttgaggagacacattcagtttatggcagtgggagatactttgtcttcagataattagatctttaactccgaattcttatgtaccttttagaaataaggactgatttagactagagttgttgggcccggcgtgacccgaagtagtggagagagcacaggactagagcgcagacctcaggacgtggatccgagccggcgcgatgggcggagagcaggaggaggagcggttcgatggcatgttgctggccatggctcagcagcacgagggcggcgtgcaggagcttgtgaacactttcttcagcttccttcgacgcaaaacagactttttcactgcaggagaagaggggatggcaaagaagcttatcatacagactttcagccacgacaatcagctggcacagaaggcccggtgggagaagagaacccgggagaaggtggagcgggtggccgggctggccaaggaagccaagtcagagacctcggggccccagataaaggcagacaggcagagaggctgcagctagagattgaccagaaaaaggatgcagagaatcatgaggcccagctcaagaacggcagccttgactccccaggaaagcagg

SEQ ID NO: 24507 - DNA, 1779 bp, Homo sapiens
gaacattattggaactatggtatcagatttcctgaaggtcacattattcattaataataatgttgctctttgagcccttaaaattggcctttttctagactcctaaactctatatgttcttaatgaaataacgctggctagagcccttaccaaaccctgaccagaaacagtgaattaaaagatacagaagactgggagctagaagttgttttttttttttttttttcaaacccatattgtctcgaaaacatctaccttaggatctattcacatccttattcacatgccaactccttgattcatttgcaagattgccaccctccttgctatttacaataattcattctttaatttcaaatttttatgctattttcatattgtttaaatgaggttctctacctacccaacatggtagctatttgcctaatatcttagttgtacctaaacattgtggaaggtagtttcttttataaatttaaaatgtttggcttttcaaacccctgttttctcatcttcctttgtcagagttctgtttgaggtgaccaaagccacttggatcctgatttagtggatgatttcagtgaaattaagactttgggattgacttttctctcccccccactcatcacagtgggaatgcatttttcatcttttctgtggggtgatttggagaatgactgagatggttattccttttttcctcctgtttcagtctgttctgtgctgtaatgacagaatacttgagactgggtaatttataaggaatagaattttatttctcaccgttctggaggtgactgggaagtccacgatcaaggtgccagcatttggtttagggagcatttggtgaggaccctcttgctgcatcctcatctggcagaaggcataagtgcaagtcatccaaatgcggagtgaagcctcttttataagagccttaatcccatcgagagggagaagccatcatggcttaatcacctttaaaggctccacttgtaaataccatcactttggcaacacctaaattttggaagggacacattcaaaccataacaccccctgtcacctattgtctgccctccttttgggagtgggcagtggtgctgactgacagatggatcctccaggcttccttgccctctggcttctaactggattggccaagggggaacttaaggagagctaagagtgggaggggagagagctgccagtcgccatatctcttctctctgcctgcttctctgctgcagttttgtcagtgactgtgtcccaccaagaaaccactcttgcctggtgggtcctctttcaggcctccagcaggttactttcctctccttgatgcttcgagtcactttctacctgaatgccccttgtggtacccttcacccttccctcatctttgtaaatagtccttcagtcagatgtcttcattgaaactatgtgagttgcctctatgtagtacatgtaagacactgttaattaaaagtacaggtaagacactgtggtatcaacactttaatatgaggaaacacatagcacattaaatgtacatgattataagatatgtcttaatttcagatacattaatacttagaaacaacacccatgactcttaaaacagagggaaacctatgaaattgctactggtttttcattgtgttaaagataccataataaatgtctttatttataaacttgcctatatttgagattatgtccataggatagatgagaagagagttatggacattttctaagacttgtttctttttgccgcattgc

SEQ ID NO: 24508 - DNA, 1189 bp, Homo sapiens
tatctggaccagtcccttaaaattaaaagttaaattagatgtgatgtgatttgaaatttgaaacctatgtttttatttaactagactacaatggtacacttagaatttttgttcaacttccccacccaatatgaatttggagaaaaacaagaatgactaaaaaatcagcaggctcacatgaaattgagaggacggtttggaaatctccttgaatttctttttgtaagccaaatttatttttataagcctttaacggaagacagtttgttctttggataattggcccaggctttatcctcctctttcaaatatgcttcaaccaaatacccaactgtgagatgaataggataaatgaaggtgggagtcgtagagtggtgggggtgggtgggccagggggcggggcggcggcaggcaaaacagtcatgtggaatcttttgtttcatttttaaaataattcttaagagctgctgtctttcgacagagtcagaaagtccttgcttaagtgtatttgtcactatagagagtgaatgggattctgaagtctttaacgtggttctgtaaatgtaagtcttgttgtttaatcacggcatttctgcaaaaatgaactcctgtacccacatccctccccctctcctttattttagtgtcttagaactcagctaagcatttgaacagtcattgctaagtgtttccacactgggggagctagaagaacttggctggatagaattctgattttcatgggagggaattagttttccgttttctgccttagaagtcatatactatacttgctatttgggctgaactgacttgaaaagtcaaacaggaatgagtctagctactaaatttagagaactgattcgtaatttcttgatctaatacagtgggcagtcttgtcattgaccagttatttatttcagtgtttgccaaacctagaatgaaatccaaggctgctgcttaaccctctatagctctggtagttcatttctacttctcctgctcatttccgaagataacatgtatccagagagcctgtgaggtcctggcttagatgagtcctgcatatcagggcaaacttccatgcctctggacatctttcacatttcagacattgtcttatttctttttcttatccagttaacaagtatgtttttatttaagtcaggctttaactctcccctctctc

SEQ ID NO: 24509 - DNA, 1084 bp, Homo sapiens
tattattttccatactgggttgctgggacgattagaaaccgagcatctgaaaactctttgcacagtgcttaaggtaattaatgagtgtttgtcattatacttatgttgatgttaaattaacatcttaaagaactctaaaatatttttcactttctgtttttgttttttttttctttccccctgaagcttcagaatgtcatttcctctaaatgcctgccaccctcagggagttctagtaatagggtgaacataacatcaatggaatatgaggagttactattagcagatgctatttgtttcccttttcatttctttttttacagtcgtttgggagaaacccttccagccctgggcgatgcggtgtgtcagtgtctgcctttctgccgactcctgacagcgcctcccttcaggggtgtgggtggagctcttcatgcctgcccctcctgctcacatttctcggttcactggaaaagtccccaaatctttttgtctgctcagttgtggcctagtagccagagtggctcgtgcattaaacgaagaggaacctatgtttcttctcttttcagcattttggctgaattttgaatttttatctgccccattgagtctgttggctctggctgctgctgtaccaagccctctttctggtgttcataaaccaatgagagtacaatttcatggcctgggtcaggcttgtttgttggtttcgtcttaattagaagcaaacctctttgtcttcccttttcttcatcttccagggagaaatggattttctaggctgagcaaattaatcatagtggtgtctaataaaaaacaatcaccactgcagtacctggcacacagtaggtactcagtagctgaaagaaacagttcctgtagctcttccaaggtatccagcattttgtgcaggtaggctgggggctgctgaaggatctgtttgtgaaagacgagaattagcttaagtaacttgggttggaaaagtcactctgccttctgagtgacatatgggggctggaaggtggcagagaacagggttggagagtttctctggtaggtggattagtgttgttcccagctcagaata

SEQ ID NO: 24510 - DNA, 1101 bp, Homo sapiens
ctatagaatatctagggaggttgagaagtttctagtattttgaaataagaatttatagcaaaccctgtgttttgactaattgtgttctataattctgtgatgtggctattggtcataagtcattagtgactttggatagagatagttcgagtggtggggtagaaagtgtttctagttataatatgtcatatacctcaaggtctagtctaatgtctgatgccatttttctggtctgtctagagattcatctaacactgctgcatgaaaatagttaaagcttgcatgttctcacttacaagtgggagctaaatgatgagaacacatgggagcatggtggggagcaacacacactggggcctgttgtgtgtgaggagggaggaggcaggtgggaggagggagagcatcaggaagaatagctaatggatgctgggcttaatacctgggtgatgggatgatctgtgcagcaaatcaccgtgtttacctacgtaacaaacctgcacatcctgcacatgtacccctgaacttaaaatagaagttggaaatttaaaaaagccttagaggaacaaaaaaaaaaaaaaaaaaagaaagaaaatggttaaagctgaagacagcacgcagtgtccgaccaaatgtgtccatgcagagctgtccctttctaggccggtgcccctgccttacattgtgtgtaaactcttgatccttttctagagcctagtgaagggtctagctgtgggaagtggagcatgaactggaaataacttcctgcctctagcgattcatttttcttttcagcaccatttcagcgatagaggttttactgaaatttaaagagagaaaggctaaaagcttagtatttcaatgtgccagctattgctgacttgcagtaaagaactgttgccgaattaatgtggttggtatttactgacagatcccttagatagcccacttcttttgtctttttttttttgttttcttttcccttctaagacttctgtggcatctatcttcaatttgtcttcaattttggggaaatgctctttcttttttaatttctaagtttttagaaattgatgctctcagatatgtctgaattgacacagt

SEQ ID NO: 24511 - DNA, 1407 bp, Homo sapiens
tgttttctcctatacccattgaattcgtcaaaacatacctgactgtatgtgtaagggagctgcttaaagattttggcagtataggtttttgcacctagcatttgctgatttcttaaaaaaaaaaaaacacataataacagaaggctattctgtatctatttcagcactgctgagtgtttaagtatttattgcttaattttaaatttttggataaaagtattggataaaagttgcttagaagcaacttttagggagttgcttctgagagtgtgttcaaagggtacctttgactcttgttggagtttgagtaatgttcaaacaagagtaacataaaataatcctccagtgatctgaaattgttaattgtcgggataagcatagactgtcctcttagttcaaaccaacagactgaggaacttgttcataaaactctcttctttgacttggaaagacagattaaatgtggagtaaaactcctcggggttttctcttttttggactgtcagtatggcataaaaggaaaccttctgtaaattgaatactatctgaaaccagatgcactcatcaaagcatttgttgaactcctatgcattaggctctgtaattctcgtgaagccttgcaccattttcagcattgaatttaaaagtaggtcagtgaccacagtgaggtaagaaaaacattttttgcaaaaagaaaatccttggagagtgctgctttgataagacgtttaagctttccctcagatagctgattacatgcgtgtgtccggatttcctacatctctcatgctcttgtcccttgaagagtctctgaaatacagaactgtttagtgcttttaagccatgcactttgtgtttgtcgagaagaaaccaaaagacctgtgcctggcaaagccatgttgaagcctctaatgtctaattgtctgttggttaagatggcactcagtagtcaagacccaaaacactgaactcaccaagcaagcacaacagaaggggtgttcaatatttctctttttgtaaatgcttttgtgcctcttagttgctagaaaggactagatgatgtctgttttaggcacacttcttccttctttctccctctggtttctctctctttagtttctctttccggaactatgggatttttgttgcatgatagcctcttagatgtgtgatcttcatgcttaatatgcagtgatatgcagggaacagattctgggactacttttttcctttttttctctgctcataggccttggtgtatgagattccttttcaggatttttctaccatctaatggatttctgcaaaattaattaacagtgtaaagtttctcaaatttttttcctgacctctccccttaaaatagtctgtagttttatggcaggacttggggggctctcatccttg

SEQ ID NO: 24512 - DNA, 1033 bp, Homo sapiens
ccagccagggtgacagagcaagactctgtcttggcgtcagggggtgggggtgggggtggggattacagaaagaaagaaaatacggctgaatgaaaggtcaggagtggattctgggccctgactgacccagtgtgattcacagactccttcattaggagcagtctgctcagaaataccctttgcgtatatatttaaaagagctttctgtgtcatgtttgaactgtgacttattggggattattaacacttggtggggaagggagggaacaaagaatcctcagcccttcatcttagaggaggggacgatccagtttgtggattgccaggacgcttgttttgtccccttcctcccctgctgcccagccttctggctgtattactgcttatttgcctctttgttagagggagaaacaaaaggagttcagattcaatgcctgcttttgtttttgggttagcagctttggttgaagtttagctgaatgagagaggagagggaaaggtaaagactgagctatctgttaaggttattgactaatttagattgtatgccattctgtcccttgcatgctgtctgcgagggcacagccattataagcagagagtgaaaagggagattgtgtataacagaaagccaaggcgttagagcctaattggaaacaatacatgccccaaatgtgctctcgtgtcctagccaagaacatggtttcaaaaacatgagaaataaggataatgaaatgaaaaacactttagaaagcttagatacctcaggtattgtattgtgggggaaatgaaaaattaagtattagatttatatgttttctggctgggcgcagtagctcacgcctataaccccagcacttcgggaggctgaggtgggtggatcacttgagggtcaggagttcgagaccagcctggccaacatggtgaaaccctgtctctgctaaaaatacaaaaaaatttagctgggcatggtggcagatgcctgtaatctcagctacttgggaggctgacacaggagaatcacttgaatttg

SEQ ID NO: 24513 - DNA, 1052 bp, Homo sapiens
caaagtggcctgagactgtcactttatatttctgtaggaaaatgtgttccaaaggactgatgtgcaatgtagcccattgatatcttggaaatgatttagggtcaagaggctagagaggtgtatattaacacatttactatcagaggtggattcagtgaagaaagaagccccgagggattcctggaagggtaggtgggattttaacaggcaagggaatgaggaagggcagttcatgtcaggagggtggtgtgctctggaggaaggaccctctaagtgaggaataaggggcagaggtagctctgcatgcttatttttgcaacgtgttaggtcacgcagaaaaaaaattaacatagcaggcctgagactgctatgcttagcaaagggcctgcctgcaaggttggcccttggctggcatctaggaacttgtgtttgacgggggaaagttcctaccatttcctgataagactgtttcgctgtgcctaaacagtttatgaaaacaatacggcttatgctgaatgcctcttttccctctgggagtctgaatttgtgtaatgtactaggcagagagttgcctattaaaccagctcccaataagaacctggccactgagtctctaatgagctttatgcatgttgtcatttgtgtctcctcggggagaggactcctggaagattgcacctggtttcctgcacgttttatcctatgcaccttttctctttgctgatcttgctttgtattcttttactgtaatacatcatagccacgggtatgactgtatgctgagtcctttgagtgctcctaatgaatcattgaaactggaggtagtactggggtccctgacccataggaatattggtgaatactgttgtgtgtgtggggtagggaaataaaatctacttactgaaaggcacattacataaaacaaggactttttgtagtcctttctcagtagttaattttcatggtgaggaaaatttgtgtgctctgcaacaaaaaaagtgagggaagcccattttagaagtgaagatatttttcatattgtgttaaattta

SEQ ID NO: 24514 - DNA, 1095 bp, Homo sapiens
ttctggttttattttgatgttaaaggccacagcattggatatgagggagaaggtgagtagtagagggtggcaccagggcttttgtcttgggcacctgtgagatatatttgctatctacaaagatgggaagactgcaggatagatggatttgagggagatcattaggaattctgtttcggggattttaactttgagattccccttagacattcaaatggtgatcttaggtgcatggttggatatgccagtctggatttcaaggcagtggtctaggctggagttagacatttgagagtaattagcatataaatggcataggaagccaggaaggtgaatgagatcagtaggggtagactgagaagtaaagaagtccaaaatatgaactctagggctctctgtttaaatgtcagagagacgaagaaaagctggctagagagcctgaaaaatagccaagtaggagccaagtgaaggacatatttcaaggagaagggagtattcagctctgttagatgctgctaagtcaagtaagatgtggagtgaggattggccattggcttcagcaaagtgcaggtctttggtgatcttggcaagaacagttcattgggatggtgggggtgaaatgcttgattggagtggtttcaagaatgagcaggaagtgaggatttatactgagtgtctggaggagttttgctgtaaaggatagcagagaaatgagaggcagtggctgaacacaggttgtggtatcaagagaggtttttattgttacttaagataatttgcattttttatgctaatggcaatgagtctatggagagggaaaaataagggggaagggaggaatttctggaacatatgatgttcgtgagcagatgcgagggaatgggatggaggaaggactcatgggaggggttggccttagtttggagcacagaagagttcctctttaataggaggtgaggaggtaagccacaaatctgtgtggatagattgatgtggtataggaacttctggatgttttctctgatgagctgagagtgagttttgaggagaaagaatatagttgacccttgaattttgtggggtgtgaggggtact

SEQ ID NO: 24515 - DNA, 1050 bp, Homo sapiens
aacactgtggacaagacccattcagcaatgtactaatcacagtccatggatgctctttaagagcctctttactcattcaaagtaactgaagtcagtaggtactttaatttgggtgagccaacaggcttccagcccagggttgggaactggttttatcagccaagaattgtgttaacccagcctggttcctgtctgattgaattagcataatgctatctcctcgaaccaattctcccaaatttctgtacttccttttacagatcagagtaataacttgggcactagtaggagaggcagcaagtgacttttccttcatgtctgttgcacatgaatgttgcttataagcttccagatgcttatagctttttataatgggacagtccaataatatgcagatgtactgaaaatagtatgatgaggtcccatgtatccctcatccatttcaacaattacgaactcatggccaatcttgttacatgtacactctacctacccccatatccaacccttgacaaccaagacgtagaatttcacttggaaatatttcagtatgtatcttcaaaagataaggactcttaaaaaataaaaacaaaaacatactttacaccattatcacatctaagaatcccttaatatcaaatatctagtcattagttcacatttccccaactgtcctgatttttaaaaatagaattcctagactcttgatgtctcatttcttttttttttttgatggagtctcattctgttgcccaggctggagtgcagtggtgctatctcagctcactgcaagctttgcctcctgggttcacaccattcttctgcctcagcctcccaagtagctgggactacaggcgcccaccaccacgcctggataattttttgtatttgtagtagagatggggtttcaccgtgttagccaggatggtctcgatctcctgacctcgtgatctgcccgcctcggccacccaaagtgctgggattacaggcgtgagccaccatgcccagcctgtctcatttcttgttatagcttagtgaacattgtacatt

SEQ ID NO: 24516 - DNA, 1050 bp, Homo sapiens
agtattggtaccaagtagattgcttataagatttttgagctaatgtccttcaacatatccattaataacaataactgctatacctaacatgtattaagaacttactgtgttcaggttggatgcagtggcacacgcctgtaattccagtactttgagaggctgaggcaaaaggatcacttgagcccaggagtttgagaccagcctgggtaacatagggaagccccatctttacaaaaatcagctgggcatggtggtgcacacttgtagtcccagctacccgggaggctgaggtgggagcattgcttgagcccaggaggtggaggttgcagtgagtggagatcccaccaatgcactccagcctcggcaacagagtgagaccctgtctcaaaaaaacaaaaacaaaaaacaaaacatactgttctaagtaggtttacagatattaacctagcccttttatcctatacccagttaatatgctttgatagcataatcacctgccatatgaaagtgctcaggaatgcgaagtgctctaaagtgcaaaatgacttgcagaaggaactgtgaactatgcacagctgcaaatcaggcctttcttaactctcttatacgtccatagcatgatggaactcgtaatatgagcttaacacagggagcccttttaacctagcttgtatatgtagatataggcaatccatagctttatgtcaccctactttagtaggccacctctattccttctgaatgtcatgcccatgttcaactatcagtaattccatgttggagcaaagctgtgaggcaggacatgaatacaaaggcttaggtcctcccactgtcttatctcattcacgcatcttcaccggtagctctgttccatgtcaaacccaggctatttcttctgtgatcagatcatatcttgacctgcttctttggtcaggatgatggcaccagaaatactaacagcaaatatcattggaaaatgccactgtttttaaattgggggggaaaaaagggtcaaacttttcaaagtaacctcctgggcacagtttttga

SEQ ID NO: 24517 - DNA, 1026 bp, Homo sapiens
atgtttcatttatcattcccctccccacttttttgcccttttttgcaattctgatagttttgtctcctaggtggtttatttctgttttgctcggagacattgcctttgtatcataaagtcacaaaaccatgataagtggaattccattgcagaagacattgaactgtgcttatttggaagaatagagaaaggaactgaactccacctagtatgccctttagtgtttaccactaccttagggaataaacagtactctcatcctatgtacggtatatagctgttggctcccttagtggtcaacacattaatttgcttgctgaaggtcacatagctggtaaattgaatcagaatttgaacccagttctttgtgactccagagcactttccacagctccacaatgccttcacagcccttgagttacttttcaaattatagtattgctttcctacctaagtccctctttgtatttgcagagttgcatgctgagaatttgaaaaatgaagatgatgtagacactggactattaggtatggacttaattgccgcttgctttggttttgagctcacgtttgtgtttctagatcatgtttgaactaactctgggataaaatacttaatgtatttctatgtgcagtcattcagtcttgtttttaatttgcatatgttggtgataaatgttattagatttcctttatatgtgtggagtatgtgtatgcatatatggtatgtttgctataattttttaatggggccaggtgcagtggctcacatctgtaatcccaacactttgggaagctgaggcagtagaatcacttgagcccaggagttccagaccagtctgggcaacatagtgagaccctgtctctacaaaaaataaacagaattagccaggcatggtttcactcatgtttgtagtcccagctacttgggaggctgatgtgggaggatcacttaagctgggaagttcaaggctgcagtgaaccgtgatagttacactgcactccagcctgggcgacagagtgaga

SEQ ID NO: 24518 - DNA, 1029 bp, Homo sapiens
catggataaaaaatatttgggaaaaaaattacaatacaacaataaaaagtaatacaaataaaaaacagtatagacaactatttacacagcatttactttatattaggcattataagtaatctagagatgatttaaagtataggggaggatgtgcatacgttataggctaataccatgccattttatataagggacttgaacattcatggattttggtgtttgtgggaatcctggaaccaatctcccagtggataccaaggtgcaactgaactgctgtctttccattaacaaaaagagatacagtcacagccctctattggttaaaagccttcagtagctttcctgttgccttcagaataaagtccaactcttaagtatagcagaacagtccttccccaaatgaccctaccctacttttccaacctcagctatttccctactgcaccctatattgtagtcacataccagattagcttgacatccccctcataaactatgcaattttgagaagtcatgattttactcttgctgttctctctccctggattatcattttccctttcatgttgtcttttaccactgtcacgattcattaaccttataagtgtaagaagcctctggggttagagaaggttttagtattctgttaaagatctgctattctgagggcatttaactaattttaaaaaaaattatctttgcattttgtattaaattagaatcaatttaataaagggcctcaattttccatgtatttattaatgtattagtctgttctcatgctgtctaataaacacatacccaagactgggtaatttataaaggaaagagttttaattgactcacagttccacatggctggggaggcctcacaattatggtagaaggccaaggaggaacaaaggcacatcttatatgatggcaggcaagagactgtgcaggggaactgctctttataaaactgtcagatcttgtgaaactcactcactattatgagaacagcagcatgggggtaaccacccccataat

SEQ ID NO: 24519 - DNA, 1039 bp, Homo sapiens
gttaattacttccaagataacaatggcggtacaagcactgtaaatacacccattccaaatgggataaattggccaaaacaaaggggctacaggcccatgcaagtccgaaattcagtagggcagtcaaatcttaaagctccaaaatgatctcctttgactccgtatctcacatccaggtcacactgatgaaagaggtgggtttccatgatgttgggcagctctgcccctgtggctttgcagggtacagcctccctcctggctgctttcacaggctggcattgagagtctgcagcttttccaggcacatagtgcaagctgtcagtggatctactgttctgatggccctcttctcacagctccactaggtagttcccccgtggggactttgtgtgggggctcccaccccacatttcccttctgcactgccctagcagagaggttctccatgagggctccacccctatagcacacctctacctgaacatctaggcgtttccatacatcctctgaaatctaggtggaagttgccagacctcagttcttgacttctgtgcacctgcagtcccaacaccacatgtaagccaccaaggcttggggtttgcaccctctgaagcaacagtgtacattgaccccttttagccacgcctgggacacagggtaccaagtcctgagactgcacaaagcagcaaggcccatgaaaccatttttttctcataggcctcccagcttgtgatgggagaggctgctgggaagacctctgacatgccctggagacattttccccattgtcttggcaattaacatttggctcctcattatttctgcaaattgctacagctggcttgaattttgcctcagaaaattgttttttcttttctgtcacatagtcaggctgcaaattttctgagcttttatgcttttcttcccttttaaacataagttccaattccaaaccatgtttttgtgaatgaataaaactgaatgcttttttttttttgggagatggagtcttgctctgtcacccaggctggagtgcagt

SEQ ID NO: 24520 - DNA, 1066 bp, Homo sapiens
tcccagtctctttgctaaagcatagcaaaaatcacctttgctgctccagttcccaataagttcctcatctctgttggagaccacctcaacctggacttcattgtccatatcaagatcggcattttggtcaaagccattcagcaagtctctaggaagttgcaaactttcccacattttcctgtcttcttctgcaccctccaaactatttcaacctctccctgttacctagttccaaagttactcccacattttcaggtatgtttacagcagcaacccgctctaccggtaccaatttactgtattaatctgttctcacactgttaataaagatatacctgagactgggtaatttataaaggaaagaggtttaattgactcacagttccacatggcaggggaggcctaacaatcatggcaaaaggcaaaggaggagcaaaggcacatcttacatggcagcaggcaagagagcatgtgcagaggaactgccctttataaaaccatcaggtctcaagagactcacacactattagtggaacagccacatgggggtaaccacccccatgattcaattacctcccaccaggtccctcccatgacgtggggattatgagaactgcaattcaggatgagatttgggtggggacacagtcaaaccatatcaattagtaattagcattttttgtttttgggttttttgagacaaggtctggtttggttctgttatccaggctggagtgcagtggcatgatcttggctcagtgcaacctccacctcccaggctcaagtgatcctcctgcctccaccctctaataagctgggactgtaggtgtgtcagcatgtcaaataatttttttattttttgtagagacaggattttgccatgtgcccaggctggtcccaaaaccctgagttcaagcagcctgcccaccttggcctctcaaagtgctgggattacaggcatgagccactgcacccagcctagtgatccagttttaatatgaaatggtgtcatattagagccttagattatgtacttattaataaatctaaaaatggttttgaaatg

SEQ ID NO: 24521 - DNA, 1063 bp, Homo sapiens
tcttttttttttttttttttttgacggagtctcgctctgttgcccaagctggagtgcagtggcgcgatctcagctcactgcaagctctgcctcctgggttcacaccattctgcctcagcctcacgagtagctggcactacaggcgctcgccaccacgccacgcccagctaattttttgtatttttagtagagacggggtttcaccatgttagccaagatggtctcgatctcctgaccttgtggtccacccgcctcggcctcccaaagtgctgggattacaggcgtgagccaccacgcccggtccaggtcctttttaatgtctgacagtaaagtgtttttttgttttttgtttttttttttcatataatttacataggataaaactttactcttaaaatgattaagtatttaatattttcactaaaaactactgaataacaatattcagcaaccatcactgctagaacatttctatcactccaaaatgaaaaccccatacccattagcaatcactgcaccatttcctcctgcctctatcccctggaaacccatagtctacttttcgtctctatggatttgcctattctggacatttcatataaatggaatcgtacagatttttttttaatgtagtcttttgtgtttactcctttcacttagcatactgttttcaaggttcatccatattgtggcatatgtcagtacttcattcctttttaaggctgcatggttttccgtatggatataccattttttaaatccgttcatcagttgatggacatttgggtagttctacttttttactattaggaataatgttgctatgaacactcaggtacaagtttttgtgtgacttgttttcagttttcttggatatatacctagagtggaattgttgggtcatatgttaactctgtgtttaactttttaagaaacctccaaactgtttcctacagcagctgtatcattttacattcccaccagcaatgttcaggacttctgatttccccacatcctcaccaacacttgttttctttttctttttttaaattataaccatcca

SEQ ID NO: 24522 - DNA, 1044 bp, Homo sapiens
tcccagtcccctgagagtgcagggatgcctgggtgcacagctgcggctgggcagctgcagctgaacccaggagtgcagggctcccacaactcccaacttggaaggggccagctctcccgcctgctgcttgttcccaccagctccctggagtgcacagctccagccatgcctcccccactgcagctggcatccccacaggtggctgctccagatgggctgctgctgccatcaatccctcatgtgaagaggtacatctaactgtcattaagatagggatgatgcctcatcttaattgcttcataatgacagggggcatgttttggggaaaacagcagtcagatctctcagaggcctatctaagggttcccagtaaaagggagccatcatccatggttccatttgcatgaccatttggagtgtgatggcctgaagacaagaagagacaactgggttattagaagacatagatcaaaatgaaacaagagggtaaggacagctcaaaagtcctgaggctgctgacacacctagataactggtagctacagttgtgcttgctaagacttgggtgcatggagattggcttcagttagctccttggtcttattttttcaaaaaagaaacctgcgggttatgaggaccacatttaaccccatcacctggcagcgtttgcaggataattgcccagaattagaatattggtccagatttttacattatgtatcccttttgtttcttctgagctgcagttagagatcactggttggtcacaggaataagcaggcttagtctaaaatgcagacaaaaacttaaaaacaactaatgagcatctgtcaaagtcctatagctgattataaactatctttagaagaggatcaaacaagaggatcaaaacaagacaacaattgtctgtgaatggcaaaatgttttagggtagtcacagtcaaaaacctgattgacaaagaaatttggttatttctgtggtttataataacataataaccctagttatgattgataacatatactcagacattaaaatttaga

SEQ ID NO: 24523 - DNA, 1008 bp, Homo sapiens
ggcaagaataaggttatattttgagatattcctgagatctgcaaaagtagtttcttgaataatgaagcattaaaatagccacaaaagcacatttttggcatttctttagaaattgaggaagcctgccctctggaggttgaggtaaggcaaagatgatttgcgtatttagtttatggtctcgccaaagggcaaggcactgtgattattggtttctcaggcacacataatagatatggaaatgggcatttcataatttttttctagaaaaggagttcaaatatttcagtaaaatacaaacattatatcctttattacccagataatatttactgaattgtacacaattttaaaaacaaccaaatttgtattaataaaatttaacttttaataggaaagaaacatttatcatttttacaagcttccataatgagctcactggtaactatgttttgcttttatctttattgccaatattatgattacattaaatggtagataaataatatggattattaaccctatatgtaaatgtaacacatgttgtctggactgagaatgatttctaggtgaattaacacatgattgcagccacccttgttgaaaatagaagagcttagggtagtcttgtaaggtctgtgataatacacattttctagtttttatgctttgtatgtgcattgaaatgatatggatattgtgacttctttattaattctgatgcttagctatttatttttgtgttctccattgaaatagactcctgagacagaggctgtttttcctgctgtagaaatgctatgatatgagtgagtggtttataatttctataattctcttttcactgtaacctattagggctccattccaagatctatttctgactcctttgacattgggaaaattactttatacccttcctcaacgtgctttccctcatctgtagaataagaagacttagctctacttatctcaatgggaaatgtgttttattaaaggcctattagcttc

SEQ ID NO: 24524 - DNA, 1098 bp, Homo sapiens
ctattgcgttatgaaattcttgtagtgtttttttcagctctataaggtcagcttcatgcttttctatactggctattttgtctatcagattctgtgtcattttattatgattcttagtttccttagattgggtttcagtgttttcatgaatcttgaaaatcttcattcttatccttattctgaattctatttctgtcatttcagccatctgacctcagttaacaactcttcttggagaactagggtggtcatttggagaaaagaagacactcttgctttttttgagctgtcagagttcttgtgctggttctttctcatctttgtgggtctgctgttccttcagtatttgaagttcctatcatttagatgtttttttttcttttatcctatttaatgaccttgggggtttaattgtggtataaggtgtattcagtcaattggattcatttctgcaagattttagggagtcaaggcttagctcaggactcccggactgtgttttctaattctgggtgactcttattgggcactggctttgttttctggcccctcatggttaggaacctgttgcacaggataggctgaaatgttcctgaactgctggtcacaatacttgtatgcatggtgccagccaaagctctttgtagggcagtggcagtggaatctatcctcatttgcatgtgctagcaacagtggcagcagcagcatggccaagtgcacacttgtcagctgtggcagggtggtagtgggtgctgggtagccagcaggtgtttgcagcagtggtgatggcagtattactcagggagacaggggtcctccactggcaactgtgcatgtgtttatgccagtgttggtgttagcatggtggtgggggtgctggtgggcgcaggactgtgcatgccctctatgcatgttcacactggtggtggtggctgcctaggttgtgggcaagctgtctgttttccctgcctagtttcactttggcagcagtgtcagtgcaagtggtgggtgctgctggcagcagggcaggcggctttcatgcctgccaatgctctgaggacaatggcaatgtgacaggtggggtggggggcagcatgc

SEQ ID NO: 24525 - DNA, 1058 bp, Homo sapiens
atttttgaggcaggatggagtgagttaaaatgcacaggttctaacatcatacagaactattctgatctcagttcagcaaatactagctgtgataccttgagcaaggtttttatttggttatacctcctcagctgtaaaagggcatgatataactgtgtttaaatgtttcggtgtggatagaatatgataatatattcaaagggttcattgcataggaaatagtcaagaaatggtatatttagtttacctatcttatattagcataaattcagtttaagagaggacggtgtctataaatgactaatacagattgatagagtacaaaggcaactaaccttgtttctcttgagtagagctttaccttttagatgggattgagtctcaatttctgttctttgatgtataatttctatactttgaattaaactgaaagattgctcaaagttaaggtctatgatagcagcactttatgtaatgtcaaaccaagaaatagataagaatttaaaggtttctctttaacctttgccattggtaagttatgaaactgacgaaagaaattatacacctctgggcctcagtttattcagctgacaagtcacttagttgatgagatgacctctaccacctatttaacagctttaaaacaccgtaattctgtgcattttttttttgcctaacacagattcttttgccaaaagaaatatccttgtctctgtttgtgtctgtgtgtatgtatttattcatattgccatcatctttaaaatatcttgaatataccatatgtgtattaagatgtgtaaagtacactaatattaaatatatggattgatgggtttttacgtagttatatgcctgcattactgctacctatagcggtaatatagaatcaggaacacacagaatatttctaacccccaataacttccctttacatctcttccccatcaataaccttctggtttttattattttttattttgactttatgataatataatttgaaaaaggtatgcattattttgaggggtaattcaaacttaaaaatttttctagaagta

SEQ ID NO: 24526 - DNA, 1022 bp, Homo sapiens
tggattcctacttacatggtgggttgcattacagaaaaagaccaataaccttagataagctactattttataataaacatttttcaatattccttactgcaaacacagttatgaaaagtggcctggctgtttggggccttgcattcttggcatccccagcaagaagtattaggagtttatgagagtggaggagtgtctctcaatgatatccacttttgatctttgatcatgttggcttctggtgaaatttcatgtgattatggcactccattgaacaccctaaataatatgacagtggctggggtcagatgtatttagtttttctcatacagcatttatataaggctattatgagcagaacttctaacaacaggattaggccaacttggagttttgactttactcatgtttccctgtggtccgggactcagtcactgtaaataagtctaagaggatatcaataggttttattctataaagccaaactgtggtagtctaagaacagtgtattatccagcacaactgacacaagggagtttacatagaactgcttatctttggttatcattgcaatagatgatttaatagaatctgaatttccatggagagatagtccatggctcactcagcccatatacaaacatatagcccaaagggacataaatctgtccaatcaggattttttatttaactttatttggatcatcattacattggtctgattaagcatgtgtcatgtcactgaagagttgtagcctggattgtttacatggcataagccaaagtgctcagatatcaggagaagcaagtgaatttctatcagccagatagaaacaatgttatgcaagttcctgtgtttgtttaggtgggaggaagggtatctttttgggagcagccatttatggcatcaggcacagcagagcagttcaggactggccatgcccacatgagtttttctgtttcatagcacttggaagagatgacaaatggaacagcaggctggattgtcagccacagatgct

SEQ ID NO: 24527 - DNA, 1035 bp, Homo sapiens
attgattatttgctgatgtttataatacaatagcactaaaatattttagtatttatttaaataaagattcatactgaagttttattcattaattaaaaccactcaaattaataactaaatggaatactgtcatttaaaatttttacgttacaaattaattggtaggagaaagaaagatttttgtcctgtaaaattgagtttagatattatttttaaaggtaactactcaagtccaaattcatcaaaatgtatacatcaaatatgtatatttttgtatatcagttatacctcaataaagtataaaaaagtaactactcaaaaatctttactcatgtagtataagttgagacaacttatccaagaaacattacttgaatactgattgtgacaaagcctggagatagaaagaggaagaatacatatttttgttttcatgtttagcagggaagaaaggaatttggaattaagtgaatgaaatgtcagcacatcaatgctgtactattaggaggagagagactctatgaaattaagaccaaaaaatcaatagatgctatctgtcctttgaaggcaaggtctaatattctttgtaatattgaacagcatattctatgcaaatacttaataagttattacagcaatgtaaatatcaggcagatattttcattcacgtttatataaggcaaatgcattagttagtgtaaagggaggtaatacataataataaaggtaacagtctatcaagaagacagaacaattttagacatgtatatacaacaccctttatataaaattaggaaaaattagaattacaatgaaaaaattagcagacccaacttcatagttgagtatttagcaaaatgctttcaaaaattaataatctttaaaaaatggaaataaaagctatagaaaacaaaatttacaagcttgaagatcaaattttcaattccacaaatacttgattgattagagagtgggtaacaaaactgtttaccaaattgtccaccaataaaatgggaatggacagattttatctct

SEQ ID NO: 24528 - DNA, 1026 bp, Homo sapiens
aggcttacttgatatatctttttggattctaagaaacatctcaaacttaccatatccaaaactgaatttctcatctttcatcaaaagcttttctctttgccatcttttctgtgtcgatttttggcagtttcatcactccggctgcttaaaccccaaaatttcagatattctcaacttttccttttctctcccatttcacattagcacatcctgtttgcattattatatgcaaactttctttaaagtatatttagaattcagacttaagtcagatcatgccattcctctgctccaacatctttgctagctccccaatactcagagtagaaacaaaagttattatgatggcttactcaagttctgtgccttgagcactggagtcacattgactttaggtcttggtattctccccttattcattctgttccagtcacattggctttcttgctattcttgcaatgtggcaggtatatttctacctcagtacctttgtcttgctaactcttctgtatgtaatgttctttctccagtttacttcatgtcttaattttctacctcaccttattcaggcattatctcaaatgtcagtgactcagtatagcccacatggccacactatttgaaaaggtaaattgttccccatctctacactcgctgtccttcttctctgccttgtttttttaccactgtatttttcactgcatgacatattatgttttacttatttacattctttcttttctagtctccctctctgcccaataacaatcctgtaagtctattttactgctgtatctccagtgtctagaagcgcttgacacatcagatatgtgaatgagggaaggaatactgagtgaatatttgcttaatgctgtcatgatagaagaatctgcagagcaagaattcagcttttgttccaataataatttaccactagagagacttatttcaagaatttaactagaaatctatatacaacataaacagaatataagcatgcaaaatttatagagaaagcatgaagtt

SEQ ID NO: 24529 - DNA, 1024 bp, Homo sapiens
aatattctagagaaatacgatctttcaatcctgggaattattgcattaaaaaaaacagtgccttcaattacagctgtttgtagataatcttcctctttgaggatgctattcatgcctcagctatcacctagaaaaatagatttaatagcttttccaaaaatgttgtttcattaattatagtcatgctttccaaaacattacaaatgaggtactgaatttaatgcaaggtaaatttctcagagataagaagatagaatattgtctgtttattccctaaactgctgctttcatgctaggattgcaggtcctcagggtcagaaactttctttctacttcctgaaagactaagatagtagcataaggacagaaaattgaagaggtttcctacattttcattatgactgaaaccttgaatcatcatctctacttgcattcagcctgggtatgaatttttgctttcctctttgttttgcgtgacctttgtcaagtatcatagttttctatgtctgatatggtttggctgtgtccccacccaaatctcaacttgaattgtatctccttgaattcccatgtgttgtgggagggaccctggggaggtaattgaatcatgggggctggtctttcccatgctattctcgtgatagtgaataagcctcatgagatctgatgggtttatcaggggtttctgcttttgcttctctctcatttttctcttgccaccaccatgtaagaagtgccttttacctcctgccatgattctgtggcttccccagtcatgtggaacttgaagtccaattaaacctctttttcttcccagttttgggtatgtctttatcagcagcatgaagatggactaataaaatatcttgtttctttatctattaaattgagctgggcatggtggctcacacaggcagtcccagctacttgggaggctggggtgggaggatcctttgcgcccaggagtttgaggctgcagtgagctctcattgcaccactgcactccagcctgggtgacagggca

SEQ ID NO: 24530 - DNA, 1048 bp, Homo sapiens
tttagtcatgcagtggtttgcaagctttgtttcttaaagccgtaaggtatcgtgaaggtggctcagaatacctcgtatattgaggagatacctgtgtataggaagccaggctcttccttttcaactaaaggagctttacttttatgtaagttgcaatctcaaatgatattttattcatttaaaaaattttaaaatatctttattcacgaatggaaactgtctgctacattattaaatagtgaggtatctcagttcacaccctaatatttgagaatgaagccatgaaaggcaactatcataattatctccaaaattatttctttaaagactaaatactagattggagctactgcttatttggtctcatgcaaaattgtgttcatccttgtgatattttagaaatatagtttttttattatactttaagttctagggtatatatatatgcacaatgtgcaggtttgttacatatgtatacatgtgccatgttggtgtgctgcacccattaactcgtcatttacgttaggtatatctcctgatgctatccctccccactctgcccaccccataacaggccctggtgtgtgatgttccccttcctgtgtccagatgttctcattgttcaattcccacctatgagtgagaacatgcggtgtttggtttttttgttcttgcgatagtttactgagaatgatggtttccagcttcatccatgtccctacaaaggacatgaactcatccttttttatggctgcatagtattccctgatgtatatatgccacattttcttaatccagtctatcattgatggacattcgggttgtttccaagtctttgctattgtgaatagtgctgcgatatagtttctagaaactataggcaaaagttgcttaaattcacagtttaacactttgaattttgctttgtcacctgagaccagcaattcattgagccaggttatctcctttggctttcagaattttttctagctcatggtatacagatctgttgtctatatccaacagtcctctctcagacatagaatag

SEQ ID NO: 24531 - DNA, 1050 bp, Homo sapiens
acaagaacaaacacagtaccaacatttatcattttagttaagtgaaatgctaggaatcaaagtgacaggctctgagagaagttatactgtggaataaaactttatgatccatttgcaaggacggaaatgtacttggctcatcttagtaagtaaataatgctaaatgtatttaaatattgatctgttttcagtggaagggtgaaatgaatttcaaaatatagaggctataaatgtatacaaagcattttctactgtactaccaatattgtgctatgtcactttacgaatctgtgagtaagttgctgaaaactgcaaattttgttataagttgtagtagtcatctatcaccaagtttgtatgttgaagtcaatgtacctaagggaaaatagtgacagagacagattagtttctgcatagcatctgtcagtgtagatagctctcaccattttataggtgagaagcttaactatctttaacaggtaatataggttctattctaagatccactgtctgtttcctttaacaagcaccgtgatgaggctgtaacttctaccttgatgtttggagacatgttcaataatcttgagcaaacataatacttcatttttatttttcaaaagatttacaaattatcaaataaatttaattttatacaaaaataatcccaaatgacagacatatttaatctgtctggggaaaaaaaagaatatgcaataggaagttttggtattttctctgccgtggtgctgaggatatttaagttaccgggtatatttaaggtgctgagaatttttgttagaatttgaagagaaaaacacagaaggactaaattttcttaatgtattgaaacaagaactatttttatctggagataaattagacaataataacaattttataaagttaatttatcagaaaactaaaaagcgatattgaaataagtctattctgtttataaactaattctgtcttgcatagagtgaaatttgatgtgaacagcaagtagcaaaatttgctgtagtttcttcaatgtttgctgaatttttgagt

SEQ ID NO: 24532 - DNA, 1064 bp, Homo sapiens
tgaaaaaatcataggttgggtttattgcaggcttaaattatttttataattgactagattattggcaatagttaacatcttcaacacagtcattatgtgtgcaatcttgtacttgtatttgaaagtgtatttaggggctatatagtaaaggatactagctccagaagactgtagtatactaaaggtatccagagaagttaacattcaaatacatcctaacagtgaaatttggagagaccaggtttctatcacttttaatattatttaaatattattggaattatataaattattttttatttttatgttagatcaaccatcttttaagccagattgtgagttatccatttggttattttttcctttaatcaattttattgaagtgtaatttacaaacaatcatattcaccaattttaagtgtgcattatgatgtgttttgacaaatgtatacagttatataagcaacatgatgccctcctctcaccccaagtccaggaatttactgatctatttttaataattatagcttattgttctacatattcctgatgcttctctttactatttgttttatatttcctctcttttttttcattttggatagttttcaacactatcaggttcactgatcttatcttctgcagtattaaatctgctgtgaattgtatccagttctttacttctattgtatttttcatctctacaaggagttctgtgataaaatatgcataatttttcgaatgactagggggtcaaatcctgttgctgatgttttcatttgaggaagttccttaattattcagtgccttgcaatcttttatctgaaaaatgggaaaacagttccatctgtgttgtaagatcaactacaactatctatatgtaacacttaaaagtaaaaagtaaactttctgtaagtaccaactattatttttattatcagttagtatttatgacttattaaatgcccattcttagaaaaactaaatatgcctattatttgtaattctcagctaagcgcatcacgttcctaagaaaaagacccttacatcctacttaactcgtc

SEQ ID NO: 24533 - DNA, 1059 bp, Homo sapiens
tggaacaggaccgagtaatttaatgctaaatttttcattttacatataattcattgaaaaatacatgtatgaacaaagttcaacctgaacactgaatgatctgattgtataacttgcttctgggcatctagattcatgaagctgattccctaataaaggtaagtcattctggaataagtgtatccccttctagtaatttctaaacaacaaattgcatttgcaatatattgtcatgggttataactttagtctgtgaaaacaataccatgatactttttaaaaaaaaatttagaaaataaagtggaacaaaaaagcagaaaaccaatggcagcactaacagtgaaaaagtcgatctgctctaagtgctgcctcatcacccttgcctattaggcaaattatttttattgatgcttatagaagtaaactaatattcattttatttggacatcttatatctaatacccaattttctttcatcattaaaactttaaaatcctacaaatatttactttaatagaaaatatactgtgaaattagacatgatagactctggggaagcatttatttgattaggaaaggttagttcaagctgttctttatgaaggaatattaataaattcagaagatgatatatttacgactaatatattttatatttttaccaagtatgtgaagtcaatttataaatcacagaaaattatcaagattaacaccatttacaactattgtatatattaagtttttatgtgctatatttgacaactttagatatttactataaattaaatatcaagttcattctgaatagatgtgtacaaataaagtgattgtaaatttattgaataaagtggaataaagtagtagtagtatttagaataatatactgaattaaaaaatgatttcttccaacattcatagtagaaagcattattaatatgataaatttggccgggcacagtggctcacacctgtaatcccagcactttgggaagccgaggcgggcagatcacgaggtcaggagatcgagaccatcctggctaacatggtgaaaccctgtct

SEQ ID NO: 24534 - DNA, 1072 bp, Homo sapiens
tagcccccgagcccccgacagaccctggtgtgtggtgttcccctccctgtgtccatgtgttctcattgttcaactcccacttatttgtgagaacatgtggtgtttggttttcttttcttgtgttagtttgctgagaatgatggtttccagcttcatccatgtccctgcaaagggcatgaactcatccttttttatgtctgcatagtattccatggtgtatatgtgccacattttctttatcaggtctatcattgatgggcatttgggttggttctaagtctttgctattgtgaacagtgtctcaataaacatatgtgtgcatgtgtctttatagtagaatgatttataatcttttgggtatatatctagtaatgggattgctgggtcaaatggtatttttggttccagatccttgaggaatcgccacactgtcttccacaatggttgaagtaatttacagtcccaccaatagtgtaaaagtgttcctatttctccacatcctttctagcatctgttgtttcctgacctttaatgatcaccattctaactggcatgagatggtatcttattgtggttttgatttgcatttctctgatgaccagtgataatgagctttttttcatatgtttgttgacagcataaaggtcttcttttgagaagtgtctgttcatatccttcgcccacttttttgatagaattgtttgttttattcttgtaaatttgtttaagatctttatagattatggagattagccctttgccagatggatagattgcaaaaatgtttacccattctgtaggttgcctgttcactctgttgatagtttcttttgctgtgtagaagctctttaattagatcccatttgtcaattttggcttttgttgccattgcttttggtgttttagtcatgaaatctttgcccatgcctatgtcctgaatggtattgcctagggtttcttctagggtttttatggttttaggtcttatgtttaagtctgtactccatcttgagttaattttttataaggtgtgagggaagggtccagtttcagttttctgcatatggttagc

SEQ ID NO: 24535 - DNA, 1050 bp, Homo sapiens
ggaacttaaaatgaatatgagtcagcctttcttactacatattgtagattgatctcttagtgttttgatcgacagctagtatctcagtcgtaccatagatcagttctcatttctgatgccactagtgtcacaaaaattgatttgccattactctgttacctctgatctttgaagtggtagggtattaaacttttctattggtgagaaacataattttggcacagttatgtttcaaatatatgttattgattgcaaagagaatgaatctttacacaatgctaaacaaacaaatacacataccaggtagatagtgactcagtgatatcagcattttacatactaaattattgcttgtagtctcagaaaatagtatttaatccctaaagtatacctttaaaattagaaaagatagtatggcaaatttagtaacttttaataagggctcaatataatctgttgctttagaattccatcactgtgcagaaaattgaccttattttgtgcatgtttcatttttcaaattgattttctgtattttacctctgtaattactacatatgtttcgaattttgtcttcagtcatttcagctaattgaatgtaaaatttatatgatggttatattgaaaatgatttaaaattattggttggtgaaattgctgttatattggtattgatatacaagcaataattaccttactttgtagagtaattacaaggatgatactcctctacttatagttgtgggagtttgattcatattatattttttatttgttgcgaattttattttcaggtttatgcatttattctgtgtgatttttggcatcctggaaacctgtgcccactatgatattttttaaataccttaaaaaattcttcactacataatctgcaagactgaagttctagtgtctttgatttattcttcagttgtttgcaatgtggttggaatttatggccccaaaccataatgtggaaatgagaaacaacactggaatctacattcaagcttgggccctttgctcttttctcagaggcttatccaagca

SEQ ID NO: 24536 - DNA, 1019 bp, Homo sapiens
tgtacactgtgctcacttgcgccagagaagaagcggcacagcaggggtgggctgctggtggacacgaggttctggaatctgtgcacgcagttgcacccaccgctgtgcggtgggctgcccacacatcagcgagggcgcagtgctggcaggggtgggcaaggcagcagagtgtgctcatgacagcagcggtggggcagtggggtgcacactcacatgcctgctgtaggaagagggttggcgaggtcggtcggcccttgcgcacacactgccaaagcagtgaggggaggctgcagtgagaagaggctgtgggtgggctggttttgtcggcagagtccggtctgctggacttctctgatggttaggcatggactgccagcgaagaagctatcatgaaggcatcagggaagcaccctggttaggcatttgatgctgcattgcaagcgggagtgatcaggctggggctccaggagaagctggcagcaggagaggctgctcagatagaaatggctctgaaacatgggcaggaccgccctgttcccaatccgactgtcacccaaatgcaaaagccacttagaggagcttggtgagccttgggggatagacatccctggccatgctccactgcagccattcccccgacaaaccttctgagctatgcccaggttggagtcctggcactggcatctctcaaagcagctctcgctgccagatcaagtggtttgtgggggtcctgaggtctcctgcaactaggattacgggggtctgtggcaagggtgggccactcatcacctgttaaactcaccccttccccagtattcactgggggccaggagtgggtcacagggctcaacagccccatgcaggatttccagattcctcccgcttcagtccagtatcttcatcctccttccgtccactctcagtgccttccctctgaaggtctgcttgaagtgtgctagtattcccagtgcctggctgtgtcaggtcagccatcttggctctttcctctgttttttttt

SEQ ID NO: 24537 - DNA, 1032 bp, Homo sapiens
atgtcttcttttgagaagtgtctgttcatatctttcgcccactttttgatggggttgtttgtttttttcttgtaaatttgtttgagttcattgtagattctggatatcagccctttgtcagatgagtaggttgtgaaaattttctcccattttgtaggttgcctgttcactctgatggtagtttcttttgctgtgcagaagctctttagtttaattagatcccatttgtcaattttggcttttattgccattgcttttggtgttttagacatgaagtccttgcccatgcctatgtcctgaatggtattgcctaggttttcttctagggtttttatggttttaagtctaacatttaagtctttaatccatcttgaattaatttttgtataaggtgtaaggaagagatccagtttcagctttctacatatggctagccagttttcccagcaccatttattaaatagggaatcctttccccattgcttgtttttgtgaggtttgtcaaagatccgacagttgtagatatgcggcattatttctgacgcctctgttctgctccattggtctatatctctgttttcgtaccagtaccatgctgttttggttactgtagccttgtagtatagtttgaagtcaggtagcgtgatgcctccagctttgttcttttggcttaggattgacttggcgatgcgggctcttttttggttccatatgaactttaaattagttttttccaattctgtgaagaaagtcattggtagcttgatggggatggcattgaatctataaattaccttgggcagtatggccattttcacagtattgattcttcctacccatgagcatggaatgttcttccatttctttgtgtcctcttgtatttccttgagcagtggtttgtagttctccttgaagaggtccttcacatcccttgtaagttggattcctaagtattttattctctttgaaacaattgtgaatgggaattcactcatgatttggctctctgtttgtctgttattggtgtataag

SEQ ID NO: 24538 - DNA, 1075 bp, Homo sapiens
aacgtaacattggactacttaacaatatagaaacattgctttgtgtctgcttttccatattcagtagattgatatttttaatgtttgatcatttttaaaaaatgatccctgactagagatagcatgagattagcagggcaaactgtcgaatggacaacatatacctaattaatgaaaatatgttatagatgagtcacacttcagacattaatccataatgggtctctatttggagttgtttgaatgacatgtgagatatataatccaaaagaaataagcttagaactgtttaagcatgacctttcctaggagaaataaaaaataagttaaaaagttattttcagaaggaaatatattaaagtcattcctagagttaagaaaagaatgttaggaaaatatttacaaaataaattgtataatatctataaatatcatgggggataaataaataggaactgggaatatatctccaggtattttcacagaacagcttaatgacaaagacatttcctaaggcttaaatgtagcattattttgaattgtaaaaagacaacaaattaaacagtatttgttgtaaaaatgtatctcatatattattacatattgcacatcaagaatatttttaaataaagtgaatattatatactcgcttttttggtaaatattgcctaagtaaaacatacaattttggcttttgctctcaaaaacaagccttgatgtgcacacagttagagctgcgactgtagagcactattgccaaaggaggatggtaaacttttcagtaatgctgaacctactagcgtgtgagggcatttagcatactgatagtgatatgaactaaaggaaatgttgacactgtcctaaataatattctttttatttttaaagttacttccttgaaggcaaaatcataacctgcataagctcatagtacattaaggcttattattttgcctttgctatattgctaagaaaataaatttggttatcctgataaatttattcttcacaaggccatgaatattattttttcccaatagcttataattttattatagcttgcaagttgattgtt

SEQ ID NO: 24539 - DNA, 1145 bp, Homo sapiens
tcacatttttattagaatttgtttatattttaatcaaggcttttcattctgctgcattttgtggggcataattatgttttcataaggacatatatgatacaacatatgaattaataactaaacaggagacttagacttacttccaaatcctttttgaggataaaaaaataatgggaaagagcatcacttctagctgtagaacagcaagcaaaaaaactagaaagtttgcagattcacaacttttcatggagtcatcagagaactaaggtcgtagggcaaccagctaacctgaaacttaggaggagacatgagcacttgttttcctggagcagatactgccagatagcagtaagaatttagctgaatttttaagtcgaattggtaaagccagttgtgcactagaaagataatatagcaaccctattgactgcagatatgaggggaatttgcactgcagtcttttctccatagacttcaatgtatactcaatatctataatatttatagatattatacaatttattttgtaaatcaaaaaaaaaaaaaaaagatcgtctacagccctctgaaagcatctcttctgatacaggcatagcataagaagtacaggaatcactccgagaaaggcaggaatcatcacctggatccttctccccttccccctacagaagaaaagccttaaactgctaagtgtaggacagctattgtctgaaaaacagtgtaaaaggaagacctaaagttgagagtggagcagatactgagaaaagaaatggctatccatgtattacccatcctcaacacaagagaatactagaggaatttgaagcctgtgatgccaggtaactttggtaacaacaaatcccaaacctagcttaactcctgagtagaatgattcaaaccgcagatctagcagaaggacagtcattctcatttaaagacataaacactatttactcattctttaatgtcctacgcaagatatttagttttaaacaaaatgtacaagacgtgtacaatggcaagaaaaaaatgggcacactgccaaaataaaaagaattttataaaagcaaagatatgacttacataataaaactgtgagacagaaaagttttaattactgtcattaatattttaaagactcaaat

SEQ ID NO: 24540 - DNA, 1013 bp, Homo sapiens
atctgtatttaaaaaaaatctccccaagtgatcctaatatgcagtaaaatctgaaaatccttcctctagaaaacaaaaataaaagtgcctaataaacaatgattactgtgtattctgaaaccagaaacaaccattttcttaaccttttatggtttaaaaaagtatggtaggaaagttattttaaaaggaattaaaggtgattttatgtgacatatgtttatttttttaatgcaatcttcattataatggttttgaattaaggtataacctgtttttcttgtggagtgtatgcaatagaaaatcacccaacttaagagtcagaaaacatgagtgtgtgtggtggttctgccacttcttaaatatattgccttggctgggttctcctataagacttactttcttattgcccatggtagtacaattgttatagcatttcaaaaattaaatggtgtgtttataataaaggctatatataacaaacccaaagctaacatgggtttcccatactgaacaggcaaaagttgaaagcattccctctaaacactggaactagacaaggatgcctcctttcaccattcttactcaacatagcactggaagtcctagccagagcacttaggcaacagaaagaaataaaggtatccaaactgggaaagaggaagtcaaattgtacctttttgcacatgacatgatattagatacagaaaaacataaagactcaaccaagaaactcttggaactgataaatgaattcagtaaagttgtaggatacaaaatcaacatataaaaatcattatcattcatatatatcaacaatgaattagctggaaaagaagtcaagaaagtaatcttttttataaaagccacagcaaaaaattacatacctaagattacattttaccaaggaggtgaaagatctctacaattaaaagtataaaacactggtgaaagaggacataaaaatattgtaagatgactaggcacagtggctcatgcctgtaacctcagcactt

SEQ ID NO: 24541 - DNA, 1073 bp, Homo sapiens
ctcaacagggtggggccctaattcaatgcgactggtgttcttataagaggaaaagacactgtggagaaaagaaagaagaaaaggaagattaaaagccatctgaggatacaggaagaaggtggccttctgcaagccaatgagagaggcctgagaagaaaccaaacctgctgacacctggatcttgaccttctagcttccaaaactgtgacaaaatatatttctgttgtttaggccacttagtctgtgggtttttttttttatgtctgtcatagaaaacgtaatatacagtactttctggtgagtaagtttttattttccctgagtgaatttttagtagcacatatcttttctgtgctgaaaatgtgagacctctgatgatttgatgagcccttctcttaccctaacttgcttttacacttgtaatattataccaaaactaagtgctttctattcttattttcttgttagtgtgatgtttcacttagttgcattattcattttgctagaaattttgaatacatttgctaaagctggaatgaaaatctcaataaatgaataaataatgatttagtgacatctgccgtgtgcttgttcactcgttgatctttaagagtgaaattttccaaaagagactgatcattaggggtttctgtagatcttaagtatgatgctttttaaaaccttttatcagaaacacgcttctttgattaacatgaatataatatagtgatgtagttaagagtatatggtctggagttaatgtgctatggtttaaatcctggctcagcctcttggaagctgggtaacaatgagtgagataatcaattaaattagagcctcattttcctcatctgtagaacaagagtaataatagttgtgttcaactcatagtactgtgatgaagattgaataagttaataaatacaacagcacctggttcatcgtaaatgctccctacatttgggctattgttatttttctaaattctattgcttgcttgtctgaacatcatcttgggttaatattgttactactggaactttattgtgatattaacttaaagcagatttctc

SEQ ID NO: 24542 - DNA, 1033 bp, Homo sapiens
aacagctgcatagtgctagtcattgcacttgagtcccaggaagatattgttatggactgaatgtttatgaccttccaaaattctatgtaggctcctgcccccaatgttatagtatttggagataggacctttatgaaggtagttaatgttaaatgagattataagtgtgtggtcttgatctaataggagtggtgtgcttataagaagagacaccagagagctcatactctctctcaaccatgtgaggacataagaagttggctttctgtaagtcagaaagagagctcttaccagaacccaatcatactgccattctgatctcctccagactccagatctgtggcaaaacaaatttctgttgtaaaagccaccaagtctgtggtattttgttgtaacaacctgagctgattaaaacagccataaataataagtgtaatacataaataaggttaatataacaattgcattattaacataaagtgtaatacaggtagaatattataaggcaacgacttgtggaacacaggaaaagtgggaaagagatagggaataggaagtggtgtgatgaagggaatcttacaacattaagtaggaggtctgggtaggcctaattgaaaatatgacatttgagcaaacacatgaagtttgtcctgtggatatttgggaagttcgcattctaggcagtgagaacagccagggtcctggccctagggtggcatcatgtctgctgtgtttgaagagttgcaaggggccagtttggctggaggagagggatactggaaattaattagcaggcaataagtttggagatctaataggagtgaggtacctcagggccttttaagctattatagattttaggttttactttgagtgaagagaggaaccattgtagggttttaaggagaagggtaatgtagtgaagggatttgactgactactgtattatgaatagatgttaggaggggccagacaaaagcaataataccaattaaaaggctattatagtaatccaggcaagagaagatggtgg

SEQ ID NO: 24543 - DNA, 1063 bp, Homo sapiens
aacaacaactttccaagacatagccagtataataagatataaagagaaataataaaaagttaaaaaggttggagacaaagttaaagtacagtgtttttattagttattgcttttcctgtttgtttgcttgtttttgttaatgtaataagtgtcaagttgtcatcagtttaaaataatgggttataagatattacttgcaagcctaatggtaaccttaaatctataaacatgcaacagatacataaaaagaaagaaattaaacataccaccagagaaaatcatcttcactaataaggaaggaaggaaagaaagaagaccacaaaaccactataaaagaaatggcaaaatggtgggattacatccttacttatcaatggtaacattaaatgtaaatggactaaactctccaatcaaaaggcatagagtggctgaatggattttaaaaaatgacccaacaatctgttgcctacaagaaacagacttcacctataaagacacatagactgaaaataaacagataaaaaaatgacattccatgcaaagtaaaactaaaaaagagcaggagtagctatacttacatcagacaaaggagatttcaagacaaaactataagaagagacaaagaagtttattatttaatgataaatgggtcaatttagccagaggatataacatttgtaaatatgtatgcaaccaacactggcacagccagatatataaaggaaatattagagctaaaaagagacaaagaaacattggacttaatctgcattatgtctcaccatatacaaaagtcaactcaaagtggattaaatacttaaagctaagacttgaaactatgaaattactaaaagaaaaatttagggaaactctccaagatgttggtctgagctaagatttcttgagtaatataccacaagtacatgcaaccaaagcaaaaatggacaagtgggatgtgtcaagttaaaatcttctgcacagcaaagaagataatcaacaaagtgggaagacaacccacagaatggaagtatttccaaactgttcatctgacaagggattataa

SEQ ID NO: 24544 - DNA, 1023 bp, Homo sapiens
ctttcgactctgagaacaggtattatattctatataatgccaacatatatgtatgtataataaggatgaatatttatatttattcttaatatatcacttttagtatgatacatatttttacacaaacaaattgaaattgaatttgaagtcttccagtggaacgtacctaacatattcaaataaagtaaaatctcaagtcctggtaagtgtttcttcatccccatcaccaactccattactggtatttggtattaggtacatatccactcctcttctggcttctggctctgggacatacccagctggcataattggtagtgtggagaagggagacaaatagtcttcctacaaaccagaagaggttcttaagaggcattccacctttccaaccactgtgacattgagatggcttacagtaatctcatgctcagttaaaaatgacaaaaatatttctcaacactaaaatgattctcaaagccttctcatttcttgtatatacaaagactcagagacttgcatacacagataaatttatcatctcttacagaatcttctcaactgatattcttgctttttgatttctatcagaaacaaccatttcccttgctattattgattagttataaaatgccatcctttcaccatatagtccagatactattaataacttcttgttggctccaggacaaattcaacattagtagcatagttatcaaatccttggtagtaatgactatgaagagcaccaataaatagcatgcttcttccctatacaggttctaaaaaattaaaatatctgaaaaggtcttaataaaatgtgacttttattaatgataaagatgaagttggaagatacagcttattaagagggcaaaattgccctgttaattgaatcagagaatcaggcagatttagccaatatgacacagggtatttttgtcctttgggagaaaaaattccacatcatcaaaataaactagtaagtgaataagaaaataagtaagtaagtaagtaaataaataa

SEQ ID NO: 24545 - DNA, 1069 bp, Homo sapiens
tgcctttcccaccataatatccctcactctaccagttagggggccaatgtgggggttctgccagctgctaaatatgtccatgccaattatgcattctggcactggggaaatgaccacaggatgaattcagggacccactggacccactgcaagtcagatctgagctaaaactccattaattacctgatctccacaagtttctactttaaatggaggcccacaatgacgttttgtgtcctctggaatcaatgtcagctcagagccagtgtccagtagtccctgaaatgcctatcatttctctttcaccagaagtctccttggggaaggatggaagaaatattaacagcataaattgtcagtagtgtagtggggtccttccttaaggggaccgggactccccttcattcaaggggtactgggtctgtaaactggatcaagtctggaaattgattgaggggccatgtttctctgtttttataatccaaattggtcttttgtccatttgacctagaagttttctgcttatgtaaattaaggaggaatgcaataggcttcctattaattttaattctaggaacactgtgattaattagctaatgcccaaactctacacaagtcagagtatttttaatgctgctttgcctctgctgtttattacagtagctatgctcaccttgattttgatggttcagtgccaccacttggcttctgctgcctgggatccaattattcccactgtatttaaattttgtagttgagtgactgtggttcccaccgttagatctgacatatggagaagagcaattacagggttttttaaagatgcagatgctgccctcataaacttatttcacaaggcattggtcaagggtatgtcttctagacactcccagccgggatgagtatgtctaaagtgactaacccacttcatcatcccaatctccctaagtcttgggatctcttcctctacattaaaccaagggagatcagacattttcagctcactcagtgtgggacatattttaatccatattttagctaactaagcaaataaactattaggattttt

SEQ ID NO: 24546 - DNA, 1085 bp, Homo sapiens
tcctttgtttctgtctgagtctgagtattcttgccattctgttttccctagtgttctccatgaggtgaatttagcatggacttcctggaaagaatgttggaattctagggaagctggatgactgcctgtcattttcttcttcctttgtagaaactgtgggtcaggaaaatcctctctgtctggtattgtgccgacttggggaagggaataaagtggtttagttgaactaagaccattcttcttacccttctaagtcagatttaattctgttctatggaacatatggatgtttcagacatatttccaagtattggaattttcagaaggttattgtggtctgtggaaagttgctaggtgaactttctgttgggggtggggaagtggaacttgagactttctattttgctatcttgctgatgccactatttatttagtcttttgtatcagtattaatgtatatacaatagcgtactgacattttgattggaattgtgttgaatttatagatcaagttgggagtaatttattccacagtgttgtcttctaatccatgaaaacactatttctaaatttatttggatgtttgatttgttttatctgaattttgtagtctaacatatatagattttatacatattatgtaacatttacacctaaatgtttaattttttggtgctattgtaaatttaattgttaaatattaagagtacatttactaaatgtttattgccatattttgagttttgtgtattgtgactttgctatagtcacaatactatagcaccaaatacacaatactatagcactatttgctatagtcatttattggtttcgggaattttttttttctattgtagatacattgtgattttcttcatagacaatatgtcatgtgcaagtaatgacaattttatttctttctttccaatccattaaactgatctttctctttcttgccttattggtctgagatccagtacaatgttgactagaagtggtaggagaggaattccttgccttgattccaatcttgtggaggaaaccttctagtcttttaatgttcattttgttggtttaggtttttg

SEQ ID NO: 24547 - DNA, 1039 bp, Homo sapiens
ttttgtaactcatagaatatgctgttttaccctttgctttcaacctttgtgtgtacttaagaataaaatgagtctcctggatactgtttttaatccattcagtgactctctgtgttttgattgaataatttaacttctttatacttgaagtaattattgattgagaaggatttattattgtcatgttaattgcttttctgttttttaattcctttgttatttttttcctatcttgctgtcttcctttgtgatttttttcttttcatagtgatatactttgtttcctattctgtatcatttacagtttcctctttgtgattatcatgtgtcttagtctgtttagtgttgctaagaatacctgaggctgggtaatttgtaaagaaaagggatttatttggctcatgattatgcaggctatataagatgtatggcaagagagaaaacaagagtagggagtagaagtgccaggccctttttaacaaccagctcacaccagaacttatagagcaataactcacttattactgcaaggacagtgccaaacctttacattttttcatataatatatcatttaaaaagttattgcagctctagttatttgtaatactttaatcttaacttttatattagaattaaaagtgatttatataccaccattagagtattagaattttcttaatttgatggtatacttacctttgccagtgagttttatgcctgcatatgttttgatgttggtaattagtatcttttcattttaactagaagaactttctttagcatttctagtaaggcaggtccagtgatgataacctccttagattttgtttgttgaagaaaataattatctttttatttgacagctttagtggttatcaatttcctagtgggcagttattttctttaagcactttgaatatgtcatttcactttgacctgacatgcagagtgttggctgaaaaatttacagataatttcatgaagtttcctttgtttctgataaattgcttttctattactgctttcaaaattctctct

SEQ ID NO: 24548 - DNA, 1054 bp, Homo sapiens
ctcctcccagctcttccctgccccactcctgtatcacctacatggaccatgaagtcagccaggtttatttgggttatatttacattcacatggattgaatgacatatatatatatatatttaacagcattatgaaataaagtaacttgtccgtttgtgtgtgcaaacaaacatggtgtaaaacttcaggtttatctttataaattttttttatctttgttagccagcaattaggtccatttttatagatgtttctggtaatttgtttgttttagtcacatacatgaaatttttagaaatattatttaagttatttaaaggctgatcttgaaggacaaaggttttcagagtaaaaatctaaaagttttaaggttgttatcttgtgatttacttaaggcttatgtgtagcttgaaaaagatgttaaaatctctttgctgtcaagagctagtttcaatattttagaagcacatgacttaaaaatctgcactaataattctcattcacaacattgaaagttgggatttgttgagttctttaaattggctataagttccatttcttgagtaaaaagctattgaaaaaaataattagaatagttagagtaaatgtcacataaattaaaacattttgactaaactattagtgtgtgtttgtgtgtcagatcaacatagtcatgtgtttcttagcaaggaactattcacatatgttttgcttctgctcaggataagagtacaaatccctctggctctttctgaacaattacaacaaataattttatttgaaaatatttcataaataatttataattgttatacacacaaatattatatgtgtttattcttatgattcacttcaactttatctggcaatctcaaatgataactgatatctctagctgcttagttttttattcttgttaaatagaactcatggactcaggtttgcagacatccaagttgtgttgttcagttgcatctccagaattaggtcatctctccttggggggcagtagatggcctccctcagaactaaccagtctgcagttttgtttcct

SEQ ID NO: 24549 - DNA, 1076 bp, Homo sapiens
catgtttctatatacatcattctctacaaaaacttgattggttgtgagtatttttatttaacaaaatttaagacgttggtgaagatgtagttgttttatagatcccattttctcaatacgaagcaaatttcttgttaattttttattgattataacaaattatgaatgtgaaatgtacatggcttgcactcgaaaaatgcttcagatattgcccatctttttattaaaatgagattaaatcaagatggtctaaaatattataagtttacttttctttgttcttaatttaagacaagttagaactttcaaatgaaccactttacatagatttatattcatgcccatctgtctgcatataataattaagaaaaaatattaaaatgattcattttccctactttaaaattattttaaaaggcaaacacttcatttactttcatttctctctctctttttttttttttttttttttttttgagacagggtctttctctgttacccaggcacaagtgcagtggcatgattatagctcattgcctcaaaatcctgggcacagcctcccaggtaactaggactggaggcatggaccaccacatcaagctatttttttttttttatttttttagagatggggtcttgctgtgttgcccaggcttgtctcaaacctttgacttcaagtaatccttccgccgcagcttccaaaagcactaagataacaggctgagccacctcactagcctcatttctctttttattaaactactcaagttgcttcttacaaaaagacttttatattctctattattggggatttaaaaaatataccctatcatttgccttacctcttatgaatgggattcctgaagaacatgacaaataacaaataaaatgtaaactccagattccagcaatgaaattctcattattttgtatataattcacatttaacttcttattttgaaacatatgaatgagcaaagtactatttctggaggggactacatctggccattcatttagaaacctgcctaatgtgtttgaagggaaaataaaattgtgtaaattagtggaaagaa

SEQ ID NO: 24550 - DNA, 1050 bp, Homo sapiens
aatttcaattcaagctgacattttatgcttagttttaatgaagtgatcccagggaaattggtattttcctatctgatacaacgatatatatatttgaatgcaagattaaggcacattttaatatgctttatttgtttctaatttttccaattaatttttttacaattaatgtcatttaaaacttttgatatagcattataaaagaatctcaggcagaaatcattagtattactaaattatttttattgcattattattactactttaatatagtactgaaagaactatgcagcttgagacttgtattctgtgaaatgaaactttgaattagccaactttgaaagtcctttccagttccaccatgtggagattatgagctttactctgcagcatataccaaagaatgtctaccatacatttcagatgagacctttgagattgcctaccttaatcttattatgtaaaagatataaaaactgaggtgaaaagtggtgaaattatcctttttatatcacaaagaacaaattgtcttgtctcaagtagaatagattattagccaagttctatctatttgttttgttttaagtacttatccccacttccatcatttgttccttgttcatgttgttgttcttgtttgttttgaattgtttctggaaataacagtgagttaaaaactctgccagctttatatatatatatatatatgtaatattatatataacatgttagatattatttataatatatagtataacatatagtataaaggtttttttacacaaaactttaaatgcattttgttgtctaaacaaaagaaattattgtattcacatgtgttaagatgtgcagttttttcattttatgtgtctgaaattagcatgagtttttcaaacatggtcacagctgttcatatagccattgcttcatctagattatgtgtactctttgtactgcatgtattgagtttaattgtcattcactattttttcaaaaatattacattattgttcaatattagaacaaaaagttattgtctgaagagaacaa

SEQ ID NO: 24551 - DNA, 1051 bp, Homo sapiens
gcataaagtcttaaagtaacaatttcttctctacagaaagccacatcttcatacccaaacacaggttcagatgattgtaatagtgtgcggtatccaccaaacttcccatttttatcagtaaaaactttaattacattcagcatttaattattcatcactctgatagaaaagcatttgtgcctctgcttcctttctctttcctctgctttctattttggttatagtgcatagaataaggaagaaaggagagaaactcatagcatttcatttcctttgggttcctaaacctacaaaatgattaacctaataaagccattagattttataatttaaaaaaatcagacgtgaagatttcagctattcatgctcatatttgtaaatgtaaaaaaaaccttatttttattacttatctttattaattttataatctatggaaaatgtaattaacacagatctaaatactaacagtgtagatattgtgttatttgaacattataaataatagcttagaactaagctgtggtctctgaaacattcttaggagtttttcctccaaggcccttgattatttgccaagtaagattaaatagaatcctgatgtatccaaagaaaaaaatagaaggaatgatgtttccagaactttgagagaaattgtttatgaagggcagtccaaaaattcacaggaaaacatggtacataaacatggagcttgaaatcaggaaacatgtactattttaatttattttattttattattattatttttttttttttgagatggagtctcgctctgtcacccaggctggagttacagtggcgccatcttggcctaccgcaagctccgcctcccggattcacgccattcccctgcctcagcctcccaagtagctgggactacaggtgcccgccaccatgcccggctaattttttgtatttttaatagagactgggtttcaccgtgttagccaggatggtctcgttctcctgacctcgtgatccgcctgcctcagcctcccaaagtgctgggattacaggcgtgagccaccactcc

SEQ ID NO: 24552 - DNA, 1060 bp, Homo sapiens
tgaatgaagataaatactattatttattaatagttagtagactcaatatgatattaagatgacaattctccctcagatcaatatagattcactgcaatagcaagtgtattgtatttacttactattgcatatcaatatagattcaatgcaatagttaagtgtattgtatttacttaactattgcattgaatctatattgataagcaatagtaaataaaacttattttgttaggtagaaattgacaagttgattctatccatatagatatacaagggatgtataatagctaaaaatgcattaataaagaaaaaagttagagaattaacaaagtaggatttaaaatgtattataaagctataataatcaagactgtgtgttattaacataaagacagacaaaggaacagaactgaaaatctggaaataaacttaacacatacgtggacaactgatttctaacaaatatgcaaaggctgtttagtagagaaagaatagtagtttcaaaaatattattagaacaactgaatgtctatgtgggggggaaaaacaactccaatccataacttataccatgaaaatattaattcaaaatgtaaaaatataaaattataaaagaaaacataggagaagaacttgtgtaaccattgattagacaaatattccttagatatgacaccaaaagtatgagtcataagagaatggattggtaaattagatatcattaaaatttaaaaacttgtgcttttcaggccgggcatggtggctcacgcctgtaatcccagcactttgggaggccaaggtgggcagatcacttaaggtcaggagtttgagagtagcctggccaacatggtgcaaccccatctctactaaaaatacaaaaattagctgggcgtggtcgtgggcgcctgtaatcccacctacttgggaggctgaggcaggagaatcacttcaacctgggaggcggagcttgcagtgagccgagatagtgccactgcactccagcctgagcaacaaagtgagacttcgtctcaaaaacaaacaaacaaacaaaaaaacttgt

SEQ ID NO: 24553 - DNA, 1029 bp, Homo sapiens
gtgtagtctccacaaagaatgcagaccaatcttaatgatttggttcagcaaatgtttctcttgttccccatttggtgcaggctgaaccttaaacatattgaagaatagcttgaagttttagcttctgtgcctgcaactagtttttctgtcatctcggccaccactttgctttgaaccattgtttaaacatatattttcattcaaagaagggctttttaaatttaaaccacagaataaaaaatatttctagataagaggcaatgagacagtgctactaaagattgtcatatatatatttatatatatgtgtatatatatatatatatatttctaaagcacagggtgagtaggtgtcacagaataatatttcattatggttcctaatagaattctgtttatccaaaacaaatgtgttagaattttattttgaatattaactgctataaataactggctttgtatgctcctttagaaaaaaataagtgaacaacaggtaaattagacattaatcaagctttagaagaacattagcaaacattaacaaaacttgtattgctcttaaaattataatagcttaaggcatcgtaatttcaataactacattcctctattaatatttttggttcagaaaactggaatatgagaagagctttatattagcctttgatatgatgctttaccttgtaaacattcaatttggagacatgcttatagttttagaaacataaagcacttaaagttgtttagatgcactaaaacttggtattaatctctggttctcttttatattcatttaattatttcttaaactaattgaaaataattttgaggtggtcggtaccacccataattcgtttttaaagcataaccacttatttataccttttctattatttctaaaatcatcctaagagattactaacatgaaaattcacaattgaaatgattcaaaacaaagcaaccgagaggaaagatgaaaatgaagggcaagagaaataaagtaacaagaaaatgggataaactagtcac

SEQ ID NO: 24554 - DNA, 1054 bp, Homo sapiens
gggtgaacttcagagaagaggattgactttctttcctaaaatggaaagaagaaactaaggatatttgagacatttcgaggtagaaatgagtagaaaatcaggtgagctctttttgatctcaaggaaagtggaggcaagagattattttcagagaagatagaatttatatggagcttgataacaggtgaaaattttggattaatcacagcttcttcaacaagcatttgaatgagcatttgatgttctctatggagcaacttttaaatttcacaagaataacattttgaagtactagtgtaccaaggaaattatctttactggactttaagcatcatatctaaagaaataaactttgcactcccctctccttgtttgtgactgacaagttagcaaagcaatatgccaaatgttgctatttcatggttatttctttactcttctaaagtgtaatgtaaccttcattgactattaccaattaatttttttaataaaaaactgtcaaaagtagagtattaatttccttcttaggatgtttgtgggtttcttgaataagtacttgaggtgacattaacatggatatttttaggtgtttcacattggttcttgccaaactctatatagcaaaaaaaaaagtgcctgtaagatgagttttgagaggtactcatattttccattgacagcattagaattttagatatgccccctagggaaagtacttatttgaagcaaaacttacagctttaaaaaataatgtcttaggttcttgactagaaacaaaatgactctagctgattaaaagccaggagaaaggcatcctgtctatcacgatggtgggggtgagaaactctcaagtccccttcttgtaagcatgagagactgtttatttatttatttcactgtcaaatgcaaactgatgactagactttaactttaatatgcccagttttgacattcacaactagactggcctgtaagctactagagagctatgtattattattattctttttctatgccccagagcccagcattgtgcttgacaacacacaaagta

SEQ ID NO: 24555 - DNA, 1030 bp, Homo sapiens
gtcggagtctaactctgttgcccaggctggagtgcagtggcgtgatctcggctcactgcaaactctgcctcccggttcaagggattctcctgcctcagcctctccagtagctgggattacaggcacccgccaccatggccggctaatttttgtatttttactagaaacggagtttcaccatgttggccaggctggtctcgaactcctgacttccagtgatccgcctcagcctcgcggagtgctgtgattacaggcttgatccaccgcgcccgcaaaaacttttttatatataagtacctagaagagaaggagcagaaggagcagtatgaagtttcttattaagatccagcatcgctatataaagaatgggggcattgtatgtttaagtgtgtgattaggaaaaggactttttcacacgttttcaagcctcttctatgttaaaaagctattacgaggaacaccatttcatgcatagatgtatttccctttacagtagaaatctagtccatatgttcagagttgaattcagcaagagcatgtaatattcaaagcaaggcagtgacatttatataaccttttcattttcttttgatgatactttttgaattcaaatcattacttgtagaaatatataagttcaaatatgaataaaggagtaatggaggaaaaaagtgtgttatgtgtgattgcatgcaatgtacattcaggaatatgagtaattgagaataattgtaatcacatgtattatattcatccatgatgaatatttgtgaaaagtaatgtgctagtcttttgtataattttccactgaatgaaaaaggcagataaatgatggaaccatttctcaaattataatgaaatgaataactttagaatgtaaagcatgggaaaaaatgcctgctatctggaactaatgactttatgttgcacaatagggactgtttgtatatcctggaaagtgcagtttttacattacaataaataatatttggggttattgttttataaaatggatttatttaaatgtaga

SEQ ID NO: 24556 - DNA, 1036 bp, Homo sapiens
aatggtccagaagtaggccaggcagtagaaagcatgattttgttagccattagttacatagagcaggttatgtacgtccctacctggaaagtcataaaacattcctgaaaatcctagctggcatttccagcaaattgtgagagaacacagtttacattctgaagcccaagaagcattgtttttttaatattatgtaccatttcactacttaccatttcaagagtataaaataacaatagaattggccttctcattctgatattttagaaaattccacattttcacggttcctattgcaaacaagaataaaatcttttggcagagcctgactataaaaagatctagaagctattcttataatgtaaaaaaagagtatgtttttatgaccttgccaatttctctattgataaagagtaggaagtgtggatatgatctataaacatatttttaaatgacaggcatagataaagaattctctgaagcagaataatttatggaacaaaagcagttaaggatgaaaacatttatcatgggaaatgggaatactgtgagtaaaaagttcaagaataaagtatgatttatgataatagagattctcacaatattttcagaactatagttgaataaaaatatgtagtatttgattgaaaaccaaaacagtggattaatgtaactagaaaagtttgggtttgggccaacagcggacattgaaatatgagtatatttttagaataaacatctatatatagctccagtgaattcactttgattaaaagataattcaatggataaattggataaaatatgtaaaaaaaaaattctctggctctgatgacaaaaaggcagtttcacagatttgctatcagaaattactttttcatagaaacctacatatatttctcttttattctgatatgagcttctcatgtgagattagtcagtgtgaaggccagtatagctcagacaaagctgaccacagcatagaaacccctgccaacactaaggtcacacccctctctggggtgtgactgaccag

SEQ ID NO: 24557 - DNA, 1034 bp, Homo sapiens
aaagaaaattatttgtttttccttgagaaaatcagtggatatttgtgctagatactgaaatgaagaaccttggagatggagcaagttggagaaacaaatttttgacttgtcaaatttgagatgcttagtatagatcccagtaaaattattgggtaaacaattggataacctactttgaagaggtttgagttgcagataagagtttggggaacaagtaagattacatatcaaaccatggatctgaataatctaattcaggctctacagtcactaaatcatacagcacaagaaaagtctctccatcttgtagctgcacccactgggatacaagtcctcctcagtccctgtggcaaaggaaaagaaagctctcatacttgctttcctatctttaaaatcagaagtgacataacccctttctctcacagtttgttggccaggaccagttagatgtccttacctaactgcagggacctgagaaatgtggaggagtacatggagtgtttgtgaggactgttgtctcttaatatgtctcacttctaagaagaaaaacatggattcagagagaaaaagccattctcaccaaaatgttaagatagcccaccatatttttttgtacatttctaaaggtaatttagcataattatctaggattagaacaaaagcaagttgcagtggaaatgccagggggcggcttagaggtggcaggataagaaggcttttgctttattcagtaatctctataattccccattagccactttttgccaaatctgaagtggacaattaatgttttctctgacctcatataaaatggtatgcaaggccgggcgcggtggctcacgcctgtaatcccagcactttgggaggccgaggcgggcggatcacgaggtcaggagatcgagaccatcccggctaaaacggtgaaaccccgtctctactaaaaatacaaaaaattagccgggcgtagtggcgggcgcctgtagtcccagctacttgggaggctgaggcaggagaatggcgtgaacccgggaggc

SEQ ID NO: 24558 - DNA, 1897 bp, Homo sapiens
ttgtttagtattttgaaatgggaacatctctagcagttttgttcatttgggtcacagctgtgccatctatttgcatgtttaccaaatggttactgaataacacatgcctaagaaaactaagcttttgcaaaagcttgttaatatttgcagtcctcaactgaactcggagctcacaaatgggctttttgcaaaggagcctgaattcttggcaatgcttgataaatgtcagtcagtttctttagccatctgcaaataaaggtatattagacaatgatgacttcataacagtcaaagatgtataataattaatccagggacacctgtgcacagttccttttacaaagctatcacagtgtattatactataaaaatcataaaggattttttaaagaacagattttatctgatgtgctagcaaagctaaagacgaaataagctgcactgattattggttatcttttacagagactcacgttgcgacatgttaacagtaaccaatgtctcgatgaaccttctgaagaagacaaaatggtgcctacaatgcaggactgtagtggaagcagatcccaacagtggctgctaaggaacatgaccttgggcacatgaagatcatgtcctccaagccatgaaagtgtctacgcttttgtttttccattatttcaattgggggaaaatattaactttgctgaattgaaagttttaaaaatccttttagtattctaaaacacaattgtttctaattcgtttctagaaatgtttgcttatttccctactaaaatttgtatctgatcaaagcacataagaatataaataatagcaaactactattaaacaacagaacaacttgtaaaacaaattgtgtttgctttaagaaaaatgtttattgcactcatgtcatagggttaattggaggttattttatttttggttgtcatggtgattgaaagagataatgtaaatgccttataaaatcttcattatgaaatattatcagttgctttataaactcactctttttatggatccttcatggaaacatgtttgatttctgtgtctacaacagggccacatattaaattacttctgaatggtgaattcatcttacaaaatgttccaagttttggacaaggaaaaacattacattggatattgaattcatggagcctttacagaagcatcacatttaaaccaatgtgaattcaaaaaagagaaggaaactttttaaattcaatttagagtacataaaaaaagaaatccgcgaagcattgaggggaacaagatgagtctaatccgcagcacttcgatcactgtgagagaactcaaagtgggttgcaatcattcctaacacaggctgaaactaaacaatcttgctcctagagtttatgttggatactcaattcttaaccaaaatcttggtctccacaaactctaccatcccttttctcttcactctatagacagtggcatgccattgatgctgtacagaattgcaggtgaaagggagaattttagacttaatttttaactctattgcacttaaagattttagttaggttaccactgtcattttcattttctatgttaaagaatacctttcagtgctgtgctccagtatctaaaaattttatcaccaggggaataaactcaatacacattcattaaacttttgttgtaattaaactgctatatattgtttgccatatattatggcccaaggaatatagttataatcaggctacattcacattttcttttctcatcttaaaaccctttatgttcaaaatacattagcagaggccatgaaagtgaaaaaaaatcagatttttgctagtaagtttttatatttgacatcattttaaatgctcaaagagttgccctatatatgcatgttatccat

SEQ ID NO: 24559 - DNA, 1023 bp, Homo sapiens
gggagtatgtcactcacagcaaacttggaaagaaggctatgactcccaagaggcagtgaaccattgccttaaattaatagcagcctctcaagtccattgaggcctcatgtaaaattcccatttttcatctttacactccttttctcccctcatttcctcttctccttactaaggtaaaaagaccctgcacagcattattacttaagttgaaaaagcttcaactctcaaggactcatgtataccatatgttccacttattgctttgttagtcaaaatgcatgttatgtagaaaatggtcaatggcaaatttttataaatacagctaccccatcaaagctgaacttgaaacgttttagcagaattttaaatatgtgaaagttcattgtggtcatggtgagaaaactaaaactacatgagtttcatgttagaaaagaatttttaaacaatcttcagatggcttgaacacgtgccattatagtatctaacaaaaagtggcataaaatattacaaaacatccaacactagaaagcaatgactaacatttaatttgtttacaaaaatgtttattgtcttcagtacaaaaagttaaaaccatgattggattcataatgcacttgtcttatcccttatttatggagctagactgacatatttcaaaccaatctcttctgtggtcttctccatctcagttaatgcaacttcaaccttccagatgctcaggtcaaaaactgaaagttgcttttgactcctctatttctgtttcaactctcgtctaatccaacagcaaatccccttgatgctacctttgaaatataactagaaaagaatgacttgccaccatatccactaggtgtcactacctctaacctttttaatcgcaatatgcttattatttagttccctaatttcccagtccttgtcttgaacaatcttttctcagtacaacagccatagtgattctgttaaccatgaatttgattgtgtcacttccctgctcacaatcttccaatgacttctccctcc

SEQ ID NO: 24560 - DNA, 1049 bp, Homo sapiens
ccaaaagccccttttatgacctatcccagcgaagcatgcaaactgaacagttcgagattgtcgtcatcctagaaggcattgtggaaacaactggtgagtaaaaacagatatgccataaagtttctttataccataatgacattatatgatatgcacaatacctgtcatgaattgggcgaaatgactcagagtttacaataatgaaagtaatgatttgcctttcatttctttgtaacattaaattgataccattttgaaaattaaaatgtactgttttgatggttacatagataatattaactctggaacactcactgtaaaaaaaaagtgggatgacttcttataaatgattatgatgttctattataattacaaacttgactttcttataatcatgatttttctttaaagatttaaggctcaaaaaagtagggtaattattgagcagcctgaaatcagcatgcatattctggccttggggatggtgatttggggtgtcattgatagagctttgatatccactatgtgcaacctcagtggaaaattccctgtgtgtgtgtctgtgtgtgctgtgtgtgctaaagcagcattttaatatcgaagtgggtcagcggatttccccagctgaaccttgaccaaaatttcatttcaaaaagatatttttttctttttctgctcctgtatagctatgtgctatatgtttctccttaacatccaatataacttggtatgccccaaatactatttgctattttctgaggacagttaagttgacaaaggaaataaacaatagttatgagcatattatttggggcctacacattgcttagtttggaagctactggatgtttgagattaataatgtagtttccatataattgtatgtatacgtatatgtgtgtgtgtgtatgtgtatgtgtgtattttgagttctatgctttctacaagtactgagaagacaataaatattttagcttttaattgttttctaccactatcatctgaattatataatactaatgattatgtataaactatagcaatataga

SEQ ID NO: 24561 - DNA, 1047 bp, Homo sapiens
ttctttttgaagtaattgtgaatgggagttcactcatgatttggctctctgtttgtctgttattggtgtagaggaatgcttgtgatttttgcacattgattttgtattctgagactttgctgaagttgcttttcagcttaaggagattttgggctgagacaatgggtttttttagatatacaatcatgtcatctgcaaacagggacaatttgacttcctcttttcctaattgaataccctttatttctttctcctgcctaattgccctggccagaacttccaacactatgttgaataggagtggtgagagagggcatccctgtcttgtgccagttgtcaaagggaatgcttccagtttttgcccattcagtatgatattggctgtgggtttgtcataaatagctcttattattttgagatacgtcccatcagtacctaatttattgagagtttttagcatgaagggctgttgaatttttttgaaggccttttctgcatctattgaaataatcatgtggttttcgtcttttgttctgtttatatgatggattatgtttactgatttgcgtatgttgcaccagccttacatcccacggatgaagcccacttgatcatgttagataagctttttgatgtgctgctggattcggtttgccagtattttattgaggtttttgtgtcgatgttcatcagggatattggtctaaaattctctttttttattgtgtctatgccaggctttggtatcaggatgatgctggcctcataaaatgggttagggaggattccctctttttctattgattggaatagtttcagaaggaatggtaccaggtcctctttgtacctcttctttacctttttttaatggactctatatactatcccaacattctgtggttatatgacaatgttgggatagtatatacagaaatgggtggaaggaaagctttatgaatcccaaaactaataataaattttgcttattggtatcattcctcctttgatagttttaatgaaaagttttcagtaaaaaattcaagcctt

SEQ ID NO: 24562 - DNA, 1026 bp, Homo sapiens
atatacaatctctacctagccctttgggttgccctgtgggatttagggcttggggaatcagcactaactgattaacaactgtgctgattcttctgcttctgtgacccaggagtcctgtgtctgctgtcaaagtctatggagcttgacaagctaatctgttagtttatacagttgttgcagtgtgaattgtcctgctactaagtcccctccccatatcacacgtattgaagtagggtagaatttcaacagactcctcttaggagccatgcagattattcaatcaatcactagtatgtgattgtgtttgccaggagaatcattctctactttttcatcaccaagcccaaaggcagagagatctatggcctcacagaatggttgtccttgtttattgttttctgttttagttatttgggtgtttttaaagaaatgactattctacctaaaaatatttgcttagtttatcatgctgtcaaccatacttcaatccacttggcaaactgttttctgaacaaagttgtctcgtgattataaatggagaccatggaggtaggagaaagataaatgtttatcacaaatccctaggatgaatcttaaaaaagatgtctacaacagttttatttgaaagaaaggccagagttgtactaattagcacattggaaagtgcttctttacatggtttgttttatgggaacagaataaatttaggccacaggctgatttaaaattttttccctccgaatatagtatagtttttaagtattcacatcatgacattcaaaagtgaaagacttcaagattttgtggaaataagtgggttcatggaaagtgcaagcataggtcataaagattatattatattggcgagtttttactgtattttttccctctctttgaggcaatccaatacttgaaatcttcttttcacgacttctctttgctcaccggaaaatattcactgatgacagtgaatattttgaataatcaaaggttactgcataaaccctatcaggtttgtgccttcta

SEQ ID NO: 24563 - DNA, 1034 bp, Homo sapiens
ggcttccttctcttcaccaatttctcccttccccctacttacccacctaatccaatctcttaagaaagaatctggaaaatgaattcctaacaagatgacttacaaaaattaccttgtcccccttatcaaaggcgttggattctatggggacagcgcattggggaccatttatgtgggctaggtcaaaggtgggcagtgcctacttctgagcatccctgcagccacattatagccactcaagtgtggctttggtcactgtctggacctttcacttttctccttgtcaaataaggtggctggactggatgaatttgaagtccatggagagcatgaaatgtttatttctcttgtcctgcctaaaaggaagccagtcatggccactgggttctgtttgcctctggaccctggcctagattttccttttattacctggagtttggggtttccttgctctcagcctctccaggtatagcattcacatctagaggctgccacattccttttatctctcttcaggattatgctcataggacctatcataacaagtatattttcacttttttctttcactgtgtttgctagtattaaccccttttccccatccccatccgccattaagtagctgggatacttatctaaaaaatatagattccgcagggggcagtggctcatgcctgtaatcccagcactttgggaggccgaggcaggtggattgcttgaggccaggagtttgagaccagcctggccaacgtggcaaaaccctgtctctactaaaaataccaaaataagctaggcgtggtggtgggtgcctgtattcctagctactcgggaggctgaggcatgagaattgcttgaagctgggaggtggaggttgcagtgagcggagaccacgccattgcactccagcctgggcaacggaacaagactgtctcaaaaacaaatacacacacacacacacacactaacataattttatttattattatttttaaagacagagtcttgctctgctgcccaggcaggagtgcagtggc

SEQ ID NO: 24564 - DNA, 1049 bp, Homo sapiens
tatttttgggtacatgagataatttgctacaggcatgcaatgagtaacagtaatatcagggtaaatgggtatccattaccttaagcatttatttctttgtgttacgaacattctcttagttatttttaaatgtacagtaagttattgttgactgcagtcaccctgttctatcaacttccagatcttattcattctaactatgtttttatactcattaaccatccccaccccaacctcactaccatctccaacctttggtagccatcctctactctctgactctctgtctccatgagttcatttgtttttatttttagctcccacaaatgagtgagaatatgcaaaatttgtccttctgtgccttatttatttcacttaacatgatgtcctccagttttacccgtgttgttgcaaatgaaatgatctcattcttttcttttttgagacggagtctctcgctctgtcgcccaggctggagtgcagtggcgtgatctcagctcactgcaacctccacctcccaggttcacgtgattttcctcctgtctcagcctcctgagtatctgggattacaggcacccaccaccacgcctggctaatttttttgtatttttagtagagacggagtttcaccatgttggccaggctggtttcgaacttcggaactcaagtgatctgcccaccttggcatcccaaagtgctaggattacaggtgtgagccactgtgcccggcctgatctcattcttttttatggctgaatactacttcattgtgtatatgtaccacatttttgttatccatttgtctgttgatggacacttaggttgattgaaaatcttggctactgtgactagtgctgcaataaacatgggagtgcaatatgggatgcctttatgtcttgctggagaatgcatgccccgaggacagcaaggctggtcgttgaaattactcttctgtaattgatctttgagctgtactctccgcccctccattggtcatgcttgtaagggatggagagaaatatgcttacttctatgctggcataagaatc

SEQ ID NO: 24565 - DNA, 1034 bp, Homo sapiens
gtgagaataataataaccaatgctatagggctttgtgagattaaatgagatgtctatgtcaagtgtttgcacagtggtaggcctgctgtaaacactcaggaagagggtggtattgatgaggggagaaaatataatatcctgttacaggtttgtttaatttaataaggatctttgtcttccctgagaagagataggaagatgtattctagaaggaaatttaacaattcatgcatcgttagcattggttttgattgtttctgcttttttttctttcttgtttttctaactgctccaggttgcttcagctggaaggttgctaacatttgcctcttttgcttcctctgtggtatcaatgtcagtgatttccaaagttctttactttttcatggaaattatctttgtaacagaataattctttatgagtttttcttgtacctatccacaaacttagttctcatctttaggctttctctcctttttaaagtgcacacatgtgtattcctgtcaccgaactctttttattaactgtttaatatttttatcaaaatatttttgagcaatgttcataacccttggcattgattcctaccagtgagaagaggggatgtcctggcagcatggagtggaatccgtcctcttgttacagaccccaaatctgcagatactcagtctatctcccgaaatcatgttgttgatatcagtgagagtggccttattactatagcaggtatgagatactaccttgttattttcttttcttttttttttttttttgttatagggacagggtctcaccatgttgcccaggagggtcttgaactcctggactaaggtgattctcccacctcagcctcccaaagtgttgggattacaggcatgagccactacacctggccttctgtcttgtaatttggatgtgctttagatataagtttgacttaaattgtcctgccagaatctcttttaactttattgaacaagcattttttttattctgaattaagttttacacaatcccatgtttgttacaaaca

SEQ ID NO: 24566 - DNA, 1019 bp, Homo sapiens
tgccgttagcaatcttcccaaacggtaggatgtgtgttgccatagatgatagaacgatagcacaaatgttcaataacaccttctaatggtttctgtcttaggaaatcagcaggaagatgttggaaatatccctgttgatactcaatattctgtcctcattattgaaagaaaatacaatgagtccaccattttgaagcataagcctgaagttgtttttccacctgaatgacgattttgagcttcatcaggtcatataatttcttctgttgaagtcaaatgtgttcatttgtgatatggcttttaaaggtagctgaaactcaacgtgtccacaatgaatctatgtttttttctcaaatatgttaatcctccaaatctccttcatcttggggaatggcaccctcatcatgcccaccatcagctgtctcagcctaaaaccaggcagttatttttaattcctccttttccctctttgccactttttagtctatatatatctgattaaatctacctccaaacatgtctcaagtctaaattctttccatttgtactatccctttgcttaaaaatctccaatggcttgctcttgtctttagaaccaaattcatactttgtaaaatggcctccaagcctgtctattattttttcccacataatttctccactagttccctctagttggaacatgctggccttctttgtattttgcaaatatgtcaagatttttccatcctccagggctttggcttgccgttctgtctaccagcttcattgtttcccttgctttcttcatgactggctttctctcatcattcaggacacagatcaaatgtcacatcttcagagaggctttctctgaccaccccatctacaatgggtcctccccatgtagcacttaccactagcttaagaatattttgtgcatttatgtttaaattgcttgtcgctttctctttcctaatcctagaaattatgatctgtgagaacaggaccttttcttgttcacctgtgtatcttctgtg

SEQ ID NO: 24567 - DNA, 1044 bp, Homo sapiens
acattcagatgaggcatgatagtacacatgatttacacggtcttgtcaattctcggatttgtcacacatcaaagtcacataagatgatttttccccttattgctatctaaactacttaaggaataagttgcaaagataattcttagcataattgctatgcagaactatttatgtaacttgatgttagaatttttataaaaaggtttttatgaacctgttagtaagattttatagtaaataagttctcacacatagatgtttatatttaggtttacttgttttttgactactgactatatgtaaattatcacatggctatgtaagttatgttatgtaagctaaggctgaataagtgtttgctttattaaatggacttttttgggccatgtaaatttgaagctttttggctaatacatacatatgaatgaaaaaaatttgatttaaaacttggcatattgtctgtgtatttcagattaagctaatattgtataagaggacacagtagcataaagtggaacaatgtacatttattggatagtttaaaaatatagattgatttgtgtctgtctaacaatgggcccaagaacttcacagttggattaaaatcggggatatatatattttttcttcttcggagacaaagacatcaagaattcaggaagaacaaaggagcctttctctgttcagtggagaaaggatgacaggtataaatgaaaggttttatatgtagtatgagatgtaaataagatagccagagaagctataacaataacctaaaatacttagagaaataacggaagagctcaattatgtgacagtatgtaaataaaactgttctgatgtgatgttaaaattagggtcttgtaattatgcaatttacatttaaatactttcttataatctatggcatcatgaataagttgcttaaactttctatgcctcagtttcctcatctacatcacgaagctagcattagtaagtacttcacagaaatgttgtgaagattacattacaaacttcataaaagctgattagcagccagca

SEQ ID NO: 24568 - DNA, 1034 bp, Homo sapiens
tgaaaattagcagaacttgccaatgatgaaatcggatatttagctgaggagagtaccaagcaaaatgttgaaggtgcatactgatatcttctttctgttcagagtacaaatgtgagagaaaatagatacattcaggaaggaactgttaagcagaattttcagtaatttgttatggtggccaaagtaaactgataaagctcttaagtgaagagaggaatatcttctcatattattcagaagtgctaatgcatggatccttagtgtagactaatattagtttagacagtctgatattttaagttagcattagatacctgatcactacatgaagatagtgaatcaaaatgtgttattttaattctctgtcacttgaacatttaggacatgctcctatcagctgtcaatttattttttttaatattagcctcaaataataagaataaattaactttatcttgagctcaagttcttaaactcaccaatcaatgatttgtgagtcattcttttgtttgttggtgggttggtttctttgtgttttcttttatttgtttgtattttaagacatggattcttgggccctcagcaaaccttgtaaattgattttctggggctgaggattggatatttatgtttttctaaggctttgtcaattattatgataaacaaccatctaggaaaccattgaaattatgaagcacagctggatttgtctaccatttcttaagtaccccctatgtgtcagatatatattagatgagttttacataatgtttatatgtaatcttataggtacatgtttaatttcagctttgtagttggcaaattgaggttcaaagaagtagtaaagctgttccaaatcagtaattagaaaaactgatatttgagcacatatctatttccaaagcccattctacaaaaaaaaccagcagtaaagtaaaaacattatttgttcatatttccttatatatcctatctaggtggatgatgtgggtaagtcatttaacttcccaagatttgaagaagtgtataataat

SEQ ID NO: 24569 - DNA, 1034 bp, Homo sapiens
ttccctgccgcattagaaattgaaaaccctgttcagatgtatggatcacacacacacacacacacacacgacacacacacacacgattggctgtgcagatagttttgcctgcttcaggtaaaggtaacctttcagttagaaatgctttctatttgttacagatattcaaagagtggaagtttttcaactagtgatcctacacaattgaaaataaccgaaattgtattttgaccaaagtgcattccctccccaccccctactattatgtaaggagagggtgctgcatctggtgtcttatgtattatactgaagagtctaagttgggaaagctaaatatccaattattttaatttttacctgtattgtttttggagggagataagggagcagagtattgatggaaaacaagggaagaagaaactaggggcagctagtattcagccagaaagtaaaattatatacattattgcagcagtaatgcatttataagctgaataaatcaaatctaattttgtgactagttctgacatgatatgaatttaaagaaactactaccaaattcagtttaataaaaattttagcatttctatgaccttgagtatttggattaggtttaaattagaatcgcagttttcttccttttcttgtaaataggcaaagtaaatttaatgtaaaaatttgaaactcgctttaatttttgaaaatgcaattattggcaatttttgaccttagtaatttccatgctgttacccagggatcaatttaaataatattcataccctggatgatgccaaccatcaggtaagtctagtctcttacctgactcttttgaaatattaaggtattttgagaatgctctgtaatctaatgtgtttttctttctgtttcaattgagcagtaattccctaccttgcttaattctaaaatggacatcatatcttcattcttaaatggaaggtaaaatagaggttactatagggttattttagggcataaatgcctatggtattgtatgtcagtttgggaagtttgcc

SEQ ID NO: 24570 - DNA, 1031 bp, Homo sapiens
gaatgcctgttttaatatttctccaatcttattcatagttacaaaatcaggacaatttatttcttctattaaatgccgtttattgaactaagcattatttcaaagaaaaaagaactagtcattgaaaagtaattccttttttagatacctcattaaacttaacaatggcatttaaacacttctgattattgaaaaattaaacatgcctaaattatttggtctcattctactcatagccaaaatttaaatatagcttatcaagtggtttctgaaaggtatagagtaaaaatgcattcttcctcagctctttttctgtaccaaaaagcgctatctaggaagcttagcacagaactgaaagtgaatcaataggaagatgttggttaaagaatatataattagttagattgaaagaatgagatcaaggaatctattgcacagcatggtgaatatcgttaatgataatatatttttgaaatatgctgagagtggatgttaggggttctcaccacaaaaatgacagctatgttaagtaatgcatttgttaataagctggatttaacattccacatgtatgtatacttcaacatcgtgctgtacacaataaatacatacaattttatcttttagtttctaaaaaatttaaaatgaattttaaaaagtagaattaggccgggcgtggtggctcacgcctgtaatcccaacactttgggaggccgaggcgggcagatcatgaggtcaggagatcgagaccatcctggctaacacggtgaaaccctgtctctactaaaaaaatacaaaaaaaattggcctagggcagtggcaggcgcctataatcccagctactcgggaggctgaggcaggagaatggtgggaacctgggaggtggagcttgcagtgagcagagatcaagccactgcactccagcctgggacacagagcgaggctccatctcaaaaaaaaaaaaaaaaaaaaagaattaaaaactatcttcaggctgaccatatcagtttttatgtcttttcaaccaaatt

SEQ ID NO: 24571 - DNA, 1034 bp, Homo sapiens
ccagtttttaaaattaattttttattttgtaatttaacattttttaattttatttttccttaatatagtcttattaagcttctataggcagactgtcacttttgtacttaaaatgagaatcatggtgatgtctttatcaatttggaaaggagttcaactaatagcaactgtattaaggaaaaaaaagctttatattctgtcattgatggcaggtgaataaaaagcattaataactcttgatttattctttagtctctggtttactgtatgacccagacaagcaatcctttttccaagtcatgacatggaaatgtgtatctaaagcatttatgattcctctgtttacttgacttaatattgaaatctagggcttgcccataaactggttccacagttttgcttctgccctagctacaaccggggctgctcatgtggcttaaatgtttgtatccttcgtcagctgaggaggatatcagaaaggggagattcatcttcttagacgttgattctgaactgctactgctttacaaagagcaccaaattgcagatctgtcccatatccctaggtcaggagtacacgcctgtgtttttctacccataagtcagtgccaactcacaggttttaaagatttctgttaaatagttccttttgtcttaattttaagtatctagcaactcaaaatttgcctcctatatggaatttatttatttagttatttttattttattttattgagacagagtcttaccttgtagcccaggctggagtgcaatagtgcgatctcggctcactgcaacctctgcctcctgggttcaagtgattctcctgccatagcctcccaagtagctgggattacaggcacccaccaccacgcccagctaatttttgtatttttagtagagacaaggtttcaccatgttcgccaggctggtcttaaactactgacctcaagtgattcacctaccttggcctcccaaagtagctggattacaggtgtgagccaccgcgcctggcctctgggattctttttttt

SEQ ID NO: 24572 - DNA, 1700 bp, Homo sapiens
accacacccgagatatttaatgaaaaattatataaataagaaattaatagaattttaaaactaagaattgaagtgcatattacaattgagatgtattctcataccataaattcactcctataaaggatacagttcagtgatttttagtacattcacaaagttggacaatcaccatccctatctaattccagaacatttttatcacaccaaaaataaaccccatactcattaagcagtcatttaccatttctctctcccctcagcacctgggaaccactaatctttctgtctttatggattcgcctcttctggacatttcatgatttcatgtaaatagaatcatgtagtacatgtccttttgtgtctcactttttttacttagcatgttttcaagattcatctatgttgtagcataaatcagtgtttctttttaaattaatttctttttaaaagtgatattatactttttgtttttaaatattgaaatgaggtctcactatgttgcctagtctggtctcgaactcctgagctcaagcaatcctcccacctcagccttccaaagtgctgtgattacaggtgtgagccaccacacctggcctcatttctttttatgtgtgaataatattccatcacatggttataccacatttgtttatccattcatcagctatgggcatttggattgtttccatgtttttggctgttatgaatcatgatactataaacatttgtgtacatttttgtgtgaacatatgtttttagttcttctaggtatatacctaggagaggagttgctgggtcatatggaagctctatgtttaactttttgagaaactcccaaactgtttccaaagcagctgcacagtttttactttcccactagcagagtatgagggttccactcctccacattctcaccaacgcatgttattgtctgtcttcaattatagctttcctagtgggtgttaagtgatacctcatagtagttttgatttacatttccctaatgactagatacatttgagtatcttttcatgtgcttcttgaccatttgtatgtcttctttggagaaatatttatttaaatcctttgccctttttaaaattgacgtatttcaagtgctattataagtactatgattacttttagggagagaattttgtagaattgactgataatatataagtaaaatgtacgtggagagttgactgccacataagacataaaaataagcaaaactggtttatacaggtgaacagtattcacctacttgtattattgaaatggtgccaaattattttataactttagtgtctgattttaaaaactgttgtaatgttagtgatattttactgtattctacttggaataatgttggtaaagtttatagagttttcagttgtgatcgctcatgccataattacgtacctgtgctgtctaaaatatatccactagtcacatgtagctatttacatttaaattaattaaaataaagagttcagttacttggtcatactggccacatttcaagtgttcagtagccacgtatagctagtgcctactatgcaggacactgcaaatatacatttccacatcatcacaggaagttcagtcaagtagtgctaagctagatgtgctatatcctgaaattctctctttaccttcttcctccctgcctccattctttcccttccttcctt

SEQ ID NO: 24573 - DNA, 1031 bp, Homo sapiens
ttgcatactctgaacttttaataactaaaatgcctggttcctgttgaatatacacgtagatgactttctcaaagagggccttacctaagaggcctctggcatattttctgtgataaagatgatgacaatcagcctttataccaagtggcattttatagagttgcagtaagtggattatcttcgcttataaatgggttgttagccatgaaactattcttttaagatgtggtaacacagtgtggtaaatagaagattgcatggttctgtaaatgctgaaaactgctcataagtggggtgcaagcacagccccatatggacttgttagaagggagtacttccagtaggaaaagctttgcaggtgacaatcagaataaatggtacaggattttgttactgtaagccatccaacctagtatactcatatctcacctcagtatacctcactcagttctccccaagtgccagatctttaaaaagaaaaagaaaaccatttgatgaggtcactttcctacctgaatgacttaactgttgctctgtgatagactgaaagcctcaccgtggtctacaaggccttttgtggcccacccttctctataattagaatgtcccaagtgacagcctggcctgtatacaaggccagatttgcagctactcttaaaacaatagtcattgtttattaagcacttactgtatggcaggcactattccacacattttatgtgaattaactggtttaatcacaacaactctacaagccaattattattagccctgttttacagacgaaaacacggaaacacgtaacagttaagtcattcagaagtacgtaggaaatggcagtgctggaatctcatccaacccacttaaccctagacccacgttactatctgagatgagattggctctccatgtaacctataacaccactgttcataatttcatatttgtcgaattatttgaagcctccccaagactctaagctgcatgaaccgtgcatgtttagagcccattacaagcacctgaagtgtact

SEQ ID NO: 24574 - DNA, 1046 bp, Homo sapiens
tatattctaggtagaccctttatgtttttcaatctgttccacctatatccacaaatttattactgccacctactaaattgtttataaccattgtatgatctgatttttgtatacatgtgttgctaagtaagtttcacattgtcatgaaaccaaattataaaaaaaattggaggcaaggggtgaaagatctaggtagtgtatgaaagtttaaccagtatttgttgagcctactatgtgctggggcatcctctttaacacttcctaggcgccataccctgactaaagttccttcagcttctcatcaacacttttccgcatttccttctgagatgactcttcatctgtttttattctgactgttgaagcttttccagaaatggtgccttgctaaattcccatatataccatgtgctctttttttatgtttattatgccccttgtattgtcccactacctctaaataatgtggggaagcagtcacagagaagagagatcattgccaaccctgttttgattctgtttgacactcactgtctcacttacatgcagatatcctttcaccagtaggtttatggtaggcagctttaagatagcctccagtgatcccacctcctggaatccatgccttagtgtaatctctgtcccttgagcatgcctgaatttattattcatttctaatgaatagactatttatttgggtgattgtatatcacttccaataatagcagtgttaacaatatctcagtgttaccaaggattatcagtgattgttgatagtgttcaggaaaaagagcttagaattcactcctgagtcagggaaagaatgaagtctatgggtgtttaaaagagagctgtccaaggagtggctggaatcagataggaacaggtgtgcaaggcagtgtgtcttcaaaagatgtgtcttcatttgcatcaactattttaacaaccttggggaaggcattacatctttcagagccgttatttcgtcatctgtacaatggagttgaacttgatgatgattgttttgataaatcttttcaattcac

SEQ ID NO: 24575 - DNA, 1033 bp, Homo sapiens
atcttcacagatttctctctccctaccctgcacagcctccctacctgagtttctcatctagcagctgcctgcatgccctgctgacatccatccacagcacatgcccagccagctgagctcaactgcagtgaatgtggctgtagtgccagtgaactggctgtgctccaggactttgcctcccctgccatgccatctgatgttaagtgttttgttgaagagggagatgtaaacgcctcagtgagggcacaccaaatttcacagatctgtgaaaggtgcatgattattatttcagtctctattgtgtgcctattttgattcactcttatactgtcttctgtctgcacatccacagtatcaccatgcagatgtttggctaggtaaggttttcctgtttaaggcaggtggccttgatcttcctacttttcagtccttggtatcattaagttttcaggatcatgtgtaagacctcagcagctttcctgaatgtgtgcctcaggagcatggtggttggcatcaggcagtgtctgaacagtatttataaagtgtgtttgatgatgcttacaacattattgaaggttttctgagggctggaagctcttatctaagtaaaatagagtattatgaaatccagttaattgactttgctttattgcattcatgctgaagagtagatcatccacttggatttttaaaaaatcatgaaatgattttttttcatgatcatgaaatcccaagatgttagtgagaacaaatgagccaatcatattttaggaactgttcttgatgatggttcctggaaataaagcactggacacagaagtgacctctagttccatttgcagcttagggtccataagaattctggttctggtctttctgagattgaagtcttcctagtcgcagtaggggagggatccccaaaaagtttccaaagaagttagagccctcattcccaaattagtgccctgggctggaaattttagcttaaattgtctctcaaatccatttgagctttgaatttcagtgacagaag

SEQ ID NO: 24576 - DNA, 1028 bp, Homo sapiens
agtggtagagagttgtggaacggttggcatgtgcaacattctcagccagctctgtcaattagagcagattctgactgacaaactgtggtgtgcccatgtggcatggaacacttactccaacagctgtcccactgtacacttgtgaatcaacatgtaactgttttcatcatgttctaaagtgactaatagatgtatattacccatcatgaccaaccttttgatttgtataggttgatattaaccctttcttaaatttttgaattggaataatcagctagcttattgtctgtggagaacaaccaccagtactgacaagacctccctaaagtcacatcacagaactttgaagtcactgcagtcctgagcctgtcctcagttttacagttctcagaacctggagtaatatataaaccagaacacaaatttattaattcataattatcaaaatgtccatatttgccaagtacacttctcctttctaggatcaggtgactgttgccattgtgaacttagaatcttgtcaaaggtgaagatgtgtttgcaagaagagttcatctcaggaccatctctgtccctgagagcaaagatccttcttgtaatctcacttgtttttacttctctggggagggcaggaatctgggttttccttttctgtgtttcatactaactatcctcttctctaattatgacagcaatcacatgtgataagtcataatcataatctgattttggtctacatgttaagagtctgttccttgatgataggttagagctcttgggggatacttttactgattcttagtttacgtccacccatttccggtcttatcctcattttattgatttttctgattttcttctcttagaagcagccttgtttcctttctcttgaggttttgaggagcagctccctgatgcatctgcctgtgaggatactgaggcgagcaggatggcaatacccgagtacatcttcctagtgtccttaagtagcccacttggacaaggaaggacaaggtttcctaggattc

SEQ ID NO: 24577 - DNA, 1025 bp, Homo sapiens
ttcaaaagaagctgttagtcctcttaagatttagcttcagatgttgcacaagatcacatctgccacattctgtgatcaaagcaagtcacatggccagtcccagattccaggggtggggcagtagatgctccctcctcctgcaattttgagagcagcaaaattgcagtcacctggagttactgtctacatatttcttccccctgagataaatgagaacactagtgtcatttcacttttatcagctcctcactcctctcatgttgagactacacagaaggtatgtaggtttaatcttcagttttcctaaatcatttgctttgcactgtttcttgtgtcctaaaccttcctctgtcatatttgttgttttgctgcagaatttccttttattcagcattatggttgggtgattttggttacagaacttccttttgttgaaacaaattctctgagtcctggtatgtcctaaaataccctttattttgccttcatatttgaatcataatttttggtcagtacttggaagctattgataaatctataattgagaaggtgtctgatgctaatttgattttatttgctttttccactatagtaacatatataattttttctttatccttggaacctagaaatttcaatggcttggtccagatgtagcttgtttcattcattttattcacttattgtctcattttaagtgatttgttttcagctctgggaattttcatttcttcttgtagtatttcttcttttttctcttttccaagaacttggagtaaacagatgtcattcctgcatctaagctctagtcaccaaactgttctttgatctttttgtaaaatctctctctttttttttttaattgttgtttctgagagaattatttaggtcactcttatgaaatactctgtttttaaaaattcattttgctattcatctcacgattaagatttcttttttatcctgtagctttttcttcaaggcttctggctgtttctctttcctacttacagttttcagtttta

SEQ ID NO: 24578 - DNA, 2020 bp, Homo sapiens
tacatctcaataagcattccacatacactaaaaaatatagattgccataaaattattacattgtataaagaactagccatttttatcagtgaggaagtgaggctcagcaaggtagaaactccccccagggcacttaggttttcatcctactcatctcatgtctcaggatccttctattcatacttgagaagatcctgcctgcagttcaaagtctatctaggccttatgtgccatgaaaatgagagattgagaattcacttgctagatagagcaggcaagagaactcatgaggctggggaaatgcacagataaactaatcagacccactatccatttatgcctattaatatggcaagaataaaacaaccaccagcagaaacctgaaacttagaccctctccactaacatttaagccaggagagtagggaagaagatgggatctcagagggtgtgtacatctccccttttacttacggattattattttggaaacagaagactgatactgaaatttgagggaatggggtaacaagtcccagatcaagctatagaattgaagactgtggaagttaattgattataaatgaataataatagtagagtagtttgcaagagaaaactgaagaatgttgagaaaaatatttatagtctcagatgtccctatttgaatatacagagtgacacatctaaacagatagggtctctcgggcatcttaagccttggcgggatttgcctaatgactggaatgagactgaaaatatatcatccttcattcatgtattcatttatttagcaaacattaattgaataccatttaatgtgccaggcactaggctagtttcatggtatgataaagactgtactcactagaagacagagagactgatgtgtaaatgagttattaaaattttaataacattttacactaatcatcgtttccccctattttccaaaactgtaggaagtccatatcaggtcagtaagtcttttgacaaacacactgctctcactatgtgttgtcttaggaaaggcattccatctgctgccaagaacctattctatcataagctatgggcctaaaaaatagattttcttttcaacaccacattcctagttattgttatctttgaataatcagattcttctaaagaaaccaagctagctataggactccaccaagggtgaccttgttgctagttattaatatgttatatttcttttaaataagcagacttttatttttaagccttctttaggttttaaactctttttttcttttctgttgcaaaaacctcttctgcaattggtaaaacattcttctcatgtcagttaacatttgtagatgtctttttgtgtgcatattactttgaaaacagacccctatagcaatctagaatgtttattatttagtttcttgataagttagtcatatttacttattggttacctgtttagaaaatttagcaatttcacaagtttttgatcatggtgtgtagactgtagtctactgtagttgctaggaaccatctgtaaagccttggttcctgcaagggagcccagaagaaagtgttaaccctttgcctgcttgattgcaggaggaatgccagctcctgagcaggcctcattggtggaggaggggcaaccacagacccgccaggaagctgcctccactggcccaggcatggaacccgagaccacagccaccactattctagcatccgtgaaggagcaggtacatcctcgtattgaaagttgcagtgaattatttctttaatgcctttaaaaaattaatctttggatatgttttaaatttgtgtaacgtccttgacgccttcacgttttctaattataaggtgtttacatccctgagtacattgggatgactggcatgtagagccgctccaggtgccagtcagaatcggaacatgcaggatacttgtgcgtctgcaagtaaggacaatctcgatggtgatcggtgtctctgtctctcccacattgcagagtgtgtgcatgcacgca

SEQ ID NO: 24579 - DNA, 1046 bp, Homo sapiens
ttacaaaatgaataatttgagagaaagcttataaatgtctgggaaacaaatgtggtgcccttccgggaatttacaacctaggcaacctggccttttaaagatacacataacagagaaagaagactacattgccttgctgtgttatttatgttttttaatataaaatatgtgaccatatattcaaattactatgcatgaatcaccatttttagaataagattttacaaatacagttacttagttgtcattattattttcactattaagtattaattattattctgtaatgtaactctgatttgcttttaggcttacgtggaaaagaatagtaagaatcctatcagacctgtggtctttgggtcaactttataaaagtaattagagctattaaataggcacacagttttatttggccattaaagctctagacagaaaaccccaaactgtttgcctctaggttgttagagaaaaaaacattaattagcattaccattgcttctctgaatcttccctcttccctgtagtggacagtgcaagtgggggtgccagttgctagactgtgaagcgattcccaaggtaattgatcatattgacagaaacttagctgcctgttgctctactaaaaccatctcagttagcattcccccttctggtattcaatcaccctcgcccttcctcaacctaaagactgaaacataaccaagagttaaaagagataacagccatttatttactctaactcctaagggaaaatagtattttcctaaagagtaatttctaaaataaaggcatatctgtttctaaaatatttttactttatgcagaagtattttttaaatctttgcaactatttatatttgctaatttaccagtacttattctacttagctgtaccatcaacctcatttttaaaattatgtttaaaagttaattatacttattcgtaagtgaaaaaatcaaaataagtatctcacatttacatattagcttcagaaaagtaattttgcagcttttgcaatattaagtagtaattttgaaacaactat

SEQ ID NO: 24580 - DNA, 1068 bp, Homo sapiens
gcaggggtccactacataatacttgcacagtgcatgtttctgttatgattatttgctatttacttgtttaaataatcctgaatattctaatatgaatagcttccaaagaatatatctcttcttaaaagccatgtttaaacattagtacatgttttatttagtgaaatgatattttctaattgttctccaggtagttgaggaagcttcccaggctcctaagaaggcaacatgcaacatcagcaaaaatgatctgtaccaatccctagtgacctgtaccagtcttatgtaaattatgagtgcttataaagtaattaaggtttgagttgttcagtccgttctttttctctgaagcctgtctgtggtgtctttgtaattgtgagccagctattctcctgcctagcaggctttagggacaccacctttcccatacatgtgtatattaaagaaatgttagctcatcttaataataaagcaaaatgtaattagatctgctacagaaacatcatactctgcactacaaatataagtgtaaataatttggagtagacacacaccactggatagctctattagcatcaataactaagaattggttgtataaaaatagccttacataaatgcttctctgttctttgatttaaatatttctgaaatgttttactgcctgcaacacaatttatacccaagtgtgggaaatgtttgttaaatgtcttgtatttggatgtgaagatggatggtaatagtacttcacactcatctggatttgcctttggttgattttctgattgtcatgggttttgtccatgccacctgtatcctcacctggtctcacttttgatcatgatataattcgtagggtggctgacagtttgagttgtacaacccacagacataaactggttttttcttctgtggcctatttttttgtttgttctcaaaataccatcccagctgagttaataggccaagtccaagtataatctactctgagactgagcttggttttttccatagcttgcttattttggtcactgctgatctaactcaagatactttaaaactcttgat

SEQ ID NO: 24581 - DNA, 1035 bp, Homo sapiens
ctgaattaagactttgggttgctttaaatcagtatctgaatattaaagagcaacacaaatgtacccaccatccctgtactggcccttttttttttgaggcagagtctcactctttctcccaggctggagtgcagtggcgcgatcttggctcactgcaacctccatctcctggattcaagtgattctcctgcctcagcgtcccgagtagctgggattacagtcatgcaccaccacgcctggctaatttttgtatttttagtagagaaagggtttcaccatgttggccagggtggtcttgaactcctggcctcaagtgatctgccctcctcagcctcccaaagtgctaggattacaggcgtgagccaccgtgcctggctggcattgatattttgctatctgcaggctggctatataaagaaatcatgcattttaattttgtaagggttgtaagagtgcctaatttgtgtaaatttcttgctttgaaattaaataaatagagcattatggctgtagcaaaaaggaaccactatttttctcactcatttgtcatgagtggtgcttcagccactacttccttcttgtgattttatgtaaaaaaaaaatggatcttctgtatatgaagtttaagaggaaagaacaaaaaatgacattgagaacaaaaaagggttattgagaacagaatatgatcagaagataaaagaggtaaattattaactaagtgtcatgataacattgtacaatgctaagagcttagtaaaaatggaatccaaggcatctgtctatggcagaaattacttaatttttttttctctacttaggaaatgaaaatatatttccaaatttttggcaagtgaacctcttaggaaagaacgtggtatattaaaaaaataaaaatttatattttactttatcatgcctaactctttaaaaaatagctcacagcatttagcattttgttcatgtacttcacacccaactcctctgatgtggttgttactcccattttacaagtgattaaactggggtttacagatg

SEQ ID NO: 24582 - DNA, 1049 bp, Homo sapiens
tggtgctttgaacacctggtattgatttttttaaaactaagaaatatttctaaataagattgcattaactttaaaaatgtcttcaatttactttgggtttttctagaactctatgaatctaccacacaaactaattactatatggaataatttactgtactcacatacagtaaatactaaatgagtgcattactgtaaaaacataatcatgattgttattttttatttaagtacctcttatgctatttaaaagcataattcctgtaaaaattacatgttccgaatagttaaatcactgcttatcctatctatagatttctttcttaataattacatatttctgtaaagcctactgtaaaatgctttcattgcttgcagttttaagtttgatctgcttacacttaggtagacatgcctgcaataacttttctctcagttatttctaacctcataattattctacttttcagtatcttgtgttactcatgggcaaaaaaacttcttagtgaatagaattctgtctgttgtttctgattgttggtatgaacattaaactattgggctggtaagttgtagtaatatgaatttttcatctctcttaacagttgtgtatattgatatgtttggtaaggcataaagtatataaataaaggtcgtcaaaacttttacaaaacaaatataagattatgtaattattttataaatatccaggaaggtttttatagaaagagaattataagcaaggtataaaataataaattagaaatttctaactcagactttgcaatacccaatgaaataattcgttaagttaaaactgtgaaaacaaaaattagctttaattctctataatattttttagaaattatccgtatctttagcaccaaaaagaacaactcacaaactcaataatatggtattatatatttctaaaaggtatgaaccaactggttttgtttttctaaccagaattatattttaatagaaaagtaattcaacatttaacagaattctgttagtacttcttattctggcaatattactaacta

SEQ ID NO: 24583 - DNA, 1032 bp, Homo sapiens
gtgtgtgtgtgtattgtgtatttcttctagacttttttttttttttggagaaaaataatagccagttattttaggatcctatgatgtgtagtctttgcttcagtccaagtcaattaaagattgatctacttcccagatttagttacattatcaataatggggctatttcagccacagagaaaattcaagtaaaattatcaaccataatacaagaactaatgcttacaaagtacaaaatgcaaaagtgtatctgttttctgaacaacattagcaaatgtctttcagtaaagacatttgtaaatgacaactgaaatagtattatatcataaatgaacatgaaacaaagggagaaattatattactgaatgaagtagtttaatcagaataagtctagaagttaacttggtagaacttcgcaaccactaacaaaatagtgacaaaccaatgatcaccaatggccactaaaatcatcagctggaaaggtagtgagaagttttacaatgaatggatcaggctgacaggacatgaacccacttatctatcttatgttaatatcacagaaagggagacagccagaaatcacagtcacctgatacgatgcaatgagaagtatgtaacgtcacccatgacatgttcttgccctaaaattatttaagcatctagatattaatatcagtttatggggaatacaggagacagaggaacatgtcagttgatactgtactgatacattcattagaaccaggctaaaattctacagagcaaatgaaattatttcaaataggaaaaagaagagagggggaggtaaaactatatatcagaagatttttagagacatagcaaccaaatgtaacatatggaccttgttttggtcctgatttaaaccacccaactgtttttaaattgaaacagggaatatgaatactgactagatacttgttgatactaaaaattttaatgttaatttttggtgtaataatattgtggttatgttattttttaaagtatctatatttagagatacatttcaag

SEQ ID NO: 24584 - DNA, 1051 bp, Homo sapiens
cacatgttcattttcttgttgaagctgggtaataaatacaaagagtgtttgttatactgttttttattgtatatattttaaatgttgcataacagtttttaaaatgttaggtgattcagatcttaattttctgactgaaattgcattttaaaaattaaccataatttcaatgtttataagattagtatggttatatttcttacaatctgagtaataaatattctttttgaaaatttaaataaatgtcatttattagctctaacttttaccatttagagattataaatttacataatatgttccacataccatgtaatacctttcctatcaatgatgttcactcatggcaatgaatgggacagggagaaaaaagagggaaagaaagattaagttagtcagcctctcctctgttatgttgtaaattgtcatttctttttggattcatgtttcttaaaagaaacctggacattaaagctagaaatttaaggcagtcttgaccaaccacttaccttttctgtttgccttgaagggtacctgttcaactcctgatcagtgtttatggatcacacactgtttatcaagaatgctgttttaagagactttaccctgtctctccattatcattatcatcattccttcttattcatcctcttaggcttttttctgcttcattcccctacagcagtagttaggaacatgtgggtgatagagaagagtaggaaaccagagtggtgggtaaggggatatgggatgaattagggatccatgagagttttcagagggatttaaaacattctagaaccacttttctaggatccagatgtcttactacatagaaacatagtatatgctatgtagaatattgactgtttccttatgggtccactctttttccaggatagttattaataatcctgggtctgtggactgtcccacatgtgaattcattcctccttctgcactaaaacagctattcatgtttcttgtccatgaatcaagagctgaaaatgctgttacagagagaaacctttctttttcaaaaagcaaggca

SEQ ID NO: 24585 - DNA, 1029 bp, Homo sapiens
aagaaagtgttcgagaaattgatggatgttacgtaggtgataaagaattggtgctcatgggtaagaaattagaggccaaaaaagattggaatctctaccaaaacaacaagtgagagaaattttctggttgactcagaaggcactgaggggttaatagatttggatgaacaggagagaaaatagtaacaattctgtgcagttaggagttttgatgtttgacagtaaatatggaagggaagaaaaaagaccatagtaaaataggaagtttaaaactgattctataacttcacagtgctgcattcatttattgtataacaggtattgaagtggtatgattttaacatactattcatttaaatcattactgtgtgaaatactggcattagttaatgtttactactaaatttaagactgtaggagctaggctgtgcattttgtttatgtatttaaattttgtttctaaaatgtatagatacaagtttcttccactgggatgagctttaaaaaataaaaataaaaaaacatcaataccgaagataaatgacaaatgagaaagtagtcctaagtcaatttatcttttcttttttcctccatctggtgcaagtaatttacaacacaaaaattcatcagcacatcatgagataagaagttgacttaaattgaaacactttatgcctcagtagaaatgtactgaatttataaaggagatacagtaggaagtgagtgttgtattgtacatgttcataaacaaaatattagatcagcaatcatgtataaaggactattattgaggattttggatgccgtcatttattatagccataaactttacaaatgacaaaactttatcatatatttcttcctgtttctcttctaaatataaggatgataagaatttcttttaaaatcagctgtagagtacaagtttctctcccttattttctacaggcccatttagccacacagtcttgactgcctttttaccaactgcagtgctatagcttcctgattgccactataaaagctctt

SEQ ID NO: 24586 - DNA, 1050 bp, Homo sapiens
atggaaagcaaaaccaaaagataaggatggactactgtagaataaaataagtaacctgggtacacgaagtgttaaaattttgatggttttaattacttacaaatttgaataaatatcttgtttttaccactagaatgaaattaataaattttgctattttatcatttatctctaagattcttatatttctctcagttttgttactgaacctcaatgaacatactatataagcagatttgtagtttcacttttgctgtttcttgctaaaaaattaacaaaatatttatgtacattaaaaacttaagtaccctttttagcactaataaggtagaattttaaaatctaaaagtaagcgatttatataattgccaaaaaatatagtccttaaaattaaaaatgttttacctttaattaaagtgtgatctcatggagaacatactaatctttttcaaaatgttgactttctagtaggtattggaaatctacaaaggacatccagccaacgaagtacccttacataccaaagaaataattatgctctgaacacaacagctacctacgcggagccctacaggcctatacaataccgagtgcaagagtgcaattataacaggcttcagcatgcagtgccggctgatgatggcaccacaagatccccatcaatagacagcattcagaaggaccccaggcgagtaccagttaggagtctctagaaggctacagtattgcaggagtcagccagttcctccattttgacttttttaagttgctaagtctattatactatcattatactatcattaattccatatatattaatacttccagttgtattccagctatataggtcattgaggttaatttcattttaaagatagattccttctttccatcctttcataataagttagagaaggcacagatccatgggaatatctgcagcattcatcactgaaatatttcatcaagacaacaacctggaatagcctcttggaattaaacaaggctttgaaagatcaatttaccctttgcccttatcctgaccgactt

SEQ ID NO: 24587 - DNA, 1030 bp, Homo sapiens
catccattatctccttgatggttcctcacaccctgagcctgggtagttttacctgcctccatcatgaacgtcttgtgaaagagcacgactaaaaccagagcactcagagcgaggttcactcaagaaggaaaatgcaggggcctgtccagtgatgatgtttgaagcacactggcacctttatggctgttgcttttttgcttttggcaatgtctacaaacacttgggctctttttaatataattaggaaacatggcataaattgaatgctgtctaaaaatgagtggtttaagattgtctttcatatcaaaaagaaaaacagttgtataggctgccatgcatatctgccaccagagaaatcgcattttccaaatgttttgttttttttaatatcctttaagaagtacatttttcaaatagttgctattattttaattaatcagtaaaatcagcttctaatttgactataaaattatcagttcgccattagaatagctataaagttagttttaaatgtgagctctttcaaaattgtgcagcataggatttatgtgaaatggtattttaattactttattcattctttgtgaggaaaatgaactttcatttctcatggcagtatttcattgtgattattggttactcataattatatgtacttgttcctgtgacagggaataagcagcgttttctacaataatatgcatgagactccctaatattttctaaattagtttgtatgtttatattcttagtcctcacaacaaatagctaattgctttaaattaaataaaacctcaagcttcctcaaccaaattctagtttatttttaactttccctttgagaaccaggagataatggagtatggtgataaatatttttgaagcaaattttgcattaggatgttggagttagaggttatcatgttgatggagaaggctaatcctacagctcttcattttctcatcagtcttactacatctgggagttggtgtattctctattcattacttactgccctagcaagattct

SEQ ID NO: 24588 - DNA, 1031 bp, Homo sapiens
ggtaaaggctttctctctggttcccctaggctcattctcagggtggtgcccatgctgctatttcctccaattctgtatccgcactagaatcagagccatcagtatttgagtatctactgactaaaagttcctggttgaggcactgtaatccccccaaactctctgccctcctggctgcagtgcagtccacagtccccacccccagcactaactgttgttgcacctctctacaccccctcctgctgctgctgcctgtggttggtctgtccccagcatgagccccttaccctctccctcctgtgcccgagtacagggcattctgctcatcatttgtcagctgtgacgaccatccaggatcctcctgggggccgaggaaagtggaaagaacaggaaagagggactgaaagtgtcaggacttccaaagcgggccagttacttggtgtcaggatggactggactaggagaggccattggaaggtgttggattgtaagggtgagcctgagagaaaaaaggatgaagagtgcctgggagaagagagaggaatgcaagggaacagccagtttttgagccttattgaaccaggagatctgcagatgaaattgagaggagtaagcaagttggaaagggaagcttgctagatagacaaatgctgaacttggttttagacactcaaacactcagttaaatgacagttggcctcccaatcagaggtgtgatgcagtcttttagggaacaaaagaccatgtacagaaggcaaatgtcagcagggaaagacaccgctgaacatggctcaaaaggagggtggagttgggagattgagaaggaggcagacatgggacttggggatatagttgtccccagggagggagttggggcatctgttgtcacgccaaggatctgcagtagtgagaagtgaggctcaagcatcatgggtgcagtctgcacggcagcagccctgaagagaaacactgggccggagcctcaagcatttcggtcggcatgaagtcaaatcctcagcaggactgagaag

SEQ ID NO: 24589 - DNA, 1050 bp, Homo sapiens
agggtcacagctacttagcttgtgtgtgaaggggttaaagggaaaaaagggagacaagcagttgctctggggatacaaagataaatacaagtccctcactatgagaaacagaaggctagtgagaaaaacagatggtgccagcacagtgtagaagccacaggatgtatgtgctgtggggtcctgaaagaagacatctaacccagccacacagtgtaagggaaggtcaggaaaagagcggagtaaggacgtggaggagatttcctgaaggggatgctgcccggcagaatctctgaagatgagtgaaagtaagcctgtagaggctgaggctgtggtatggaaggagccatccagataacagggacaacaggaggaggacagtcttgtggtgcagagaagacgtgtgggccaggactactggctgcccactggggcccaccatggagccaggcatcatggataggcctgaaggccaaacttcaggagctgaatcctaacctacacacaggagggactaccgaaagagtctgggcagatgagtgacagagacgggctaatatcatcactgctcccccacttccatggcagtgcaaaaggtggattcgaggaagggagagttagaagcagggattggatttgggagccagtgcagcaatacaaaggtgagaaatcttgagtggcaggacagaacacaggttgggcagcactgtggggagggatagaggacctctgttcctctcagaccgttacagacatgcctgtgtctaaggtttctgcatctttttgcaaatgtatgagtatgaaaactgaagacagtttccttttgttaccactgtaagcaagttctcagaactttctaaatgtcccccagcaacttcccagacagtccttgtctgagacattttcaacctctagtaatttcttgacaggtgtattttagtagagttactacaatgcttgctgtgggcttcttcccccaccttaaccccccaaaatgagaatcttttggtgatggtgttttcaagatagtgaaaagcattgataagcctaggt

SEQ ID NO: 24590 - DNA, 1033 bp, Homo sapiens
tatatggcttgtaaaatcattaacagctgagccctagtctccagtttcttggcatatttgagtactcctgttttgtgaccattctttttcagcaggaggcaagctcattaattagtcattgattagggaaggtaaattttcagaaaggccagcaattttagttgtaccttacaacactagtagggttaatgtctctcatttctaagagagttctctatatcctgagcaacaaaaaatcttaatctccctttccaatttttggactgctacctgctaattcaccaacactaccatactctaaataaaaaatcacatgaatgttttgtagctttcccctctcacattggtataaatctttatcccagagaagaaccactgtcccaacatcatttccaccctgggcaggggcaggactagggtgagctaagcaaggcgccaaaggcacaacattttaggaggcctttactctcaggtttgtacaaggtagggttggcacatgcacaaaccaaacagtgaggacctctgtacgctccgcaccccaggcagcttgcttgcctctgcggcattgccacatcctaggcaggatgcgggctaaagaagacatcagggacccccataaacctgagcttcgttcccaggatgtgctgctcactggccatgcaacctggggtatcctatataaccccgttcaggctccgtaattctatctagattggaaatgaaaggcaactcctcatctctgaaggggagctgttgatgcctgctgtcctaactgggtttgctgtaaagaggaaatgagagagctccatgccaagtcccacagctggtgacaggtcaggggagaaggaggggaaatgggacaagatcttatgtggattcatgtgaatctatagtaaacttaaaatacacctgccatgagagaaggagagagaaacaagggcgatgatgtttaccataaagaattgctgtaaggattaaacgtgatgacttacaatggaagcccttcacacagtgcctgacagaattgctattt

SEQ ID NO: 24591 - DNA, 1020 bp, Homo sapiens
agtctctgtgttttccacatgcatcagaaccgtcagcccagtgtcactttgcaggggccacatcttctagactggctcatctcttaaattcaaaccagagaatggagatcaatttcatttacattttcatggagaagagtttgaataaatagcaaaaggtataatgtgattcttctcaacgtgattattttttaagaataacaaaaataatgttacatagtgttaatatttttatatcctattcagaaagctgtgcatacaatttatttaaaggataccagcccaaagggttactaagatttcatactgttcccattctcaaccgtctggcgattataactactttagatgttccaaataagtcagtgtgagctaccccacaaaaagtactcttttctcaaacctgtctattaaaaataaataaaagctggtggcagctttactcctgctgggggggcagtctccattgtactgttgtctttgaaattgtgatttcacaggactatttactaatcgactgttgttactatggcaattaatagctcagaaaattgcagatgctacatttcaacaccaagctctgggcaaaaggaaatgcacataccaactgaagtgcatggttgcttccgatttgcagcagcctgctttatcttacagatcacctctttagcatgcatgcccttctgtatcttcttcgcttgcttcaataaactaatttgcctcaactacgtttcattttcctcattaaaaaaataaaaatctttgctagccttaataataatggaagggtaacatcatcaggagtctactatggacttttgaagacaattatctcattattaccaagttccttttgtattaaaacatacttaaatatgccaggtacaagactgtgcctccattgttgctccttccttgacctgagattttgaatcccagttgtttgtttggaaggcatggggcttgttcgaatattgtgtttcgcttctcctctctgacccactgccgtagctcagagcc

SEQ ID NO: 24592 - DNA, 1073 bp, Homo sapiens
ccggtgttctcaaaacttactggacttattgtgtaaagctccgggaggaaatgtggcgttggccaggtagaaacgcggcgctgcggccaaggggcggaggacgccaggctcggcaacggccttctcccagccccctcctgccagctccagatccgcgtgcctccagtgttgggaccgttctcagtggcgttgttccctgctggagttaacttgggaggtgaggagggaactttcatcttgaacttgaccccagaagcagcgtcgtccgtacaggttacaaggtaaatggaagctgagtcttaacgtgggttggaccgcaaactctggctggcgcggaaaggaagttcctggttcagaatctttgaggaaagggctcaagattgctgagatcgctcgctctggaaatgccagacacaccagactgcagaagttaatgcgtgtttggaggggtgggggtgggagaggaaaggagaaacctggttagttggcacagagggctggtatttctctgtagtggaaatgaagggagtctgcgtctctgctttcaccagatccgctaccctcttttttccttccttggtcatctttattcctgccaggctggcactcctgaggcaggggaggggaaggagaggaaagcagttgtgaagcttcctgggtcagcctggaggtatttcagatctgctactaggaagattccaggattttaacagctgcttcttgattgctgggaatgaaggagtttatgagcggctgagactacttcattatagaagtagtctgagtgttttactcatctaagctacttaaagacctcacaagggaccttccctagagtatgccagtttctgcagtttgtgtcagccagaatgcttggtgagtgttagtcaaaaagcatcataaatatatcctggtggttctgaaatgaaaagtatgtggcagtaaaggaagtatggtatctgatatccttcaggacttcctcctagggttgttcctgttacctgccaagtgaacttggttcaggcttccggactgttgtgatttgacaataagagatgggaaatagtgtcatc

SEQ ID NO: 24593 - DNA, 1049 bp, Homo sapiens
atattaagcaatggggtttaaacctcaataagaagatgtatcagtgctcattggctgggaaggaggtgtagtatatctgaaattgccgccatttccatgagtgagagaagagaacattatgaagtgctattagctagagaagttgggacactttgtaccaggagggcacaagagcagcaaaggagaagaatgattcttggtttttaataatattatcaggagcatggatttggaatgatagaggactttgaagaaggctttcagaggacattatcttgtggagagtgaaaggagttctcctggtttggtttagctgtgttgctgatggaacttgcccttctagggtcggtgttgtctttaggttcccctgcaggtgggtgtgatcaaggagaatgttctagaaagaagagttccatagacagaatgtcaaggacaaaagtgttgcagagggatgacatagttcctggattttagcacagattttttcgctaacatgagggaatttattaggggaaaccttccagttgtagaggtagacagatgcgaacccatcatgttcagttcacatagcccagagccacagtgactcaacctcttccctgccccacctcagcacacctagggttacgtgccagtcatgaacagtggcttattacctctttgggtaggagatgggggtggagagtagggaagtctctcagaagcactcagctgtgaccttttcatgcatgtatacccatgcaaaaatgggatcctctgttgcatgagcttttgaagaaatatgaaaaagatcatacgtatacggctgctggtattatagctctcaagcctcacatccagaattggcctttttgatgttagttccaatttgggaaagccctggagggaacccgaattggcttgatgccagccaaaggagagttacggttagacccataaaatggggctgtggggagacaaagtatcccacaaagaagagggttattgttaatggaagagggagggagctggatcaacaaaagagctagccagggcagtgtacatttcca

SEQ ID NO: 24594 - DNA, 1035 bp, Homo sapiens
aatgacttccagcaattaactgtgttgaattactaaacatagtagtttctttcaataaatttgtggaatatgttcatcttattagtatctgagtaatttacttcgtggtccagaactgagctaggtgtcagggatacacgtagacataagtattgtagtactaaggataaaacaatgcgtataccaataggaagggatgtcagctacttaagtaaatagactttaattatttagataaaatagacatgaaagaactttagtgtatgcaaatttataaaacatcaaccagcagctgttcatacctctccatgtgtggggtgttgggagtggggcactgagatgcagactgtggcaaaaaaaaaaaaaaaatctacctgctttacagactgtgggaaaagaatctacctgctttacagttgcatgacatggtcacttaagagagtggggacagaaagacatggacctgggtagctttggaaaatggtgttttgactataatctataaaaactacaaaaagaactgcataaacgctgtactctagtgggtaaagtttctcatgggacacaggttgacagttccaacgctgctttatatatgtacaagggttaaacaaatagtgaaggggtggtggatggagagagccaagtttcccacagctggagaggaaagtcaaaggtatgcaaggaaggaaagctagaacgaaccttgtgggactgtattaaagtcagaaacctcaatgtgaacttaggtttagcttgacatagatacagaaataattatattttagtgtgtattcatggattaggacacacatgtatttcctagatctgttcactgaaagagcttagaaacaataacaccccagtatcttggttcctaaattccattctctaatcacagtaaccaggactccttgaagaaatggataattataggtctggggcatcttgcattgtcagaaaataaggaagtgctcacgaaacaaaggatgtgggcatgtctgaaggccataccagccaacctcaaagagctcc

SEQ ID NO: 24595 - DNA, 1039 bp, Homo sapiens
gtgaggagagcaccaagaaaacaatacaaccaacagcgtgtattaaaaacacctgtctcaaatatgaaatgtggcattttgtttttgtacattgtctgtcacagtaaatatctagagtctgtctcctgtcatgccaggcctggtttttgtagatagtaatttggtggtgatggacattcttgataaatagggcttttacagactattctgaaaatgaatcatgggacttgcctttaattgctagcagtggcgtgtatgtgacatactcgctcctgctaatgtgtgccaatcagtaagttactgtttaattttctgaattttatgggatgatgcggtaagaaggcactccccagaagtgggcccctcgatcttggacttcccagcttccagaactgtgagccaaatagaagtttataaacaaacttctattgtttataaattaccatctccatgatattctgtgacaaaagtacaaaatggactaagacaagggatctgtgaacttgaatgggtggagaaaaactcaactgtattttcactaacctctagccaaaatatagccattgcttcaatcatgaaagtgggcaaccaaccatgtaagatcaacaggacatgtaactttgtcacatggaaattaactgatttttgtatcatattgtggaaatagtttaaaatacatttatgcccatcgctgctttaaaaactgcagtagttataaaacctgctgctgtgtcttatttatgcgttaagcatactttagtgtatcaggtttgctttttgaacattttgctatctgtgtttcaatataattagttttctttgtaataagactgtctacttaaaaatcattcaaaaacactctgagggtacagattgctgaagccatccatggaacttaaaaggttacagattcatgccttggatatggcacccttgtgtctttctcatcctcatttgagactagatttgttaacattaaacctgaattttttttttttaagtcttaacatatttggcctttgttttctagcatgccttg

SEQ ID NO: 24596 - DNA, 1035 bp, Homo sapiens
ctttttccccaaattaaagctcttaaacgtgtgaagtggtgagaatgttagagcctgagctgaccggttgtggggaggttctagctgtgatccctgttcctcagggttaccttccaggccccagtctcccatctgagacagtgtgattgcatttgatgctgtgcgatggaaagcattttggggtaggtgggactgtctgtggtgtgtaaatgttccaatggaaacacctgccagtgaagctggaggaggtaaattactagtcattgataacatagttttcataccctggagaggttgcatcgtcctacctggcatttctgcctgcagtaacaggaagggtgattgaaatgtgcttcccatcacttaatcaaggtggggaataaaataggtcatagttaaaagaaaacagtatctattcaagggttaagaaatatgccagctgtgctggttgttgcagtgaaacatctttaattcctcttaaatgtctttaagcttctgctgaggaatgttacatctactggagaatctctggtgtcttgttgcccagaaccaatattgtattgttcacgtggatgcccctaagagattttcactttctgcccgtggcatcatcgtgatgctttctttgtttgaccgtattccccttgcccttgtgcagttaaagctcctggctccagagtgctagatccacccagctttgtgcttcctgttcatacataaaacttctctccctactttgtgcctttctaatgaaaggatactggaagttagagatcttttattgcctctgaaaaacaaaccaaacagaacaacatgtttgagagtgattatagtgagatggtaaagtaaacttgaaatggaaacccccctccccctccctcttctcttaagcctcgttttattgcagcctgcataaaatcatagtgctggagcccagctgctccaaaggctgaaggtcctcatgcttacagcatgctttggaaactcatctgcaccacatttgcaattaatgaaaatatttgctttgcttgttat

SEQ ID NO: 24597 - DNA, 1033 bp, Homo sapiens
actagttccagccaagatactctttcttgtatatattttttaacattgtgattacatcctttctgcttcttaaggttctgtctaccctagaatgttgttagaaatgcttgttccctggtgccacaaagaaatagcactcaaacataaatttaattatctcagcaaggcagtttttactttctgcagaaagggtgctcatcacagatggaacaatggcgagagcacacctggacaggggaggggcaggagttcttattcctgacgcaggtagcccctgctgctgtgttgttcccctattggctagggttggaccacacagtctaagctagttctgactgactgttttaaagagggcaggggcatgagccagaatggcggggtttggtgggaaggacggtgaggaacaggtaactaaaggtgacttaggtcagagcaggtgaccgggatgagtcaggacagagcaggtaaccagggaacagacgtgaactactaattaggattggcgggaaagttgttgactgaaactagaagcgagaagccaaagagaaccaggaagttaaactttaaaatggagaatcaaagaataagagctgaacatactgacatactggtttttttgaggagaaacttggggtttaccatatttaacaatgtttaatttcctaatagtaagcttgtttgttcccaagcttgtttaggggtggagtgtcaagcggaagctgcctaataagtgagcaatgtttccagtcccatgactggtttggggctgtttgagttttaggagggtggccctgtgtcatggggagtgttgagtagatgggatgggagccaagggatggtgctggggaggaatgtggatgtagactacactctcacttagtcttttcttattagagaggagcagtggaggcctgggagttctggaagggttggtatctgaatctgttttactgatactcatgtaaggctagtaagccctctccttttccttttctgagatcaaagcttcttgtggatcattcatacttgacct

SEQ ID NO: 24598 - DNA, 1028 bp, Homo sapiens
tatgtgtgtggaccacattagtttttgtcttttttcaagaaaatatcctcaagtttttctccataggaatgaaatttatttttgctaaattctttgcaaggccttagaatagaaggttaatagttctgaaacatacaagcttctggtggatttgggatgttctctctattagatgtttttggtccaaatgataattaaataaactaagcagatacatctctaacggagcagtgcttgttcactgcccaaatttgtacagcaaattagtgtctcacagtggtaatttggcttcattatcttggtaattttaattggaaaagtttagggcagagatgctgtttaaaaatggcagtgactcaatacatcaaatgatgaacagtattttttttcagtgtctaacacagatttctgcttaaaccattttgttggtaaaagtatccagagctctaatgttctacctgcctggttttaataatttaaaaaaaaaactgacatatggttgtgaatgtgtactggatttaaaaagactcatctattttaaaagctagcactgttgctgctaatgatagagtcaatacagtgtgtctgcagcacccagaggtatggagccactcccctcctctccttccacgctggccccacagtgggtcatgctccagggtcgtgccatcattcagacatgtgctccgaaactaccttgatgacttttgttctgatttgtaagatgccccccacccctgccaattcctctcttgttcaaggttaaaaaacaaaaacaaaaaaaccaaacttgtttcagttgtttgtatagaaactcttcactaattgatgctaatccagaaactgttagggactggaacaattattcttgcaaggatcaaatactacaaacccctgtaagaagacactctgaacaacacagcctgtaataataaaaatatgtatgttaatacaattgatgattacttcctggatcttgggaactgtgggccagagataatttaattaaccttgcaataatgtgaccc

SEQ ID NO: 24599 - DNA, 1054 bp, Homo sapiens
ccattctgagtagcatgctgaaatccagctctttccagcccaggacaggaatcttcccttggcccagtgtccatgtgctgcacacgctaccctcctgttaatcactcagtagccctctcagttgtcaggctgactgtcacagtatcacaccacatgtattcaagtcaaccttattttacttaactgtggccccaaagcacaagagtggtgacgctggcaatttggaaatgccaaggagaagctgtaaagtgcttcctttaagtggaaaggcaaaagttcttgacttaataaagaaaaaacattgtatgctgaggttgctaagatctatagtaagaatgaatcttccatgaaattatgacaaaggaaaaagaaattcatggtagttttgctgtcatacctcaaactgcataagttactgccactgtgtgtgataaattcttagttaagatgaaaaaggcattccatttatgggttgaagacaagaacagaaaatgagttccatttgttggcaacatgttgccaagagaaagcgttgagactatggagaaaattctgcaagagaggtcccctgaaatgagtgacacaaagccatttagtgcaagcgaaggatatatgtataggaaaaagcatagtgtgtatacagggttcagtactatcctcagtttccactggaggccttggtatatatcctctgcagataaggaggcactgctgtacagtgagtaggcactgtcctcagacactggttctgctggttccttgatctgggacttcccagcctccaaactgagaaataaattgttgtttaagccacccaatctatgtttggttttgtttctttaaattttttgaaaaagatggggtttcaccatgttgcacaggctggtcttgaactcctgggctaaagcaatccttctgcctcagcctcccaaagtgctgggattacaggtgtgtgccatggcacccagccttctgtggtatgtgaaaagtagcagcctgaactaagacataggacaagtgaaatttaaacaagatgtagactgtaaagtgtagg

SEQ ID NO: 24600 - DNA, 1011 bp, Homo sapiens
ttgacttcgatcacctggccaacgtagtgggtgccaggttgctccaaggtgaagttattcgtttccttccctcccccttccatatattaacatgaacgcatttgtatgcatgcatagatgctgtatgtggagtgtgctgtactctccagaaggcaggaagtcgctgtgtgcagcccacacttaggggtatggtggtgtacaccaccaccatgagagtggaggatctatgtaaattgtttggaatttttctgcataggagatttgtcttgtttcccatttattttcatcagtatggattcccgggaagatgaactcccagtgttgtacttgggtgtgattcaggagtatgcaagcctttctgccccactttgttgccttgttaactaagggaggctgagataagtcctctcaggtgcagtcagagtctgtcctaagatgggggtagggagttgctgtgcctcagtggtttactttctcaatatagactgttagccatatgtgtgttacctgaaaccttaaggagaaagcatttttggccggcctggaaaggacacaagcaaatgtagccttgatggtggagaaacgtctctagcagggctgtgcatctgaatcagcattgaagcagcgccaccttgtggttgatgctgaatgagctgtgtattcggccaggttctgtgattcttaccctgtctgcatgctgttcgagtagctaaagtactttagaaaagaagaaacactttaaactcttaaagaaaaagagaagctacctcctaactttgcctttgtacatgactgggtacacaaacagcagacatcttaaagtaaaaaatctctgtagttactttgtttgacatactgttaatcatgtattttctggtaagcctttttgtctctgattgttcaaaattgttcaatagctgaggcgtaaaagtagaataggttataaccccaagcctctgtcatatttttctttggtataggcagattgggcagttattttaatattcattc

SEQ ID NO: 24601 - DNA, 1089 bp, Homo sapiens
gcccccatatgtggtccacaagggggtgagaagctgaatagaggcagtcagaagtgattcaagaacttccctttacctttctccatgcagtcagcctttcacgctatgtaatactgagggttccatgaatgtgctgctggggggagtattgttctccacttgcctaatggattcccagggcattctctcatctccaaataaagccatcatacagccgtcagatatttaaatctgtgaaatgaaaagtgaagtcttctctccagccctcatcccactggtattgggtaatgtacacccattattgatcagcgatttaatattaactacatgaatgaaaatagacttgctatttagagtggtctgtttgaatttgacttggaggtgcttttgtagtaactagcctaaaaccatctggctgttcagatctcagtatttagtgaacagctatgcaagtagacatgtatttccatttcacagcgtgtccatgtgagttcctaagcaactcatcactcccaagatggctcagtgacacttctcccaggcggtccttctgccagagtgagaagttcagtgagagagggctctgtgcattagggaagggagagattcagacagcttcattggattaaggaattcagactgaaggggaccttttaaggggatgatcactgggatgacattttagaagacagaataatatgaaaagacaggtgggaagcctttggaagaatacagttgcagtgccttaatggatataaacatgaagtaaataaaataacgtctgtccattcatcccaaccccgggtaagggtttagaacttgggtagcagcaaagtccaggttgtgcagttaagagaacagttgatcatgaatttgggtgtcccttttcctttttttttttttttttttttggagacagaatgttgctctgttgccaaggctggagtgcagtggcacaatctcggctcactgcaacctctgcctcccggattcaagtgattcccctgcctcagcctcccgagtagctgggattacaggcatctgccactacgcccagctaatttttgtatttttaatagagatggggtt

SEQ ID NO: 24602 - DNA, 1048 bp, Homo sapiens
ttttttttttttgctttgacagttacaaacttttcttgagacagggttttgctctgttgcccaggctggagtgcagtggtgcaattgtagctcactgcagccaaacttctgggctaatgcaatcctcccacctcaggttcccgggtagttgggactacaggcatgtgccaccacacttagctcattaaaaaattttttaacatatttcactgtgttacccaggctggtctcaaatttgtggcctcaagaattcctcccaccttggcctcccaaagtactgtgattacaggcatgagccgctgtgcccggcccaaacttttaataactgagagccacccattcgtttatttctctttctctctcattgagatacagtgccacaatttttaaggtattctaagcagaggaaagaaatggtgctggtttggttttttgtgttgtcaatgaaatattaaactgcaggaggttcttaatacttaatctcatacagccctacccagtagctgactgattagacccctcttacatgttccccatagtgtctcaatattccccttcagtgtatttgttcttgttttgttatttaattttctctccagatgtaaacaggggtctcattaatccagctatctactaggttcctagcatggtgctggaaatgagaaattaaggaaagagaagtgttgccagtgtcgagttgcatcgggagagggaacgttcagtttataaagaagctatgcaggatccccattccacatgggctttgtcaaacctttcaatgtctgtgttgtaacctctgccatgatgacagagttagcacatttcatgacattgaagctgtgtttttcctctgctcaagccaacattttcccataactcggctgagcatgaaaagtggcaactgtaggtgaaagcagaaggaattaggaagtggctggtaagtccctctcatccagaagacctcagctctggagaccatgcctcccactgtgttttcctgcaggttgcaagggctgtagagggatgagagggaggcactgctgttgac

SEQ ID NO: 24603 - DNA, 1027 bp, Homo sapiens
gaaatgctcaaaacagacatgtaataaaccaagatttttccttttccatgaaggtatgagttggggaaagtatgaaatagggcaagagaaaagatgcattgaggagtcacattcataagactgtattcttcttataagtgggcagaaagctttactcctaagtttcctgatagctagtggaaagagagaaaacacatgtggaaggtggtgtttataaagacaaaaatgtccattgcccaaaatggtaccgggtctggagacgcatacctccttgtggaccccctagaggggagaagccaaggttgcagcaagccccttgctcttttcacccttgtcttctctgtagctcaaagagaaggttctgatgaattgtttgtggcatatgtttggtatctctggtccttagttcctgaacaattctgggctaatgctgtagtcaggttacagttagctttcttcttgatgttcatttaagcctataacttgatttggatcccaccaaactacctatagggccctggaccgacactgattttatttttcttttgctgattctattttaagtgtccattcaacatagaaccttcagaaggcaaggggtaaagttggatcctagcactttaggaggccaaggtgggtggattgcttgagctcaggagttcaagaccagtgtgggcaacatggcggcaccctgtctctacaaaaatataaaaaattagcaaggtgtggtacctgtagtcccagctacttagggggctgaggtgggaggatcgcttgagccttggaagttcgaggctgcagtgagccgagatagcaccactgcactccagcctgggcaagagagtgagaccctgtctcaaaaaaaaaaaaaaaaaactttgggaaggtgaagaaagagtgcagtcgtatttcagagccttgcagagcaaagcatttgatgactgagtggatgactttttaacaaggcagacttcatgaacttttagccacagataattaactccttttatgtaatgagcaccatgca

SEQ ID NO: 24604 - DNA, 1035 bp, Homo sapiens
tgagtttgttaatatcagctcgaggatcttcttaccaaacttacaaacttatttttgtctaattgaggccgattgtacaggcaagagggccgaatttctgtacaatttagttaaaatggagctcacggcttaaaatgtaagcagtggaagtaggagctctcaatcaaggaaatgaaaatattcgagatagacatgctttaccgagatatgcagcagctggaacaaagaagaaaccacaaaggctggcaactgtcagtagtcagactggtcaccaggtgtgtgtcaagcaaggagaatacagtcagtcccctgtatctatagttctacatctatggattcatccagccatggagcagaaatacccaaggaaaaaaatcgataaaaaataataagaatttaaaaatacagtctcacaactatttacattgtattaggtattataagtaatctagagattatttaaaatatataggaggatgtttgtaggttatgtgcaaatattataccattttatagtaggaacttgagcatctgaggatttcggtatcctcagggggccctggaagtgatctccagtgcatagtgaaggatgactatagctccaggtgggtggggaaaggagctctctgcatctgagctgtggggcctgtttttaaggtttctagtttctaaactccatgccctgtgctgagtttagaagaggaacttgttacagtcattctttgttatcagtgtagcacttaacatttctcttctactactgcagggacccagattctccgctcctacgtcagagaatttctctgtgatttatactgtgctttcaggatgcggtgggtcactctggtggttgttgggtgttcttttacaatgggactctgaagtagctgataaataagtggccctaatggaaaagtgctgaggcacaactctaattcactttcaaaggaagtgaaatggccttgttccagaagagggatttggcatgtctgctggagagaaatactagagaacattatacgagttgactgatag

SEQ ID NO: 24605 - DNA, 1098 bp, Homo sapiens
ttgcctcccttcctgcccctgaagttgaatctcagttaagaggaaatggcaagatttttcaagtaccattgaagagtaagattcaggttgtatagactctatgcagcactatttagtgattagaaggcaggctgctacaaacagggcagcagagaacactcagtgttagaagaatcagaataatatgtgaaggaccgtatacagaaatctcttagaagtatttgcatgttatgatccaggtaaacaaattgccttttggtgggaaaggtgttttggcatatgaggattggcaggtaaaggaagggtgatgccagacctctgttcacagcctcctcatggggctggcccctaggggattgggtgcagaagttcttcctaaggtcctttattgagcttgctacagagaatgaaattgtctgttaaccatgtagtacagtgacaggtttttttatttttattttttgacaaagattataaaaataagttggctaggtttaaagattatttcactatacagattttctttgtaaagatatttattagagtgggattggtttggacaactatatatcacatcaaaatgcatgacatggacacctctttcctttattaaaaacagacctagaagcctttaaaggtatgttttaaatcagaaagaagttgggtaatgggttctattttttacctttcaaaatactttctgagtggattatagaacactgtgtttaattttccaggaaacaagcatgattgctatccagttttcctaaaactggtcattgccctggacttattggcatggactttccataggttagaccacaactttagcaaatgttcttctttgttcagcttagagatgtctccctctgccttgccccaccaagcccaccctcaccaaaaaacggactttcctccacatcttgaaatgtgcttcttatccagatgttagatatggtgtgtgtgtgtgtgtgtgcacaacaagtgtataattaatttcgctgtagagattctagcagtgggtttattgtagcatgaaattattgctttacctttgggtttttggggccctgagtagtgtctaggattttgaaagcg

SEQ ID NO: 24606 - DNA, 1070 bp, Homo sapiens
ttatgaatatggctgcctgccccttctacctgtgccttggtgggtgcattcaccatgaggcatgtgaggagaagggtctcagtgctcaggcaggagcctagaaaatgttccaagctgtgttactgtagggaggtaagaaggtttggggaagacagtgtagtcctgttagccctccgggagattttatacaccctacttatgaagggcctagagagaagctagacgctgtccttggattaccgtacattcgatccatttaaaatccccaacaagtaattagctgagtctttctaatgggaaagatttgtgtggtagctggcaaagtgcatagaatattcacttaaatgtgtatacactgtggatatgcaccaggaggatacagaggcataggtgcatgctgtcgtgaagtcaaggtttcaggtgtttcttgctcgctgggaggatgagtaggcagggcacgtgttggattgccctttggaggatgcagcgagaggggatatgccaacacagtcaggcctggagccacccaggtggctgttgaatgaaggaatgagagaggatgatatggatagtgaggaagagaaggactgagatcttagtagggggaaatggaagggtgcaggtaggacggatggcactggtcggcagctggatgctgggtcagagcctgttgggcagccagagggttttcagaagacagatggcccaactcgacttctgtcccctgcaccttggtcccactgaagatgtccccagtgctaagaaggctttacccaggcactatgtctccctctaggctctcatttgccctcaagtcactgtatattttcttgtcctgaaagataataatctgactaagatcaacagtacttcatgttgggcttaacccataaaccaaattaggttaattttagattttcctcaatgtaataacaggaggggtttttaaaaggcaaaaacgtgtactatgtacttgcttctaagatttcttgagaattagcaaaattattttgcggtagttgtttttgtaatctaactcgtatgaatgtttgaatagatctttaattttt

SEQ ID NO: 24607 - DNA, 1072 bp, Homo sapiens
gctcctggaatttggtgcctgcctggacggaacgtcagagaacggcatgactgccctctgttacgcagcagctgctggccacatgaagctggtgtgtctgctgaccaagaagggagtgagagtaagcggcagcctgctcttttggggctggggcagggaaatggcttcatctcattgctagaattgttatttgctgggccagactctcttgtctctgaaaccacagcatacacagaaagggtcgggctccagggattggtcactttgtaatgtggcagcctcagagaggtttgttttgctcatacacagcaactctgcttaatgttgtccaggggaaggcagaattccagggagaccctggctcctagccgcatgaggagggccagcctttaaaaagcctgcaagtatcgatctagaaagcaccaagattggtttaaaatattttaaatgtttgcttttttcccctctcttcttcttatcccattttatgtccttttaaaacagtaggatgagttccatgaactcatgaagaagccatgtgcctgagctccaggaactagattgcctggaatcttcatctttccacttgccagccctagggtattgggcaagttattgagcctatatatgacttcaggcttcttatctgtaaaatgggcataacagcagtccctaccacagggctgttgagtaagcattcagtcatatatgaagtaagtatgtattgctatacaagttactctagagcgatcaacttttttttctgttttgacagtctcactctgtcactcagtctggagtgcagaggcatgatcttggctcactgcaacctccacctcccaggtttaagtgattctcctgcttcagcctccaagtagctgggactacaggcacatgccactgtgcctggttaatttttgtatttttagtacagatggggtttcaccatgttggccaggctggtcttgaactcctgacctcacatgatctgcctgccttggcctcccaaactgttgggattataggtatgagccaccacgtctggccaggagctgtcagctttaatagggtg

SEQ ID NO: 24608 - DNA, 1050 bp, Homo sapiens
cagatcacctgaggtcaggagttcgagaccagcctggccaacatggtgaaaccccatctctactaaaaatataaaaatcagccgggcttgggggctcgtgcctgtaatcccagctacttgggaggctgaggcaggagaatccctgaacctgggaggtggaggttacagtgagccaagattgcaccactgcactccagcctgggcaacagagcaagatcctgtctcaaaaaaaaaaaaaaaaagggggaatttagtaacagcaaatgttgtggtggttgggtggggggtgggtattgtgtttgttacaaatttttaaataagctgcatttaaaaaatgaaatttggactaagcatttgcggaaactttggcctcttcataactctggtcaggctcaactctttagctttctgcaggggaaaactgaagctcacagaccttgaggatttgccaaggtcatacatagcaactgggactagatcatatcttcaggtgtcttgtcttgtgttacatcctggaccttgggactccagagctgagcagtctctcacctgctgagaaccatggtgcacaggccccctgtgccctccactagggtgactcactgaacacacatgttggtaccagcactgacttctcatgaggaccttggctcggcttaccagctacctccttggagagctgcaagggactatgtcccagtgcatgtgaaggactgttctaccacagagaactgaagttgttacgcctcttggaaaaatattgtagcatcaggtgtcagagcatcttgacagctggcagatgcctgctccctctggtgctcagataaggcctggggagctgggaatcagctcctgacttgttacctcctctggtccaccaccgctttagtgctgtctgctgcaaacatagattaagaggcttgaggacatccaacaggacagagccctttaaatgcatttttctggagaaatgtggtggcctcctttctgaaaagaaacaggccatcatctgggtggtgaggaatagggcgtggaacattcggaatcagc

SEQ ID NO: 24609 - DNA, 1030 bp, Homo sapiens
ttacattttcctacaaaggcaattcgtggcagctctggctgacctgcaagaggctgtgaaactctgtcccaccaatcaggaagtcaagaggcttctggcccgcgtagaagaggagtgcaaacaactccagaggagtcaacagcaaaaacagcagggcccgctaccagctccactcaacgactccgagaacgaagaggacaccccaacccctggcttaagtgaccactttcactctgaggagactgaagaggaagaaacttctccccaggaagaatctgtttccccaactcccaggtcccagccatcctcatctgtcccttcctcatacatccgaaaccttcaagaagggttacagtccaaaggaaggccggtatcgccacagagcagggcaggaatcggcaagtccctgagagagcctgtggcccagccagggctgctcctgcagccctccaagcaggcccagatcgtgaaaaccagccagcacctgggctctggccagtcggcagtgagaaatggcagtatgaaagttcagatctcttctcagaaccctcctccaagtcccatgccagggagaatcgctgccactcctgctgggagcagaacccagcatttagagggaacaggtactttcactacaagagctggttgtggccactttggggatcggctgggccccagccagaatgtccgcctgcagtgtggtgagaatggccctgcacaccctttaccaagtaagacgaaaaccacagagaggcttctgtctcattcctccgtggctgtggacgcagcccctccaaaccaaggtgggctggcgacctgcagcgacgtgcgacacccagcttccctcaccagctcaggctcttctggttctccatccagcagcataaagatgtcaagttcaaccagtagtttgacttcgagcagcagtttttcagatggcttcaaggtccaaggaccagatactagaattaaagacaaggttgtaacccacgttcagagcggtacagctgagcacagaccccgcaacacg

SEQ ID NO: 24610 - DNA, 1071 bp, Homo sapiens
agtgagttctagctaaatataagtgcgactgtaaacgcagccaatttttttaagcagaatatgagaacacctaagtattctcttcatagcagttcctataaagggattaaacacttatttctgtgttatggttcttattcatatatttttatagcacttttggaacctatatttgtgcttgaaggtgtttttgatatttggaaacagtataagccatttggagtcatgattggtggtcaagtggattcaagctaaaatactaagaccagcattcttagtggcgcttataaattagctctcacctggtttccaaactgcttttaacaatggtagtgctcctggaacaatccttccaagctcctctaaggacaatatttaattcagatactaaaggtaagactggttgttacttttgttttgttgtacaattagtactttatagtcacatgttgtatatattaaatagcccagttttattcagacttgtaaatagaactatttcaatgtagttaatctaaaaacaaaaaagaaaaccccagtcacgatttgcatgttctctgtaagcttcatccatgctggttattgcactgaatgatatattattagggcatgttaacagtataccagtaacagcactttatctcatttatatgaacacctttgaggtgctacttaagtccaagctctgatgtattattcatttgtaaagataaggtacaggaatgaaccttggtttaaaggtatttttatatgaaaatggtgtgttattggaagatgttaaaatgctaatttgagagaagtaggagtgtatctgttttatatgttgggatgtgaaatttattttctaaaattgaggagaaggaagttatatatttgcagaatgttttaaagtgaattgttgtaatgaagttcctgtgaacatcattatggttttgtacaaataggaacctctgatgtcattcttcaacgtttgttcctgtgtgtacaattgtactttgtatgaacagctttatcatttttataggctttccatgagttttgctgtaactactatggcttatttattttctt

SEQ ID NO: 24611 - DNA, 1102 bp, Homo sapiens
tgggggaggggaggaaacgaagaggcctggggacgcggaggccgcttcctctcaggatgaggtggagaagcttggtccggggccaccggggccaaggggccacagcgcaggcctcccttgccaggggcctttggtcgggtggtggagtttgtggcgggtgcaggggacagattgtgtgtcttcctcagggacgtgtggcgggtgacgggaagaagcctgagccctcctttggcgcggggcggcctcctcttgggccgtggggcggggggtcttcggagccctgcgggccgcgggtgtcgcgcgtgagctcgccggtgagcgcggggcaaaggcgggcagggctccggctcggccagcccggcctcgagtcgaagtgacttcggtagccccttagattcggccaagattgtcttattggtaacgtcagtttttgaatatcgtgacgccctgagagttatttttgtgttgtggtgaattgtgggttctgcaactcgaagtaggtgattgtattaaaaatggacctgttggcctaagaagtaaaaatatagaaggcgccgggagtaggaaactccctcattttggtgaaactgcgtattgaagatgtgtgtccaccccctcaccccaaaatgctgcacttaatactttttctcaagtaccaaagtaaatatattgggaaagtctatctgggtaataaattcgtcacgactaatgttgtttgttactattagttaaatgtgtgaaaactgaaatttggcgaggttttctcccccattttgtaggattgattagctatttttctgattacatgttattttaaatctccacctttctgtccagaaccaagatgtaggattaaagatgaattttcgatttaaaaatccaatagtatacagttattaagaaggcacacatgtagtgtaactagatcttttacttgaggtagcaaaaagtttgtttgagaaatgaggtcagtataatatttttatttaacagctctacagcattttgggagacaggactggtgcatgaggcagtagcaccagactcagaagacctgggtttgagtcttgatttttgccatagttatttaagttcacgagat

SEQ ID NO: 24612 - DNA, 1100 bp, Homo sapiens
aatttttagtccgctccatacccaccttacacaactcttttatctgctctatgttcaagaatcgtctacattttgacattttattgtaggaaaataattttataatgcaaaatctgtcaaatatcttaaaacttttttagataatttgtaatttgttgtagtcaaattacaaattatggagagcttcacattacaagaatgagcttgacatggcatctgccctccacaactcactgtttagtcatcagactaatgtataaacaactattattatcttaatatgactgtacagtggttctgtgggagcataggggaggggtgcttaatcttggaaattttacaggatttatttatttattgcctgaactaagatgtgaaggctcactaggactttgataaagaaactgcaaagtcatgatattatggtttgttttaggaattcatgatttgttcctgtagctgaaacatacattgaatggtaagttagagcccgacataaaagactttctgtactgtactagaaaattagtgtctgggtgtggtggctcactcctgtaatcccgtcactttgggaggccaaggtgggaggatcgcttaaggctgggagttcagccaggccacaaagaccccatctctacgggcatggtggtgcgggtgtagtggtgcgcactgctactactagctacttgggctgctgaggcagaacgatcattttgagctcacgagttgcagagactgcagtgaggtatgatagagctccactgcactccagcctgcaccacagagtgagaccctgtctctaaaaaaataaaaataaagttagtgctctatgctgcggaatggagagctattgtgttccttaacaaaataaaaataatttttagataatctttgctgatacatccttctgttaccacagataattaagtgccagtaataaagaacaatgggacatgaatgaatgaaatgcacagcgttgcattagactttacttttaaacaacaaattaactaatgaagcttttaactgttaaataagtgaatcaactgatcacattagaatgattacaatttaaaaagaatcggattttgagttcctac

SEQ ID NO: 24613 - DNA, 1516 bp, Homo sapiens
ggtactattaataattattctgggataataagcataaattagaatttttcagcacataaactgggactgttctgggcaagtggggaaatatggtcatcctgcttctaaggaaaagagcagtccttttccttaccctttaccccatctctagtcccactttgcaaaggcagtgcccctctgctatttagctatttcttttaggacttacatactttcatttttctaaacagtgtgcttatactgttatttcatggtttttcattgtttcctaccattcttatttccactgcccacttccatctcacaatatgtagcaaattgattcagtagtctatatttacattattaagactatgtaaatattaaagagctcacctaataacaatcatgcctttcatgaacagctaagtttttccaagttaaaaaattaatttttaaaattgccttttcttctatatacacagttttttcaagttgtaccaccatctctaccacatgccaatgagatgtagtttccatgtgatgctttttcttttcttacaacttctgctacctgaggtcctgctccagtccgaattgtttgcttgccatgctttctgcatagcatcccccttaagttcccctttatcgctgcttcctgggtttcatatcttgttatttcctgcctcacactcccatttttctaggacacgctgttcatttagcttcctctggtagtgtttttggtcgttgtgttttgttgagaccttgcatgtctgaaaacatgttctgttctccacttcaaatgtacttgctagattggaattcaaggctaaacatttttctcagtattataagcattatttcattgtcttaagactttattgttgctgttaagctgttctgattacgttctctttgtatgtgacccattttttccactctagtaacttataggatcttcccattacttctggttttctgcagtttcaagatggtatattgtgcttagtgttggtcttttttctttgatgctcttatgtagtcttgagccctttcaatttggagagttctgtccttcgtttctagaaaagtttatttggtaattttctctatatttttctgtaaccacagtcaaattataactctctagataattattttcatgttacatttgctatttcttttggttctgctttccaggaggtttctgcaacttactcccagtccttatgttgaatttatttcagtatatctcattttaacaagtatatggcattttgaatttccataagctctttataatgctgtctttgtattctcacacatcctgttcttattttatgaatgaattttttttatactttaagttctagggtacacgtgcacaacatgcagatttgttacatatgtatacatgtgccatgttggtgtgctgcacccattaactcgtcatttgcaatagatatttctcttaatgccatccttccccctccccctaccctaaaacaggccccagtgtgtgatgttccctgcc

SEQ ID NO: 24614 - DNA, 1033 bp, Homo sapiens
aatccttgcctcagaatattttaaaagctttttaaggctgggcacggtggctcatgcctgtaatcccagcactttgggaggccgaggcgggcagatcacgaagtcaggagatcgagaccatcctggttaacatggtgaaaccccgtctctactaaaaatacaaaaaaattagctgggcgtggtggcgggagcctgtagtcccagctccttgggaggctgaggcgggacaatggcgtgaacccaggaggtggagcttccagtgagccgagatcgtgccacttcactctagcctgggcaacagagtgagactccgtctcagaaaaaaaaagctttttaaattatagtagtaacgtgcttatagtagcactgttacaactcccaagtggaaacaatctagcgtacattcatggtagaatgggaaaataaattgtgtgccatatggtggaatgctatgtaaagaaattagagtgaactgaagactgcatgcaacaacacagatgaatctcacaaatatagtgttgagcaaatgaagttggacacaaaagagtacttattgtatgattccgtttatacgtatttaataatcaggcataggtaatcattactttcgtcgtgggtttagaaatgtttagtgaggaaaacttggaaattattaatctataaagtggaaagcactcagttccacaaaataacattttgtttttttcttagaagttttattcattttatttgcataaatagaatcatactgtatgtgtagttttatagattgacctttttacttaaaatgttactttccaatagtaccataaacaatctttgaaaacattttgagaaacactttattagctgtgtgatcatgtgcaaattgcttaacctctcagtgcctgttttcttatttataaagtggagataatatagtacctgtctcacagggttggtctggagagtcagtgaactaacagataatcagaaggtctttactgtcagaccttgcatataatacttaataaatatcagctattgctattat

SEQ ID NO: 24615 - DNA, 1047 bp, Homo sapiens
agttcttcattccacttttaccatgtttgtttgcttccttttatggacgataggaaacctttgatgaacttctgctttgcggaagagaagtggtgatcatttcacaatttacgttgtcagatatggttaatttgtatggttaattttttatttgagctgatgattaaggaggattaagcattaaaggctttcatattttcccaaaggcaattaatgaaaatttttatttcacagaaaaatctttaagaatggagtctaaaccttcaaggattccaagaagaatttctgttcaaccttccagctccttaagtgctaggatgatgtctggaagcagaggaagtagtttaaatgatacctatcactcaagagactcttcatttagattggattctgaatatcaggtaacatttttatttggaatatatgtatacagcctttttcaaaatccctagggccactcttttgggggtatttaaaaaatgtgttagctggatctgaggcatcctgtaatcaaaaccaatatatatgtagcaaaatgaataacatttttcaaactttttggacttcagaattatggataacagattgtaacctcatataaaatcatacttttgcgctgggaacggtggctcacgcctgtaatcccagcactttggcaggctgagactggcagatcatttgaggtcaggagttcgagaccagcctggccaacatgacgaaaccccgtctcgactaaaaatacaaaaaaattagctggacatggtggcacacacctgtaatcccagctacttgggaggccgaagagggaggattgcttgaacccaggaggtggaggttgcagtgagctgagatcatgagactgcactccagcctgggtgacagagtgagactccatctcaaaaaaaaaaaaatgctttccaaagacttggaaaaccttgtacgtaaaaacataagtataaatttaactaaactggtcaatcaatgtgaatggctttgtcagaggaacaaaaactgtacctcctttccctctaagatcacactgattca

SEQ ID NO: 24616 - DNA, 1031 bp, Homo sapiens
acaaggaactacagagccccaaagaggttgtcacagccctggttcagggagctcctaggtctggactccccaaagggtcagagctcttccgtccttgtcgccggcagcatggtgagtggggggtaggaagggatgtttcagcactgtttgtgttacagctcttcgagtcccaccatttggcgggtcccgagttcttgtcccacgtccagagagaatgaggtacacagacagttggagggttagcaaggcgaagaggggctttattgagcagtagcacagctctcaggagacccaaagtgggtggctcctttccacaggcaggtcatcccaacgagtgtgtagctttcagtggagaggagaccagacaggagtgggtagctcctgtccatagggaagtcagcctgacatctggctgagtcagattttcatgggcttcagagaagaggaagtgcatgctgattggtccatgggaggcaatgggtgggcctgggataagcaccataagttctcactccggtccgtggaactggcagcccagcctccaggcttcaggccatcccaggcttaaaggtagggtttcactagggacctgccccttttcacccaggagcatgtctgcctcctgctactgttcatggcacccaggctgtttgtgccaagggatgcctgcagacccatgccaagccaccctcagttcccccttggcttccctttgtgcttgttggtgcccaaagtccagacgggggccaaggtagcagtgggctggtgtgtcggcactgccccaagcatgcgcatacacacctggatcgtgacagtgcccaagcttggccaaaactttgctccaaaatcggagcaggaggcgggggcgggaagggaggcttctcaggcccctgagagcacagggatacccaagtctacagccacagctgggtcagggagcacagggctcccaccccaccaacttggaagtggtcagggctcccacctgttgctgactctgtggagcgcacagaccctgccacgcctcccct

SEQ ID NO: 24617 - DNA, 1022 bp, Homo sapiens
gaaaagtgttttatgaagacattataaaactaagctttatttgtaatttaatttttaccaggttcttcattagaagctgtaaccacctgtgaactatgtaaagagaagttggagcttaacctggaggattttgatattcatgaactacatagagctcatgcaaatgaacaagttagtatattttgcctaatttggtaagtgtctattctatgcttcaaggacagctcttgaagaaaagattaaatcatggtcagaaaccttgcattaaaataataataataacagtgataatgttcttaacataattctgttactgcattaggtgttagaatttcataatttttttttttttatttttcccttaagcttaggaaagttgttccaaaatagggatgccaaccttatttccccatagctgtaagttttttgagatgcataaatgatacagtttagaatgaagagctcaataatttcctcctttttctttactgaaggaaaattcgggaggtggggcagatgtgtatttaaggagattacaagggtgactttagagccaaattgttgaagtgtggttagcatatttgtttaaaaaaaacaaacaaagatatgctgtaaaaggaatgcatgaagtgcttgaaaaacactttttggccaggtactacaatggctcacacttatacctagcactttgggaggctaagacgggatgactgtttgaggccaggagtttgagaccagcctcagcaacatagcaagacccggtctctacaaaacagaaaacaaaaacactttttaaatgtaggggtaatgggcctcccctcttttattatattgaatgagatttacaaaacataaaaaccattttgtgcagccgccatctctgtttagttccaaaacattttcatcactccaaaagaaaaccctctacccattaaacagttgctccccattctgtgctctcagcccctggcaactaccagtctgtgttgttttatggatttacttatcctggatatttcata

SEQ ID NO: 24618 - DNA, 1126 bp, Homo sapiens
aagaacatagagttcttaacgtctgatgaaccagttgcccaattcagtttgtaaatagttcactgtaaaaattacaggacagattagattattaataatactatatttatgatttgtattcatggcttgaaaacaactgtggggggaaaagagaaacttttaatctgaggaatatgagcccctttaaattgtcaggttcagagaggtatttaaaatgtaacagcattctcatctcactctcccttgagctaaatacgccacttgctttggggcctctagactaactagtgccaagtagctataaaatgtcatataccctatagttcaatagtgtatagccaatcactaaccaatgttatttctgtaaaccaatgttgagaattcagaatgaacaacttttgttatctctcccttcctgatttgtccttttttctttaaaaatttgagcctttcttttgttctctggagcactctccccaaggcagcttggaagtgggagcctggcagcagtcctgaaccttgactaaaataaactctgttaaatttcgtctcagtttcttccttttaggttaacacaacagaacagttttgaattgaagaactgtttttaccaactacaaatttctgtgtgaatgattaatctcttacctttattaattcattcttttatttatgcctttatgttcatcatattacacagaaaaacacttgagctatcagaatagattttagttacagcagtatattggcatagctatagatgaaatgtaatttttaactaaatatatatagctatagccatttgtataatgaaatctatgagctttatagaaaaccaaagcattcattccaccatcaaattatttaaaagttccatttttatataaagtcattacactaaagaagactatgtgagaataaaaagtaaaattttatgaaattataaagatattctttttttctcaataaatggcattgtgtcccttattaggaactggatatgaatacatttcctctagtttatcagtgtactgtgagtatcaatctcaattctactaatttttcattctctgtatttttcttttctcctgtttgcttccctgttgaaggctgagtatgagtttat

SEQ ID NO: 24619 - DNA, 1022 bp, Homo sapiens
tgttgacatcttatttcctttgggaagcttttattttttaaatgtttcttaaaaataaagataccgtagatttaatggaaattgctgtcttctataacaagcagcctgattttctcataaagttattttagagaaagaagtaattttctagctctcaaaggtaattggaatgtatttcattgaaaaacagaattggaaacatcgagggaaaatgggctttttattattaaaacaaaacctcagtattatcacttagaaacctgaaattgaactccaaaagccaaagagtatgggaaattaacttcaatttatttgttactgttctacaaaagattaccagtgtactaatttttaagtgtccatattacaaagtattttagatatggaatagttggttgtttactgtgtgtgctattagccataatacaacattttggccagctgtatgttaggtatttataagtaaatgatgctctttgtgtcagtgtaccagaggaaactttatgctttgctgtctgggccattttgtgtagcaagggctagggtctctatgtatctgccattattgtagcattctgaacacttcatgtcttgaaatgtgttcataagtatatccttcaaactttcttacatgttaacttcggtgataaaagtgtagtagagttcatgtaatgtttttattttgaaaattatcaaataactgcaattcaatgtatgtaatactccttctaaattagtaaaaaatttttctttattttatcatgtggacattattccagtgagctggttaacagataattaccattgaagagcattcatattatctatcaagagcattcagaatttgagcaaagatctcttgacttctaagtactttacaaattgtgagcccctaaaaccttaataccgtaaaatgatttctaaaaaggtaccttaagtcttcaggatgaataaaccatataaaacatttaagaacttctgaattcatgtgtttttaaaagttcatattaacaagttttaca

SEQ ID NO: 24620 - DNA, 1046 bp, Homo sapiens
ttagaaattgggtccaaacacctttttgtactgaagaaaaagaaactttggtcccaaaagatttagtggcccttaactaagggtcagtcagtaatagaacaaagcaagggactagatggatttccagttcgaggctcttatttgtctcagatctaaaggtacaggtgtggtttatattgacaatttttcatgacatgcagctttttaaggcagtgatagatagcttagccgcttagctacttaaaacctctaacttctgtattagtttattatagtatattatagtccctgtgactacctatacttactttttctttcctctttgcatatttatttttaatctcatgtattttttgtaagtagccttagtatgttttcgaatgaagcagtgtctaaaatactcaaaatgatgctttttattaatgctaactgcttatgtttccatagtgtctatgtctgggccaagatcctagcaacattaattatcgtaacaggatttcaactttttcatctatcagaggtagcagtagaaactaacttcctaagtggaatgcataaagaattgccatttcttcagtttttcagaaagtaatgacattgttatccaaaaccctggaattgtttttattgagcctggtaaattacttaaaatgtatttagtatcttaaaatgaaagactttggctgaaagattacttgcatgtgggtattaaaaaaaagttgtgatttatgatcagttgatttttggcaagggtgccagggctattcatgggaaaagaatagccctttcaacaaataatgccaggacaattggctaacctcatgcaaaagaatgaatctggacccctacctcacaccttatacaacattaactcagtatggatcaaagactttaatataaattataaactacttaaaaagaaacaattgaaaatcttcatgaccctggattaggcaacagttccttagatatgacagcaatagtacaaacaacaaaagaaaaaataggtaaattggactgtattaaaattaaagacattgtgtgtc

SEQ ID NO: 24621 - DNA, 1045 bp, Homo sapiens
tagttttgatattataactgtggtacagttatatgttatgtttatttaaatgaacacttgcaggatatgggaaagtggactttcacatatactatactatatggtagaactctaagtttataaaacttcctaaaaagcaatttgccagtaaatagcagcaaaagcttttgaaaacatctatgccttttgaaccaaaaactcaagtcctaagactatatcataagaaaatatttgttcaggtactcaaaaatatatatgcgaggatgtgtatcacagtataatgtctaatcatggaaagctagaaacaaatattcagtagttacactgatctatatgaatagctatgtagccaagaaaagtgatgataataggtattaacttgtaagaatatgtggacgatatatagcaaaatgaacaaagcaggatacataaataagtgtttttttcatttatgcagaaaaaggtgattcttgtgtgaagttatatgtataggaaaagaagaattctgatagaatatataaaccaaaatattaactggaataattcacaggtgataaaaatttgggtagcatttactttttattctttttggctgtctgcattttctaattttcccataataagcatggagtcataatacaaataattatcttaaataagaaacgcatacctgaaaatgtgaatataaaagttgaattgttgctgacagatgcaaagagcatatttctagttttctaaattctgcatattttacatactgctggcttttggagagcaggggttttgtgtgtttgtttagtgggaaggaaaaaatataaatggacaacttgtcaaagtaactattacctaaagaattttctaaaactcctaccttaaaatgtattctctttatggttttgagtttgtattattttttgctttttcaggtggtaccaaaaataagggttttctgctaatgtccaagaggtttttgtcttgcagataacaattatggctgtgttcctctgcttgaagacagtgaaacaagaaagaataatttgactct

SEQ ID NO: 24622 - DNA, 1070 bp, Homo sapiens
agatatttacaagttctaggagtttgaactttgggtcaagatgttgattccttttaatgtgcgagggtgaaggaggttttattttgctttattcttttggatattatgagatgagattgtatccagtcttggctgtaacctataccataaatgcagagctgcaaccattatttctgtctctttctccttttatcacctacacttctagagatattactttcagttttattgcaaatcatctgtgtctttagtttaaaccattatttttcatataccccaggcacatttcccttataatgagacaaattttagattattaatgttccacctaaaaggatactgtacacttttcattgccaatatgggctttgaagcttaaatatcaacatttttataggaaatttacccatgtcaaatttaaatatatttgcttatatttcttggaaaaaagattttggataactatcaattaagcagccaattccatttggggtgcagaaaattttgagccccttgataagaaggaacaaaatttttcctctaaataaccaactctggatcagaaaaactgaacttttctaaatatttattattaacaaaacttttttttgtctgattccactagaagcattctatgttgtgaacactataaagttatcctatgttgtgaacaccataaagttatgagggaaaaaatgtcaaatctaaattttatttagaagtaacatattgtttttctggacttgcaatccaattcgaatgcatcgttagacttttctgttttcttatgattaaacaacaatggcttaaaatgatagcaagtcaactgaaaagttgctttggaataaaacaaaagtgggaatgccaactttcttttcttctctataacttcattaacatggttgtatagacatttgcatgtaaaatgtagctaacaaaaattacacagaagtaaatttagtcctctagtgcctacctctatggtgaaatcagaccatttggcatagtttgaagtcttccaagaagcctggtttccacctggaaaataaattactaaatttgaatgtgtt

SEQ ID NO: 24623 - DNA, 1048 bp, Homo sapiens
cactgagctagttatattttctaagtctcagtttcctcagtgtcaaatacaataattgtgaagactcaattatatagatgataaggcagattagctcctacccctatcattctttcttttaaaggattttctgactattctctaccattttttcctccagatgaatggattttagattccatcacatatgttcatctttttaataagtgaggaaaatatcttctcagtcatactacttttagactgatgagcaagttgttccagagccttaccaagaggaggttcaggaatgacttggaacctgtaataatcaacatattttttgtttattcaaaaaattcaaaactatgctgcaccaatttgcaaatgatattgaataaattggggtggttagtatcctggaaaaataaactaaaatttaaattaggataatgatcatatttttaaaatgaggctcaaaagaagcaaatgtgaggtgtacacataaacaataacatatagaattgtgcaggaatgtctaggcaaaaagcacagagaaaaaagacttgagggtctatctagagtacacgaacggtccccaatgcggatgaaaaagagttttcatgatttatgaaatatcccaaacaggcaggaaaccatttttcctctgtttcatgtataaattatacttttatatatatatataaaagtatatatatatatatttttttatttttatttttttgagatggagtctggctttgttgcccaggctggagtgcagtgccgtgatctcagtgcactgcaacctctgcctcccgggttcaagtgattctcctgcttcagcctcctgagtagctgggattacagttgcgcaccactatgcccggctaatttttgtatttttagtagagacgggttttcaccatgttggccaggctggtatcaaactcctgacttcaagtgatcctcccacctcagcttcccaaagtgctgggattacaagcgtgagccaccgcacctggccctaattatactttcatttgaaaattatttcctgctttgaacc

SEQ ID NO: 24624 - DNA, 1024 bp, Homo sapiens
tttttgtgttttcagtagagacggggttttgccatgttggccaggctggtcttgaacccctgacctcaagtgatctgcccccctcggcctcccagagtgctgggattacaggcatgagccactgcacctggccaaaaattgatttattttaaatccagcatggacatgatctagcaatatcaggttctaatcagacataaagtgagaaagaaaaagtggaaagtaatcaacttttgaaagtactgataccttttttgtactatttttaccagttaggattctaaatattattgtatgtatgacattatgttaggtataaacactttattcatattgtctgataatattttccataaagttaattatatcatgaatgagcttttgagtcttctactttttgatagctgtaaaaacttggtttagatccatcgacctttttattgcttttatttctaagaattgaaagtgttcccttttatgttaagtataacacattcactttgtgagtctttctgctaaattctgcgaaatgcaagtccctatctccagtgtgatttagtaatgtgaaatatgcccagcattttgaaacccagtaagtggcaaactatgtgaggaagaaggatctgtgttggtagccatgctcaggatggggttgccaatgacagtagctagtgtttattatatgcttactatatgataagcattgtgttaaatgtttttttttgtgtccattgtttttgttaatctaaacggctctgtgagatagatctccattttgcagatgaggaaactgaggaggagagaggtaatttactcaaggacagggaacttgtaagtgtcagagccagtatttgaatctggcactctgactgtagagtcatagtacttgactctcatgtaccaggcaaaatagtcattagtcatcgccatttaccatctaggtccagtagaccataaaaggatagtgaaaaaacaactgtattagaaatgttagtaaagcttaaacatagcaaatacaaatttt

SEQ ID NO: 24625 - DNA, 1050 bp, Homo sapiens
cgatctgtgcagtcatacattgagttaatactaattaacaaaagaaatgactatgtgtatttctcttcctaagacttttatatatgcaatgtattgttttatgaccaaatattagaaatatttttatagtcccttttaaaatctctttagtttccagctttcccacatttccttactgctatcagtgacttcatctttcttcaaagtaatctgtgtttactataagaagcagtttttgtttcagacttcatgaaattttcagtgttttagaagaactttcataagaactgtttgattaggtctatcatggtttatgacttttataaagttgaaatctttttgtgattctgtattgcattcttggatggatttcagttgtttttcgtttacttttgttagttttgatgatttctcatgtttctttgttgtcagcctatttcttcatgattcttcatttttataacacctgtataactcattctctcaagaggcctaagcctctttgaacttgatcctgaacctgtttccattcttttgtaaacattctagagagcttctagaatttctctaatttattctgaaattagtagtaatagtgttcaggcatgtgaaaatgtgagaagtgagcagaggtggtatgtagatagtgcagatttacctgcaaattataggtgaagatgttgccttagaattcttaaggaaagttgtatcaaatttaaatataaaaataactttccttaagcatagatacaataaattacccatcttggaaatccatgctggaaaacccctggacatgaaataatggttttactgaccacaaattgagctacattatatgtcaatggcgacttcaaagctttatatcaagtgaaaaacttaatgttttttcagtaaccttattggtttctgattaatcagccattgtgtccttagtttgtactcttttttgaagttaaaaatctgcttaagaatcatttcatctcaattagatgataaactctaatttgtggaactcttatttttatggtatctcccttatcctatact

SEQ ID NO: 24626 - DNA, 1049 bp, Homo sapiens
gagattattgtattaaaaacatatgttgccataatttggctacttcgttgtctttataacaactccacctaggtcttggcatctaaacgatttccaaaagcagtggaaacagagcccaagagatgagaatagccaaagcatattctgtactttttaaaaattttgatttctccctgggttcattttagctttggaaatagtcaatataagcttgaaagtagatggaacttaagcaaaatgtcagtggcatttagtaacttgtcttcagttttaatttgttaagtcaatattttgagtttctgtgtatcaggtattatatactataacgaattccaagacgaacaagaatatcaatgcctaatccagagccttacattataatagacacacaagcaatcatgttttaagtgcctagtacacattaactactttgaatcagtgaaagctaatgctcattgtaaataacgtgatttgtaagtacagtggaggttagtttaacttcttttgggaaaaattagaccaacttgggaaaaatgggaaaaatgagactaaggagatgatgtttgagctgagttttgaaatatgtgtcaaggcatattcaaaaggctagagaatagatacataagaaaatactgggaaaagaagttggtaaaggagtctgaagttggttatgaaaggtgttgaatgccatacttggtgatttttacttttttcccctaggtgttgtagtttcatgaagattttctttctttcttttttttttttttgaagtatgaagattttttttttctttccagtagacttgtgaggtaatttgatctgtgtttttgaaaagtaattctagtggtagtttggagaacaggtaaaggggaagagattaaaggcaaagtcatcaattacatgaatatttgtgactttcaaccttccaggcatataacaggattatatttttctgtcatctttgaagttagccttgccatgattttgctttgaccaatggaatgtgattggttaataggtcacttttaggtgaaagctttaagaatcag

SEQ ID NO: 24627 - DNA, 1056 bp, Homo sapiens
actgctgtgttcagttgttggcagggagctgcccaggagaagtatgacctggtgtgaatgcccagtagagccaaaggtgtaaaagctggaggttgtgagtcagtcatgcgctccacagcaggttctgttgaaagatctgagctgggcaactccatcagtgccacagttagtaacactgaaaactacagtggcagaaacatatatattattttattaccaagtctatgaggcatcgtcattcatgagcaaatggagaaattgaagggttaaataacttgttagaggtcccttagctagtaagtgatagacccagaattctaacttaggcaggattgactccagagtgcctcaagcatttaaacctctacaccatactgactacatgcatatgttgaaaagttttctgtgaaactttatttttattataacttaagtaaattcttttcccagtgtttcatgaatctaaaaatgtctaattaccttttaccatactagtttctaaagatcgatttgttttcattaaagcatatacgttcaaaacttgtggatttactctttgaattttgatgcatgtcttcacttgtcaaaaaaagtaaattatgcaagttacaccccatcccccttttctcccaatatactgaagttgtactacagatctttagctacagtaagcaattctccgaggatgaagaaagaaaatgtacatacacataggaatttcttttccagagctaaaattgacattttataaataatttccgtgttgcaaacttgagactaagaaatcacagcaattcagtgatatgcatttggcatgagtcagttttagttcttagtgattttcattggaaatggcataaaaagtaagatttctctgaattttttatgctgtgggcttacaagagacataagatgtttttctcttatagatgtctggcagtgcatggcagcagaagtaacgaaatggtcacaaaccccagcagtacttcccaggtcacatgcactcttaatttttaaagaatctagaaacaacctaagcagttgataacaggtcat

SEQ ID NO: 24628 - DNA, 1048 bp, Homo sapiens
tttcctggttttacagctagtctataagctctgtgaattcagatattgtctcattttatctttagtacactgccagataaatggtagatgctcaataagtatttattaaatgaatgaaattatgctatacttgtatttttctaccaaaaatgtaactttattaagtggccaatcataagcactgttattaactaatattaacataatataaactaaaatttaaggaaatgcaatgtcctctaaggggcacctttcttcctaatcttcaactgttctctatcatggcaccctttgcccctctcccttccttgaggctaactggataaaatataacctcctacgtcattgatcatttccttccacctgcctccagtattctcggagtcataaccttttcatgacagagtatggcgctgatgacaatttgctgtttccagcttgttaaaagagatgagtgatttattttcttagtgcactgagtcttgcatctctttcagttattttccttgtcctcttgccttcacatcatacctttgaacttctgaagtctctttttacttccatggccatacattcccgtggttcccctgactttttggcaactacacactctgctgcctttgctatgagcatttccaagattcagcccttgcctttctgctcttctgtttttatacctttctttaaaagtctgttttcatagtttagcaatgccaacaactttgaaatctcttcatttcctctcatttgaaatgtattatcatctccactgtctgagacctttccagttacatgttcattacttcagatgctgctgttcaagagtaagcaatattgtctaccctactttctactttttcatgacagttccctctaccaatttggttataactgacactcatttttctaggcatcgtgtaggtttgaaactttggactcatctctcttgctcttcttccacatccagccattctcccatggtttttccctttccctgttactactaagtatcacatgatgtgttcctccctaatgcattctttatact

SEQ ID NO: 24629 - DNA, 1023 bp, Homo sapiens
ctgggaatttggaggtgggttcgaaaaagtgagtaacaataaacagttaactttactgcctcatatttagattgctggtatttatgcagctttgaccaggacctggtaacagatgtggatggacttgaaccaccaactcagcttagaaggaagccaagacttaaagtttcctagatcccagcttgtaagttccctatattctttaatatacaactttcctttaataaaacaaaacaaaaaaatcccccaacaacttatttttgatatagctgccattcttttcttggattcaatacagcaagttttggctggagcagctaggaacttaattagcaactaatgtaccaacttgtagtaaacatcaacatttgtctatgtcatgagagaaaaaaaacatattcacactgaaaaatggcagcttcattttggtacagaagccacataaatgtgagtccttaaggttactactcattctgaaggcattctgtagccacatgtgactgtgggtggtaggcacatacgcaccataactagaatctcatggtccagaattatataaaggatggagagatcatttaggttatcaaagagacatatttaggaaaaataatctgttagcaaagtacattcaataaagtctgtgtaggccaggaaaacctgatagtgctttgaacaggataatagaagtacagagtcttggtgagtgtttactaggggcatacaaaatatccaaatgagcactttatggtaacatgtcttattttattctctaattatcttatgtagcaaggctttttctacccctgaaggattgtaagctgcttgaagaagggatatatttacatagtaactagtacactactcacaactggtgggctcttgatgacatctctcctgggagttgtatttgagttgaccatagcagctggcataatgttaaatacactgaaagttgaagtaaatgaaaccttgggcttgcaggtaggcctgatttatactgttcttttctgtttcttcacagaa

SEQ ID NO: 24630 - DNA, 1005 bp, Homo sapiens
ttctgtggtatgatattttgtaatatgcctttgttgtcagtaattatctctagaattttgtagttaattatagagtaatgtttcaaagaatgcatatgtcttgattggcctagaacagtcaattgacattttaatatgcttttatacaactgcacattaaattaggtcataattatttttaaacaggatggtgaagtggatgctgaagaacttcagagatgtttgacacagtctggaattaatggaacttactctcgtgagatcttttttccccttttgttgaaattataataggaagtttattttcttactttttttgtccctgtaattaaaatgtttaaaaaattatcacagttatacatgcacatagtttaaggagtcaaataactgtaaaactcgttatgaaaataactgttcattgtgtattcctgtctccttaacattaactgctcatagaggacacttcttttgacttttaaaaatctgattcttttgaaatttgcttccagatttcaagatagaatatttttttcacgattgatttttggattttatgattatctattgatatcctgctatgaaagatgaggatttcactttattttaaccttaaactctcccctgtctctgcactccacagaggaacatttcccatcctcctgtccttccaatgtagttataatatatagtaacttttgttaggtatgttagtctttaccttatttttactatctgaatgctgcttatagctgtatcttatgataatgtatgattacttttcctttttatataatgttttgcttttcttgaaatcactagttgtcaggtattatcctagaactctgggatatgcagttttttatgtgtagctgtcatactgggattctttcaccatcattctgaagctggtttccccgtttctcttgagttagatctcctttttactccatctcttgttgtcctcttttaaaaaattcattatcttattttagtgaaatgtatagt

SEQ ID NO: 24631 - DNA, 1050 bp, Homo sapiens
atactgaggcctgtaagaggcgggggatcggggaaagggaacatcaggcagaatagctaatgaatgctgggattaatacctaggagacagaatgatctctgcagcaaaccaccatggcacacatttacctgtgtaacaaacctgcacattctgcacatgtacccctgaacttaaaataaaaattgaagaaaaaaaggctgtggtgtgttgcaggctaagagaagaggtatttcaaaaggaggacttgagtgataggaggtcatatcttgatggtcttctatgttcttgaaattcagtcttttggagttggggatatagcaaattgttttaagtatgaaattgtattttggtgtccagagcacacagacatgggctgtgttagtattagtgatgtcttaaagaagagaaataaatttaaaagatatagggtctatttatttgactgaagagacaaaagcacatttagaaagactattctatatctctctttttttttttactatttacttaggttttataactttatttaaattgttagtggctgtgattctttttttttctttgatgagcttctttttattattattattattatactttaagttttagggtacatgtgcacaatgtgcaggttagttacatatgtattcatgtgccatgctggtgtgctgcacccattaactcgtcatttagcattaggtatatctcctaatgctatccctcccccctccccccaccccacaacagtccccggagtgtgatgttccccttcctgtgtccatgtgttctcactgttcaattcccatctatgagtgagaacatgcagcgtttggctttttgtccttgcgatagtttactgagaatgatgatttccaatttcatccatgtccctacaaaggacatggactcatcattttttatggctgcacaatattccatggtgtatatgtgccacatttccttaatccggtctgtcattgttggacatttgggttggttccaagtctttgctattgtgaatagtgccgcaataaacatacgtgtgcatgt

SEQ ID NO: 24632 - DNA, 1102 bp, Homo sapiens
gggtttcccaatccggcttgaatgcctgagtttatatcctgatcattgtccctccccctgtgcatttaggtgatagatgatttgactatttcttttttcaccgaattggtattttagtgagctctctttactacctaatgggtcgggtgtgagctgagttacaagcctcgtgtttaaaggtgggtgtggtcatcttccccagctaggcttaggaattcttagttggcctaggaaatccagctagtcctgtctctcactagtaggattagaattcgaccttatcattaaaaatgagataaggagagggtattagtccgatctcatgctgctaggaagaaatacccaagactgggtaatttataaagaaaagagatttaattgactcacagttccacatggctggggaggcctcaggaaacttacaatcatggcggaagggacctctttacagggcggcaggagagagatgtgccagcagaggaaatgccagacacttataaaactattagatctcgtaagaactcactcactatcacaagaacagcatgggggaaaccaccccaggattcaatcacttcccatcaggtccctcccatgacatgtggggattatgaggattacaattcaagataagatttgggtggggacaaaaagcctaaccatttcagggagaatatgacaattcctgatatggagaataagaaacatgtatcactggggtaaataaaatagtaaggagaaaggagtttttggaatcaaataaaggtagattctgattagttttattatcatttctcattactttttagtttataatattgtcttttattacatgctttccttctgttaactttgggggtaccacgggcctattgctagacaaacagtagcaaaggtgcacaatttgcaaagatgtaaaatatatttttgagatatgaagcactatgaatgtttcatgagttaaaaataatatgtcatagtaagtggcttcattcttattagcggttgatttctctatatcatccatgtgagaaaatgaagtgaaagcaagaatgcaacaatgcatgtttcccccttgatttcttggtatctctacctttta

SEQ ID NO: 24633 - DNA, 1047 bp, Homo sapiens
cctcctaaagtgctgagattacaagcataagccaccgtgcccggccactatttgtactcttaaatgatgtatgtgcatgtaagaaaggataattatatatgtacacacatataaatatcacacacacacatgcataaattaaatcggtatgtctggatggttggctatgtattagatttattgccttcttggtatttttcagtaggctccaaatttcctgaaaacacatctaattattatttttaaaagtaggtatagaatatgaagggatggacaatcataaacaacataaagagataaatggccaactacttaaagtatgtttatttcatagatgacagtggagtttgagtagccttattatttaaagacatccacaaattaatgagaagatcaacaagaccccagtagaaaaatgggctaaaagaaaacaaagggcaatagaaagaaagagacagggagacagagagagagagagaaagagatatgagagaaagaaagagaaaaaagagagagagagagaaaggagagggagaggaggaagagctaataaataataaaaactttatactgaacagtagtcaaagaaatagaaataaaatgatgtaatattatgtctataaattagcaaagtttttttattacatatttgtttcccagtcatatactgttgatagaaatgttgagtcctttgcctatcttttaatcaggttgttttttagctattgagttttttgagttccttacatattttggatattaactccctatcagatgttttgattgcaaatattttatcctaatttgcatattatttcttcatcctattaactgcttcctttgctgtgcaaaacttgtaagtttgatataattccctttgtctatttttgcttttgttgcttgatcttttagaatcaaatccaaaaaaataattgcccagaccagtgtcatgtggtgttttcctatgctttcttctagtgcagttactgtttcaggtcttaggtttaagactttaatccattttgagttgacttttgtaacgaatat

SEQ ID NO: 24634 - DNA, 1050 bp, Homo sapiens
cattgactcacacttaatttgaggccttgggattttcttctactttactagaccaggttgcctcatctgtcttccttaactataccagacatctatctggactgcagagctcttctctaagctgttcatgtatttttacattgttattcttttattaatgatattttaatctaatttgtttacttttttaattaataaaagaaaatttcttgtaaccatggcatgcaaattaaaaatacatttagctagtaaagacagaaacataaaagttaaacatatttacctacaatcttatgaacatttaaatgatatattaataagatttgaaactggataaatagttattaccacatttccaatattatttagttgaagcttttaaagttcaaatacattgttttctatctatttttaaaaatttggcatgggagatgaggaataagacatctcaatcatcaaactaaattcttttctttttttcaagattatgttaatactctgctaaggaatgtagaagttggttataatactaggatttagcttagtttttcatttttaattttcatgggcacatactaatagtaggtgtatacatttatagggtacatgagatgtctcaatacaggcatacaatgcataataatagcatcacgtaaaatggggtatccatctcctcaaaggatttagcttattttgaagttgcaataaaatcagtggtttccagtcattcaataaatatgactgagcttcaactatatgcaaagcacttttctagggccttgaacacatcaataaaaaaagagatcaagacacttgccctccagtatcttaactttctagtgacgagagatagacaaggttaatgaaatattatattatgtttgtatattttatatatatatatacacacacaatgtttgaatataatatatattctgtatatgtaaaatatacagaatatcatatagtatgttagaaagtgatatggaataaaataaaactggaactaagtaagtggaatctgaggtacagagtagaggggcagagtga

SEQ ID NO: 24635 - DNA, 1033 bp, Homo sapiens
gtttctgcagaaactcacgatctaacagtattttagcatttctctaacacttactgtattctattttacattggaattatttatgcacacatcttatcttttcttgggatttatagaacttaactgtgtatacttcttgctacctggtgctggttcaattactgttaaatgcttaataacatttagctttgtaaagtcttgtcttctttagtacaactaagccttataaagtaaaaaagaaaaaagagatgcatttattagaagacttcacaatggtacaaacattagtggaaataaataccaatttacaagctaactgtaatttataattttgatgagtgtcattgtgatgtatcaggatcctgatttattacttatcatatctgaatacatgtaatgatgaactgtgttttaaatagtgtctcactataattatgcattcttaacatgtacctttctggtttcatttgcttatatatagctttaccaggcagaaacatcactgtttaattggatgctgtgcagctatttatgcaggaactgtataacacacttgagggagtctgagttgttttcaccttcaccatcctttgaattggctaggaaaaaagggcattactaagtcaggtcactaacatcatataaatacagttcatttagttcttgtttgatttgttttaaattcaggatcaggacctcacatttagccttaaaaatagtaacatttgatttagctctttatttcagcctactgagatttttaaaaattatttctgtcttcttatatatttgctttttctcccacagtcacgtcttatataaatgtatctgaaatctgtctacttatctccatttgttttgtaccatatcaccatcctctttctcctggactgctgcaggaaagagccttccagacgccctctctgcttcctctcttgttcaagcctcagcctcttctctatgctggcatctttcaatcattttcaattcatcaatcactttcaattgaactcattactgtggcttccagaat

SEQ ID NO: 24636 - DNA, 1052 bp, Homo sapiens
ggtaccctggtacctacacagtcccttgctggccagctgctctcatccattgttatactggtgcctcataaatttcccctgagaggtccctcttctacacaaaagctgcctgggttttcttctcttaactaagaagccttcttttcatcctacagcccacgaagaaagcaaagcacactgaggttctcacccttacttcccctgcctctccctatttcctcctccttcccatcacctctttcctttatttattctttcacttcagcagtctcagctggcatgcatgaggagtctgttaggtgccacacattgtattgttcatctctacaaccggtgagatgggttttctcattttacaaagaggaaacaggcagagagagggtaagaagcccgcggaaagtgggaaactaaataatggcctagccaggattggagtcccagtctgactgtgaagccggcaactgcatcacactgcccctcagatatatgtgccacattgtgtttttagagaagtcatgcagaacaactgaaataatgtgacagtccaagagatctcatttcaaatcgtgactcccatcattttggttgtgtcctaggcaggttactaaatgagctcatttcctcatctgcaaaatgggaccagtgagcctttctttcattcagtaagtatttactgagcacttcctatgtgcctggcatacttctaggtattggatatggcagggagtgagacaggcactacccggttctcaaagaaccaacatttgggtaaggagacaggtaacaaatatacataacatgtagttgtaagtgctctttaaaaaaaaaagtgccaggcacggtggctcatgcctgtaatcccagcactttgggaggccaaggtgggtggatcatctgaggtcaggagttcgagaccagcctggcaacatggcaaaaccctgtctctaataaaaaaaaaaaaaaggaaaagttagctgagcgtggcggcaggtgcttgtaatcccagctacttgggaagctgagacaggagaattgcttgaacctgggaggca

SEQ ID NO: 24637 - DNA, 1071 bp, Homo sapiens
cacacaaagatccccacccttttgcagtttatattctattggggtgcaatagatcataaaaatatagtgataacttatatagaatatttatctcctaccaacctgtttattctaagatctagatctcatggaccaatctctttccatctcattttctcttgaacttatatgtccccactcatatatacctacacaaattaatgtaagaatggaaaactaatacatattgatcctgaagctatgtatgagaacaataacactgcgtaatatgtgagggttaaaggcaaaaaagagagatctaaagatgattattcagcaataacatgatatgatatctgtcctttaaaatatctttaaaatcaaattataatattttcagaggaactagaggacaacattatcttttaatgtaatggttccaaattaacaacatttaaacaaaataacagtatttatgactgtgcaaagtcaaatctacagaacttcattcaaaagggatgagtgaattttagtagttaggaaagattcaaaagcatgtttgtaatgagaattcttctttctcttccacattgaaggtatcacatttatgtacctctgtaaaaactgattaaaaaaaaaaaactaggttttgaggtcaaagtttccttaaagtttatgcatcaaaaaaataaaaagactcatgatctgatcatctagtaagaaatgctgaaacaacaattttcaagtaagcttgtctttaattaaaaatagatttgcgtatgcagtcagtccaattacagatcaaactttgctaaattttacctagatcccaggttctattcttttatgcaaaaaaagctgtacaattatgattccagtttcactttctgtgcttctgtttcattactttctttggggtctttagcttacatctcagaattattacttatcctcatatgaagaatggaacctagcttgactttcaaaaaccagtttgcgaacaatattttcatattagacagaagctgaaattatactccgaagaagttatagcacataatgaattagtgccaacttattcacaggtcgtat

SEQ ID NO: 24638 - DNA, 1065 bp, Homo sapiens
aaattaccatacatacagttcttttttcttttttattagcttaatagttgaaatttataataatatttatttaaaattttccaggtatatagatagaaaatctgtatctttgaaattctctacttgttttgattgtcttagttcatgacattagttcatagtgcaaggcacattactttataatagatggtagagtgtcaggctgataatcatgagtaatcaattatttatagattgtccacatggcaacaaaaaatgtgcttaacattgctgcctgatgctggcttctatttgttattgtttagaaattttctgtggtaggttttaatttactcatacttgaggctttttaatgttaaatttttgatatattagatttgaacatatttatgggatacatgtgaaattttgttacgtacatagatgtgtaatgatgaagccagagtacttagggtctctgtcacctctttatcatttctatgtgtcgggtacatttcatagcttttctggctattttgaaaaatgtagtatatcgtgttaactgtagtcccccgactctgctatcaaacattagaacttacatcttccgtcttactatatatttgcatccattaaccaacctctcttcatcagtccctctgcctcactacccatccatccttctcagcctctggtatctctcattccactctccacctctacgtggtctacttctgtagctcccacatatgagtgataacatgtgatatttgcattcctctacctggcttctttcacttaacataataatctctagttccatacatgttgctgcaaatgacacgatttcattcttttgtatggtcaaatgatatccacattttaaaaagtcccatttatccattgataggcattaaggttgattctatatcattgagattgtgaatagtgctacaataaacatgggaatacatatatctctttgatatattgatttctttttttttgttttttggataaatatccagagttgtgttttagtttgttcttgcattgctatggagaaatatctgagactaggtaatt

SEQ ID NO: 24639 - DNA, 1063 bp, Homo sapiens
ttttttttcatttttttattatactttaagttctagggtacatgtgcacaacgtgcaggtttgttacatatgtatacatgtgccatgttggtgtgctgcaaccattaacttgtcataggtatatctcctaatgctatccttccccgctccccccaccccacaacaggccctggtgtgtgatgttccccagcctgtgtccaagtgttctcattgttcagttcccacctatgagtgagaacatgcggtgtttggttttctgtccttgcgatagtttgctcagaatgatggtttccagcgtcatccatgtccctacaaagaacatgaactcatccttttttatggctgcatagtattccatggtgtatatgtgccacattttcttatatatatacacatacacccagatagaagttgtgctttacatttagcataagtgttgatatgaactcatttcttctttttctttactttgtcctttccagtttgcatatcatgtatattgcaagactatgtagaatcaaaatatacatgagatcctcctaaaacccactgttatctctgggagtgttaaatattgcttcaataaacaaaatagagggccttaaagtgcttcttataaatgatttattggtaggtggacgttttctctgtactttaaatgtttgaaatataacagcaagaacaataaaaatgtgtactgtaagaatccacttttccgatgggtgttgcgttttctgatttgtgatattaggtcaccagcagactccagaacagtttgggaattttttgactacacgtagtttcctgggtttctcagaatgaattacagtcaaggatatggaactagagacttgcatttaggctctttgcccacctctcttcatagatcagaaactgaagtctgagaacagtctcagagtgggaagagatcagaaagaattatgttcttcctgccctttcagtttggagcatttggtaaagctgcctgaaaacctggcttttaaaaccaggcataacacttcaggttatgtttcatttattctcactaaaatatgaagagctt

SEQ ID NO: 24640 - DNA, 1029 bp, Homo sapiens
gtcttcgttggattatgttaattcggaaactttgtctttgagctctgaagttctttcttctgcttgttcagttctgttaatgagactttccagaacattttgcatttctctaagtgcatcctttttttcctgaagttgtgattgtttttatttatgttatttccctgaagatttctcccctcatttcttgtatatatgtattttttatttccttgaagtggacttcacctttctctgatccctccttgattagcttaataactgaccttctgaattctttttcaagtaaattagggatttcttcttgatttggttccattgctggtgagctagtgtgattttgtggggatgttaaagagtcttgttttgtcatattaccagaattgtttttctggttccttctcatttgggtaggctatgtcagagggaaggtctagggctcaaggctgctgttcacatttttttgtcccatggagtatttccttgatgtagtactctcccccttttcctatggatgtggcttcctgacaggtgagctgtagtgattgttatctctcttctggatctcgccattcagcaaggctgccaggctccaggctggtactgggggttgtctgcacagagtcctgtgctgtgaaccatctgcaggtctctcagccatggatgtcagcaccccctccggtggaggtgacaggggagtgaaatggactcagtgagggtccttagttttggttgtttaatcctatttttgtgctagtctgcctcctgccaggaggtggctctttcaggagaacatcagctgaggtagtttagggaggatcaggcagtgggcagtgccctagagctcccaacagctttgtctttggctaccagggcgggtagagaaagaccatcaggtgggttcagggtgatgtatgtctgagctcagactctccttggacagggcttgccgtggctgctgtggaggatggcggtgtggttctcaggccaatggagttaatgtttccagggggattattgctgcctttg

SEQ ID NO: 24641 - DNA, 1048 bp, Homo sapiens
atttagaactgttgtacaaaaatacaaagttgagcagaggaagggaaatgaggggggatgggcaacggttacagtattaaatatgatggttagaagagtctccatgaagcgggaggtatctgagcaaatatctgaaaaaagtgaatgagctagtatcctaagggagagtattccagacagaaggaaaaggaagtgccaaaactccaaagtgggaatatgccaagggtgtctcagcaaaagccacattttaaattttaaatcaatctttaagcaagatgctcaattgtaccgatcaccaactactaaaatagaggattttttctgggaaaggatgttccttcttagaagttctgcttcaggctagattgaattgggacaaaagagataaaaagaagagttattaaggagtcagccttgagccatgcccatagctaaagaacctgagggagattggagaagtcagcaaaaccaggattgtgcctgtccttgaaactatatgaagaaggcttggctaagaaaaggagactctgaggtgacaaatgcaacaaaaagattaggaagaagaaagactggagaaacaagaacccagggcttacagaggccattgatgaccttagagagaggccattgatggagagcacaggattcccaagtacccaacatctcatgttttctatactagatacagtgaaaaatctgtacttttaagaattagtagtatactaaccaaggagtatatgagttttcaactacctgttaaatattaacaatgttttgaaatctgtctttggttaaaaaaaagtgccaacaagtttgaaagcctaaagttaaatgtgttaggcttcatacttaaggtgtatgcaacttctgttccgttttgctcttaccatctgctctgattttataacaaagcccagtactgacatgttgaagaactgaggtctacacacgctttggcaaagtgatgttgcaggattgctcaatttacagaaattccctggcctgaagtatggcttttgtcaggtcatcaccaaagcttgtgctttat

SEQ ID NO: 24642 - DNA, 1029 bp, Homo sapiens
tttttatgagcatcaataagtctttaacgatgaatattactaatcatcttttggctaatgttattgagactttcaattcatgtgctaaattacttactcctggggtaagagtagaaaaatctttggaagaatgattaatgggaagaagttggtgccaatgaggtaattaattattggttatttaataacctttgattgttagaaccataatcctttactgatagcaagtctaccatactatctgggatagtgagaccattaactataaattggataatttggctttttttcattggtttgctgttaaattcctagagtagaacaatagagaacccatttaaaatagacatttaacgaatcaatgagacaaccaacttcaggatgtattttaataaattaaaatacagccataataaaaatgactattcttttaactaaccgtataagatgttgtgtggtagaagtaaatggaaatggactttgaattcacaaatccagaaaactctttaaagtgggtatgttgaactcctaattgatttttattagtatgattggggcaaaatttgtttttttctttctgattgtgtattattaaatagcaaatgaaagcaaataaaaaatgtgtattaactcagtatttaaaaatatattaatatcactttataattttaaataatttggtaatgttttagctataataatacataagatgttcaattgcaattcctagtgttcaaatctcaagttttcagttgcttccacttaagcttttaaatatgctttttaaaaaaatttctgatttttgtttaaagtttaaacttaaaagacagcaacaaaaccaagataaaaacaatacattttatttacaaaacacaaaaaagatttttatcattatgaaacaatttgcattagacttctagttgtaatgtaaatataaaatcaatttggtcatttccaaattttgaaaactttttgctcctaaaagcagttctcagaaatgttaattcacacatctacagtggcaaaaaa

SEQ ID NO: 24643 - DNA, 1132 bp, Homo sapiens
aacctcttttctttataaattacccagtcttgggttctttatagcagcatgaaaacagtctaatacagaaaagaataaaatagatttagaatcagcttaattttagatataccaaaaggatatatttttgcatagatttttttttaattaggaaagtcttccaaatgttagcaagaaattgtcactgaatggtaggttttccttttcctacttttctgtattttgcaaattttctacataaattatgtactcagaaaaatgtcatctaaatagaagatgaaaatgaatttcatgaaaaaataactaataagatggactcagattttaatatataaagaacatttttgggcttgttacttttactctcaaaatacatttattattgggcatccaccatgtgccaggcacggggaatacagcaatgaatacaaaagacaaagtcccttctctcttggggctcacattctgacaacaggagatataaaaataaatatatgatatgttaggaagttagaaaatttgaatattttcttcaaaagtactatgaagaaaaatgaagtatgatagagggcaaattgtcaaattcatggcacactttgtatcacagtaaaagtataatttgaagtaaatgtaatattgagcatccttttctcatttccaacattagctgaaaaaaattcagtattccaccattaaaaatgatgcttgctaaagatatttttaaagaaattctttatcagttatagcatatctcttatattcctaggctgctatgagttatgaatacattttgaattttgtcaaattcttatatgtctattgagattatcctatttttcatcattattctataaatataataaaatgtattgaatgattttataatgttaaaccaacaatgctttcctgaaataaacccacttttgtttatgttaattatacaagtctgtaatttatatatttgtattttgtatttatattatacatgcatatatacatatatatgtgtgtgtgtatatatatatgtatatatatgtatatatatatgtatatatatatgtatatatatatgtgtatatatatatatgtatatatatatacgtgtatatatatatacatatatatatatatt

SEQ ID NO: 24644 - DNA, 1060 bp, Homo sapiens
aagttgcatgaaggcataggcttcctataactcccttgctcctaagatcagtgcttggcagccagtaggtgctcgctaaacatttctaaaggaaagaatgaaagaatgaatggtcttcttacaatgcagtatatacatgctgctggaatagttccttaaataaaatgttaatcctcttttgtgctggattggactgaataatccactttctttgatgtttgatgttaaagtgatgccataaaacagctattaaaaaattgagaattaaggatcgaagagaatccaaatgctcagctgacttagctaccaccctgtagcctgcatggcactgaggcaatcatccatctttattgaatgcttgtcttatttttacaactctttcagccattcacaaccttgatgggaaaccttttccaatatttaattattctttcaattgaatatctttttttaaatcaagtcagatttaatcacaccagtttaagctcatttcttttgtagatcttctggggaaatagaaaattacttctgcatacaatctgcttaggtagattagcctgcatattcagtacaagggtacataataggtgcactaatgcttgttgtatgtagttgaatggattgcatgtgaacaagaaagaactgtttagccatttcaagtactttagggtttttatcttgagactgtttttatccatttaactatttttgttatttggctttaaatactgtttcattctcctaccaaacacagacatcaacattcacatagcaaatgagcaatgggaactttaaaatattaatcccaaggtcttgaatgtcaaagtaataattacttcatctcagtgacatgtgatgcttttaaataatagctcttctgtttgtctggtgatgggcataaatctcagcataaatctgtgtgagggtggattggggtggagttggcaggggaaaaggaaaggggatagagcagaaaggatactgtcaggaaattaaatgaaggacgggacttctttaataatgtagtcttttctttttttcataatatgttagagtaacc

SEQ ID NO: 24645 - DNA, 1023 bp, Homo sapiens
aggaccaatatcaccaaggaatgagaactctcccttcatgactctgggattctaaacctttctctagaacaatgacctagttaatttattaatctaatcttttaaatgttaaccttttgaacctttcccatttcataaagtcactgggcccagcttcaccagtctgcttttactcatgatagaattatagaagttcaaatcagttaaataatttagccctcattttacagatgagaaaaagcaagcagagagaaagacagcagtcttaccaaatgggtggcagggctggaatggaagcccagatctaccttcttcctgcctctttcttgaatgtgcatgtgctagttttctccttagagaaggaaatcaaaaagagaaatcaagcttaccagtgacttcccaactccacctccattatcactcccacctaatacccatgatctctttctctctcataaatgcctgaagactctagttcccagatgcttggcatctcagtatggacacatgactaagttctgatagtaaaaagttaatggaaatagcttgccatttctaggatgtctttttaaaagagagggtgtgggcccttcttctccttttcctccctcctgctgcctggaatgcataggtgtggctggagctttagcagccatcgtggacaatgaggcaacagtgagaatgcaagcatcaaggtagaaagaacctggcttctgacactgagcagatgccataccagccctggattgcctgtccagacgtgtgtgtgagtgtgtgtgtgtgtgtgtgtgtgtgtgtgtgtatgtgtgtgtctatgtatgaaataaaattttatcttaagtcttaaattagattactcttatttgggttttctgtctcatgcagacaaatctgtccaattaaatttcaagaagtaaagcaaaccaaaaagaacttgagttgtctttttttattatttgtcttttttaactaatatttaatctcttctgttcaggaatatatttaacctggttcaagttctac

SEQ ID NO: 24646 - DNA, 1044 bp, Homo sapiens
tcagttgaagaggagtcttaggggccagcaacattttgcttgaagaagagaaaaatcaatatggtcctgtcttcagacatttggagaactgccctgaaggaggtgaaatgagcctgtcaatggagggaactgtaagagaccatctccaaggttctttggcaatctgtgattctctgttgtatttcctcatgaatccaaggagtagagtcagtggaagctacatgttagctgagcatgagaaagaattttctgctagagtaagctgatgatggcagttgtgcctcagacttaacccatcagtggagtttctagcataggccagaaaaacacttggtgggaattttgggaaggaaatttaaatatagaatgattgattaaactagatgcctttcccggacctgagagccgtaaactgacaaataaatgctccatgatgacaaaccccaagactatctgctgaagttcctcagagcctgagatttatgtttcttttgctcttccagagaagcctctcattgaaagggaagattagagaaaagaacttacaatgacagtagtgcaagctctcagatcttacacttgagttctaaaatgacagacaaggttgtaagaaaatccatgcaagaactgatgagataactcctaagaaaatgtttcgagaagcacaaaacaccattgaaattatagggaataaaagtaatattagcaagttagggaggcaacagtcctcattgttagggaatctttcttggttaaatgtcattgtgcatctatatatggagtgggccaaggagtggaaaattcaaattaaatgaaagatcaaaatcatttttaaagtgtagtaaaatcagtcagtattggacagaatggcagtgacaggacccactcagaaaataccgtgaaggtggaatcagtttcatctttagtttttatcaaatgatattttttctaaagacaagcacaaacagttgttagaagtcaccacaatggagttcttatgttttttcctctttcaatctcaaatactactagtatcttctgtgt

SEQ ID NO: 24647 - DNA, 1061 bp, Homo sapiens
gtgtaggagataagggggtgcattgtttccaaattatttagaatataataataatagagatttgaaatttgcatactttttattatcaccatgcatgccaattctaaacaatgccagtgataaaaatactcctccctgccagggtggaccatgccactcccttcaggtccccagcccttgtaaccacaatggttgttaaataactatctataaatcacactaaacatctttgaccttgaagttcacctttagggagaaataaactccctaaagtatgctgttctttgatcatactgggaaccaaaatcttgactacaataatggagttgagctatctagattttataatgttggcaacagagagtatataattcagtgctatgtgaaggcaacttcataacttactgagagtatatgaagatacataagaggataaggaatataatataccacaaggtattaatactgtaaagtgggagttgatatgaactttcaatttgcccttactgagaaactgatgacacctctcagtcaggtgtgcataacagactctaacgactccaaatgactctagaagtttctactaaagtaatttaatttactgatgctcttctgtgcatctacctttccaggtgtaattgaggagtccttaccggaaggtcactttactatatcagtgtttttcactctcggtttttgatgaaatacttgctttaagattgctttaagtgtagtctttatccattgtagtatgagagacagttgcttcaccattattgtttgcttggctgtttcctgcctgatggatgcagagtacactgcagtgtagggacaggtaatgtgtagtgggagttctgaagctggtgaagtcagtcctcactgggcaaaagagcatatctggttcctgagagatgagaaatatttgtgtagaaaatctttaagaaagggaaggcattgaaagcttaggaaacagtttaagaaaaaaacacaagagcataaaaaatgtgtattcagtaaagacagtaaaaaagcaagtccaaaatatgggtgtgtagcggcat

SEQ ID NO: 24648 - DNA, 1098 bp, Homo sapiens
tgaacatacggatcatttgtaggtgagcttcacctctactgaaaaacatgttggtctatgtagacaaatactcttgttgatcgcatataaatacactgagtgttgatggcaaatcatgttaattaacacagaccagcacttctcagcgatatgctacgatcaatactgttctattatgatattcatctctaattaattttggctcggcaggctagaacagcagactgtagctacccggggaatggaatttgaaatatgcattgctttacttgcggaccaaactagtgaatggctaagcttccgggggtggataattcatctcacatcaccgctttctgttgatgtgtttcaaccagagaacctctgcagagagggaaaaacataatcactgcaggagaagaatttcagaggcagaaagagaaagaaactatgcggatgtccaagaaaatcttgggacttagagtagaagtcgtccagaaggactggcccatttactgccatttactgcagaagctgaacactcatctggtttcattccactatctttgtaagaggatgaaatatctctttttagtgttaggaggtggtgggatggagcaataaatagagggggttctcaagtcctcaagtccaaacgagtaaattcaaatcctacctctcctccacttctcaaccattttgtttgggacaagttacttattctctcaagcatccttctcctcatctattatacgggactaataatagttattatcatccactacgtcagaggaagtggtacagaagaagatatgcctgaagaagcctggcactctatcagcattcaccaggtgtaagcagttattaggttgaaggaaataatttgctgccgtgccccattcagttcagtgtaataatgggctgtgtgtaatagcatcccagcccacccatccagacataatcattactctgtatgccaactctgccacccccatgatggtgggtgtccagggtgacaaaatccactgtttctcaaagctgcctttcagtgacctcaagtttctgaaagtacaggtaccttgcaatgttcaatatttggttaggtgagcaacttctaga

SEQ ID NO: 24649 - DNA, 1090 bp, Homo sapiens
aattcttacttaatttgaggcatcggaagacaggtcactacatcacttctagtttttttctgcagcctaagcagaaagatatcaccatgtctttgtggctttgtcgtatagcccttttctcctgatgacagtcctgagctcattatttatacaagtatgtagagaaagttagaagcataggtttcagagtcagactgatgtgagttttaaccctgactctgtcactaattatgtcatactagtatgttccttaacctctctaaccttggctttctcaccaacaacacgagcatgatatctgctttataggattgtcttaaggattaaatgataagagcataaataaagcctttggcacactctatggttcataaattctagagaacggtggattccaatataataatgatgatggtgatagttataataataacaattattattgaaaggatgttgccacagcaaactgctgtgttcattattgaggtaataataacaccaataccaaatgccaatgccaatacccaataccaaaaaaaggcactttcctttagtacatactgggaaagaggaatgttattgtagatccctccagagttttccatccctttcctcctttcctcccctacagcttctccacctttcctcctcccccacagcccccagctccaccatggatcagcagtcacttatgcccagtggttacagtctggaaattatagacacgggccccttggaacagtgtcttcaaatctgcagagagaagggtgaccgtgcggtaggcccactcctcttgtccttattcttttattctctacacaaccaccaccccgcaaagacagacaagtggttcaaacttctctgggggttagtaataactaaagacaattacaagagacaggagttttgttttgttttgttttgtttaacctaattgtttatttcatcagactatcccctagtccgataaatcttttcactgctgcaccttgatggcacgcttaactcctagtcttgctctcttcactcaggttgtctgcctctccttttacatatctactaccatgtcagccccgcttttgagaaatat

SEQ ID NO: 24650 - DNA, 1096 bp, Homo sapiens
gtatctcattgtggattttgttttgttttgttttgttttttgagatagagtcttgctctgttgcccaggctggagtgcagtggcacaatctcggctcactgcaagctctgcctcctgggttcatgccattcttctcagcctcctgagtagctgggactacaggtgcccgtgaccacacctggctaattttttgtaattttagtagagatggggtttcaccacgttagccaggatggtctcaatctcctgacctcatgatccacccgccttggcctcccaaaatgctggtattacaggcgtgagccaccatgcccggcccctcattgtggttttggtttgcatttctctaatgatctatgacattgagctttttatcatatgtttgttggttgcatgaatgtcttcttttgaaaagtgtctgttcatgtcctttgcccactttttaatggggttgttttatcttgtaaatttctttaagtttcttgtagactctggatattagacctttgtcagatggatagattacaaaaattttccattctgtaggttgtctgtttgctctgataatagtttcttttgctgtgaagaagctctttggtttaattaaatcccatttgtcatttttagcttctgttgccatcgcttttggtgttttcatcatgaaatctttgcccatgcctgtgtcctgaatggtattgcctaggctttcttctagggtttttatggttttgggttttacctttaagtctttaatccatcttgagttaatttttgtacaaggtataagggaggggtccaatttttattttctgcacatggctagccagttctccctgcaccatttatgaaatagggaatcctttccccattgcttgtttttgctggcttagttgaagatagatggctgtaggtgtgggtcttatttctgagttctctattatgttctattggtctacgtgtctatttttataccagttccatgctgttttggttactgtagccgtgtagtatagtttgaaatcaggtagcatgatgcctccaactttgttctttttgcttagaattgtcttggctattgaagctcttttttggtttg

SEQ ID NO: 24651 - DNA, 1027 bp, Homo sapiens
aggacaaacctgaatgtgctctctttttaaaaatcacaatcctaataatggacagcctttactgagtgcttactctatgctaagcactgtgccatgagctttgcatatatgatcccatttgagctagaaacaaccaaccctgtgtggtttgttctgtaggatcttcattttgcagattaggaaacgggcctatagaggttgcagaacatttccaggagtaatatgtgtgtgggactgaaatgcaggtcttgacattaacactgtcctgtctctaaaattatcatactcaaatttcagtacttggtgactgtcatcataagttgtcatgctgtccctcacaactgactgccacaatctgtgtactataacagagagaaacgtttaccaaaagtacggtctggcttttatcaaaactaactttttgcttcatggtttgaaccaaattgtccaatactgatttgagttactcgggtcttaaaaagcaatacgttaataactgtctcttactgattgtctataatgtcctactcactatatcagacatttttcaaaaattatttctaataaaaatagatatctaggccaggtgcggtggctcacgcctgtaatcccagcactttgggaggccgaggtaggtggatcatgaggtcaggagttcgagaccagcctggccaacatagtgaaaccccatctctactaaaaatacaaaaaattagctgggcctggtggcgggtgcctgtaatcccagctactcagaaggctgaggcaggagaatcacttgaatctgggaggcggaggttacagggagccaagatcacgccattgcactccagcccgggtgacagtgcaagactccatctcaaggaaaaaaaaaaagaaaagaagaagaaagaaaaaaaaatagatatctaaagtatgataaataaagttggagcaggacagaaaggggagccaagtcttcccccacttatgagtttcatttttcaggctccagaggcctttcatgtctctttttcccactcttgaa

SEQ ID NO: 24652 - DNA, 1072 bp, Homo sapiens
ccgggcgcacgggaagaggactgagagccctgaaaccccagcggggcaggagccagcattctgagcatgtgcgagccagccagggggctagggcggatttggggggtcgactttaggtcgtcgccctaagcgcaaagcgaaagagcggtgagagcaggggcgggcgacactccccggagcggtgcccctgcgcccagggcgcagcgactgcgccctgccctgcgggtgtgggcgagttggccgcgtgtgtgcctcgctgtttgacgcgaagacgagccaatcagggcgggcggcccgagctgccatgtgacgggcaaggcggcccctttccccagcgcggccagagggaggagagaaccggggctcgccgcgagccttcgagagcagcggccgcggaggaggcggcggcggcgggcgggagcagcggcggcggcggcacaggctcggggccagccgggcgcgcatccccgggcgccctgcgcggtggagagcttggcgggctgcgggtgccgcaggacaggagtggacaaagcaagatggcagggatcttagcctggttctggaacgagaggttttggctcccgcacaatgtcacctgggcggacctgaagaacacggaggaggccaccttcccgcaggctgaggacctctatctcgcttttcccctggccttctgtatcttcatggtgcggctcatcttcgagaggtaagaagggctgaagcccctcctcccctccccctgcgcacacacacgcgcgcacacactcgcgcgctctctggcgcacgcccccgcgcccccaacgctcgcgttcacgcctcccaacctttgtgttcggggaggggttgctgacccccctgccccgctggctttctgggagccagaaagggtctggcttgccacggatttcctcccgggcgccggggaggagccgcggagcgttagggtcgccccctgccctcctcctgggccctgctctcctcccggcaagggcaggcgaacaaaggtgagcggtggtcgggctcaggacccgccgcattccgcggggctcgcccctctccgccggcgcgccac

SEQ ID NO: 24653 - DNA, 1050 bp, Homo sapiens
catgatgtaatgtcatctaggattatgaaattaataccctgagttcacttatgacttctctgttgaaaatatttgaattctctatggacagggctagttttctcttggattcctggttgtaaagtgtttcagaagtggttgctcttctgtgatggggaaggacaggtggcagcagagggaaaatgggatttcaggtgagtttcctccatcagcataccagttccatggctttgtcagacattgctgcaccatcctcaggctgccctcttgtattttactaacttgattaaaccttgttggtgaacactagaacctaggcccatgttgtatattaaaagtttcaaatgttattgcatacacttacatttcttcctcttaccaccaggtgaaaccagattttttatttatttcttacatagtcgggactttcaaaattttattattttttttccttgctcatcttcttttgattaatttcttaaacacttttgaatcagaatactggagttccagattgtatgtctagttgtgtcacttaatttttcttaggaaccattttttcatttcgttttttttaaaggtaaacaggattgcctcgtatagcacagtgatcctttcatattagcaatgccttgagaatctttattcttaggattttattctttggtttcttccccctggccaccttttaaaaatgatttcataagttttttttggtctctctttcctgacaccataatctttattgacatctatactgtagcatgattgaacacaaaaggatgattcttttatttatttacttgttttttgggacagggcttcactccgttgtccaggcttgagtgcagtgccataaccttagctcactacagccttgaggctcaaacaaccctcctacctcatcctcccagtagctaggactacaggtgggtgccaccatgcctggctaatttttaatttttttttggtagagatggggtcttgctttgttgtccaggctagtctcctggcctcaagtgatcctcccatttcgacctcccaaagcac

SEQ ID NO: 24654 - DNA, 1028 bp, Homo sapiens
gtgtataagtttgttgacaaactggatcttgttccttgaatatagatggtctcactcaatttgtcatttgagacaatggaaacaaaggtatccgatactttggatttgaaaaaaccagatattttgaacacaaaatattggtttgtgacattggaatactttgttttgcaaataatgtctttaaaacttgcagtgcttgcatttgaaacattatgctcaccttaaaaacgtatcttttcatctcaatttttcttatttaagctttttgttctgtctttggatctatcttttgttccttttatccttctcttcttcaggaatatcagttatacatatgttagatttcctttgtctgcctttcatgtctatcatcttgtctataatcattttaatattattagttttttccatgtggttttattaatttttttcacacctgcctaccatgtatcttttcactcatgtttgtttaagttttttcttttgttcttaatgtttctgtaatcttaaaaaaatttacccttttattgtgctgctatctctgtttgcatttttttcagttttataatcactttactaagtcctagtatctctacaaaaagggcacaacaacattcttccaaattattcatgtttaagatgattgttttttcaggctacttttaaatggaaattctgaattcttttcggttttcctagaaatgtaatgacacaatatataataaatcttagtgcattattgtgtcagcagtaaccgtttgttagtttctagggcattaattttaatttgtggattaaaaaatgtttcattatctaacattaatgctacaaaattgtgtttgaaatatttagaatatgatacctcttgatttaacagttattttaaaaattactaatgatatgtctatagtctcattaggaaactccccatacacgaaaaaaataaaaaaataaaaaaacacacagccagttctccattttcactgtttcttctatctcactttcttccctgatgtgtccagtattag

SEQ ID NO: 24655 - DNA, 1087 bp, Homo sapiens
gaactttacaccctgacctccagaggtatctggtgcctacagttgtcaaacatttctggcattctctagtctaaagcctctctactcaaagtgtgaaccatagaccatcagcctctgccccatcaccagggagcttgttagaaatgcagcacttcaggctccaccccagatctgttgacttggaatctgggcatcaccaggtgattctcgtgcatgtgaaagtgtaagacatctttctttgatttccatccctggagacttttatcactggagctggttaggcttcagctatctccacttggcttaatcagttaccctggcccttctgtcttgggtgacatctcttatttgttatcatcatcattagtccttttagaattttaccctgtttaatttaatctttagtgacttaggtctcaagaggtcttggagataaaaacatttactttatttattatgtttaacaaaaattctctctgaatatttcattatgttttttgttaaatttttgagccatcttgaattaattttggtgtgagagatgagaacttcgttaattttggtgtcagaaatgggaactccagattttgttttcttcccccagttggctggcaaatagtcctaacatcatttactaaataatccatatttttttctctgatttgaagtgctacctcgatcatattctaaatttctaccatatgatgacaattttaattattgtaactttataatttatcttactagttagtactaatttctattcatttttagagacagagtttaaaactctgagttaaaataaatgacttctgtatttcccatttattttcatctgtatttttatttattccattttatgtttacttgttcaaaatgatagggtcattgacatattttcatttctaactagatttttaaatatagcaagtagatatgcatgtgtgtgtgtatatataatgtttaaattacagactttattttcttttttcacatatgacaaatttgaagccattcctaggagaatccatttctttctatcttttgggaagggcacaatgtaagtactgttaaatgcaatagaaag

SEQ ID NO: 24656 - DNA, 1027 bp, Homo sapiens
ggagcttgcagtgagccaagattgcaccactgcactccagcttgggcgacagagcaagactccatctcaaaaaaagaaaataaccagatatgtgtgttgtaggattgatatggatagtcagtaaagattaaagggaaaggatcaactgtaggttggggtgcacggggggtttgctgggattagaactgggtcaatgtcagtggcctttcatctttctgttgtatgatatagtattgatgaagttttgttttgaaactctcttcttccttggtttctgagttgccactagattctcctgcctttccaaggtcttttgtttgcatcatttattctgtgtttgctgtgtggtctttaatgtgttaatgacactccagatttagtcttcaatctcatttttcccttgccctaccttccattctgtgtgttaaaatcatttcctctcaccagtttcttccaaagccatgtgtacagtgcagatgtttcttctaaggcatcgttctgcgggctccaactggcagttctaatttgcttccactcctgactttatttttcctattgtttttatgcttccgttttgtcataggctggaaactcaagtcaatcagccactgagttctattaattctttgtaaattcgccattatagcccaatatgctttcatatgtctccttattttttttatcttgcatacacatagacattttgtttgctaccaaaaatcccaaattatttttctaaaatactactatccccatgttgtgacactttaaaactttggtgattttaaggcaactataggataaatattaggtccctgagcctgataactagaatctgtcttttgcttgtttaatgtcagtcacccaaatgacatcttccttctagagggttgtgtttttactgtctgtgccttcttccttcctgccttgtgtatggtgttccaggccaggaacttcctctgccttacccatttatcccctcaccattcttcaaatcccaggccctctctgaagtgtggcctgacta

SEQ ID NO: 24657 - DNA, 1048 bp, Homo sapiens
cagagggaaccatcaagcctgtgttgctcaaagtaaattgatctactgtttactaccagtctgcaatgagataagaagcttgcacctgaatgtaaagcagctcctcctgatttttgaaaaagtctatctatgaagaaaagttagctgaaaacagtgtgcttagtgatccagttaatttacctcgagtgtaagctccttatgttgttgtggacttgtaacagacatttcaaggactgggcctcacccattagcaccccactgaggtatagtggaggtagtaatagcaggaaggcactgccactgtgaggacaaggggattacagaacatagaggctcaaaggaagagccatggagccagagaagacttctgacaaggggacactgaccagctggtgtccctgagggagcatgaggggcttggctctgggaatgtggaaaaactacaaattggaaccagctgctgctgctggaatgaactgctactgctggagtgaagatgcactgctgggtgggtgtggaggcaggggatgaacgtgatgacaagaactagaagcaaaacagaaaggagcaagtcccatcttcctcttgcagccttccagccttcctcaagtgcttctaagaagctaaacttggcaaggcaccagctccttaaagccagcagaagtgcggcttgcacagtctctgctctgagaccggcagcagtatctcaataactagcccaattgtctcatattgctgcattctgaaatgtactctgataaatcttattataacctattttattacatttttaaaacatgaaggttgccccattacattgacttcatgactaactgctgggtgaaaacttgtggttgagagtgccccgtcagactgagtcctttgcccactcccttagactttctgaatccaaccttaactaaggtgcagcctttcattcttcatgcggtgttctcaaattcaacacacaaagccacgaagtgttccctggtttcatactttgagatgttctcttttgtttattgcttagttcggaatctttctgaaa

SEQ ID NO: 24658 - DNA, 1076 bp, Homo sapiens
atgaaaaagaatgaaatcctgtcatttgtagaaatatggatgaacctggaggacatcatgttaagcaaaatacaccaaatacagaatgacaaatactgtatgatcttattcgtgtgggatctattttaaaaagttatcatagaagcagagattacagcagtagttaccagagattgggaagggagggtggggagacgtttgtcaacaagtgtaaagttacagttagatggggggaataagttctggggctctattgcaaaatagggcaactatgcttaacggtaggatattgtatattacaaaatagaagagaggcttttgagtggtttcaccacaaagaaacaattacatgcatgaggtgatggatatatgaactaccctaatttggtcattatccaatatctacacgtgttaaaacatcaaattgtactccataagtatgtacaattacaatgtgtcaattaaaaaataaagagactgtatgtatatccagatgtgtctattaggggttgttaaaatagaatttcccatcttttctctctttctcatctgtggcttctactcgtaatctcgctctgtgtgacaaaactgtatcttagtcatgaaaaacagtttatttgaaaatattgttcagggagattagtacctcgctcacacacagataggacatggttcagagaggcttggaatcaggtcattggccaacgctgtcaattctctttatagtgtttatgaggtttacgatgagcatctcatacagcaatgcctgaaactacaagtgggacttatattgtgcctgacatcaagaaaagggccaataaatattagtttactctttggttacttgcctcttttcactgatccacattgttcttatttatgagcaatatcctttaagctgcagcctcctatgtgcttagaagtctttttaaacgttgatgactgattaggaaaatcaataccaaagagcatgaaaccgcagggaagcatgataagcacttcttaaatattggaagtaatttacgaactacggcattttcaaagagtctggagttctgtggagagaaagactcaca

SEQ ID NO: 24659 - DNA, 1044 bp, Homo sapiens
agggagcaaaaggcaaaatcaggagcctaattaagatctcggaaagaaaatgaatagtgcttgaatgaaagggaaatgtaaagattctggaacatagttaggtttagggcagtgcatggctttgtacaggaatctggctccctaccttgagattgggtttagtttgatcagactcagagacagggtgcacagtggttatgtttgggtttgggaccagagagtctgagtttgattttcaactttggcactgcctagctattgaacctaggtagttattcacagactcggggcctccatttacctatctataaaataagaaaaatactagtagctactataaggattaaatgagttaatatgtgtaggaggctttaaaagtatataggacataaggaggactcagcagatattagccacctgaagctaattgtcctcattcctatgatacagggctgatgaagatgttggcagattaatcttaagaaacatatagatgtatatcaaatgtatatagatgtatatcagaaagtgctgagagctgtagataagggatgcaaaagaattataacattaatacttcttttgaaattattttgaaactatgagaaagtttgtgctggtcttattggataattcggctgtctgcttgaattcataccaacccctccctgattattacaaatgtttggaatctgtgtgtacacttagattttcctaatcatactgtgtcataaggcaagtaattcctcaaattaagaatgattgttttgtcataaaaagacctggatcacaggtcaggagttggcatgtgctgtgagggttagtcttaagtgtccttcttaagaagtatacctgcatgtcactgaaccctggtcaaggcatgaataatgtcgcttggtaaacattgagtctgaggagtttcagggcagtttatactagctgtcatcaatgtttatagataagagtgagatggaggatttatatctggtttctgtgagacccctgcaggcccctgctgttgaggctggttatgtagcaggaata

SEQ ID NO: 24660 - DNA, 1044 bp, Homo sapiens
aaaactctcttgtttttagtgggattatgtgcaaaataaatattcctgacttccactgcctctctgagcctccccccgaccctgagcctctgaggcagttaaagcaggtatcactcccattttacaaataagtaaactaagacccaagttttatacctgctgagctgtagagctgagacgtgatccgatatcctggctgggtgcctagtctggtatctcctggcagccttcctgtccctctgatcttttagtaaatatttttgaataattctttctgatatttgaaatgtactgaacatttttttctaataacaaaaaaaagagctttctgattaatgcagaacttaaatctatgcctcagtgacccatacagcattccagttcctatcacctactgtcttgtccctatacttgcagcagttgtccagggttattctttgtctgtattagaattttttttcaggttgcttaaggaatcttgcagatacttgtgacaaagaatcataaatgctgttgttaaactgaataatgaattgagtcccaaatgttcgtgctaattaatgctttttgagttggagatgaaatgagagtaatatcatcaagctgtggattaaagttatcctcaaagccccatcatctacaaaaagaataggacaggaactgcctttgtgcaggtgcaagaccatgttacttttgagcagtgagcttgagatgtctgggatacaaattgggttccctattaactactaatcattccttttttttctttcaccttcagccactcacaactgaccttcactactattacatcctggagctgtcgttttattggtctttgatgttttctcagttcactgatatcaaaagaaaggtaagagcggttatgtcgtaaagtgcttgcaagcatgcatctttaatggcccttagcaggtgggtttagactctcaaaggcactcacccctgttctcctggcagccctaggttagtacgacttgctgcgttattacagaaagttctctatttttgtttgtgctgttttatatt

SEQ ID NO: 24661 - DNA, 1023 bp, Homo sapiens
gtgtctatttgattcttctctcttttcttctttgtctggctagcagacatctggccagaatctattttgttaaacttttcaaaagaccagcttctggattcattgatttttttttttttaaagggttttttgtttctcttatttccttcggttctgctctgatcttaggtatttctcgtcttctgctagcttctgctagcttttgaaatttgtttgctcttgcttctctagttcttttaattgtgatgttagggtgtccattttagatctttcctgctttctcttgtgggcatttagtgctataaatttccctcgaaacactactttagctgtgtcccagagattctggtacgttgtgtctttgttctcattggtttcaaagaacttaaaataatttcgttatttacccagtagtcatttaggagcaggttgttcagtttccatgtaattgtgcagttttgagtgagtttcttaatcttgagttccaatttgattgcactgtggtctgagagacttgactgttaggatttccattcttttgcacttgatgaggagtgttttacttccaattatgtggtcaattttagaataagtgcactgtggtgctgagaagaatgtatattctgttgatttggggtggagagttctgtagatgtctattaggtccacttggaccagagctgagttgaaatcctgaatatccttgttaattttctgtctcattgatctgtctaatattgacagtggggtgttaaagtctcccattattattgtgtgggagtctaagtctctttgtaggtctctaagaacttgctttatgaatctgggtgctcctgtattggtgcatatatatttaggatagttagctcttcttattgcattaatccctttaccattatgtaatgccctctttctgtttttgattttttgaggagacttcattcggttttctaataatggctgtaccgatttacattcccaccaacagtttacaagagtgtccttttcttcacatcctctccc

SEQ ID NO: 24662 - DNA, 1032 bp, Homo sapiens
actcctccacattggaggcaagagatgcagagagctcaaagaatgagggtatcaagtggtgaaagatggatcaagggggataagtaagatttaactattattatttcaaatgtaatgataagtgtttgcttttactattatacataaagttattgtcattttagttattgctgaataccttaagaaaagtagaatatcattttagctaataatatctacagttcttttcctaataacatttccccaattctttttcttattttttaggagtgagttgaatgaaataaaagaaaatcagagaagtccagttagagtaaaagagagaaaaataacagatcacaggaatgtatctgagagtccaaacagaaaaaatgaaaaggagaagaaagttaaagaccataaatctaacagcaaagagagagacatcagaagaaattcagaaaaagatgacaagtataaaaacaaagtgaagaaaagggccaaatctaaaagtaggagtaagagcaaagagaaatcaaagagtaaagaaagagattcaaaacataatagaaatgaagaaaagaggatgaggtcaaggagtaaaggaagggatcatgaaaatgttaaagaaaaagaaaagcagtctgattctaaaggaaaagatcaggaaaggagtagaagtaaagagaagtctaaacagttagaatcaaagagtaatgagcatgatcacagtaaaagtaaggaaaaggatagacgcgcacaatccaggagtagagaatgtgatataactaaaggtaaacacagttataatagcagaacaagagaacgaagcagaagtagggacagaagcagaagagtgcgatcaagaacccatgacagagatcgcagcagaagcaaggagtaccatagatacagagaacaggaatacaggagaagaggacggtcacgaagccgagagagaagaacaccaccaggaagatcaagaagtaaagataggaggagaaggaggagagactcacggagctcagagagagaagaaagtcaaagcagaaa

SEQ ID NO: 24663 - DNA, 1045 bp, Homo sapiens
aaatcgtaagagtaatttttttcagttgatgtactgattgagcttgagttgctgttatacagcatttgacaggaactataccttggaaaatcagattgtgattctcagttctgtgttgcttttggtttgaagagttttgggaacgttttaattattaattacccttctctaaactttaaaaaaaaaaaagcttttctcattaaaacataccatttgtgcaggtccttaagctatacagattctaaaaattgttagtattgagacattaacttctaagatttctcttttttggcctccaacctatatagaattgagtgttaactctgcatggattttgtttgttttaattgaactgacttctctaactctcatagctgtgagttccaaatggcaagaaaatgcatcttttctatatatgtatcacgataggctatagcatgtttatgactctggtttctttctcttcaggtggttttataccattactgttaatgttattttaacttggcatgtataacattgccatatagagtagagtagaaagttgcaaattttgatagtttacagagttaaacactaaacatatccaaagtccatttagagttttgggtgttgtattttgccatttttgtgatgtgtggccttttattctgtaatctcttctaaataaaacattgaacatccagcaaacataaaacctgcctcatttgaaaaggaatttcaaaattccaattaataggattctctagagagttttgtactttaatatttgtcagtgtagtgtcaactctgttaccaaggtagcttcttggtaaatccagtagctactcaatgctatttgtactgaataaagcaattattaacatgatacttcccactattgattaatgcaatattgatatatttggcgttgtggtagctgttgcagaatgaatagtgtaatgaccataagattgcttggaaaattgtaatacagatatccacaatgaattctttccaaaatttttttttccgatgataaaagtagtagatgtttattataaaa

SEQ ID NO: 24664 - DNA, 1065 bp, Homo sapiens
aattttcatggttattttgtatgaattatttttctgggtaagccatctgccacagaaattgacactatggtgagattaatgttaatgaaatgagcagtagagaagctactggattgctttaaaacattctttgattaaattactacatagttggtaagttcatagttttaagttacttaattgaagccctcagaagttgcaaagaatttatctgataaatctgcctttgcacaaatgtgatactgatgcatggacggctttgcggaatgacctttgatatttgtgcctagtggaaggtatggagctaaacaattaaagaactcttcattatggataggcacatattggatctctggtattttgggtagtggtattaacttgacaattctaatttattttagttagtatatgtagcaagttagtatgtttgttagtagtttattgtacttcattccagttggtaatatagttttcatcacactaaactttttatactaaatttctgtagaagcttgttgggtttgccttcaccagaaggtactttaaatacctaccatagctgatttgttataaagaaacaaaatgggtgttcttctgtttccttttgattatgtttactgtaattatttcattttggatttatacatttacaattgaataaggattataggttgataagctgtttattgtgaaaagatgtgttttgttacaaatacttgttttaaaaattaataagcccccaggaagtacagcattgactggcacaactgcccatagtgagcttcccaactaactgccttcagtggattcgggcaagtgcaaagtctttggcctattgtgtgacaaagaggtatatattaaaggaaaagaaaaatgacatgaataagaaaattccgtcaacaaggttggagtagggagttgttgaggggtttagtttgttttaaaaggtatgtgagggagtggtggggtggatttgtgtttctgactttttttctttaagcaaattccatatgttaccaaaagcacatgctgtatattttcttccccttttgtgtgtatatagta

SEQ ID NO: 24665 - DNA, 1056 bp, Homo sapiens
ggtgtgaacccgggaggtggagcttgcttgcagtgagccgagattgcaccactgcacttcagcctgggggacagattgagactctgtctcaaaaaaaagaaaaaaaaaagataattattaaaaactttacaaaattgaaagatagatcctgaggcaggacttgggtaaaacaaacaaacaaaaaaatacaaaaaatatatttaaaaactttgtaaaaaaattgaaagacatcaaacttcagattcaagaacgcttataaaccccaaacaggataaataaaatgaaaaccacatgaaattacaccattgtaaaactgctgataaccaaagatggaaaaagtataaagaagccaaaagaaatattactttgaaaggagcaacaattaagctaatagctggcattttttctttctttcttaaatgcttgatagaatacaacagtgaaactatccagacctggagttttctctgttgaaaggttttaaccacgaattccatttcttttacggatataggacattgtgaagcttttcttgagcaagctttggtagtttgattgtgttaattatctattgctacacaataaattattgcaaaacttaacagcttggaaaaataaacagttatctcagtttctgtgggtcaggaattcaggagcatttagctcagtagttctggctcaggatcaagaatgggtcaagatgttaactaaggctgaagccatatgaaagcttgactggggctagagtatctgcttccaaggtggcccactcgtggtttttggcaagaagcctcatttccttattggctattgacaggaggcctcagtttctcactgatagaaaggctcaaggtattgctgattggcagaaggcttcattttccaactacatgggcctctccatagtgctgatcaagtatccttaaaaaaagaaaaggtagctgttttcttgccaagtgagtgagccaagagaaagggcaaagaagaaaccacaggccaggcgtggtggctgatgcccttaatcccagcactttggaaggccgaggtgggtggatc

SEQ ID NO: 24666 - DNA, 1482 bp, Homo sapiens
aaccctttaaaattctgctattcaactttttcctctcaaaatacgctgatcagctctcaagaggtccttcattaaaaccttggaaggtttggtccctacaggatgtaacaaagtacattcttccaggaactagagacaacgtctgcttttgcaattcagtcctctctgagaggggcagacaccatactctccctcatgtggcccacagaacccggcacacccctgggtctcggtatctgtctgataaacactattttctgctgtgtttggcgatttgtttgccttgctctccttctctcccactggaaaaaaagttaaacgggaatcttatttcattgtatttattcattggtgctgaggagttgtacaaaaacaactggtaggtcgttaccaaatttgtatcattttgtcccaaatgtttcttcccaggcttttctgtttcttttttaatgctagtgagagtgtgggaatttgacctggtctggaaatctgacctggtatgatccttggatgacaggcaggaagctgagaggcagaacagtcttgggatcaggcacgctgcctctgaagctaaactgcctgcatccagatccctgctttcctcttacttgctgatgagctctggcaaattgtttaatcaccctgtgcccccgttttgtcatctgtataatggggatgacaatattacctagtctcggatcattgagaggattaaattaatctatgcttgtgaagtgcctagaacagtgtctgacacagagtaagcatgctataaatgttacgcatgattgtcctgaatgtcggtattgaaggacatgtcagctcttatagagcagaaattgatttcatgtgaagttgtgaccactgtcacaccagggtgggagaaggtagcagaaagcccggtgctgttgctcccctggtttttgtctttgcctgagtctcaccactacttgccgattccaggagggctctgaatgtcctgacccctcttctgcaaaagaaataagaaaagtccatatatttaaggagctattgtaaactagcatacatttctgattctgttttttaaggatgatataacagtttcaatggttttgtggttcagagtatatttctttttctttttctttttttttttttgagatggagtctcactctgtctcccaggctggaatgcagtggcgtgatcttggctcactgcaacctctgcctcccgggttcaagcagttctcctgcctcagcctcctgagtagctgggattacaggcatgtgccaccacacctaggtaatttttgtatttttagtagagacggggtttcaccatgttggccaggctggtcttgaactcctgacctcaagtgatccccccaccttggcctcccaaagtgctgggattacaagggtgggttcagagtatatttctttgagaatgaaagcttattactttactgaaattttaaaaatttatatttagaacagtgc

SEQ ID NO: 24667 - DNA, 1482 bp, Homo sapiens; identical to SEQ ID NO: 24666

SEQ ID NO: 24668 - DNA, 1482 bp, Homo sapiens; identical to SEQ ID NO: 24666

SEQ ID NO: 24669 - DNA, 1482 bp, Homo sapiens; identical to SEQ ID NO: 24666

SEQ ID NO: 24670 - DNA, 1058 bp, Homo sapiens
gtcatcccagggagaggtaacactgccagttatgtgcagttttgactactgcttgttttggtgggtggactcatacagaactttttttaaacaatttttaaaattttatttttaatttttaaaactagaaatggcggggggtctcactatgttgcccaggctggtcttgaacccctggcctcaaatgattctcctaccttggcctcccaaagtgcggggattataggtgtgaaccaccacacccagccatactgaacttttagattcccattttttggtagaaaggataacatttttttcaattcgttttattttgtagccttgaagtgaaatagcagctttctctggtaataaacttaatttgggtacagtcaaatttaaaatttattacctttttttggtcctggacccaaattaagttcactaatgtacagagaataaataaatacttggctgtttaggaactcctgaatctttatttttttccatcataactgctctacttataaatccacttttattttggaatagaaaggaacaagaagattgaactgtatcatgcaaaatggtgctaggtaaaagttagtggaaagacaaaaccaacgttttcaactaaaatgatcctcatcatctttcttcctttcttcatcttccctccaaacctatttcctccccctcctccccctccccttcctcaccctcccctctcttcccccttcccctccctctcctccctatctccctttcatgtttcgcctatcttcctctttcttcctcctccttccctctcctccccctcctccctctcctcccccttcccctccccctccccctcctccccttcccctcccccatctcctctccctccttctgccttcttcttcctcctcctccttcccctccctctccttcccctcctcgacttcccccacccctccttgttttggcatcagtgattccagtttttccagctcaggacctcaaaatcggtttggtttgcctctgcgtcagtcagtcatcaagacctgtgtgttttacctgtctctttcctctatgct

SEQ ID NO: 24671 - DNA, 1058 bp, Homo sapiens; identical to SEQ ID NO: 24670

SEQ ID NO: 24672 - DNA, 1058 bp, Homo sapiens; identical to SEQ ID NO: 24670

SEQ ID NO: 24673 - DNA, 1058 bp, Homo sapiens; identical to SEQ ID NO: 24670

SEQ ID NO: 24674 - DNA, 1035 bp, Homo sapiens
ctatacttttaaccttaaaaataattcagaaaaaagataaatgcatgaagacatttatgtctgcattctttataataacaaaaattggggaaaaaaactccatgtcaagaaagtgggataagaaaaatagtgaagtattatactgccattaaaataattatttggaagactgtagaaacgtggacatgtttgatatggtaagtaaaatgagcacaatacaaaatagtatgcatactatgattgtgactttgtaaaatctttatgcatgtggaaggtaatctgcaaaacaaattcattgtgttagtgtagcgggatatggaatgactttatttatttaaatcttttctttaatattactttgtattttcaataaaaataaatcactgtacatagtaagactgcttgaatttgggctgattgggttgcaggatagtctgaattaatgaaaacaagtgagttatacactacttcaatctgtaattgaattgtagactattttattgctctgaagaacatttagcaattaatgctagaactaatatgctgctcagtagtgctttagagatccactttatggcataggtgagaacaattgcagtcaccttcccctcctttgccagtttatgtaggtcctatgaactcctgagtcaagtctggccttctctggaaagtctttcctgtttcagccacagtaagactcccattgtcacatttaagaattggtcatttatatatgaattgtgtatctcttggctaagttagagattatggaccgcatcttattattggccttctcaagatctagtatttcatatgtacgtccagcatacaaggacgatgatatggattatttttacagaaaagcatgctggaggtgcttgaaggatcttgaaaatagtttgtgatctgaggtatttaattttcagctcctattttctgtttgttttttgaatttttatttttatttttatttttttatttttagtagagagagggtttcaccatgttagccaggcaggtcttgaactcttgacc

SEQ ID NO: 24675 - DNA, 1050 bp, Homo sapiens
caagttttttcttattagctccagataattcaaccacattttgtctctttttaaaaaattgtaaggttggcagggcatggtggcacatgcctgtaatcccggcactttgggaggccaaggtgggtgggtcacttgagctcagaaattcaagaccagcctgggaaatatggcaaaaccccatctctattaaaaatacaaaaattagccaggcatggtggtgcacacctgtagttgaagctacctgggaagctgaggtgggaggattgcttaagccttggaggcagagattgtagtgagccgagattgtgccactgcactccagcctgggtgacagagaccctgtgtcaaacaaaacaaaacaaaaacaaaactggaaggttagcatgcatttgacttcacactctgaagcaacatcctgacagccatatccatttcaaggaacatcatactggagtacttttcagagaggtgtccttcataatttctgaaagtctttgaaacatgatctttgttagaacttccttctgcttttctcttccccaattcctagtataaggcatttattctcagaggttcagcttttag[450 bp omitted]aagtcccccctgctc

SEQ ID NO: 24676 - DNA, 1050 bp, Homo sapiens; identical to SEQ ID NO: 24675

SEQ ID NO: 24677 - DNA, 1094 bp, Homo sapiens
ttctgggacatacaagggaggcaatgggaagcaacatttatccttctgcatctctatcttgtttatattctttgctctgcttcttagttcatccaaaactaaaccaaagtaaaatcaacttgaatgaaatccaagtctttattctctccattccccaaacctaggccagattctatggtctgattttcagcttacattctattgtccagctctgtttttacagtaaacacacacatttaataaaaggtgacaatttgtgcacagcgagtattattttaagggaagctatgggaatatactattggcctcaaagagctgactttctactgaggcagataaaaagtgtaaaaaccactactatctctaaagtcaagacaaagttagagggtctaagacctatggtaaactagaggatgttcaatccaatagatgtaatagtgtagaaataggccttttcaaatcatatatatatatatattttatttgtttgtttatttgtttgtttttgagatgcagtctcgctctgtcacccaggctagagtacagtacacgatctcagctcactgtaaccttcagctgccgggttcaagcaattctcctgtctcatcctcctgagtagctgggattacaggcgcatgccaccatgcccaagtaatttttgtagttttagcagagacagagtttcaccatattgatcaggctggtctcgaactcctgaactcaggtgatccacccacttcggcctcccaaagtgctgggattacaggcacttatattttttaataggattttaaaacacaacaaaagattccccagtttaactccagaccttctctgagcctgcggcagagcagctaaacactggaacagtgccttaaatttctggtatggaattctttttttttttttttttttttgagacggagtctcactctgtcgccaggtatagtgcagtggcgcgatcttggctcactgcaacctctggctccctggttcaagcgattctcctgactcagcttcccaagtagctgggattacaggcacacacaaccaggcccagctaatttttgtattgttagtagagacggggtttc

SEQ ID NO: 24678 - DNA, 1049 bp, Homo sapiens
gccctgaacaaaggaggacatcaaatggcaaatgtgcatctgaaaaggtgcttaacattgtaaatcaaggaaatgcaaattaaaggcgcaatgagataccaccacaccaccatgtggccaaaatttaagagaatgacagaccggctgccccgcctctggcaggggtccctggtgcgggcggggaatgtccccgacggagcttgatgagaggcgcacgctgctggcagggcaccgctgtgtgagctgggactggctcgcagccctccgagatggcccagcagtcggacaaggccgtgaagtgctgcgccctggaggagattcaaagcacaatcatagcaaaagcacctgggtgtacgatttgaccaaattcctggcagagcatcctggtgggaaagaagtcttaagggaataagctggagagatgctactgaaaactttgaggatgtcgggcactctacagatgccagagaattctccaaatcataaatcattggggtttcatctggatgacagataaagttaactaagccttcagaattttttttttttttttgagacggagtctcactctgttgcccaggcgggagtgcaatggcacgatctcagctcaccgcgacctccgcctcccaggttcaagcgattcccctgcctcagcctctcgagtagctgggattacaggtgcgcaccaccatgcctggctaatttttgtattttttagtagagactgggtttcaccatgttggtcaggctggtctcgaactcctgacctcgtgatccgcccaccttggcctcccaaagtgctaggattacaagcgtgagctactgcgcccagcctttttttttttttttttttccttcaagagatggtttagctctatgttgtccaggctggtttccaactcctgagctcaagggatccccctgagtggttgggactactggcatgcaccactggaaacccttattactactgttgactttaattccagttagtggactagttgagtgatcccagccatctcagcactggccaaagccttcctgtgtta

SEQ ID NO: 24679 - DNA, 2079 bp, Homo sapiens
tccagttctttttatttaaccatctgttctttccacactgatttgcaagagccttttcatataatctttaaatatattcttctttaaggttttctagtctattgacacatctgttacactattttagtaattgacattttagttttatctttttgctaatttgtaaacattattgtatatttggggaaagtgttttgccttttgtaacttatgtatttttaaataacagaacttggtactgtagagtaatgtcaggattggagtccatattatacagtgttctgaaatacattgtaattatctcacagtattattttggcgacttcaatttgccacgggacaagtttctaaaggaacagataaaactggatgaaggctgggtacctttggagataatgataaaattcaacaggtaacaagcttttaaaaataatctttaggttttctgtttacaatgagtgctactgctgagtcttatgtttttatatgtactcttcaggttgaaccgtctaacaacagactttaatgtaattgtggaagcattgagcaaatccaaggcagaactcatggaaatcagtgaagataaaactaaaatcagaaggtctccaagcaaacccctacctgaagtgactgatgagtataaaaatgatgtaaaaaacagatctgtttatattgtaagtgggcctgtaatgcatttaaatatcttacatttatttagaaagtaaagtacggaagaataagggctcaggaatcacagcctcactaattactgtatgtcctttcgtaatattcttaacctaagtttcttttgttttgttttgttttgagacagtctcatcctgttgctcacgttggagtgcagtggtgtgatcatggcccactgcagtcttgacctcctgggctcaagtgatcctcccacctcagcctcctgagtagctgggactacaggtgcatgctaccatgcctggcaaaaaattttttgtagagacgggtcttcctgtgttgcccaggctggtgtcaatctcctgggctcaagtgatccaatcaccttgacctcccaaagtgctgggattacaggtgtgagccaccatgcctagtcctaagttttatcttcataaacgtggatattttctaccttgtagaactgttgtgagaattaaatgaaaaaaaatatatataccattggatgaaatctttgacatattctaagcacctattgcctattagctgttcttatttatcagcagctaaacttgattgcagttttctttagtgtatttttaaatagttttttattacggaaaatttcagatacatatataaatagattcaataatgtaccatcaccagctttagtagttaataacagaacatgcaaatcatcttgttttatttctgcttcaactgaattattttgaagcaaataccagatgaatcacttttattgtactggagagtagtggctcctaaacaaggctgttaagtgattaacaaagagaaatagagatagataggtatatcctgggttcatttcaagaaaaaatgaatcaaattctctccaattgtttatctgagaagtcattatttgttatttgtacatttcttcccactcttcacagaaaggcttcccaactgatgcaactcttgatgacataaaagaatggttagaagataaaggtcaagtactaaatattcagatgagaagaacattgcataaagcatttaaggtatgataatacagactttttctagttttaaaatatatgggacataacttaaaaaaatattttccttcctttttacagggatcaatttttgttgtgtttgatagcattgaatctgctaagaaatttgtagagacccctggccagaagtacaaagaaacagacctgctaatacttttcaagtaagtctttttgctgatgtttctcctggccttttacttatatggacacacactagggtaaggagcatggaagtagtatcccctgaaaggccaatattcttagtatctttagatgacctttgagaaatgcttgatatttgttcagtgagaactatagtcttttgagactataa

SEQ ID NO: 24680 - DNA, 1067 bp, Homo sapiens
cgatctcttgacctggtgatccgcctgcctcggcctcccaaagtgctgggattacaggtgtcagccactgcgcccggcctaaaaattttttaaagtatgataaatactgcctagaattattttccaagatagtttaatagccagatttatgtagtttataactaattaaataccagttgtataagagatcaaataatattgaaagccattttggaataaaggatgacaaaggaaaacaccaacactatgaaactactttatttatttattattattattattttttgagatggagtttcgctcttgctgccccggcggaagaaactactttaaaatagcattttggtttctagtctttttcttgtatagctataaggtggtgtgagtcatttctggtctgttgttgcttttaagaaactttttgatcactttgtatatttttatagaaatctctagaagaaaagattggatgcttgctgaaattttcgggtgatttagatgatcagacctgtagagaagatttacacatacttttctcaaatcatggtgaaataaaatggatagacttcgtcagaggagcaaaagaggtttggatacatccctatcctttttagcaatcagtttgaaaatctgtagaaacttagacaaaattagtagaaagtaattttaaaaattgtgtttattaaattagtttctacttgatcatttgttattgccactagatgtgatgtctgatattttctgaattatactaaattagtttctacttgatcatttactttgttgttattgtcactatatgtgatgtctgatagtttctgaattatactatgaataactgttcatactgatgattgcagttttacttctgtagcattccttttctactgttcagtaaaattcattcaaactggtaaagacatggaaggtttgcagggtagaaaaaattactttggacaaagaaattaattgtgggactaaaaaccaagggtatggcttttgttttctgtctctggtataggggataattctatttaaagaaaaagccaaggaagcattgggtaaag

SEQ ID NO: 24681 - DNA, 1033 bp, Homo sapiens
ccctgggccggggacgtcgcgggagggcctggagcggagcactgggagcccactctgagctgtcaaggggagggtgcgggggagggtgcagccacagggggatggaggtgactgagctgtcagcggtggaaagggggtggggaggagaaggaggggagaggagagcggagagcatgtttaggaaaccgggctgtgaattttggggaagccagggtgggtaaatgatagcgagaaaagagccagtgtatggggtaggaggggagtgaggggaaatgatttttggggaagctcgtgtcgagctgtcaagtgtgtacttgttgggaaaggctgtaaagcctggttcttgggaagagacttaggttgtgatttggattggctgggaggggatgttattggggaccgtattggctcgcgggatgatgagagctggggaggtggtcttgtacgtgcagggaaggacgcttgaggaaaaggtcttctgaactgccagtgtgtctgtcactgtgagagaaggagctcttgagggttgagggaggagggaaggggaggggcctgcatgaaaagtgactgttgagctgtcagtggattatttggtatgctggaatgacatttagaattgggctactgagcagtcagttacagaataccctccataccaggagaacaaacaaaatactgagcgaaccaggaatcaagtgttaggtcttctccagttaagggcactttgttcactcactgatacgtgaacctctgtctaaaaggagacaacaaatgcccttttgacagaagcgatgcatcagatgttgggacttatgagaaaagacatttcagagtttgcagtgagttacagagagttggtacatgtagggtcgtggcttggaacatgatgtcaatgtcagggacagtctgagaaaaaaggaaaaagtgaaaggggcgattttggatgggcagtagttgaaagaatattagcaactacaggttgctatcagttattaaacttcttcaattttcaggtcttaggattaatgacaga

SEQ ID NO: 24682 - DNA, 2027 bp, Homo sapiens
gctctgtccccatcagactcaggctggagtgcaatggtgcgatctcggctcactgcaacctccgcctcctgagttcaagcaattctcctgcctcagccgcctgagtagctgggattacaggcggccgccaccatgcctagctaattttcatatttttagtagagatgggggtttcaccatattggccaggctggtctcgaactcctgacctccggtgatcttcccgcctcagcctcccagagtgctggaattacaggcatgggctaccacgcctggccccaccaggaatttgaggtcttgtttttctgcttattgaaacttggtgttaatgagaacacatggacaccacgaagggaacaacacacacaggggcctgttgggtcgggggcagggagagggagagcatcagaaaaaatagctaatgcatgctgggcttcatacctagttgatgagttgataggtgcagcaaaccaccacagcaaccatttacctatgtaacctgtacatcctgcacatgtaattcagaacttaaaaaaaaaaaaaccaaaagacacttggtgttatatatataaatttataatattttaccaatctgttggatacaaacatctttttaaaatttatattttcttgactagtaaagttgaacatcttttcatatgttttggggccatttgggcttctttcttggtgaactgctggttcatattatttgcctgttttgtttttctgttttactgagttttaagaatgctgtacatactctagatgctgatcctttgttgtataaatacttaatttcatcttctagtttgtgtcttgtctttttaccttgaaatatataattttgttgtaaacgattttaaattaaaaatgtagtttttcttctacagtttgtattatttgtatcttgttaaagaaatcttcttcaccttggtttaaaaaaatgcttatatgttttctactgaaagatttaaggtttttcattgtacacttaggtcttttgtccatctggaatttatttttacatgtagtatgagattgaggtctgtattagtctgttttcgcactgctataaagaactgcctgaacgggcccggaggctcacgcctgtaatcccagcactttgggaagccgaggcaggtgaatcacctgaggtcgggagttcgagaccagcctgaccaacatggagaaaccccatctctactaaaaatacaaaattagccgggtgtggtggcgtgtggctgtaatcccagcttctcgggaggctgaggcaagagaattgcttgaacctgggaggcagaggttgcggtgagccgcgatcacgccattgcactccagcctgggcaacaagaggaaatctccgtctcaaaaagaaaaggaaaaagaacggctggagactgggtgatttataaaggaaagaggtttaattgactcacagttcagcatggctggggaggccttaggaaacgtagaatcatggtagaaggcacctagtcacagagcagcagggggggagaagcgagcaggggaaatgccagatgcttataaaaccattacatctcgtgagaactcactcactatcatgagaacaacatagggcaaaccatccccatcatccagttacctccacctcatcccacccttgacgtgtggggattatggggattacaattcaggatgagattttgggtggggacacaaccaaaccatatcattagatctaattttatctttttcaatatgaggattcacttattgaacatttttttcctccattgatctataatgtcacctctatcacagaccaaacctatgtgtgtcctaagttctctattgtattgatatgtctcttataacaataccatactactttattagaacattaaaatgtattttgatatggcaggatttccttattattagtcttcaaaagggtttttggctgttcttggttcctgttttcatttgaatttcaggagcttgtcaagttctctggaaaacttctgttaagatgttgactggca

SEQ ID NO: 24683 - DNA, 1026 bp, Homo sapiens
tagtaactaaaaaatcttacccatctacttactatttccagtgctctttgtttctttatgtaagtttctattttttctagtatttctttctaattattctccactactgaggaaagatactactgtgtcacctatctaatacctgttgaattacaagttttccatcagtttggctgatgggaacagacaccattctcaaccttacatgtgagcatgtactgttttctaatcctttcaaatgtttttatccctggcctttggtagtttccatacagttatgtgctaattagtactctggcaaatagtcaaatactcaggagcactctgtgtagatttctgggattatttctctgtggaattctttactttttagtactctgtcctataagctatagcagcattgattttcctagatgcttagttctgtcttctcagcttcatagagtttggccccattttgattctccttcctttactgtggcctggaaactctgtcaaggaagtaagctctgacacatatcatcacgtcacttgcttcccatctatcacagattattgtccttcattacctgatgtccaatatcttgaaaaccattggttcatttattttatctggttttttgtttgctttggatgaaggggttaacccaacgacctggttatttttgttttagatacagattttatttaatttacttatgttaataaagtatttttgaagtaagtataaaagtatcatagttttttttttttttttgcctttagggttaagtagtactttgattataatagatagaagaaaaagtggtattgcctggcttctcttgcagagaacaaattacttagatgtttaacttaattacgcacatatttacagtacaatattaggttctatattacagttatatttacttttttatatttatatttaagttcacttagggcagttacctaagtgaactttctttcatatatgtgctcccagaaagtctattgctttctgctctatttttgggagaggactat

SEQ ID NO: 24684 - DNA, 1024 bp, Homo sapiens
gtgtgagcaaccgtgcccggactggaagaagttcttaaattcattttttcttttaaatcaaggtttaaaccttaaggtgtaatgcttcctaacctttatcataatatggcagatgtggaaaatagtatttggatgggacacagaggcaactgaggaggctgctcaggctctgcctgtgtgtctgccttgaggaccaaggaaaatccatctctgcactgtaatctgctgacctaacaattgaaagacctacctgaagggtagatagacttcagcagagtgtgaacatgctaacttttattttgtatttatgtatatattttcttaagagttgtaactttcattagattctcaaaagggtccttgaagcaaaaaagaataccaatgatgttttaaattgtggaggtaaaaccaaatgtatggcataacttattttttgtttttggtttaaatttttccttttgattacaaagttgtatgtatgtttgttatataaaattcaaacattatacgtagaattaacgtcctaagtagaagtatatcatatcataccctcagttaatttctacaaagtttggtatgtatttctgaaaatgtttttcttcttatatatattaacatttgtttcccttctccaaaatagtatttatagaagagattaaatgtatatacaattcatttctcacttaatttatcttagatataattatacttcagtgcttattgatctacctcatttttgtaaaaatcaaaatatgttatggatctgccatagtttggttcacttttcttctatgattaaatgcatgcatttttaacttttttatattgtaaatggaggtataataaacatctttgcaagcatatttaggagtatttctgtataataaattcatagaaatggaaatgctaagcttgtgttacgaacatttacaattttaatagatatggtcaagtgccaccaaaaactcaacctgttttacacttccatgtatacaacaaaaatttctgaacatgctttcaacga

SEQ ID NO: 24685 - DNA, 1024 bp, Homo sapiens
gagaacgaggtgtgtaactagatttttacttcttgtttataattcatttttctttttcacagtttaaaagtgggtagaaagaggtagagatttctcctcagaggctatccccaaatttacccgtatagttgtcatatgtacaatgaaattatttttgaaaatttcgctaagtttaggataatttattaaaagactatgaaatggaactgtttttctaatcgtataataaagttacattttacatgtcagggatttttttttaaaactatgtactgggaaaaagaccatcaatttgaaatttcaatttttatagtgtttattaataataaataggaaaaatcattgttatatttctatattttattacataatttataagagaaaaattgctgttatatttgcttataatcttgttgcttattcaacttaaattttatatttctaatacatttaattaaaatctaaaaaataaaattacatttaaacatatatatcttttttcttttggaaattcattttgagttgataatgtaatgtgaattaagccaaatatactccttttaaagggatgatttctgttgtggaagtcttgtaattgatttaataccttaaaatttaaattttatagtttttcccctctaaaaaggctttcacacaatgttacattttgtggagtctcattttgggcaattttcaagaattttcatcagattggagaggcagtttattatgctgtgtaggagtctgactctggaattagactgcctgggtttgacttctggctcctttacctattagtagtgtaaccttgggcaagtgtcttaacttcttcatgtctacatttccttatctgtgaaatggagataataatagtacttatttcatgagaatattatgaggattgaatgagttaacatatgtaagcacttacagccctggtgcccagcatattgtaaacactgtatgtgtgttagttaaataaaatagagtaatttaaaaaacttatgtaaatggttagcttata

SEQ ID NO: 24686 - DNA, 1035 bp, Homo sapiens
ttatacttgtgaagttgatttaaagcaaacagtctgattataggggcttacataaatcttcaagtttcatcttattgttatagtcttaagatctttgtatttcatttttgtaaggtgacatattaaatattccttctagccctgtgtagtctgtgttaatattctttgagtattgttgtaaccagctgtgaatttacctgacttctttttatgaagctcacatttatgaaaaaatgtgatgaaaactgtctagaaaatccatcaaaaaaaagaaaggttaatttaggttgagaaaccatctgtagattttgcagattgggagtttgaatctgtttttcttggattttcttgtctcatgtcttcttgtttctttccaaaatgttttggacctgtgtccatattttgtgcctgaaacacatgtagcaatagtgcctacttccatgctcagggtctatttaaggtctgaaaagttcctgagggctgtacaaatgctgtctgggttgagattgtatttgatttatttcctcttgtcagttggaccatcatcttctcttaggatcctatactgcttcctcagggacaaatgaaccttagctccacatcatgaatttggaggaatgggaaattgtggttatgataactgttttgttttcgttttccttaatgcctgaattctctacttttgggagttatttctgtttgttaacagtactgtactttctaaaaataaaaatatagaacttataactgataatatagtaatctgttattgttggaacaagtagtattggaaatcagacttgtattttaaaaagatgtttattaacttaaaactacaatccatattcattgttgaataagtagaaaataaatattaacaaaaagataacattacctaaatctctatcacttagtggtgactcactgtaaacctctgacattctttatttttaaatttttttctttttctttctttcttttttttttgagacggagttttgctcttgttgcccaggctggagtgcaatggcacga

SEQ ID NO: 24687 - DNA, 1040 bp, Homo sapiens
agggtaaggtgggaggataacttgagctgaggagtttgaggctgcagtgagctatgattacgccactgcactctggcctccagagtgagaccctgactcttaagaaaaaaaaaaaaaaaaaaaaaaaaaaagatgtatagtgttacagtgtacttgtctttgtatgttaaccactactatatatcacttatgtcaccactgaaatggaattagggagttggaagatatttttgcctttctgtagttaaaatcataatatcttcagaaaatacgatattttggtgctgtttttcttgttattaatgaaaaaactgcgttaaagttatatctaataaggactgattcaagccttagtaaatgcagtgttttgtaaagaaagtgatgacatactgagcttgttactcatttagacccattacctggggagatgtggtatgaacacattattcaatattagaagaagtataaagctggggtagtgttaattgaaaaaactctacaaggttatcctggaagacaccttgaacagtgatgtagttagggctggacctgaggattttgatgcgtgtgagatactgttttttccagtctctcatctaagtttagcccctgcttaagcagtgtcactggagccagtacatcatagttgacacttcttgtatcctcttgatgtctttgtggataatgctttcttccattgaatacctttatttaaaaagggcatccattccccccattcatttttccacttactgctttatattaaaatatatgcattaaattttttcttatttatatactgtgtacattatagaaatctagcttgtcaatattattgcattattgtaaggatatttttaacttttagatactttcccattttatggtttatgggttattagttataaaatgagatgagcaacttcaatcattaactgataaatttcatttttcatgtgcagatcaatccataatggatgttttgaagcataaaagcttcctagaagaactattattttggactataaaatatgaattcc

SEQ ID NO: 24688 - DNA, 1032 bp, Homo sapiens
attagtgaactttgtataactagtcttgaaaacaccttatgtttaaaaaaattataaaataatacatgtttgttacggacatctttgaaaatttccagtgaagtttaaagaaaaagttaaaagcacttgtagttttgttattcacaaatacctgttgttagcactttgctatatttcttttctttttgtgtaatgactatatttatagatacaataaatactttttaaaaagttgccatagtgtacatgtcaaaaacatgcattttaataagtgcaggtattaatatcatggctataccataatttatttagtcatttccttattagacatgtttctgcttttttatcataaatttgctgctatcagtcttagatatttttacatgcttatacttttataacttaaaaattgggataaatcttgcctttactcccttagtgagaactttatattcttcttttgtgcccactatgtggttgatactcttcaacctgccataatgtttctgtacctcttcccattctcatttctctatagttactcatcttaactttacctcccttaaattctatatatatgtatatgtgtgtatatatgtatatatgtatatacacacatatataaatacatacataatttttattattattttttgagacagagtcttgctctgtaccccaggctggagtgcagtggtacgatcttggcttactgcaacctccgcctcctgggttcagttcaagcagttctgcctcagcctcctgagtagctgggataacaggtgtacatcaccatgtctggctaatttttgtatttttagtagagatggggttttgccatggtgcccaggctagtcttgaactcctgacctcaggtgatccccctgcctcagccacccagagtgctgggattacaggtatgagacaccacgcttggccaataatatatagtatttaaatatttgctatgtacctggtactgtgctgaatactatttatgtattgtttcaattaagcttctgaacaagtctc

SEQ ID NO: 24689 - DNA, 1034 bp, Homo sapiens
gtgctgggattacaggcgtgagccaccgcgcctggctggagtttcactcttgttgcctaggctggaatgcaatggcgtgatctcagctcactgcaacctccgccttccaggttcaactgattctcctgcctcagcctcccgagtagctgggactacaggcgcccgccaccatgcccggctaattttttgtatttttagtagagacagggtttcactgcattggccaggctggtcttggactcctgacgtcaggtgatccacccacctcggcctcccaaagtgctgggattacaggcatgagccaccatgcctggcctacttctttgctttttaaaggaaaatttaaaagctgctttatgttttagttttactaacttcatgtaatatgatctattctttcctagagatttatctacatatattgctttttcttttttcctttttgaaatagtatctgctgtcattcagctgtatcaatgatattcttatattttattatatatttaaagacagacttttcacaaaaatggtgttttttttaaatttttttactttttaattatactttaaggtctggggtacatgtacagaatgcgcaggtttgttacctaggtatacatgtgccatggtggtttgctgcacccatcaacctgtcatctacattaggtatttctcctaatgctgttcctccccccgccccttgcccggcctggtgtgtgatgtccgcctccctgtgtccatgtgttctcattgttcaactcccacttatgagtgaaaacatgcggtgtttggttttctgtccttgtgatagtttgctgagaatgatggtgaccagtttcatccatgtcctgcaaaggacataaactcatccttttttatggctgcaatagtattccatggtgtatatgtgccacattttctttatctagtccatcattgatggtcatttgggttggttccaagtctttgctattgtgaacagtgccgcaatatacatgtgcatgtgtctttatagcagcatgatttataaccct

SEQ ID NO: 24690 - DNA, 1047 bp, Homo sapiens
gtagctggaaatccattccatcccttgttttaataataattatttgctttagctgaattgaatttaggaaatattaatctgtactggatgcttcagaggattcaaagttgagtagaatacaatttctgccttcaagaaacttatacttaagtgtttaaaatggaaaaattttatctatagtgattttggaatctgcatcttctaaaatgttaagttttgaactaaaagtataggaataaatccaggtgagagtatggtttaaacattttacaaccatcttaaaatttctataaaatagtctttgacttgtgcattttgtttgtttattccagccagcacctaaccaagtcacttttcatctgccactacatcgttactatgctatgtttttgagtaaggtaagactgtcattaaacaattctgttcttttttttttaattttcagaaataagaattgaattagtaacttttttattgtaatttttaggctgtgaaatgtcaagaactagatttggattctgttttaccagatcaggaaatgttaatgaaactaatgattcacccactccaaattcaagtatgtattcaggcatttaaaaagttttgaagtggattccttgtttaagtgattcttcctttatttatatgcctttcattgttattatagctgagatgtttgaaaactttttttaaaaagttgttattgtatttttgctagattatgtttaggtatttttcattttatgagatttactttttagttttactttttccaggaattcttttcatgatatttgcttatggggtggtatttaacatactatatagcactgttttgggagtcaggagatccaaaagattctagccttggtgctaccactgttttattttccgcaaggtttaaggtaattcacctccttgattctcagtttccctatctgtatagtgagaggagaaagaggagagaagaattagcttatataagcactgtgatttcttttaataccagcaatgtaatttgacaggccagctttttatatacattag

SEQ ID NO: 24691 - DNA, 1044 bp, Homo sapiens
caccaccatgcctggctaattgtttaaaagtgttttgtagaggtgggttcttgctatattgcgcaggctggtgttgaactcttagtctcaagtgatcttcctgtctcagccgcccatagtgctaggattatagatgtgagccattgtgcccagtgaaatatgtctgacagtggcagtgttgttagaactatgagctaggccatttccaaagatagaaatgatttcataaagcatctgttttaaattcaactgtaaagtacattttttaaaatatgtaatttcttatatttctgttgcctcctgtctcccatcttgaaggttaatggctgctgccccatgtttgaaagtatgatgtatgagtttatatatatcatttttgtctcaaactagtcaataattacgtgttggtttgagtcacttaaataatttttttctgtcatgtagcatttcatttgcattattctattaatgcttttgaaaagagcagtcaaaatgatgtattacttgggccttcaacaaatatataacctttattttggaacaatttattaatctaggtgccacatatttagtggctactgcttaaagcaaacaaagaaatgaagtaaaattaaaaattgctttttttatgctaaatgaaatagaatagttgaaatatttcatcatgactattgggatcattttgaaaattacatttatatgttgtcactgtagtattatatacaaaccaatttatttattttttatttatttttatttttttgagatggagtttcacttttgttgcccaggctggagtacaatggcatgatctcggctcaccgcaacctctgcctcccggattcaagcgatacatccgcctcagcctccctagtagctgggattacaggcatgcgctaccatgcccggctaattttgtattttcagtagagatggggtttctccatgttggtcagtctggtctcgaactcccgacctcaggtgatccgcccaccttggcctcccaaagtgctgggattacaggcgtgaaccaccgtgcctggc

SEQ ID NO: 24692 - DNA, 1081 bp, Homo sapiens
tgctacgacttcttacaaacttagtagttttttttcaggctctgacactcagaagtatctgaaggccttcaacataaactttagtagcagcagcattgttaacgtctttttaaaatttctgtattccttttgatgtttcctgagtggattatcaaatggggtttcctttctcctgttgtagttttttaaatctactgtgtcttgaattaaataaatgtaagatattagcttaaaatataaagtaaaacattatttttagttagctatataagatgattatatggatagatttccaaatagaacttctttcttgcccataaatccattggttgaagtggaagaaattagtaagataagtggaagacagaatacataatcagaataaataggaactgacctagtgatgataagagccagagtagagtctggttccttaatatgctaggctgacaagaaggtttctggtggcttctgcaggagctgatggacctacagggaggtattgtgtagagtagaaagagtcctagaccagaaaaactggggtttggtcctgattctgccatttctgagcaatgtgagcttggccaaatcccttaagtggtctgagactcaatttcctcatctgtaaaatagggctgataatgatctttcatgcagtaatcaccaggttagggttcactctgcatataggtcactctgcatataatacaggtcaatataaatgtaaagtgatgttttaaatattcaagctatcccatttaggaaggctaggttaggcctgttagacagtttgggttaggtaataagggtcatgcttccgtatattttcagagactttaaaatgaaattatggttattttgtagcagtctctgtatgtgtgtgtgtataaatacacgtatgtgtgtacacatattttcacacttttttctttgttctttattgctttggacttttgtttttttttttttttttttagatagagtctcactccatcgccaggctagagtgcagtggtgcgatctcagctcactgcaacctctgcctcctggggcctgggttcaaatgattcccctgcctcag

SEQ ID NO: 24693 - DNA, 1039 bp, Homo sapiens
gtaattacttttcttgacccattgaagttttaaattttcatgtagccagatcaatcagaccttatatttcttattttttcctattactttcatacttagaatgcccatgtcttccaagagctgatgtatacttttataactagtattacaatgtgtaatccagtcttaggatttgcaatatctacctatattttcactttagagttttctcatgggatgatttttaaaactatataacgtacttggaattcattctcacctgtagtgttaggtgaagatctaaaatttatttgcaaataaccaagtagtatttttagtgattttatatcctagttattaaatactaagggttcctacattataggcctgattaggagctttcttctttgttctattgagctccaagcctgtttctctgacaataccatgatggtttattgtttaggtgatttattatgtctagttatcgggctgagttaggttcctctcatttctcttccccaaactctgactcccagtttttctttgctgttctcacttattctccagaaggtttttagaacattttctaagcccttcccctcacttataattttttttttgagacagagtcttgctctgttacccaggctggaatgcagtggtgtgatcttggctcactgcaacctcctcctcctgggttcaagcaattcttctgactcagcctcccaaatagctgggaccacaggtgcacgccaccatgccaggctaatttttgtatttttagtagagacagggtttcaccatattggtcaggctggtctcaaactcctgacctcaggtgatccacccaccttggcctccctaagtgttgggattacaggcgtgagccactgcatctggcctaacttgtaattttgattataattattttaaactcataaattaatctgggaaagtagttatctttataatatgcagtttcctcaactagaaatattccccattcttttaattcattttttgttttattctgttgtatgcatattatgtttcagtt

SEQ ID NO: 24694 - DNA, 1818 bp, Homo sapiens
gtagttagaattgcttttaaaacttgtgctttatattatttcttaaaattttacaataattcaagattggattatcttgatattagattatactgctgtcgaacacattgtgtaatattttgctagctgtcattgtggtgatgaattcctcttagaatttagggtcagagaaaaaaatgccattccttattaatttttttagtctttcacactttgagaactggatagaggcctttaattcctaggaagttcagagcttaattacattaattttccacagaggttttttttgaggggaggtggagagttggggagataaggagttattaatataaatttttcttctccactcccttttgatgtaagagttaatagtggtctttattgggacagtgttattataaactatttttattgtaagaatatgtatttgtgtaactgtttaagttattgtttgttattagaagagaaaagcagaggaaggaaattttactgtttagacttactagaacgttaaatgcttcccatggttttatctgaaaaatagatggatgcagaaacctagctatatacctcttaaatcttttaatgcttagcattgttttcaggttgaaagacctttttatgccaattatctcatcagaagctcaaattaaatatattaaagacaagtttttttctttgatctcttatgtccttgcatcttatgtttcataatacccatcacatcactggcctctaaagaataaactcggaagtaacttctgacatcactgttttcaggtattcatatttagttctttatgtacaaggggaaagaagatttataacttaggatcagatttggctatataatataaagaagaaaccaaattaacacagtagcttaaataagatactacttgtttttctttcatgtagaaagaagtgtgaaagtaggcaggccggacacttctacttcacagcaccagattctttatggtatggccctcatctccctgtgccaaggtagctgctaagagttctagccatcacagtctagtttaaggcagcaggatgagagttaagagaggaacttcaccttcttttttaagaagccctcttagatgattcacacaaaatttacaattattatctccttagatgattcacacaaaatttacaattattatctctcaggctaaaattctttcttatttttgagcctccagggtttaagacataaaatcatcatcctttatagggagtgtattagttcattttcatgctgataataaagacacatctgagactgggcaatttaaaaaagaaagaggtttaatggactcacagttccatatggctgggaggtctcacaatcatggcagaaggcaaaaggcacgtcttacatggtagcagacaagagaagagaatgatagccaagtgaaaggggtttccctgcatgaaaccattagatctcatgagacttattcactaccatgagaacaggatgcgggaaccacccccatgattcagttatctcccactgggtccctcccacaacacgagggagttaaaattatgggagttaaaattcaagatgagatttgggtggggagacaatcagactgtatcagggagggtcagttacccaggtttggatcatgttgctgttcttgaggagcttcacaaatctgttcttaaccatgctgtatagaatacagactcccaagattctatagagcatttgggaccagtgattatagaatatccctgcttccaagatcccataagcagggcccagaaaagagagcttgaatcctgcttattattttccat

SEQ ID NO: 24695 - DNA, 1033 bp, Homo sapiens
ccaatactccaaaacttcagtattaccaaaataaatttcatcagttaattagcaggtatttcttgctcagatttttgttatgcagagggatacgtgggaaataaaaagcatagttcatgatattttggaatttacagtctagttggaaagagcacagtaacatgaacgaaacaatgaggaactatagaaagaccaaatatcatccaataataaattctctgatccaaactatcagtgccttaaaagtttaggttaaacttacattctgtggtgtttatcccttcctatattttaggattttaaaagtatagttaataagtagaataaaggacatcatagcagttctgactttatcccaatttacattttatggtaatttgcatgttacactttatatttcagtgaatataaaaagaactgcatttctttatgtataaagatcttattgacataaatttgaattcataaaaagccattattttttctttctgataaaaatggaagtaggacactaagatcaacttgtagactgttacttaatgtcattatctgaatattctgtaataaatatattgtcctattttatttttatagtgtattattttaataaatcctcaaagacatttgagggaaattgtaaatgaaaaaaatttgtggtctatattttttctattgtatgcatatgttatatgcatatattataccactataatgactatatcttttttaaatttggctcttttcacattgtaaatatttttcgtacagcttaaatttgccacattcgctgcttagaaaatgttttttaagttggtattccattttttaggtaactccctcagtcttgctggtcatttctaggttcttgctgtaatagtgctgtactggatgtcttgtacatatagctattttttttcttttggattatatccctggaaagaattcccaggggtgggaattacttggtcaaaaaacatgatttacatatgtttatttacatataattatgtaatttatatgctgtcttttaaag

SEQ ID NO: 24696 - DNA, 1028 bp, Homo sapiens
ccatcatataccccagaaatatacacacctactatgtacccacaaaaattaaaaattaaaaaaaaatccttttccaccctaaaattataaatttattttgtattttcttctattattttcatagttttatcttcacatttagatttttaattcagtctggagtttattttgtggtgtggtatgaggtaaagctctaattttttctctatttgataagacagtttttccagcactatgtacaaattatttatgaaataatgtaacttttttggactgatttttcatggtatcaagttttcaaatttctggattattatatactattaagctatttgtttctgtactagcagcagtttgttttaattactgtggttttattatagacattatatctgatagtgtgaatgtccaatttattcttgacgtctttttgctttttctattttttttttttttttttttttgctatatatgagcttttattcttttttatttttttgagacagagactcgctttgtcgcccaggctggagtgcagtggcgcggtctcggctcactgcaacctccatctcctgggttcaagcaattctcctacctcagccttccaagtagctgggattacaggcatccaccaccacacccagctaatttttgtatttttagtagagacagggcttcaccatgttggccaggccggtctcgaactctggacctcaggcgatctgcccgccttggcctcctaaagtgctgggattacaggcgtgagccaccacacccagccaagcttttattcttatatacattttttaatctgtcaagttacttcccaaatcctacaagattttggtttggaattatcttcaatttatagttttaagacattgaacgtggtttatacattcatttagtcaggtgttttaatactttttttgggtgggcgggaggaagacagtctcactctgttgcccaggctggagtgcagtggcacgatctcagctcacttcaacctccacctcctgggttcaagc

SEQ ID NO: 24697 - DNA, 1084 bp, Homo sapiens
atcaataacaagtagagagcaaatcaactaggataaaagagacctgaacaacactattatgacataactacatctataacttctccaacaaacagcagaatatatattatatatatacaactacacatggaatatcgttcattagaataaaccatgtgtcaagccgtaaagtatcaattttcaaagaagtgagttataaagtgtgttttttgactacacagaattaaattagaaattaataacagatagaaaatcatcaaatctgtgataagcatcataattctaagtaatttgtggatcaaagcagaaatcacaaggaaataatttttttttttttttttttgagacagtttccctctgttgcccaggctcgagggcagtggtgtgatctcagctgactgcaacctctgcacctgggttcaagcaattcttctccctcagcctcctgaatagctgggattacaggtgcccaacaccatgcctggctatctttttttatttttagtagagatggggtttcatcacgttgggcaggatggtcttgaactcctgacctcaagtgatccatccaccttggcctcccaaagtgctaggattacaggcatgagccacctcacccagcctagaaaatatttttaactgagtgaaaatgtaaacacaatatactgaaattgtgggatccagctaaagcagttcttagaggcgtatttatcacttcaaatactttatttgaaaaaagaagggccaggcacagtggctttcgtctgtaatcccagcactttgggaggccaaggcgggcagatcacgaggtcaggagtttgagaccagcctggccaatatggtaaaaccccgtctctactaaaatacagaaattagccgggcatgttggtgtgcacctgtagtcctagctactcaggaggctgaggcaggagaatcacttgaactttggaggcagaagttgcagtgagccgagattgtgccactacactccagtctgggtgacagagcgagaccctgtctcaaaaaaattaaaaaatgaacgaacgcataaaaattaaaaagaagaaagatctaaatcattatc

SEQ ID NO: 24698 - DNA, 1024 bp, Homo sapiens
atacatggaaatagcttgctatttttatatacatttccaaaatattaagataactttctgtaagagtcaatgattctgttcgactaaatagctgtcctttccaacacattgctacttttttaaatactgtatcataagttcagcctgtcatactttttgcattgatcgttatgaataccagaccatttgtaagtgtggttgaagagcaaaatgctaattgacatctctagtaaatactgttacaggattcatgaacttgaataattctacagtttgaaactctgatgctatatatacatggtataatgtattcagactttgattactacttatttaaaatggaatgttttatggttgtgcatatggatgtgaagtgaaaatattagccttaactttaaaatttgggtgtttgatagtgtttattttgatattggtgaattagtcaccagtaaattttaaaaaagcacttggttgaaaattgtacttgaatacatacatgcatgctgctaaactagaactttaatttttccccataacttttataagtcccatttataaacccacttttaaaaataacaggtccaagttagagtgatgtgtgtatattattcaaaaaaatgtactggtgtgatatcttgtatgaatgatcatttaaatacagtacattactgtagaagctaaattgatctttataattaagcagaaattacaaaactaggaataatcaacattgtaagatatgttaataaaaacctgctgtcatttggtttgtgaaaggtccttaaaatgtttactgcttacatgtttttttttcccccaaagatattgacagtaatatatgtgagtgaacatggctgaaaagatcaaagcacaacataattagtagttgctttagggtggagtaagtgtaaagggtttgctttgctttttttcttttatttgcagagtgagttcttgcttcttcagtccttgtctcataatcaatgcacattctttgctaagtgtgtgtgtttggtagggggag

SEQ ID NO: 24699 - DNA, 1123 bp, Homo sapiens
tcttcattttttacttggagagaaggactacagatttcctaggattcccaaagggatctgtaatcccaattaggtgaagaaccactgggcatggtggctcacaactgtaatctcagaactttgggaggcaaaggcgggaggatcgcttgaggccaagaattgaagaccatcctgggcaatatagtgagacctccatctctacacaaaataaaataaaataaagttaaaaataagaaatttttaaaaactgctttggtgaactacaaggccttctttaagagtgcagctgcacagattgtaaacatggcccaggatggggcagcagggtcagaagaagtgtcaggaatgaagaacaccatgtcagcccatttgtcaggcctggctgtggatcagcagccatggactgatatactagctttcaggagagagtgtcaggcctaagctaataagtcaggaaaagagtggaaaattggtcctttagactcaggcagggactatcaaacaggatacagctaaggccaagaaccagatgctagaatcatcctagtaggtttcctcctcaaggttgagaatggtgtcttctaatatcttagtttccttagtacataggatgtcacctggcagagaatagccactcagtaagtatttgttgaatagaactgaaagaaagtttaggaatcaggtacctggcatagataaggaacctgaaatagattagatcagttaagctcatgataaactctctagactcttcctcctaatcctgagagtaatggccatgttcctggtccttggggaggctaattcatgcaaaccttgggcctaattggttttaaatctgaagcatggagtgggacctatgcctgatattcagtcccattccctctcccttgtccatgtggttcctgcctggccaacactgacttgatcctaagccaactttcatccagtctttgatatggttctgatattacggtatgtgatttcatttgttccttgccttaccccagagagctttcttatatagtactgggagattctagcacagacactgccaccagtatctcctcgccatgcaaacatttttgtcatgtcaacatttccaaaaaccagtggaaccatt

SEQ ID NO: 24700 - DNA, 1035 bp, Homo sapiens
agtagcttcacctgtgtcttatgtaaaacaatagttatctcatccttacaaatagctttgccttacattaagcaagcaagaattcccattagtcttcaacattagcacttggctcaaacaccctaaccagtgataaagcttccccatgtcacttagctgagtcagtctaggcatctcttttcggtgaggatgatctgagcccagcctacagactctaatgctaaagaatgccaagcaaaaacaagaaagacaaaaagcctcagagcttagtaaatatctttttgttttctggcttaattttctgtggacagaccttccttgatttttcttaggccccacgtttggtctcacgatcttgtttcaatgactagtctaccagactatgcctctgtgttgaattgctttgaaaagagcatggcttgctacttttaaatcagtttcttagaagacaaatgtaaccttccaagatatctgatgcccacagctagttgtttatgccagttgaccgtcttcttgttatttataatttgtaattagaaaatcatcacttagaattattcttgacagatattgacttcagagaattatagaaacatagctgtccttgaggattattacagaaaaaccatgtagataattatattgagatctttaaaacctgggtcaatatttccaattatcttcacagttagccttcagatgtttacattatttttaaaagatagactttggctctggcttttatatattctacaagtgtgaaactggcagtcagcttttttttttttttttttaaacaaattgtaaaccaattttacatagaacttggaatgcttttttcaattaacatttgcattgtcctataatcttagaggtaaaagggactcagaaaagtcattttctttccttctattcctctgggtggaccatgcctaagacattccattcagataagaatctattttgttggtgaagtatcacagggctggcacttccaccacctctctcagtaacccaggctggtttctgacattt

SEQ ID NO: 24701 - DNA, 1056 bp, Homo sapiens
ttttaaaatttcttttgtagaaacaaggtctcactattaaacaactccattctgtcaacagcagtttgattatgctggggatcagtgaatcaagattattaattaattgattgatttcagccaaaatagtatatctactttgaatctctagtttgaagtagataaaataagaatttttaaaacaagaataggtattctgatggtgtcagagacagtgtgattgtgtacaaggggaaaagaagaaataagaattgcagttatctaggtaattcaagcagaccacaaatttgcctaagtttaattgtcagataattaatgtaaaattaactagtttgtgttggccaaacatacatagttatgtcagttctccttgtgtctttatttaggtaaacatgagtttgttcttattttaataaacttagagctctcctaaatgactcagtaactcagttgggctgaagagagcacctaggcaggtaaccaagaaatgtcattgtttctttctgtaagctccgttactctttctttctctgtctttctgaactcagggaacagattcatctttgttcagtaaatagattgagcagaaagtaaagcaggaaggatataactcacctatccctttgcagccactgatgcagctacctcttatatttctgtctagacttcaggtggaaagcgcactgaagtacacgaatcacctccagccaaattgcctagatagctttggtaataagtgtgactacttgtattcccagggtaaagggtccagtgggaagccccagcaatagggaagccagcaaaacctatcaggatattatcctttcgcttcctgacctcccttgtctcttgagacaccagctcagcgttcgtttttagaaacaataatcaaagagccccaacacctcccaatatgtccgcttgctgacagggggcgccatatccaacatgtacagcatcatggctgctcgctacaagtacttcccggaagttaagacaaagggcatggcggctgtgcctaaactggtcctcttcacctcagaacaggtgagtcgg

SEQ ID NO: 24702 - DNA, 1023 bp, Homo sapiens
aatgaaagaattgcacaaaatccctggtttttaaaccttcttggagttatggagaaaccctttgagaatctgatgaaagccaccaatatttacaccctgaaaactgcttattcatataaaagatagtgtgtaatttcaggagctgtagtattctctgaagccatccacagacctcaatttaagatccctggattagaggatttctgggttaatcctagttttcaaagtctataattctctatttctgtccacactactctgttgtctagctacgcatgctgtgatcctcattcttcagactcctgcttcgggtgtttactcatactgttttgtccattttcagatgtccttcctacccccttgaccatctttacctttgaatgttctaccctctttttaaaccacaattccttatcactttttatgtctgaagcttcttcagtcagaattaatctttcccttagaaccttataccaaatagcctttagcctgtttggttttacattatagtgattagagggctgtgtatccattgccccttcctcttctcacctattcctcaacagattataaatgtcttgacatacgtgactatgtgcctgtatttgctttgtaactgagtggtgccttgctagtagtagtcaaggaataattgcttgaatttgtcacttaattgtagtgactgtctgctgtgtcccctgctaattgctgagaggattagcccctttctcccaaaaaaggagaaagtggtgcagaaatagaaccacagagggaaaacctcatatagaagatgaactaggcccggtgcagtggctcacacctgtaatcccagcactttgggaggttgaggcaggtggatcccttgagcccaggagttcaggaccagcctgggcaataaggcgaaaccctgtctctacaaaaaatacaaaaattagttggacatggtggtacgcacctatagtcctcccaggtactcgggaggctgaggcacaagaatcgcttgaatcagggaggcagaggttg

SEQ ID NO: 24703 - DNA, 1081 bp, Homo sapiens
ttggcctcccaaagtcctgagattataggtgtgatcttccatgcctggccgaattgcagttttgattgtgagggaagaagggaagaaggaacaaataattgtgagatgaagcatcattgtgcatatcagactggtaaaggaggagctaggcctggcatggtggctcacgcctgtagtactaccgctttgggaggctgaggcgggtggatcacttgaactcaggagttcagtaccagcctgggcaacctgaagaaccgttgtctctacaaaaaatacaaaaattagccagatgtggtggcatgcacctatagtcccagctactcaggaggctcaggcgggaggattgcttgagcccaggaggcagaggtcgcagtgagccaagatcatgccactgtgctacagcctgggcaacagaataataaattgtcttaataaataaataaataaataaataaataaaattaaaaaggctgaagttggctactgcctgctcacccagcttttggtggcagtggagataatagatgatgtggcaggagaagggcacagaggtattcatgcatggcctactctgaaattgtcaagttgtttgggaaataaaagacatcatgatggaaacataagttggaacctgattatggagagccttaaataccacggtcaggacttccgatatattttgagcagttgaggctgtgataattgtatcagtaaggggttttgggttcaaatggtaaaaactagctgtcaccatcataagcagataacatacttaatgatatggattagctcatataatcaaggaaacagctgaagaaccagatgtagaaaggacaggactcagaaaacctagggatttagataggaagaagtatttggcaatgtcatcagcattcattctactaaacccatttttgttttttctctgactcccaaggtttgcagccatgggcaagagaaattggcctggctttgaccatgagccattcccttggtttgggcagggcagacactctgattgacaatcctaccagcactgcacacaacagcagagaagtaattccccaaagggaggaaagag

SEQ ID NO: 24704 - DNA, 1032 bp, Homo sapiens
atcttggctcactgcaatctctacctcccaggatcaagccatcctctcacctcatcctcccaagtagctgggactacatgcacataccaccacacctggctaatttttttgtattttttgtagagaaggggtttcaccatgttgcccaggctggtcttgaattcctgggctcaagcaatcttcctgctttggcctcccagtgtgctgggattacaggcatgagccatctcacccagccagtattcttcttttgtaaaaaaaaaatacatataaaaaaacaaacgtgaatattctccattatttacaaatgcttttatactcaaaactatgggaaattttagctggagatgtctacggtagcagatattccaagtgtctgcactcagattttctgtctgaaaatgaagcagcagcttcctacaagtccatgcagttaatgatcagcataccttaacctttgggagggctgacttttaataggtcatctcagtagttttataggcccgtcagtgatgtcagtgaatgatcttacagcaccatggtgtgcatcgtcaccatcttgtttctgtctagatgataattgtccctcttgtaacactcaccatctgtgtatattccttaacctacttagttttcaggccaaaggtttaaaaatgaagtactaggccaggcacagtggctcacgcctataatgccagcactttgggaagccaaggtgggtggatcacctgaggtcagaagttcgagaccagcctgaccaacatggtgaaaccctgtctctattaaaaatagaaaaagtagctgggcatggtggcaggtgcatgtaatcccagctactcgggaaggtgaggcaggagaatcgcttgaacccaggaggcggaggttgtagtgagctgaggtcgcaccactgcactccagcctgggtgacagaatgagactccgtctcaaaaaaaaataaaaataaaaatgaagtactagtagtagtcaaactaccatttactgtcgcagcgctcaccccaccttttgtgccct

SEQ ID NO: 24705 - DNA, 1030 bp, Homo sapiens
cctttgacaatgcctgctgtcctttcagtgctgggaggatgtatgatctatgccgtttttgtcctaggtctgccacctcttccttccatgcctccccgaaacttacctggcattgcacctctccccctgccatccgagttcctcccgtcattccccttggttccagagagctcttctgcagcaagctcaggagagctgctgtcttccctcccgcccaccagcaacgcaccctccgaccctgccacaactactgcaaaggcagacgctgcctcctcactcactgtggatgtgacgccccccactgccaaggcccccaccaccgttgaggacagagtcggcgactccaccccagtcagcgagaagcctgtttctgcggctgtggatgccaatgcttctgagtcaccttaactttgaaccattctttggaattggcgtggtatatttaaccacgggagcgtgtctggaaacgcaaactatcattaatttcatactagtttgtaccgtatctgtaggcatcctgtaaataattccaaggggaaaactaaacgaggacgtgggttgtatcctgccaggttgagtggggctcacacgctagggtgagatgtcagaaagcgcttgtattttaaacaaccaaaaagaattgtaagggtggcttgctgccaggcttgcactgccgttcctgggggtgtgcatcttcgggaaaggtggtggcggggcgtccactaggtttcctgtcccctgctgctccttccgtaagaaaatgaaatattctatgcctaatactcacacgcaacatttcttgtactttgtaagtcgtttgcgagaatgcagaccacctcactaaactgtaaacggtaaagagatttttacttttggtctccgtgagtcgcatctctactaaggtttacacaggaattccacctgaagacttgtgttaaagttctacagcgcgcactgttaactgaacgtctttttcttcagcctatacgcggatccttgttttgagctctcagaatcactcagacaacat

SEQ ID NO: 24706 - DNA, 1046 bp, Homo sapiens
tttagtgctttttatacttccattttaaagtagaaatgattattttgttttctaagttttgaatactcttagatcgaaaacaatttttattcaccaatgctctagaaagattaaaattatgtatgtatttaaatagggatatgtccatatggggatatagaggaaatttttttagctatttattttttaaaatagatcactttgcttttataatttaaataactaaaaaatagtttacttataaaatataatattttggttttaagtataaggaaactgacccaaataaataaacttctcttcattcttttaaaagatacttgagctgggacactcctcaagaagtcattgcagttaagtcagctcagaacagaggctcagcagtggcccggcaggtatacatatttaaacattcaataaaatgaagactctttttcataggaatttgtctgcagatttgttatgaaaaatctaatgatcttttatttctgaagcatgctgtaaaagataggattcacggcaacctggatgggatcggagaccattattctaagtgaagtaactaagaaatggaaaaccagacattgtattttctcactcataagtgagagctaagccttgaggatgcaaaggcataagaatgatacaatttactctggagactcgggtgaaagggtgggaggtgggtgagggatgaaacactacacattgggtatagtgtataccactcaggtgatatgtgcaccaaaatctgagaaatcaccactaaagaacttactcatgtgacccaacaccacctgttcctcaaaaacctattgaaataaaataataataaaaatattttaaaaaagaaaagttgataggtagattttttttttctgaagcgtgctatttaaagagatttttctcttaaagaattacccaggatttactagattttataaagtctggaaatttatatcaagaaactttttgtttctattggtgacttatggggaaatactatggaaagcatttattgagcacttaaaaaatagatatagact

SEQ ID NO: 24707 - DNA, 1049 bp, Homo sapiens
tattgcctaggttatcttccagggtttttatagttttgggttttagatttaagtctttaatccatcttgagttaatttttgcgtatggtgtaaggaaggggtcgagtttcaattttctgcatatggctagccagttatcccagcaccacagggaatcctttccccattgcttgtttttgtcaagtttgtcgaagatcagatagttacaggtgtgcagtcttattaatatttctgggttctctcttggtttatgtttctgttcttgtaccagtaccatgctgttttggttactgtagccctgtagtatagtttgaagtcagatagcatgatgtctccagctttgttctttttgcttaggattgccttggctaattcagcctctgttttggttccataggaattctaaaatagttttttctagttctgtgaagaacatcagtggtagtttaatgggaatagcattaaatatataaattgctttggccaatatggccattttaatgctattgattcttcctaaccatgaacatggagtgtttttccatttgtttgtgtcatctttgtagatctccttgtagagatctttcacttcctctgttagctgtattcctaggtattttattctttttaggacaactgtgaatgagagtttgttcattatttaactcttggcttgactgtggttgttgtataggaatgctagcaatttttgcatattgattttgtatcctgagactttgctgatgttgcttatcagtttaagaagcttttggattagacaatggggttttctagatacaggatcatgtcgtttgaaaagagggatagtttgacttcctttcttcctatttgaatgccttttatttgtttctcttgcctgatggctctggccagaatttccaacacactgttgaataggaatggtgagagtggacatccttgtcttgtgctggttttcaaggggagtgacaagatgtcttttttcaaagtgggaaactaggatcagtgaattaaaaagtcatgaactagtcaatgtcagagtaaacaat

SEQ ID NO: 24708 - DNA, 1061 bp, Homo sapiens
gttcatgcaacagaaacttgacttagggtgtgcatgcagatggggtgggactactggaactgtaggagaggctccttttggcattccttgtaatattaaaatcacaggtatggctactctatagtattttttcaccttaaaaaaattaagtggtcatataaatagttattaattatagtcatccaaatgtttttctcatttatttaaaaaactcaattcattttactcctatacatcatgtgccttgctattcaataatgaataagcttcgaggaaaatctgtcagttattcattgaaccaaaggcctggggatgctgagccttgcttggccacagacctttagcaattcactttacttttctgatccttgatttccttatctgcaaaatgagttgcagcaaatgataccatcttagctctcttataacttagtattttacaattcgatgaaatttaccccctctctaagaaaggtgttttccaagaaaaaatttttaccatgacatctgaacatagagcttagacacagacagaacttcccagtatacttaaagagtgccaaatcacaaaaagaaaattatatacaagtctataaatatagtaaaaatgttctatatttagcttatgaaattcagttgttagaaaagaaatcaactggccaggcatggtggctcatgcccgtaatcccagcactttgggaggctgaggcgggcggatcacttgaggttgggagtttgagaccagcctgaccaacgtggagaaaccccatctctactaaaaatacaaattagccaggcgtggtggcacatgcctgtaatcccacctactcgcaagggaggctgaggcaggagaataacttagacctaggaggcagaggttgtggtgagccaagatcatgccattgcactccagcctgggcaacaagagcgaaactccatctcaaaaaaaaagaaaagaaatcaactattactcaaattcagtagtagtacattaaaagaaatagatcatgactgttcagagttcatctcaggaatccaaggatggtttaatgtttacaaat

SEQ ID NO: 24709 - DNA, 1032 bp, Homo sapiens
aaaaagaaggaggagttttaactgggcatagtggctcatgcctgtaatctgagcactttgggaagcgaggcaagtggatcacttgaggtcaggagttcgagaccagcctagccaacatggcgaaaccctgtctctactaaaaatacaaaaattagtcaggtgtggtggcgagcacctgtgatcccagctactcaggaggctgaggcacgagaatcacttgaacccaggagacagaggttgcggtgagtgagactgcgccactgcactccagcctgggcgatggagcgagattttaaaaaaaaaaaaaaaacagaaagaagaattctttttgcactggtataggataatttccaggatgtgtactattaagtaaaaaaaaaaaaaaaatcggtgcaaaactgtgtatataaaaatcttcatttgtgtaaagtattgtgtaaagtattcatactcatgtattaaaggaatatatatatggtgatgtgcttttggatttgcttggaatatctgaaaggacacataaaaacttgataaatcggaagagatacagatcaaaggaagacttagttttcattatatcttctgatacttctaaaatgtagtgcttgtattacctatgtgacaaagtggttctgtgtgtgtgcatctccttgagatgttcagaacttgacctatatgccattttacaaatgaaccataatttacttaaccagttccctactttggacatttagtttgtttctaattttgtgattacaaatagcatatttctataactattagtgatccttgcctgaatcagttatgtcatgtgatttgcagaatggcagtttttaaaactctgttactgcttttaccttcaatagctggcatttttctagaaataaaagctttaactcatcagctagagataaactgtatttccttccaaaaggcaagttaaagacttatttcttccctttaattatcaatattcagagcaaggagttggtataatagtcacttttgatgccagcaaaatgttttacagac

SEQ ID NO: 24710 - DNA, 1049 bp, Homo sapiens
tttgtgtgtatcacccataattttaaaacgttaacatttgaaaattcttatagcaacaagaattttatagtttttttaatctcaccaatctcccagcaaggaatctcatgtaaaacctctccacagtgggaatcaccaatggaatgtgttcacattgcttctgaaattgctggtggaatgtgttgttggttctgcttctccacggcttgttgctctttgccttccagagcagaaccagatggaactctggtggtcacagtgtaggtaaattgaagcactttgaatttttaaggatattcttaagttatttatggcagagtaggtagaaatggtacgtggtaaaacaatggaaatttctacccttcgaattcatttttattttctttttaaaaatggcttaggcgttgatttgtcatttaataaacatttattgagggcctaccatgtgccagacatgactaaggacacaatctcttccctcaagttatactcttaaaggaaacatgtagaaaaataagatgcaatgtattaagtacagtgattgtgataagtgcaaaaagtgagttaaggggggagttccatttttattttgtattgctgattatgttttttgttggttagtttgtttttcaagacaggatctcactgtgtcatccacgctggagtacagtggcacaatcacagctcactgtagcctcaacctcctgggttcaagtgatcctcctgccacaacctcctgaatagctagcactatagaaaaatcactcaagctttaattgttgatattttttctcatttcatgtggacatgtcagtgcaacactacttttattttatatttatttatttagagacagagtctcactctggtgcctagcctagagtgcagtggcacaatcagagctcactgcagcctcaacctcctgggctcaagtgatcctcccacctcagcctcctgagcatctgggactataggagcgcaccaccatgcctggctacttttttattttttgtagagatggggcctcgctgtgtttccctgggtagtct

SEQ ID NO: 24711 - DNA, 1048 bp, Homo sapiens
taaagttctcacacaagtgggcaaaataccttcttttaattcttgatagaacagaaataaactgaaatttttcttaaaaaaagattttactaaatacaaaaaatgaacaaaaaataaatatttaaggtaatataaaattgaactaactatctttactcagcttttgcatgtctaggaatttatccaaaggaaataattatgaatgtcaattaaaatttgatcagagaagcagaacaactatgagtgatccagagggatttgtgtagaggacagaccttacacattaagtcagcgtaggagctggttgtgcagtctttgtatgactgtggtcctttgtgtggtactgagcctgaagtcagcagggcccgtagttaggaagggaagatgcatgtgaagtgggagtgagcaaggacaaacggggattcacaggttgagctaaaactgataaagtgaaactaaaatttgcatctgcctctcattgtttccaaacaaccaacttcaatgatgtggaagacttcgagatgatctaatgcattccaccatggagctgcacatgtacaagggccaaaatctggagaagttgaaagctggatctgttggacccagatattaacccatggagatagagctggaattgctactggtctggttgctggctcctttaacaaggtgaggcagcatgacaatgtatgtgagctgcaatggtgcctgaccctgcaccagtcttccaagcctaagcatgattgctgctactattccaccatccaaatctcatgcaatttttttatggttctcattagctcagacgcatgcagggaggcggggtctgggaaatgtaaagtccagtttacgtgacaccatacaaagtcactgtgtaacgcgtgtcacaaattaactacagagatttttattgcagtattacttgtgataataaagaataggatacaacctaacttccaacaatacagaaatggttaaaaatgtatgaaacatccacacattagaacataatatattacaaagggggctgggtgtggtggctcacgcc

SEQ ID NO: 24712 - DNA, 1515 bp, Homo sapiens
tcatcctgtttgtaattggatacatctcttatttcataggagagatcctgcatacagtacattcccgccagaaggtgttttcgtaaatacgcttggccttctgatcctggtgttcggggccctcattttttggatagtcaccagaccgcaatggaaacgtcctaaggagccaaattctaccattcttcatccaaatggaggcactgaacagggagcaagaggttccatgccagcctactctggcaacaacatggacaaatcagattcagagttaaacagtgaagtagcagcaaggaaaagaaacttagctctggatgaggctgggcagagatctaccatgtaaaatgttgtagagatagagccatataacgtcacgtttcaaaactagctctacagttttgcttctcctattagccatatgataattgggctatgtagtatcaatatttactttaatcacaaaggatggtttcttgaaataatttgtattgattgaggcctatgaactgacctgaattggaaaggatgtgattaatataaataatagcagatataaattgtggttatgttacctttatcttgttgaggaccacaacattagcacggtgccttgtgcagaatagatactcaatatgtgaatatgtgtctactagtagttaattggataaactggcagcatccctggcctgttgtcatgcagtcatttcctgttaattctgggagacaatgatttcacaactagcgggaagcagtcctaaaagtttaaaatccgataaggaatatctgggacagggtttagatcatgactctacacagataccatgatgagagtatattaaagaaatttaggaaagcacctggttcctttctccccatgcctgccttctgctccctccccagctggtttgggctcaaattgtccctggagactagggtttatgttagggtattgatagattagagcaggtggttgaagagatcttctctggtcagacttggaagaatttccaaaactgaagttagccccaagacttccctagggttgatgtactttatgatccagatgctaaacttcttagaatgaaaatatgcttcaacacttaagtagcatacactgccctacaaacctcagagagcacttttccccaagttcttgtttttatttttgaaagtactcacacagcacttactatgctccaaacactcctctaagcactttacacatattagctcattcagtccccagacagacgggatgaagtaggtattgttactgttcccattttacaggtgagagatttgaagcctggggaggctagtaactcaccccaaggtcacacggctcatacatggtgggactgagactcagatgcaggcagtctggcacctcagtctggattctaaccatttcactaagctatttttgtcttgtactactttgacccacccctgaataaacctcaattgctggagtggggtgtagttattaaagggatgctttttaccttttgctgt

SEQ ID NO: 24713 - DNA, 1032 bp, Homo sapiens
agtgatgttgtgtccttcatattgtatcatattagtagcacatctctggctattgagcaatgctaagcttgattattgggttacaattgtgataacctgatctctccatcataattagccccttgtgactaataggtaatatctgagggtgatacttgggcactatgtgactattaatttctttatcagccttttatctgatggtgttaatactcatcgatgatcctcatctaagttatttaattaagagttgcagcattgtttttgtaattctgccattctttctgcatttattggctaaagctcttctgtaaaggggagctttctctcaataactaggggttttggttaccctaaatgttagaaaagcaggagacatgtttacttttttgctttaattactcatagtcacctctaggcatggcagatgagtttttgcatgtattttatctcttttttttattttttgagacagggtttcactttgtcacccattttggaatgcagtggtgcgattttggctccctgcaacctccgcctcccaggcttaagcaattctcccacttcaaccacccgggtagctgggactacaggcatgtgctgccaccacacccagctaatttttaaatttttagtagaaacagggtctcacaggccaggcacggtggctcacacctgtaatcccagcactttgggaggctgaggcgggcggatcacgaggtcaggagatcgagaccatcctggctaacatggtgaaaccccatctctactaaaaatacaaaaaattagccgagtgtggtggtgggcgcctgtggtcctagctacttgggaggctgagacaggagaatggagtcaacccgggaggtggagcttgcagtgagccgagatggcgccactgcactccagcctgagtgacagagcgagactctgtctcaaaagaaaagaaaagaaacagggtctcgccgtgttgcctaggctggtcttgaactcctgagctcaagcaatccacccacctcagcctcccatagtgtt

SEQ ID NO: 24714 - DNA, 1023 bp, Homo sapiens
caggtaggatcagttataggcaaacaaaatgatagggaatcataattcaaaacaggcaagactactataaaaggaggcatgggttggaacccagagtcaacagatgcaaaaagcaggagggttccctggggtactggacagggtgactcattagggagctgattgattcagaatagctacgcaagttcccttccccaaccacaagctgagtggtggacaaaagcagtgtctctggccagcctataacaactgagtgatgccaccgaagctgggaaagcagggcagtgcccccagacacttgctgacccgcaagaggagaacagaagcccataccctagttcccccttatccatggttttgctttccacagtttgttacccatggtcaacacagtcttaatatattacatggaaagttccagaaataattcatgagttttacattgcaggtagattctgagtactgggatgaaatcttgtaccatctgctctgtccttcccaggatgtgaatcatccctttgtccagtgtatccacactgtctacgctgcctgcctgttagtcaatcagtagctgtcctcgttaatcagatcaactgtcacagtatctcagtgtttgcattcaagcaactcctatttaacttaataatgacctcaaaatgccagtagtgattctggcaattccgatgtgccaaaaaactgtaaattgcttcctttaagtgaaaatgtaaaagttcttgacaataattattttaattgtatgctgaggttgctaagatctaaaatatggcttagatctaaggtatgaacaaatcttccatccgtgaaattgtgaagaaggaaagataaattcgtgttagttttgctgtgcaccttaaacttcggaagttaccccagagtgcaggtaggcacttagttaaggtgtaaagagcattaaacttgtggatggcagacgtgaatggaaacgtgttccaactgacagccactgggtttggtactattcatggtttcaggtatccactgggg

SEQ ID NO: 24715 - DNA, 1202 bp, Homo sapiens
acttccggcccgggagcgcgcgggttgattcgtccttcctcagccgcgggtgatcgtagctcggaaatggcgggtaagttaccgggaaaagtttaccaaggggaggaggcggccagatcggggatagaacgccgagacggtggtgacaatgcccgcctagaactttcgggctgtagcctgggttccagaaggcctgcttgggaccggaagcgcggaactctcagcccagcagctccttgttggcggcggtccgcgcccccgcccccaactgcttggggttctgcgccttctgccagcaatccggcccctaccgagggccgaagacgccagggaaaagcgtcatgatttgggctcgtaaaatgccacatgccttggggcctgtttctcttcccattccttttgtccactgctgcttgcttcagctcttgtacatctggtcctgttcccgccagctgattttaatgctcagatcctcctcctcttccaggtctccgtctaccttccactacagtcaacttctgagctagcgcattgctgccttgccctgctctggcgctcccacttggatctcgactgacttcgtagtcgtctcgttaatctgtcacactttagtattccgaggatcgtatttagatgccctttgagaaagactttgttcctgaactgctcccttctcttttagggttggactactataatacaattctcttgtgtacattctagagacccttcaagttacaacatttaataatgtataattgctattactttgtacgtgtattaaggctgttttggtgtgattatttttttcgattacttatcttttgaagttatggacagtttctttttcctgagacagggtctctctgtcgcccaggctggagtgcagcgatcatagttccgggcagcttccaactcctcgtaggctcaagcgatcctcttgcctcagcctcccgagtagctaggactacaggcatgcgccacaacattcggctaaaaaaaaacaattttttttaaccttttagagacagagtctggctgtattgcctcaggccggtctggaactcttggcctcaagccatcctctcgcctcagcttcccaaagtgttggaatgacaggattgagccacttcgctggcctttgttgcttttatcatctctttacagggcattcctcatagtctctctacattaaccattcc

SEQ ID NO: 24716 - DNA, 1022 bp, Homo sapiens
catttctacaaaaaataaaatattagctgggtgtggaggtgcgtgcttgtggtcccagctactcaggaggctgaggcaggaggatcacctgagcctgggaggttgaggttgcagtgagctgtgattggttgtgccacaacactccagcctgggtgacagagccagaccctgtctcaaaaaacaaaaaacaaaacaaaaaagaattgggggtatagggagtgaggtaggaagataagtggtgatggtaagatggtacaatgtttgaaatagagattaaggaggtataattgtcaataatgataaataaaggctagggcacatcatgggaataagtggctaaggtacagtaaagacaaaattcttggggaggaatcaaggaactccaaggctggattggaagattcattttcattaattttgaagttaccaagatttaagtcagatgtagtgttggaaagtgcaacagtgagcctggagctaaattattcaaagaatgagggagagaggtggagcatgaactttaaagtggtttattcttagtgtgtggggagagagacattagtctgaaaccagcaatgaggagcaaggaggataccttgttctagcagtatgaagacagagaaaacaaccactacctgagaggtctgtaagacaggagcatccttaggggagagccatgtgtgccaaagaactgttagcgcaagataggagagcatttgataaagaggttggggatatggagaattttggtggtaactgacctctaagtttcacagtggtcacaatgagttgggaaggggtgggaaattagatgagtatttttatactactgtataatacagggatgagaatcccagtgataagggaatttttaagaattggactgctgttaatgggaataaagagtgtgatgggattaattatggcatctctagggaatatttaatgttgagatacctcattttgcagattgtttgtgctgatgggaatgttgccagcacactggggccactcttgtgttt

SEQ ID NO: 24717 - DNA, 1049 bp, Homo sapiens
aggcttggtagctgcttgcctagccaggtcctaatttaacactacttctctcatttgaaatgccttctaatactggtaatggtagcagcagcagcaacagtagcaatagtattaaatgtctgacatttagtgagtacttatacaatgtgccagttttataagtagtttacatgtattaacttatttaacccaaacaacattcctgacttaggcaacattcctgagttattctattttatagatgaaaactgaagcacattttattgtagattttttttttaagtatagtttaaaatcttgaaactacccatgaagttaaacttgtttatatgtagggttaatactttttaatgactgcaaaaattcattccattattgctattttttccatttcagtgaaactgcttttggttacaagggtctaaagatcctgttatactatattgctggtagcctgtcaacaatgttccgtgttgaatatgcatctaaagttgatgagaactttgactgtgtagaggtaagaacagaaatactttttaaactgttttccaatttaatttattttaaaataggttttaggccaggtgcggtggctcacacctgtaaccccagcagtttgggggaccaaggggggcagatcttttgatcttaggagttcgagaccagcctggccaacatagtgagagcccatttctcaaaaaaaccacaaaaattagtggggcgtggtggcatgtgtctgtaattccagctactcaggaggctgaggtcagaggatggcttgagcccaggaggcagaggctacagtcagctgagatcatgccactgtactacagcctggatgacagagctagaccctgtctcaaaaacaaaacaaacaaacaataaacaaatagtttctaaaaattaaaggtttgggctgggtgcagtggcttgtgcctataatgccagtgcttttggaggctgaagtgggaggatctcaagcccaggagttggaaaccagcctggacaacatagtgagaccctcagctacttgggaggctgaggtggga

SEQ ID NO: 24718 - DNA, 1050 bp, Homo sapiens
agatggttgaaaggataggaattagtagcatgttgtattagccttttgtagtgtattttgtcctaagcatcttaatttccctgttttgaatgctaagtagcaagggtcttggtttagaactaatacccatcatgcatgtaaacggtatgaaagagctgcttagtaagttaacacaaagtgttcttgtgtcagtccttgtggaaatagatacaatacaaacattacagctgaactcacggcaaactccattaagtaaaaacctggcctcattgttcaggaaaaagtttgaatagaatacaagctcattttgttgaatgtaatgtcaggcttttagggactgtattgagggataaggttttgttaagttgagaccaattcattaagttttattgcctggtgagaagcagcaatactttattgtaagacttcatcaaatattcatggttaaagagaagtagtaaatgtattcaatcaagtggtcttttgggattttgaaaaggattatgaagtctgctcagctgataacattgatagaggttgtttaacaagggtaattttaatctccgagtttagttttgttgtccagtcttgtctcttttttactgtcacaaatccaggtctgtaagaattgtgtcacattctaaggataaaagaatgatatatccattcatataatttatgttatttcctaaatatgtatattttaagttatcatcttagtttgagtttggcatatgagggaattgtgacccatctagttgtgagattgctattcatttggtcagactctagtctcatctcaccactgctggtgatcttttcatgtcttggataatatgatttctttgacacatataaaataataagcaaccttttgccttggccagttcagactgtcatgaaggggtatagtcagctgtttctgcataatggaaatgtccatagcattgcccttattattgtacttggtatcaggtcacctgccttctcttatttacttttatattatgctcatctcagttttgtgtgatgcagtttgtgcacaggaag

SEQ ID NO: 24719 - DNA, 1140 bp, Homo sapiens
agtgctatgttgaacactagattgtgctttattttttccgcccaacttcacgtttccatgcaccaaaatgttgatgctataaatattggatgccacgcttacctgacaggcttcttccatcccacctgggcgcgggggctcagagcgagcgcgcgagccgcggctggagcccgcctctcgcggctggagaggactcagccggccgcgggttctgctgcttgcccgggtgccctagccgcttcccagccagggctcccgcagtcagccccgcgcgcgcacgcgcgctcccctcgggcggcctcgacgcctcagggcttcggcagggctgcgactggccggctccagcgggcggggcggcgagcgagtgctcgcggccacgtgaccgacgccaacatggcggcgcccagtggcgtccacctgctcgtccgcagaggtaagcgcgtggaggagagccccgtgagggttcgcacggttgctcactaggtacgcacccgggtccaaagggatgcgcacccgcgctcagacttctcggcgcacacgactgtactttcagtgtttacgaacacacgcaggcacacacgatgacacattcacacaccacaggatcacacatacaaatttgttcactgatcacccgcctagaacacgtcaccacgtggcatcttttcgcaattactccttgagatttgcgggccattgtctgaagtttttttccccaacttcggttgtatcattagtgtaaccaacatttattctgtatgccgagcaaggaaacctatggtaattctgaaatgcatctggacacccggttcccttccctagagcttttatgcaggcatgctttttggggacttgcaaaatgtgatggttttcttccagtgacttaaagttaagaagataagaaaggatgactgggtagttctaagtaggttttatcctgcgtgagtgttgagattttagtaaatatacaaatgcctttgcagcagaattggggaaatctttgttggatttgaactaggtgctgaatctttgttggaaagaactagaaagtttttccaaggacgggggaagaggaaaactatcatattttgaggagctacttaagcgtcaggcatgtaggaacagttttgtgaggtaaat

SEQ ID NO: 24720 - DNA, 1047 bp, Homo sapiens
ccaaccgcaaaacaagaatagaatactatttttaaaaactttcatggggctgggcatggtggctcatgcctgtaattccagtactttgggaggtggaggcgggaggattgtttgaactcaggagttcaaaaccagcctgggcaacatagagagacccctctgtctattgtatatatataaaatatatacatattatatatttccaaggaggaaagggcctagagactatatatatgtatataatctccaagaggccaggtgcagcggcctcttccgtcaagccttagcacctataaactttataaaacctactctctgtgaattgtgcatgccactaatcttcatctagcaatacatttctgctcattctttaaaattcatctcaagtaccatttgatttagacgagccacctcttggttccagtggcttcctgatcatacctctagtgctatattgtaaccatcacttaattagttcatgattttttctcttctagactataagttacttgaacatatggatttgagtcagtaggtataggtgagacatgggaatctgcatgttcaacaaattcctcctggcattctagggctccaatctcaggtatgtttgtttcttttttttagacaagagtcttgctctgtctccaggctggagtgcagtggcgcaatcttggcttgtcgcaacctcccgggttcaagcaatttgcctgcctcagcctcccaggtagctgggactacaggcgcacgccatcatgcccggctaatttttatgtttttagtagagatggggtgtcaccatgttggccaggatggtcttgatttactgacctcatgatccacccgcctcagcctcccaaagtgctgggattacaggcgtgagccaccgcgcccggcctaacctcagttttaagtggtttttaaaatctacttcaactctgaaatatcaaggcttttcctccctgcaatttaactggtattggggagggcaggtaaagctttcgggtagttgattaaaaacaacaacaaaaaaagcaggggccgtct

SEQ ID NO: 24721 - DNA, 1030 bp, Homo sapiens
ctcgggaggctgaggcaggaaaatgacttgaacccgggaggcagaggttgcagtgagccgagatcgtgctactgcactctagcctggtgacagagcaagaagactctgtctcaaaataaataaataaataaataaataaaatgcattcctccctccatcatacttgaattctataatcctaccttcagatttaacctataaaggaaaataaaatgcagcttttagaaatggatgttattactgaatatgaaaatatttaaaaccataacctagatttacattccaaatacaaattttaaatatgaaaaaatgtgctgcaggatccagaggacatagagcaatttcaagagatgttcagactgcacagtgtgctcttccatggagtgcaggaagaagttgcctataattttcagcgttcaactcagactaggtgctgatagaatttttgtaacactaaaaataattcttattattacctttgataacagtaactattctagtattcataaaaaataacatgtagatttactccctaagaaaaccctatatagagttgctgttaggtcatcaacagtagcaatactacgatcatctcttgcaagatcaaattagtataaagcaactcctcactgttctgggctctcctactcccctgaggtttctggtgatttcccactggtgtctctaaaaacatcagattagtccacttgccccttgtagtaattagtacacacctgagtcttgtttccccaaatagctttaccaaaacaccgtgtgcagtgaatcctgaatgaatgatagtgtgtgggagacggagggactatttctgtctctgaagatggtcatcatgcatcaaatttgttgtaacattggtggtagcaatttggaaattagatgtagttataaggtatcagcagtgcttttgtcaagaaatgaattatataggaaattcaagagaccatttctacattgatctacattagttactgtagttcgggtatcctttctgtgaccctgaatataatagaga

SEQ ID NO: 24722 - DNA, 1978 bp, Homo sapiens
aaattgattatgataaaacagaaattttgaagtattttacttctaaatggatacaccaccaccatttaatgtttgttaaagcagtgcataatctaaatgggggttgtgcattacgtatgtcttttacttcttagattttaatcatataagtggtaaaattcaaatgtggcaaatttttcttatcaactcttgttttggttcttggcaaaattaaggtaataaattaagtgcatcttttgaaataaagattagatttagttatcctgtgtagtcctccttcactccaaattatcactgcatcccattgggtttgtgacagtagtcattaagtatttatttttattttccttttattgagatctgtctatcaccatttttttttctgtttacgttttagtcgacctcttcaggatggagatattatcaacattgatgtcacagtgagtaaatcatataaaaaattgtctttgatcaacttcagaattgctggtagcaacaggaagagtggattgaaaatgtgaactgcaccagtggaagtgctgtttacttctagacccagacgcaagcagctggtttccttttttgtctttaactctgtgtttattccaagtaaacccaggcctgacttgaatttagggctgcaatcagatgcactgagatcaatgttggcctaagtgaaatgtcaacccaatcctgctatgtgtcatgtttttgagaaggtgtaattgttattgatccactgtgtagttaacgcagagcaccacagcactgggcagctgctgaagctagatatgtatgagatgagctaacacgaagaaagccagcatttttccttcactctgccaagattgatcttcctcttcctgctgattttgagtggggcctgtcattatcttactctgtcattaggggctacattggcctgtgtatgtcagtctatttggacagcaactcttttgctagcagtgttccctagatttattaaaatccctgaaggtaacgttgagttccatttctggtatagagagccttgtgctcaaagtaagcagagtggtttttttgtctgaacttaagttttcaccaaatggttaatagcctttcttttaagtaacaagcctaagtaatttatcatagggacttcaaattgtacaagatgtagctttttctcattttcttagccttttaccattctcagacttggattatatgtgcttttacatttctgtttattaaagaattttgtaatgatacctttggattacctagattataaataaattctgtacatctaatgattaacaaatacattttaaataaataaacaaaatttaaacatcttaggagaactagttgaaatgacaatattcagggaatacaatttctattaataaggaagtgtttttaagaatagtatctagaccatgaaactgaagtaggagtgggaatgagataaaaataggaatccaatggtggaattcagtctgacttttagtttaagttaactaaaccttttttcttcatatcaatcatatgaggagatagccaacgattctttcattgctgatgctatttcctgtatcattttatcctacttaaaatgcttgaacacttgcaccacatacatcctgttggtatctttccaactcagaatcatgtggaaggaggtattttatgaagtatacctaaaacagagttcttttcatgagacacttttattttggattgtacctgattttacggttttacatctattttctcatctagtcaccctatcatgaaatgttaccattttaatgttttgaatgaaatcaactactcttccctactgtttccagtgtgtccaaagaaaatactctattccttttctaagtttcctgaatacttaataaacagttttgtatttaacattcaaattacttcacaattgcaaaacttataaagcaaagtgaaatatttccaagtgtctagaaatgtgaag

SEQ ID NO: 24723 - DNA, 1050 bp, Homo sapiens
cttcagtcacccttctttattcacccttctcaggtgattttgtcaaagtcatttgagattttcctgtggactatgaattcagagaaactactcattgataatcagaggaggagataacttttgcccccaatatctttgtaaatgttgagaatttcaaacctgaaggcagagaaagcatggctttgggccatccacttcactaaaatgcaaacgttccttatccatagttaagggctactttccctcggaagcttctctcttgactgccgactacctcgttgctggagaacttcagtggcctaacctaagacggccccttcttggctgagggccactgttttaaagctttgcaattttagggagcggtctgggtggagtcttgtaactgcaccccgaaacatttcccacgcactggctgcgttgatggctgttggtgtctgcggttctctgtttcggcccgtgaaggcagaagcattgcttgtgttgagaaagccctgactcaccccgcagcctctggctgtggtttgctcacacgtgtttctagacctctggggctggcattttttgtgaattatttcaagttcattcctgttcctcgggctcacctctgtgcaagtgcttgcttgccctgcatgcctaaaatggcagaaggacctcaactccacctgataacttgtcagtgattgtttgttctaggcttttccagcactactgcattatcatctccatgtttgtgcaacgtaatcataaagatacgttgtacttctctggaactttcccctgaggaacttttgaacatctaaagacgatagttttgtaatccttgtaattttccagtctgaggtaaatgtttctttgttaatttttaaggaaatgactatgactttgatgatagcaccctgagcttttaattttaccgtaaaacagaagaactctgtatcctgagcctgtgtagaaatgaggcatatcatacttataggcgtgtggatatgtgtacagacatctttcacttaatgatattttggcaaagttgactacaggctatttgtc

SEQ ID NO: 24724 - DNA, 1027 bp, Homo sapiens
taattcctcccaccaattatagcactttactcagattaactaattaatcctcaccatataccccagagacaaaattaaagataattctttcataactgtaaagcaccttttatctaaggattactaacactgatgcatttgtctcccatgacaacatcacaagtttcagagatgacaaggaaaatcttcattaccatttcaagaactgggaacaaagaaaaatcccgttccaggacgcaaaggaggagatgcgggtagctgaacagaaacttttgaagattaccatgggaatacacctgtgaacttccaggtggggctatgtctgcatcgggtcagttttctttatgttgtttacaatttccagggatcatgtccacgataaagaacaagagctggttcacaggctactgaaacatatgcctgacttcctaaagaaccttctgttttctacttgcccactcgtctccatcacgctgttgccctgttgtctctatttgccaaagttctgtttgtgatctagatgaaatgaagctgatagccaaaagctacaggaaggagagaacctgaaaaagacattataaactgagaatccttaaagaggagagtgggagaggcagggtggagaatgggagagaggaagggaaagaagtcagtctgtcaaagttctggaatcctcatttggggtaaacgaagggaaaagaggggtctgcgctctgtggcccaatattaggtttgctatgatttctttgtaattcccttggcagcagattaattttacttgacttggcagcataggcaactgctactgagctgcagccaaggctgggaactatatcattgtgcattataccatgggtgcttcataaagggggatctcaaaaacactcagggaggcacaaatggtcattttggatacacttctttcatttggccaagcagttgcatttgttctaagattattagtgcaaacaacatggctgggtgctggtagtgatttgctggtttctcttcatggctgacagctatg

SEQ ID NO: 24725 - DNA, 1046 bp, Homo sapiens
cctggctaacacggtgaaaccccgcgtctactaaatatacaaaaaattagctgggcatggtggcgggcacctgtagtcccagctactagggaggctgaggcaggagaatggtgtgaacctgggaggtggagcttgcagtgagccaagatcgtgccactgcactccagcctgggcaacagagtgagactctgtctcaaaaaaaggaaagaatgttgccaagttggaggcaggaccaggcctcttggctcctggtttattcttcttcccaccctatttactagcacatattattgaaagctgcccaacaaaactctatactgatggaaatgttctggagctgcagcatccagtatggtagccattagtcatgtgtggcggttaggcacgtggaatatggctggttcacttgaggcacagagttttaaatgtaatttaaattaatttcaatctgaatagcctcacggagccagcagctcccatatattgtacaaagtgaatctaggcttttaccttcatgagttgctggactaggaatcagagtttttcaggagattttatttgaccaggttaaattttataaaagacagttccatggccttatgaactagataaaagtaaataggaaaagttctctatcactgaacgaaggaaattatagtagaaagtggaattatacttttatactcatttagagtgacctaacctgaggagcattgggtccctaccatttaagggttttatggtgctcagagtttgggaaaatgacagcaatcattctttcatgatggtgtattcgaatttgtattgtgattcaccccacagatccaaaggcctcaagtaaatggcatttgttccataaaatttactgtaaaaggcagaaaaatacccatagtatatctatattttatttggatttgtgcttttatttagagaatttattttctaacctttgtctcaataaactgccgaagtcaatcttttgcctcttttggagttcatattctcctgcaggaagaaactacccaaagctacaatcagcaatgtat

SEQ ID NO: 24726 - DNA, 1032 bp, Homo sapiens
ccactgcactccagtctgggcaacagagcaagactccgtctcaaaaaaaaaaaaaaaaaaaaaaagaagaagaagaatgtatgcatgcatgtgaattggactgtggaatttaaagattttaacacttctctatttggaaagtaaaattcctacccgaaagttaagcgatcttaaaaaagactttaccatcctagagaaaaatgggcgcatgggttggttcgattgtgatgcaagattgtgagaagtgaccacaggactcttgtcatcatcagttgtaaatatttgtgggtatgggttcaaacactaatacattgaagaaatggtgtggcagttctcccccaggtaatactgtcctccgtagttaatgttttcttttcatcactacacagtttattcttaaaaatgctttaagcacatctctctgtactttcatatttttctcttctgctctgtagcaaaatcaccaggacagccaatacaagtggtttatgtaccatcccatctctatcacatggtgtttgaacttttcaaggtttgtaaaatagtattacataacctttaccagtacttttctgaggttaggaatctgctctgaaagccaaatattccactaggttctcctattaagaagtgccatttcacatcagtatcatatcacattgctggagatcagctttttatcaacacagggagacatctccatgtagtggtgagctcagactatggagtcagaaagacctgggtttgaatcccaattatggctcttaatatgtgtgtgaccttgggcaagtcactcaacctctctgagcctcagtttccttttctgtaaaacaagaatactgtccaggattgtttatgactattgggaataacatactaagtgtccagtacagtggcaacgtattacatataggtgctcaatagagttatctttatgtttttataaaacaatatttagaagagtgattctcaacttgctaccctcaaaggaccagaattctttttttggtctggcttttcttgggaggggga

SEQ ID NO: 24727 - DNA, 1035 bp, Homo sapiens
ttgctgatgtcactcctgctgttctttttgagaagacaacgtttattacaattcctcttccttcttatgtgaccagttttaggtgtctacttttgtttaactagagtttttaacttttttttttttcttttttttaagctgtgctctgaagtttcagtgatgtgacttggtgtgggccttttcttacttactgggctgtggtctttgaacttcccattattttcttgatattttccttttcactgtgtgtttagtctctttctgatagtcatattaagaggatgttgggcttcatgacatcactccctgttttttatcgcttcaactttttattctattctgtgagatttccttgacttcagattcccagcccttctattgaacttttatttccattatcttacaaatttccaagaatccttatttttaaaattaatccctttttagaattctgctctagttttattttattgctctaaggatattatttttttttaattaatttgcctctgtaccctgcattgtccgtttcctgagtttccttttgtccgtttctctctcgtttgttcattttaaagagataggcacaaaaaagtcaataaatggcgatgccatctgtttgctgtaaaaacaatatgaatgtatcacttttttttttttttttttagctcagatgctaatgtgtctattttttggttagttgtgtgtcagctactttcccgttaaggtttacagtcaagaaaagacccattggtcttctggtttggggcttaagttgtgctgcagcatgttctttcttgtacctttttctgcttctattagaagtgctttatttagcattttggtctgcagctgctttctattgctattatccgtcattgcatagatcaaggtttactgagttcttagactctcagaagagattacttctgtgctggtggatgggcttaacctcaggaatctgtctttatgatgtaaagaaaaattcataatgacccagcaatcctactcctatgtctatacctcaaaggattg

SEQ ID NO: 24728 - DNA, 1033 bp, Homo sapiens
ttcctaaatgaaacatttgtacaacatttgatgtttttacttatgaaatattctcctcccccaagaaaatttaaactttttctctctatttaaaagctaagaaatgttttaaaggaaaaatgaaattatcttcctttagcttatttttaaggtaaaacagctttttactctgttattgtggtaatggacagaatattacatacaaaaatattctgggagagctttttcctagttggttttaaatcattgtgccacctgaaaggtttttagattttataggagctaatttgtccaccagcattaatgtaacacagtgtagttatgaaaatatattgaaggacaggaagtggacacgaagtgatttttgtaacctgagcagttaatgaatgtgccaacattttctaggaagggacagcaagaatattctgctctgtagttaaaatactggctggcttttgatgtcttcatgcttaattgtgatcactttcttgcactgtgatgtttttacgtgaatatgttgaagtagaagtctaccatattattttataaaatgttttctgtatggcaataaactgaaaacatggatcaacccttcttttgaaaataaactgagtcaatttagccttttaaaaatatagtcatctcttttaaatagaatcctcttccaccatcaaggctcaacattttgtaagcatccaaaaaattggtaattagggggcttgcactaaatttcactatcttcagtagagaggaactgtttggaacttagatttccaatgtgtatattctaatggagaaagcaagaggtagagtttgtatgtttgacttaccttagatttttattttccatacatactgcaaatgattgacttgttgcataaatgaagatcttctgttgtgtgcttttcaaacactgtaaataaatttgaaatttgaataactttccacagtataactgtaaaaaaaaaaaaaaaaagtcttaatttaaccagcattaccctctgcttgtaccaattgaatggcagaactacta

SEQ ID NO: 24729 - DNA, 1086 bp, Homo sapiens
gcagtggtggggggtagataggacttagtgtggccccttaaagagcaaggtccaagtgattttctctggtgaatgtcgatgtggatctagtctccagggttagatccaggcaggtaacatcaaagtcagttgataagacctcttatgcctgtgaatggaaggccctgataaaacttcattattaatgttctgcattaatttagcggatgactatagtcatttcacataatctaatacatgaatgtcctgtatgggtgactgctgagggtttaacaaaggagagtccatttatatttggctggtaagatcgatgcttctgtcactactgatgggcaaggatattaacatcaatatctaaaaaaattctgagatttggattgtgatgtgttaaatttctagaccaatttgaggagaatttaacaatagcttttcaatttatgaacatggcgtatatcttttttggcggggggtgaggacagagtcttgctctgagattacccaggctggagtttagtagcatgatcttggctcactgcaacctctgcctcctgagttgaagcaattctcctgcctcagcctccccagtagctgggattacaggcgagcgccatcatgcctgactaattttcgtatttttagcagagacagggtgtcgccacctcaagggatccacctgccttggcctcccaaagtgctgggatttataagcgtgagtcaccgtacctggccagacatagcatatatcttcctttacatagattgcctttgatttctttcattgttactttgtagttttcagcttacagattccgcgcatattttgttagacttaaatctaagtatttgctttttttttaacttacaaatttttttaaaaaaacgtttttcctctccaatgttcattgctaatacatttcacgtttgaatctccagttcagaaaaatcatggcctctggagttttactgaggactagagatagctaagtaacatagttccaccttattcacttggtctttgatgtggtgtccataattgagtaaatggcagtatgtccaatggcaacaccatgaacttgactttgccct

SEQ ID NO: 24730 - DNA, 1065 bp, Homo sapiens
ttctgttctctaagatgtagtttgaaccagccaaggatgatggcttcaacatgtctccagttgttttgccactccagggcctgactcaaaccaaaataagacttgctgttaccctgagacaagccaactgtcattgctttagcaaccactacggctacaggttgttgcatcatgccaagctctgtgttctttctaactagtagaatggagtgggatggtatcgtgatggtgaacccaaaacaatggtactaggaaggaggttggccaaactcagagtggaggctgaccctgtatctggttgtagcagagtcggtcctaggggaacaggctcagcagcagcaaggatgcaaggaccagaaggcagcaggggaaggaaaaggagcaggggataggggaactttaggagcagagtagtgttgataactggcatctggaacctacagtttccagttcagagcagtacaccatactcagtgtatacttacactccaagacatttcctgggcagtgatctagaaatgatatttttaaaaggagctgtgtttcagtgttagactgtagttatccaagcagtatcagatagtgtgcagtttttgtagtaaaaggtaaaaatctgaataataaagtttattaataacagttttagttaatacttgactgacattgagacccttgatgcaaaaaggtaagtagaagagaaggctgtaaacacaagaccatcataccctgtggggaatttacaatctaaatataacaaacatatagagtgagataggagaaaagaaatgggatgataatgatattgctgtactaaagtctatttaggaaatggaaatatatagcaagaggagtcagctacttgggcattgatcaaagaaaaataaacatatagaaggaaagaaaggtcgttttagtttataacattttccttccgattctaggtgattatatagctagtttactcttccacccccaagattctggggtattttggctaatgttatttgcaatgtccataaactcagaagaagttagtattaacggggatatgaaagaacctccagt

SEQ ID NO: 24731 - DNA, 1049 bp, Homo sapiens
gtctaaaggtagttagtctgcagcaggtaaaaacatttcctagaaatctttcaaaatctttcaaaatgcagtcatgtatttgattctttctaacatttttttctttccttggcttgggagattataatatctctggaagataaaaatatctttggcttggggcaaaataatttatagttaagaaactaagtttatttatttttcggattctgagtgtgattagttgctgaggctcatttattatctgaaatgtaagtagttaaaagttttcaatagcctaagtcagatatgtgctacttttcaatttgattttgcttttgaaggtagagtgacattagtaataatgggggtgattaaaaaaaaggaatttatatacctaaaatttctgttgacatactggtattgccagcatagttatttcggagaagagggaagctttataaggaatgaaatgaaataactgttcttgtctctgtagtttggcaatccatatagacacaatttgcattattttaaagatatagttttgaaattaatgtgttgcagggcacagtggctcacacctgtaatcccaacactttgggagtccaaggcaggaggatcacttgagcccaggggtttcagaccagcctggacaacatggtgagaccctgtctctactaaaaataaaaaaattagcccagtgtggtagtgcattcctgtagtcccagcttctcagtaggctgaggtgggaggattgcttgaacctggcggttgaggctgcagtgagctatgatcatgccactgcacttaaaaaaaaaaagaaaagaaattaatgtcacaccttcttttgggatagatcattaatttatttaagaaatcaataaaaaacaagataaactaatttacagagattgttgaaatgtcttatagaaggcacagtaaaatacaacagtatccaatccctttctttctcagctctgaacacttatgaaagacatacaacatcaatttctacagaaaagaaaaccccacacaaatccattcttgcagaattctaaaagatagag

SEQ ID NO: 24732 - DNA, 1031 bp, Homo sapiens
agggttaagataattctttcttttcctttatggtgtaaaatcatcactcctgtttgcagtagccttttctctttttccccttgatccctgccccccacttccctttcaccctctacttcatggtgcaaaattgtcagtaggtaccaggcaagagtaatgtgtttgatatatggccttggttatataaacatctttgaataatatataactatttctgggtgagttgattttggaaacctgtgttcataggatcatactatcacatctcactctatttcttacccttctcacctaatactagatttcccagccctcttcatgttgttgtatgtaactctggttcattatttctgactgtaacagagtattccatagtatacctccatcagatttaacgtctccattcccacccacgataaacttacattgcctctaaatctctactgtcttaatgttgtgggccatggtggctcatgcctgtaatcccagcactttgggagactgagttgggaggacttcttgagcccaggagttcaagaccatcctgggcaacatagggagacccaatccctaccaaacataaaaataaaaaataaattagccaagtgtgttagtgcatgcctgtggtcccagctactcaggagtctaaggtggaaagattgctggagccttgaggaggttgaggctgcagtgagccttcatcataccactgtacctatagcctgggcaacagagcaagaccccggctcaaaaaaaaaatgtgatgggcacctttcatctttgtacatgtgatatggacaggaggcagggaaatactgggtagaagagggtggtccccagcgagggccacaccctcaagcctagacccatggcccaaagtgagaacatgcattcctgttttcctgcccgaatgttgccttttccaaaaccatcctggcccttcccaccaccccatcctgtacccatgaaaaccccacaggccccactggtggagtggcagagcggcagaaaaaggaagaagagaagaagta

SEQ ID NO: 24733 - DNA, 1100 bp, Homo sapiens
ctccctagtagctgggactgcaggtgcactccaccacaccctgctaatttttttgtattttagcagagacaggttccaccatgttgcccaggctggtctcgcactcctgagctcaggcaatccacctgcctcagcctcccaaagtgctaagattacaggtgtgagccacagtgcctggccaaattgctttcccttattttgcttgcctctgaatgataattgtgacctccttaatcatattgttcttttaatgggctaacatctcccttgaaattttatttatgctgcttatatgtgacagcctcaaggacacttctgcttggtgggggcagccctggtcgaagcaggtcctcaacttcaaatctgtggacactttgggtttcctgtggattcctgctcgagcctctctttgtccaggcactttcttcagttctcttttgttccattccctgcaggtgcagggtctctgccctgttgctctaaataagcccaagccagagttccagctctggacttacctgtctggcaagggaagaaggacaagaataaatattctttgctttcatgagctctgtagatggtagtgatataaataagtttgataatggtatacaaaaaaagacaaaaatgagattcatactgacgttggggggttggtatgggtgtgatgatgatgtgaccctacaagatgagggacctacaaggtgaggaagtgaaattgacatttcatcaggaatgttcattctgatcagcagctagggctgaggcttatggttttcagttgaatgtagctgtgcttacagtaggctctaccctctcccagtagacctccaggcagaggggtgcaggagtgagagctgactgttacagtttaggaattttgcaacctggtggtcaaacacagccattatttaagcttaaattatatgccattattgtataaattatataaaaattatatattgaaaacaaaggtaataaatactcaaaaaccatcaattcttaattgtcttactacactttgctgctgttcttgaggttatttggtgcccgtctgggggaaataccacataatcatgtactgctacatgtcctgccca

SEQ ID NO: 24734 - DNA, 1071 bp, Homo sapiens
ctacccccagctttcagcctttcctgtgttgtagcaccacaaaagggatctatcttcccaaggaatggactgctattgcttgttacccagtattgcaagctcagttgttttgttcctgtgtgatcctacttctccttttcaaggcagccaaactgccttgcatctttggcaaatcttctatgggacttccctgtacctgcccagtagtaggagacttctattagtaatggtgtaggatcctgagcccaggactgttccttgctcttccaataatgacaaggttttgttttgttttgttttgttttctctttctctagctgtaatgggttttcatctagtcttggagatatgaagtttctggttcttcccccaaggctagaggcttttgttccttgagaaagcatctaaggagggctttgtgactttccttcagcaactgcactcccctcctccaggcctgcaccaccaaggaagactccctctggtcccccaccctcacccagtctttctcatgagcaccaaatggaaatctgtgaagacgatcttgtaagtgtgaactgcttctctgtctgtggctcccagacaaacctgtactgtcacactagttcacagtcagacttctgcaatttgttagaaattttagcaaatccttcctacttgtttgatggcaaccggcatctcttcttcctgtgttctgccgaaggtgagacagagcttgtaccctgtattcttagagacgccttggatttcaagctacctagttgccctatggccttaactatctgatgggttcaagaaaaattatgagtttgtattttatctgtagtttttcttatttctagggtggaaaaggtgtttttgtttgctttctacatcctaggtagaagtagaactcccattgtatctttttgttgttgttttgagacacagtctcattctgttggccaggctggagtgcagtggcatgatctcagctcactgcaacctccatctctcaggttcaagcaattctgcctcactctcccaggtagctgggattacaggcatgtgccaccaggcctggctaatttt

SEQ ID NO: 24735 - DNA, 1063 bp, Homo sapiens
gctagattgcatctgagatgtcacagtgtatgtacacacacacacacacacacacacacccgacacacaccgcacacatatacacaccagcttctttctgagagagttaccaattaacatgtgttgacatatctttatccttcccaggaggaaagtggcaggagcttgtgaaaagttacaggctatgatttaaactatgttgtaattggaccaaataaaataatttctggcttataattattaattttttgctataaactctatcaccaggaataacaggtcttaacatttttagcatattttcctgcagtattttttttgtgtgggtgttttttaatgtgtttgagcttgaactttatgactttataccttttaaaatgaactttataggatgatcatttcccaggttattaacagttctttataaatataattcgtattggctgaaatcatacagatcatgtggcttaagtttttccttattgttggacaactaagacatttgaaaatgattgttgctgttataaataatggaataatgttttatattaaaaatttcttgtgttttagatacctccttaggatggagagatatctatagaactaaaattagttaatgtaagttaagagatttaaggtttttaacatatttttaaattacttttcataaagacagtaagaagctattattgatattttagaaataaggaatttgaggtctggaaaagttaaattactcgtccagggtcacatagctgctaagtgctagggaccactggggaattggaaccccagtccttttccactgtaagtgtttcaagtgtgttccttggaatattagtagatagggcaaggaaaaaagggcttatgagaaaaaatttggaaatgtcaagttaaagctttttaaaaaaatcctcaggccaggcacggtggctcatgcctgtaatcccagcactttgggaggccgaggcgggcggatcacgaggtcaggagatggagaccatcctggctaacacggtgaaaccccatctctactaaaaaatacaaaaaattagctgggcct

SEQ ID NO: 24736 - DNA, 1028 bp, Homo sapiens
cagatgtacaccaccgttcctggctttaaaattatttttaatgttatattagaaatgtttatgtgcatctgcaagtaagtaaactctaaacaatgatatgaagtggttatattgtgaacaataaaccagccttcaatgcagctaaataaaagcccacatttgatctttaaagaaaaatgtctgttgctcaaggaaaaataaaaagctttccatccagtagaaagtaataactgttggctgggcatggtggcaacatgtctataatcccaacacttcgggaggctgaggcaggatgatcacttgatcccaaagagtttgagaccagcttgggaaacatggtgaaaccctgtctctacaaaaaatacgaaaattagctgggtgtggtggcatacgcctgtagtctcagctactcgggaggctgaggtgggaggatcacttgagtccaggagatggacactgcagtgagccatgatctggccactgtactccagcctggcaacaaagtaagactctgtctcaaagataatttttgaactcagagaataaaatgaatgtagttaaaacagaataaaatgttattttatgttttttatattattttattatttatattattttattattttatttaattattttattgagatggagtcttgctctgtcatccaggctggagtgcagtggcgcaatcttggctcactgcagcctctgcctcccaggttcaagcaattctcctgcctcagcctcccgagtacctgggattacaggcgcctgccaccaggcctggctaatttttgtattttcagtagaaacggggcttcaccacgttggccaggctggtctcaaactcctggcctcaagtgatccgcctgcctcagcctcccaaagtgctgggattacaggcatgagccaccgcacccagctaaaacattattttaaaatgaaatgagtttgtttaaggaccaatgattcattaaatcctcagtatgtttgttgaacgagtatgtgaataaccaagcgtgtgcttt

SEQ ID NO: 24737 - DNA, 1034 bp, Homo sapiens
gcccttgaactagtggttaccacctctttacctgtagttcaattgcatgaacaccattctggaaaaatttccctgttgccatgagccatgtttgagcatattcaaaataataacacatatttatgaatatgttcttaaaaaattaaagacaataataaaattacagagccattaaaaataaaagcaatgttttcaatttgtagtctgacctgtgtcactataaaagtggtttcttagctgtgattgttatctgggagcctcttgacatgctattgtgattttattccaaccagggcaaaacgtgtcatggagagccgttgcttggatataatgattggcacattagattcactgctcaaatgtgtctgtggcctcagtaaacattgttaactgactgaaaatgtatttcatgctttatgagatacaaaactgagtggtaaaaataagaaagtgcacgtttctgtcttaagaaaagaaagtaattagtaaatagagatattaatcagaataatgaatgctgttgaagaaatatgtttatgactgtctctattccctaattttcagaatgtttatttttctataagattctaccagatatgttggcggttgtgaaactggaaagctttttagttacttccatttactgacttttttttagagtaaataggggaaaatcccttttccattaaaatctttcaagccacagtgagaataaggattgtttgaagcaacagcagcttagtctttgctgaggtgctttaaaaacactgttagaataatataccttccagaggcatctgatcttgctctaataggcttgatgtttctatctgtctgtagctgtcagaaaaatgaaagccaaatacttaaaaattaatatctcagaacacagatatcccagaagttctcaggtaaattgtatggctttatccaccatactaacaatttcaggttgtttcacttttgcattaatggtaggcttttcaggtttatatttaatgggcttgggtattgagttaggaatgcccggccca

SEQ ID NO: 24738 - DNA, 1054 bp, Homo sapiens
ccaggacatagtgacagtcctggccttgcttcttgccagttctgtgtcctcaggcaaggtacataatatccctaaatctcttccctcatttgtcaaatgggggtcaaaataaccgtaccataaatggttgctgagaggaagaaatgatataatgtaatcaaccccctagctctaagaacaaacccagtagatgtgggtggtgatgatgattggatgcatagacagagcaggggttcaaatccctcactccaggtgctcagacatctaactcagctctcgctgctgcccaaggattaaggttcaaactagctgccctggcatgctcagctttctaaatctgcccttacatccttttctagttgtagtgcctctattaattgatgcacacttttttttttaattaacctcagtcatatctgcaagcattagtcaagcattcactaaatgccagttacgatgctaggcactggggttgcagaaatgaacaacttgtggccgtcaaggatcttgcaacttaatggagataaatataagaaaataaatattaaagtgagataaaagatacaacaggggtgcatacaggagctagaggtggaaggaatagagaaagtaattgccaaggagagtgaaaagggtttccagaccaagtccctcactccatgggcgtcgcattcgtaaggccgacagaaatgtgacagacaggaagatgccaccagacccaggcaaagtatacaagtctttctgatgtgacatatcttcacacagaggaggggtcataacagcccctcagtgtgagggacaatcttctctcatcctcaggctctccctgtggaaggagaagccctttggagcctcctggcctttcttgaggacagaacagggttttgacatccttcagctcctccttgacccatctcacagctcctagctgtgtgcttgcttgctctcttggtgcagaaacacataagacacccagacatgttaaccaagagaactgaaggtcaaactcttggtgaaagtcttgctaggggtagcagactccaacttcaggccc

SEQ ID NO: 24739 - DNA, 1063 bp, Homo sapiens
tgtactccagcctgactgacagagcaagaccctgtctcaaaaaaaaaaaaaaaaaaaaaaaaaaaaaaaaaaaaaaaaaaaaaaaaaaaaaaaaaggaaactggtgaagtttattatgtgattcttttagtgactaaaataaagagaacttttagaggaaggtaatatccacagtaatgtaatgaacatatatgagttatttgttgaaaacactcagaaccacagttatggataaatagtaaacttttaaaaatgtaatttagctgatgtgagtcatgactttcaaagcctaacaacaagaccaggcttgagcaattcttgtttttgagtttatgctccttcttgactgtttccctttttctcatctagcctaagtcagtttgaattaacatttaccaaattattaatttcatcgtattcctcttaccccttgattttatctttatgatgtattttcaaagtctggcttgctctttttgattttgtcatagttcataagctgatttgtagagtagtaaaatcttgttcatgtatgttactttcaaactgaaggagaaggcctgtgtatgtgctcctggaattctctcagcatcccaaaccagtgctcggataccatactccagtgaccggcccataaagagcagggactcaatacttgattgattgatggttctgaatgccagccagtcagttctgggaaggtgggcttatcttcccagtgaaataaaactgagtcattgaaggccatgataaagatttggctttcagcctaagagtaatgggaagctatgcagagttttaagcagccgagtgacaagcccagatttaaatttttaaaataatttatctggatgtttgtggagcagttaagtataaccaagttttagagcacagaaatcaatatatgtttttaaagtttacccaagtgatataatctaagaagaactgataccctgaatagtctctaatcagccctctcaagttatttctcctgactgaaattttgaaaaacgctgagaagcataaagtttgagattgcctttttctgtttttggggggtgcg

SEQ ID NO: 24740 - DNA, 1028 bp, Homo sapiens
ttaaagaggaaatgggagccaaaagatggctagttgacctttcagaacataaccattcattatgatttgtcagaaagtttggcaactgttattccctaaataacttattgtgatttttaaggaaattcaagcaagaatcaaaattataccaaacccccaactggcaaaaaggttgttttccacaagttcatttgcaagccctttataggagcgatgttgtaaacatatttaggctccttttcaaaagtctacccaacccaccctcgggtcaaagtcatgtacaattgcaataaaaattaatagcaaaaccacttttcatgttaataattaaagcatatataagcaatattaagcaatgactatataagcagtaagcaataattaaagcataatagaagcaataatcaccaggatagaaaatattttgaatgctagtgttcagggttaactacaagatgatatgtatgggttgtgactcttttaaaatttgtgtctgccttcactgactttgagacattgacttctttcattatgaaaagtaggattttcctgtccttatttcaggcatatcatgggttctacctttacccatatctgccatgatttgggttgttttcacaaacgaggatgagagaaaaaggcgggtagtgagagagatacctgaggtagctggggcaaaagttgagaggaaaaacagcaggtttaaagtatgagtgagaaggaggtcaaagggcaatgaagggagcactggacattgaaggaggaacacaaaaaggtgtgcattttgctcttgaggggaaagaacattgggcttcatggctccctggatcagccaccagggggtgcttcagcctcagagaagttgtctcttgagtctgggattcggctcttgactgggtagacctgaggaacctccagtgtacgtcccccgatttaggtcccccttgtcttcacttccttccctgttcagtttggataccattgcctatcatttcaatcaccctcttgtccatattactggttctccc

SEQ ID NO: 24741 - DNA, 1054 bp, Homo sapiens
cagctctctcctgtgaatggtgcctgtgccctctttaaaggtatgtctcttgcagataaattcaaacaatggaagcagctatctgtctgaacctgacagtacttattaattcagaggacagaatcatagttctagcttcatcttaattaagtgggtttctacagtttttcttcttctaaaaggggaacgtgtgtgttagtccatttgcattgctgtgaaagaatacctcagactgggtaatttgtaaagatatgaggtttatttgggctcacagttctgcggcctgtacaggaagcatgatgctggcatctgctcctggtgagggcctcaggaagcttgcaatcatggtggaaggtgaagggggagcaggcatgtcactgacgagagctggagcaagagagagaagactggtctcaaattcctgggctcaagccatcctcccgccttggcctcccaaagtgggcctggcatcttgtaggttctcaataagtgtttgtagttttggtatctggagccaactagaatttgatctgaaaacaaagtttacattaaataacaaaactgaatttccccccattctaagtgaatctccagaatgattcatttccctatctgtaaaatatgaagactaacccttacttcatggagttattaggggacctcaatgagataacacaggaaagtccttcataaacaatccagctctattaaaatagaaggtttatcatggaaaaaaccaaaccagagcccttgataaattcttagttattgtgttattgttttgggtttttaaaaaaattaatatgtgctttttaaggaataattttgagcatctgaagttaaaatattgaaaaatctctttgctaaaagtcctttccctgtgggtaattttatgctgtatattagaaagcacaggaagtccaacatcttgcatggagttaatggtaaattttgtgtcttgagaactatagatggaaaattgttttctaatatttagatgtttcacccatgtagctgtgtatgggatatgggatgggggtgtttgtcagctcag

SEQ ID NO: 24742 - DNA, 1035 bp, Homo sapiens
gtttgcttggaggtgccctttggtggcccgattatttatgtccttaaactcttgtgcctgaagccgagatgcctgtctacctttccctgatttggcctctccctgcttaacccctttccttggaggaaatgaagatgatctcagggcctggttgtcaggattgcccacccctgggaaaagctggtgggaaggtagctggcgcctagtgggtgccaaggagacaatggatcaccagcatcctgcccagggacaatgctctggccctgagcccagccctgagcagggaggctttacatcaggaagatcaagatgctggcttttgtttggttatttaagattctccaaagaatcacaaccaaaaatagtcacaataataatgataaaaatttcatttaaagctataaataaatcttgtcatttaggactgcctctaaacccaggaattataatataataatgggaattgctcccaggatttttgtgttcagagttgagcctctgggtgccatatccagatctgctgatctaagtctgctgagctaaatagcatccgagcttacatggcctggccccaaagcacacaagccactgaagcaagtgagcaggagtgtcagcacgtgctcatggcccaggcggaagccctcctgtgtgcagagaggtgaatggtgtctccccactgccacacagggtagcagtgatctgtgaattgcctacagtatagcacttcagaccctgaacatcagcctgaagatactctcaattttttcccatgacctctttgtggggttttcaccaatatctcttgttcttttaattggacttggcaaccatatgtgcacctattcttagaccaatgctaaggtaagcagtttagaaggggcaggaataggggtaaatgagtatgaataaatacagtaacaaaaatggcaaaatgatgcaaattggagaggatgcctaaacatttttcataactatagttttattgaaaactcttaagagtgatttactaccttgttactgcctttggatagttct

SEQ ID NO: 24743 - DNA, 1038 bp, Homo sapiens
gcttcattgatgtcagtaaaacacagagaaggttatttcttggtcagttgtttaggttacttctcagctttaaaattccttgagattgagtgcccagcctatagagatcacaccttataagttgatatttttcaacaaacaagtagcatttgcatggcaggtagaagccatggtggctgcagctgtgagactcccttagtgccctctcaagctgccagaggaggatatccaccttcaggctaaaggtctagaaatctccaagggcacttcactttttttcttaccccatgagatatttccctctcggtccaacaaggcttttagcaagtttgggattataataacaacccctaaggtaggtgtctttaagttccttctcagatcccaaacctcaatggctaacgtcttcaactttctaaaaacacagtgagaaatcaaacagcagaacatggtcacccaagtggaacttttacagtacattaaatctatcattgcctgttctcataaatgagccctgacaaatattaatgactatcagaaaatagaactctaattttttttatctcacacagaagtaacattttactcaaacacgcatctcctgtgtttcagctgtaaggagtataaaaatctgaattccttttttgccatcgtcatgggactaagtaacgttgctgtgagccgcttggcactaacgtgggaggtaagcttcagctaggatccagctgtgacttttgccttaggaataaaaacacaggctcaccagtgagctttttaatagaaatatcactcacactagtataacaatgggaaaggtgggacacttggagggaggtgacctgtctcctttttccagttgcctcagagggagaatttttaaaagatattgtccttttgtgtatggagagtgggggagatgaggagatgtctacttcttgatatatgcaatgtaaataaaaataagtccagttcctaagtataacatgaaggacccacattgctgggaatgacttcataagtttgctcatagattgtatt

SEQ ID NO: 24744 - DNA, 1028 bp, Homo sapiens
tataggttctctctgtattatttcttataattgcatgtgtatctataattatctcaaagtaaaaacttaaaaaaactagattatgatattttatatgtatatatatcataaaaacgtgtcccaatgtgtaagttgtaaatcacctcgcaacttactttttgaacttagtatactgaggcacttttttatgtgactacacgtagagctaccacattccttttaataacttttttattttgtatttaaataatatttgtttacttcacatttactttttatactaaattctcgtgtagtattattagaaaaactagacatgtgaagtaaaacatattagacatgtgaagttgtaattagcagacaaaagactacaaagcagcttttataaacatgttcaagaacttaaaggaaaccatggttagaatgagagagcagaatcagtaattcagcaggaagatggaaactaaaaattctagaactgtaaaactacagtctctttaaatgtaaattgtactgatggggcttaacagcagattgaggaaggcaaaagaaaaggtcagtatatgtgaagacagattaatataatttatcaaatctcaagaccaaacaaaaaaaattttaaaaattgagcagttacacatgagacaatgtcaatctaatatacattaatggaatcacagaaagaaaggagagagagagaggggatggatagaaaaatatgtgaagaaatgatgacttcaagtgccccaactttgatgaaaaccatacacttacagttccagcaagctcagaaaaccccaagcaggataaattaaaaatgaaaaccagaaacaccacactcagtcacatcatagttaaactgctaaaaatcattgatgaaaagagaaatgtcaaaaacagccagaaaaaaaagacacattacataaaggaagcaataccagttacttctcactagaaacaatggaggccaaatgacagtggaatgacctgtaatatgccaaaagaaaaaagataactgccattttaga

SEQ ID NO: 24745 - DNA, 1032 bp, Homo sapiens
tatcttgagtctatatttcttataaatgtgaatacccaagaatgggttatattgttggttgagggggaaccatacctcacattttaagtcagatttctgatttaaagttaaacctttctctgacccatataccatgtggctccttttttccgtgtccattgtatctacttctttttactagttatatttactttttaaatctgaatccagtgttctgatcctcgtttgtggctgatgttattcctccctaagaaagtgtgacactcccaagagactagaaactctgtttcttattatatactcttgatgtttaatgctttttgaaaatatttttggccaactaatgagctattcatgaagttttctagtttcttgaggtgagggtgaaggatagaaaagggaacttgagtggtgatatgaaattctttctccaagagtttactctcagtaggaagatatcaaacattcttagccagcatatttcccctaggtcatctcatctgaaagagggagaaagaatccaggaagttttcttccattcagtatttgtatcagactagtcaatcctttatttcattcatccctttagcattctctactcatacttgcacctacccaaattcttcagttaaattgattagttttttatggatctatatctctttccctgtagagccagtaagtaagcaactggctttacattgtttagttaacattaaacctaaagaattaaaacaacacaagtttcagattatgaggcagtagtagattgtatatttatagctctcttattgacctatgagattgattattaaagagacctgttaggtgagttttaatgttttgaatgtattgatttgatatgattatctttgttcctagagatgttagttttaattaactaagtgcttgtttatgtgagcctttcagcctaccttgtacagctatgctctgtgcatgggtagtagaaaatatgacaactgagtccagtttgggagtgaagaaatcacatggattagtgatgacgacact

SEQ ID NO: 24746 - DNA, 1775 bp, Homo sapiens
accttctgtgcttaaattttgagagctcttctaagtccttatgtgacaacaattgatttgtttacactgtcattaagctgtctgatttatgcatttaatatctatctcataagaataacaacttttaaagaaatacctatttatatacatacctttgtttcaaatttattcttccaacacctctttgggtttctcagttccagctaaatggcttttgattctcaactgaagtttactattcattgtaagttactgtcttttgtttgacagatatttttctggatgacattaacttttagaaaccacaccatggaacaattttttatatatttttgatgtcttttgttaaattctttaatgtattttctcaatgaaaatataaagtcttatttctgaaatgtatcttgattttaattatatgcttatctttccttttaaaatagaatatgcttctctgggatcactctatgattacattaacagtaacagaagtgaggagatggatatggatcacattatgacctgggccactgatgtagccaaaggtaataatatttggtatattcttatagaattagtggggtgcattttcccctcctgaaatggggacttaacatcagaaaatgttttattctgtctttagatgttctttttccagaccaaaagtagtaagaattccacagctgatggtacagataatattttaggtcattgcctttccactcctgaattccttttatcttcctcttaagactctactttatttctatccacgaaatctagttgtagcttcagggcagacatgtttgtcatgttttgtgatattataattgactagcttgcttgacacattaaatggaaaaatcatagttctgttgttctgaaagtctctacttagactcagtatccagaaaacatgatttattgtaggattagttctactcattttgtatacataatatgctaaaaatagaaaccacttgcaaaaaaaatttttatttgtcctgccatgtaaaagcaattcagattttattttacatttaatgtaaacttacttaggcatcgctgttggaattaaatatttttaatacaccaaacccctaaacaaagtgcccagtcttttttctcatacattcttgcatagatgaatgctttctaaagcaattcaaacttcatttatttttatcttttttttttccattttcctaactgaacatttctgggctttatttataactgtcagagttgctttggaaacaacttcatctaaataatgaacaccgatagttatatttgtattctagcaacccctacaaagtgtgtctgaattttcctggggcaattaactcctctacattttactactccattctctacaagcatctctttacaaagcaaatataatgtgatttagcactcagtaaggggagcaactcatacgttgatttcactgtgtgacttccaaaagtagcagtctttcctttggggaattgtctattttaagtttcatcaacacctaccaaattcttcaaatagggaaagtgaaaaaaaattttttttgagtttcatgctagatgctgctgctgaatgatgcctcattacattataaaaataataagctctgtgtttagggtggtgtacctgagactttatgttaatttgcttaattgtgtattgatgcatcgggcatctcaaatcatgcttaaactttcatattcttaaagatattttcatgtaatatcatagtgacttctctgtatgtcagtagaacacaa

SEQ ID NO: 24747 - DNA, 1100 bp, Homo sapiens
agaacttcttatcagaagagaaatttcctttatcccagttacatcttatttaagatcacataattactaatacttgtgttaacttgactcttcagtgatatcattcagtgatatcattaaaaggcaagagtttaaattttctttgtcctttcatgattcttcaatatatcataattaaaatagaagaataaagatttaaaaattaacctctctatatgctttaaaaagcctaagcctcttattaaattattttcaatgcattgttcattttaaaaagaagcctatttgatttggaggtgagggggaggctatttctgccattagttagaaaaaacaacttgagaaataaagaggatatattttagtagaaaatcatcctttttttattctaaaggggtagacaatacgtaaatacagaaagagtcaaaaactactaaggtggtaaccataaaatgtgtctttaaagtataattttatattcaaaataataaagctctataaatatgatggaaagaattttggagtatgttgaaatacagattatctcaaagatttatccttgtaaaaggaatgaaatactttgtaactactgtatacttttttatctgaagatcataaaattatttaccaaccgtaactaatcagtcctcccagttctccccaccactaccccacatccactcccaggtcttgttggaatgggtactgagaaaaagccaagctgcagccaggtaaccatagacatccagaacttcggtaactggacatcagaatctgcagttgggtacctgcagacaaccagatgaaaaccacaaattttactcagaactttggcagatttagaaggtagttggtagcggaataccttagtcgtggagccctcctttcagtggttactgtgctattttcatgcagactgcagaaaattaaggtgtccttattaggtattgtaagaagctagatttacccacagtcaaattccaacctctaagagattaaagcttataaatttgacttcacatatacatgttactaatgtagacatattctgttttcattttatcagtcatggaagaataagacatgtgaattagtttctg

SEQ ID NO: 24748 - DNA, 1089 bp, Homo sapiens
ttgagtctcaactattaaactgattcatcggtttctaaaagtccaaaagaaaatgtacttagcacttaccagatgaccttgtccatgtctgctgccagtcttagagtagcagtgactatctgaagcgtgactctaaggcattacataagaatcacagcagagccacatagagaatagactaatgagggggtggagtgctcaaggaagagaccacaggaatgaatccgttaaggagcagaagctcctggaggaggaatttggagatgggccatttcctgaggaataggttatacctgcattatcagagagaaggaagtggagtgggagagttctttgctggaggaaggaattcatttgttgccttttgttgaggataaacttttccctaaaatgttacgtattctttaaaaagtccaaaatagttttggaattccctgtctttacatctcatactgccctgctatttatactattatactgccctgctgtttatactattacttcctaaaagggcattttcatagtaatgggtaaagaagcagcctgttttaggtccaaatcagcctgtctcttcgtcctgaacttctgtgttttcttactgcaggtggtagccaatgacacaagaggagattcacgttgtcagacctgttttgttttgttttgttttctttattcggtctctaggtatttaatgctggcttcacaggttttggacttgtttcagtgactagctttttgtaaatcataacacatcctatgtataccaaattaataaagattaattttgttagctattgaaaaaatcatttcaagaatgaaatatgtttttgaccgaaggctagaattttaaaggtcagaaggcaagagtaacatcaggcttaatacctgatatccaaaaaaagaaaaaaaatcaatacctgatatcccttgattctggtttcttaagaatgaagactataagctattacagtgatcaaatatttctcataagtttcagaggagactagcttataaaactggtctcctatgtcaaatgttactacattctaaccatcatacattcatctgtgggatattctgaaaatgggg

SEQ ID NO: 24749 - DNA, 1047 bp, Homo sapiens
gccgcctttgaggctgtctggggcctctgactgcttgcaggtagattgatgagtaaagggtggtaattcctgcagtaatgcgatgaacactgctgcttaagaagatggcagacttgagttctccttcctgcccctgtgatcttgcagtctattacaccttcctggggccttgaatatcctcatctggaaaatgggatctgagatccttttcagctcccaacattcattgtgtcccaggctggagtgcagtggcacagtcacggctcactgcagcctaccgggctcaagcagtcttcccacctcagcctcccaagtaactgggattacatgtacgcaccgccacatccggctgatttttgtgtttttagtagagacggggtttcaccatattccccacgctggtctcgaactcgtgggctcaagtgatcctcccaccttggcttcccaaagcgctgagattacaggtgtgagccacccccctacacatacacctaacctttatatttagtagctctaccttttacacgttgtcctgccttgttaagagggcaaaagacaaaaacttcctaagatgattgaacggagtttacttaggggtatagggatgttgggagtgccatcatcatgaaaataactttatctgcaagagactgaaatgcgtaatgttaggccaagaaggagggcaagaatgttctggtcacctgacatcttacatcttagcatattttgtagaatctataccagagcttgccctttcaaagttttcagtgtaaggaatcacttctgctattccatggccccatttaaggaataaaaacacaggacctaatgcaacacttaggaaatctcgttaaatattaagaaatgacaaaccactatcctttttttatacaagatagatgccaattacattttctgagagcagtgccaggctgttcagtatttatgaatgaatgaagcatttctatgtaagtaatttgcactttataaaaggacttttaaaaacttaagtcttgtatagcaaagggacagcaacaagaactgaat

SEQ ID NO: 24750 - DNA, 1048 bp, Homo sapiens
ttcggacagctacttgtggcatgtctttcatggattatttttcttttttaaaattaaagtaataacatggacttggtatcttcgtccattgtctgttgcttacaatacctgaaactgggtaatttataaagaaaaggaatttatttcttatagttatggaggctgagaagtccaagttcgagggcccatatctggtgacgatcttcttgctggggggcactctgcgcagagtcccaaggtggcacagagtgtcatgtggagaggaggctgagcttgctagctcaggtctctcttcctccccttgtaaagccactgacccactcccatgataaaccattaacccgttacttcacttacacattaatcaatgaatagattaattcattattgagggcagaaccctcataacctcatcacttcttaaagatcccaactctcaacactgccacattggggattaagtttcaacatgagttttggagggaacaaacatttaaatcataatatttggctaaaacaatcaaatagctctgaaggatttacaataaaaagcaacagctcctttctccacctctccagaaccccagccctattttccagggagcaaccacttttaacttcagtttttataacttttgaggaataacctgcatatctcaactagtaattctttcctgatatttcttgatgtgtaaactttgatttactcactgacttcctgacctcttttcctcacttctgctactaaccctggtaactctccttttatttttgcataatcaaggctgataatatttaccttttgatctaaaaatgtctcctgaaccttgtctataggatcgttcaaaaggttgagaaaaaataaacaatgtacattaataagatgatatagcatcctttactacagttgtgagtgatatgtttgggtttttttttctttttagagagggtctcactctgtcgccgaggctggagtgcagtggtgtgatcttgcctcactgcaacctctgcctcccgggttcaggtgattctctcacctctgcctccc

SEQ ID NO: 24751 - DNA, 1054 bp, Homo sapiens
aaaatttaacagtaaaaaagaaaaaaaaaaatccagttagaaaacagataaaagacatgaacagacatatcacccaagagcatgttttacattgaacatcaaaagatgtccaacatcattagtcatcagggaaatgcaaatcaaagccacagtaagctatcactacacacctacaataatggctaaaataaaaaatagtgacaacatctaatgctggcaaggatatggagaaattaaattattcatgtattgctggtgggaatgtaaaatggaacaaacattctggacaatagtttggcagattcttataaaaccaaatatgcaattactactgtacaattatactcttgggcatttatcccacaaaagtgaaaacgcgtgttgacacaaaaatgggcacatacatatttacagcaatttttttcctaatagccaaaaaaataccccactgcgcttcaataagtgaatgtttaaataaactgtgatacatcaataccatcatggaatattattaagcaataaaatggaacgaactattgatacatgcaacagcttggatgactccaaggaattatgctaagtgaaaaaagcccattttcaaaggttacatacagtataatttcatttacgtaatggtcttgaaataaacaaattatagaaatggagaagagattggtagttaccaagtgttagggatagcagaaatggcagagggtcatgggaatggatgtagctataaaatggcaaaacagaatttttgtgatgatggattgttctaggtcttgactgtagtggtagatacacacacctacacgtattaccaaaatagaacaaagtacacacatacttacacaaaaatgagtacaaatgaaatgggaaatctgaatacgatctgtaggccatacgaaagtccattcttttttatttttattttttttgatacagggtctcaaaaaaactactttgtttttctttttttctgattacaaagttaatctgtgtttattgtagaaaatgtgggaaatgcttgaaagcataaagaagaaaataaagg

SEQ ID NO: 24752 - DNA, 1051 bp, Homo sapiens
actggctagaattttgctcttttatttatagcagggagctaagttttttttttttttttttttggacgcaagtaattaattttgattgaggagctatatataaaaaagccagaaaatctgatctgagggcaggcacagtttttagagttagcagagttaaatggaaacattaaatcttagggaagtatggctggatacggcattgttgtgcagttttctggattaatatggacggtaaatagcagccttaccacatagcagggctatgtcaattcatcaccggtagtctttgttccctagacatagagccatggcctgctgatgagggactagctaaaccaggttacagcctcccaccccatgggcagctggaatctgggaaccagccgaaacaccctctgaagcctcagcatagcccttccctgaaaagtgtctctcaatagtgggcaggctgtcgtctggagtgacagctgtctattcaggtagtggctgctattgtcttcacacttgtaacaccaagaggatttttgtttaattttaagaattctgacagcatctcagaatgtcgtactccaagtgggtccaacccctcctctcatggggagggcacaatgacattagagtgtacatttttttctttaaattgcagatgccttaaaatgagattgtcaggtttgttggcttgtcagactaaagtatcaagattgtcacagtgtattatatcactataatatgatcattgtacacgaaactaatgaataatattgtacttagtggtgggatggagtcacattaacattaaaaacggtgagcagccttgcattttacccaggagaatctgggagggatgactctacactgtggggtgtcaggccagaatttcatcacccaggggaggtcaggaagccctctttggacagagaggtaaggaggtggccagctgagtgctgtgttgggaacagcagagcagaagggaggctgggggctcctcagggaggctgattgaagtgtttgcaccctaataggtgcacagaaaatggtttttaaagga

SEQ ID NO: 24753 - DNA, 1044 bp, Homo sapiens
acagaaaatcaaatgccacaaatcctcaattatgaatgggagctaaatgatgagaacacacagacacatagagggtaacaacagacccctgggcctactggagagtggagggtgggaggagggagaagatcaggaaaaataactaataggtactaggcttaatacctatgaaataatctgtacaacaaacccccatgacatgagttaacttatgtaacaaacctgcacatgtacccctgaacttaaaatgaaagttttaaaaaaaaagaaatttgatggaaataggtatttggaatgaaatattgctagtcactaatattcaatatcagtaacatacttttgcattagaactgaaaaacagatgctatataaaaggtctggggtaattgtgaaaaagcattctccagaccttatatgaaagatcaaactgatcctcatttcatgttagctatttgtcatcatagaaaacaatatgttaatcttgccgggacctatataaaacactgtggaatatgtttgtaaaagtatccagcatccctgaagccctgaatctcaaatactacatgacaaactgctgggaatgttcaaatcatgataaccatacacagttcctgtgttgggtgcaggtcttggaagtggattttcagtgatgaatccctctgtctcaactggcttgacttcccctacttccccagccttgctcaaatggcctcacatcacccccttactccatctaggcaatgccctcttccctttccataacatgtcctactatttgcctcctccaaggcttggctattcttgctgatccctcttactagaatgttcttcccatttctctctgaccatctcacccccaatctacacatcttttaagattcaactcaagtactaacctcttccattgaagcctttccccaacgcccaggattgaagtaacaattccctctttttcacctgcttacaccatgaacagagcgccatttaaaactgtcattgagcctccttaaaggccagagcacttgtcttatttatttatttact

SEQ ID NO: 24754 - DNA, 1552 bp, Homo sapiens
taattggctcacagttctgtgggctgtacaggcttctgcttctgaagagtacttaggaaacttacaatcatggtagaaggtgaaggggaggcaggcacagtcttcatatggtggcaggagagagagagcaaaggggtagaagctacacactttcaaacaatcagatcttgtgagaactctattatgagaacagcaacggggaagtccgcccccatgactcaatcacctcccaccaagcccctcctctaacactgggcattacagttcatcatgagatttgggtggggacacagagccaaaccatattagtgtctttacccgtgaacatgaaataataagattgatgtaacaggattactgtgaagcttaaatgagatgatgcatgtaggtgcctagaactgcctgccactctcgaggacctcactaaatgcaagttctttatagtccttcctcacagttagcatctggcctggtggtgcacacactaacaggggggtttcttataaggacacaggacaatctcatgaattggcttcctgcgtgtggctcttggtttgttcttccccataatggaggcccgtctgtgacttcatcttgcgatggtgctcactccagctctgatattacatgctcttgcacctcagctctccaaagttagccgatcattttcacagaaataggaaaaccaatcctaaaatttgtgtaaaaccacaaaggtccctgaataggcaaagaaatctttggtaaaaagagcaaagctgaaggcatcacactacctaactccaaaatgtattacaaaactatagaaaccaaaacagcaaaacactggcataaaaacagacaaaaaccaatgaaacaggatagagagcccagaaataaacccacatgtttatggtcaattgattttcaacaaggctgccaagaacgcacaatagagaaaggacaatctctttaataaatgatgttgggaacattggatatgcatgcagaagaatgaaattgaacccttacctcacatgatacacagaaatgaactcaaaatgaattaaagacttaaatgtgacacttgaaactgtaaaactactagaagaaaacgtaaagggaatgctccacaatattgttctgggggcaaacatttcttggatgtgacccccaaagcacaggcaacaaaagcaaaaaataaacaaaaagtatgtcatcaaactgaaaagcttctgcatggcaaaagaagcaatagaatgaagagacaactcatggattgggagaaaatatttgcaagccacatatctgataaggggctaatatccaaaatatataagaaactcaaataactcaattgcaagaaaataaagaacccaatttaaaaaatgggcaagagacttaaatagacatttcttaaaaaaaaaagacatgtaaatggtcaacagatatatgaaaaatcatcatcttcactaattatcagggaaacacaaattaaaactgcaatgagatatcacttcatacctgttagaatggctattttagtaaaaagatggacaataacttttattgg

SEQ ID NO: 24755 - DNA, 1036 bp, Homo sapiens
cttttgctagtcacccaaaggcacgaagttggttcaagagtcccaggacacctccccagtgtcaaacttgagctttcaatggcggcctcaggctggtttctgttttgccccatcactaattcctcttgaccagggaggcactttccttccccagatggattatccactgagtctttccttttcagtcctacatcacttctctatagcatgtcttgctagtacaatcatattagaagtactgtaagcatttgccccattgatcatgctattaaaagatgttgccatctaattctttgggtttttttttttttttttttttttttttttttttttgtgaaggagtttcacttttgttgcccaggctggagtgcagtgcaatggtgcgatctcagctcacctcaatatccgcctccccattcaagtgattctcctgcttcagccttccaagtagctgggattacaggcatgcactaccatgcctggctaattttgtatttttagtagagacagggtttctccatgatggtcaggctggtcttgagctcccgacctcaggtcatctgcccaccttggcctcccaaagtgctgggataacaggtgtgaaccaccgggcctggccattgccatctaattcttaaaaagcagaaagctagcatgtaagattcttctgatacttcttgctcttaatgtttctcttctcctgctctgacttgggacactgagtggtgattataattactttataacacaatggaatggattgttatagcagaataaaatgttccaaaggagtacttaattccatcaaagcatcccttatccaagtttgctaacttaaatgaagaattgttaacgtattctctttcatttgtcaaatgtccttcctgacctttcattgtttcacattttgaaaggaaattatggtaaaattgtctgagccaccctcctctggatccagtgtcttatttagttctgtattttgggcttaccacgggcgggaactatctacacaacccagatcccctttcacctagga

SEQ ID NO: 24756 - DNA, 1031 bp, Homo sapiens
tcccactgaagacaacggtgatggggactgtcaggctggtgatcccacgagtagcaaatgtgtgggcgtagtcactgaccaagtgccccagcgagtgatggcgggaggcgtggcctgctgggccactcttccccacagcaaagcagctcaccgcaactctgcgtcttgggctcattctgggttaccctgtgagaagaagtgttgtttccttttacttcgccatctcctccttccccttcccagttaacctttccaacagtaggaagactgtggtcctccatgtccctcaagcagcccaagtctttgcaggggtatccaatcttttggcttccctgggccacaatgaagaagaagaattgtcttgggctagacataaaatatagtaacacctacaatagctgatgatctaaaaaaaaaaatcgcaaaaaatctcataatgttttaagaaagtttaccaatttgtgttaggccacattcaaagccatcctgggctgcaggttagacaagcttgctctagaacataatttttcttctaataaacccaggaacccctcccttactccaactcagcttcctttctccatttaatggcaactttctatgcctctctgcaaagatctttccaatcttactacatgtacaatgttatttggccctatccgagggatcgtagtcagacgtggactcattagtgagaatctgttttagtcctgttaagcctttggccatcgattctgaggggcttgagaccaggctgcctgtaacactaggttccactggctctggcaccctctgttgctcttcctccttcgggcagcctcttctgcaacgtttctgtggcacagtccagcctgaatttcaaatgtcctcccaggccctgtccactatttcctgaaagaacacccatttctgggagcttgtggcctctgctggtaaaaccaacacttgactgattgctggtatcccgaacgagcttagccatttacagatactgtttgagcagatggaacggaggtgcgagtcgctgatta

SEQ ID NO: 24757 - DNA, 1035 bp, Homo sapiens
gacacacaaatagggccaggcatagtgccagttgccctctcctgtacccagactgactggaaaatttcaagatacattggggcttgggtagggtatacagagagtcttccttcactaatggaaaataattagcaacactaacaatctaacaataattagatcgagcactgcttcaatcctgcctggtaaatcttaaaagagggtttaaaaagattaaattctttgaaagtaagttaactgtgtcaaaaacaaagctcaataatacttatagaaatacaaaaatgtccagcacacagcaagtaatgttcagaatggctgacatctaatcacaattaccagacatgcaaagaagaggtgaaatgcaatccataatgaggagaaaaaccatgacacagatgttagaattggcaggacaaggatgctaaaggagttgttgtaattgtgatttgtatttttaaaagttatgtaaagacacggaaatattttttaagaaggccccagtcaaactttgggggattaaatatacaatatctaagattaaaaaaacactgaatgggattaatggtagatttcacatgaagaataaaggattagtaaatttgaagacatagaaataaaaattgtcaaaaataaaacctggagtaaaaagataatttaaaaaatatgaacagagatttggtgtgctgtgggacaactttaagaagcctagtatatatatgaagagttcctaaaagaagagacaaagatgggtaaagaaaagaatatttgaataaataatggccaaaaagttttcaaatttgatgaaaactataattatgtagattcaagaaactcaacaaaccccaagcactcaaagaaacaagaaggaggggccaggcgcggtggctcacgcctgtaatcccagcattttaggaggccgaggcgggcggatcatgaggtcaggagatcgagaccatcctggctaacacggtgaaaccccgtctctactaaaaatacaaaaaattagctgggtgtggtggcgggcgcctgtagtcc

SEQ ID NO: 24758 - DNA, 1083 bp, Homo sapiens
agcaaaaacttgcatccttggtattttcaaggaatgaatttcttaccagtctattattatactaacaaaaaggcgtggatcaccagggacatcatttctgactggtttcataaacattttgtaccagtgactcatgctcactgcagggaaaccaggctggatgataactgcaagattttgttattccttgacaatcgttctcctcatcctccagctaaaattctcataaaaataatgttgatgccatgtattttcccccagtgtgacttctttaactcagccatgtaaccagggtatcctgggatcagtgaagagtaaatacaaaaatacactttcttgaacagcatgctagcagcagtgaacagaggcatgagtgtggaaggttttcaaaagaagttagcatgaaagatgccatatctactcttaccaaggtctgaaacacagtgactaaagacacagttgtgcatgtctggcacaacttctgtctgtgcaattatgttgagtgatcatgatggacaaggtggtaactgtgaaggattctgtatatctaatgagaaaaaaaaagatgcctggcccccttacttatgcaaggtacatacctcagagtctgtcagcaagctggaagaagcgggtatcaaagaagtttttaacatcaataatgaggctccagttgttcattcattgaccagtggttaaacggccaaaatggttctgaatcaaggtgatcatgataatagtgatgatgagacgaccttgttaactctgcagaattgcctatagaccacatgctgaaaatgtgtggtgggcttatggaaggactagagcagcatgcattcattgcagaacaaaaaaaaatgtcagtttataaaatcaaagagaaactcctaagacaaaaactgttgttaatgaggctgatgattctggaggaaacatctaaaaagccatccagcagaatgcctccccacgcctaaaggacccacttcctggtccctcaactcctgatgtttcttctcaccagaaaagaaaatacagtgtatcttttattcaaagcccagcatcatagatggagactgaaagcctgcc

SEQ ID NO: 24759 - DNA, 1065 bp, Homo sapiens
atcaatccttctttgcatcctccagctcctacacccccaaacaggtagtgcccctcaagtgcacataatattgtaaacctttaaaaattccctttcctgtttagcatccagatgccaatgcaaaaggaaattcactgaactgaggattgccaaatgcggacaacctggaagtattttggggtttttgttgtgttgtgttttttaggctcaagggtacatgtgcttgtttgttacatggctatattgcatactagcagggattgagcttctagtgtactcattacccacatagtgaacactatatctgataggtaatttttcaactctcactctctcccacctccccccttttggaggcttcagtgtctattatttccatctttatgtccatgtgtccattgttcagctcttgcttataagtgagaacatgcagtatttagttttctatttctgatttagttcacctaagacaatggcctacagctccatccatgctgctgcaaaggacatgctttttttcttttttatggcagcatactattctgtggcatatatgtaccacattttctttactggaagtatttttgcaagttaggtctctactacaccaaggtgcttcatcattcagaaaacacagagtgagttaaggatccgttaagggaaacgaggaaaatctgagaagccagtttaattgatactttaaagttgagaattaccatgtatgggttgccccctgcattcctccccacaccacccctatcctcctgcagaaccccaaagtgacaagaaggaacatgaatttggtgtcaaaggcaaaaaaccaggaggctcacccccaaggctgcttcacccctttcaggccttgacatggagggaaaacaaaagctgccaccataccaaacctttccagactcatcctaatggaatctgcttgagtcatggaaacatattacaaaggcttgccaacaccagggccttgtgtaaatctacaattgcaactagtattgggattggagcacccacaagtcagttaggaccatctaagtccatagattaaccatgcca

SEQ ID NO: 24760 - DNA, 1111 bp, Homo sapiens
acttaaactgtctttcaaagaacaatatgtatctgaaataatggaatgccatgtgggccatctcttagagaaaattctttaaattgaaccatttggggcccagtaaaagttgccagggtcttcctttccacaccctccccattccaccttagctactatgtcgctcctttcaatgtggatattgtttacactatgaatggcataaacaaatttttttagttttatgatttcaaaacgaggaggaaaaaaagcaagaaattatgcactcaagggtaaaggaatagaattttgccttcaaaacttttcagaatgaataggccactctacacaagtacctacaaatggccttcctgtctctaagtacatagagaagtactcttcatgagaagtctattctagacatataagattctggtccagggattgatgattttgccattctcttactgatatcacaggtatgactgtttaagcattttcaatggccaatgcttaaaaacaattgactcttactctgaaatttttttttttttttggagacaggatcttgctctgtcgcccaggctggagtgcagtggcacaatcatggcttactgcagtctctgcctcccaggctcaagcaatcctccgacttcaacctcctgagtagctgggaccacaggcatgcaccagcatgcctggctatgaaaatttacttttaaaaggaagacttaagtctttattctgtccttattatatgaactgtatctcagagtaaccaaactagtgctagctgttgagaggaaactttttttgtagaattccagctaatacataataaagaaaagatggaattataaaattatcattttataacccttaatgtaataattgattcaggcaacaaacaccaatagctactaagaatgaaggatgagtgaagaactaaatacttttggcagattatttctagtcctaagaggaaagccacagtattgtaatggaagggtctggctgtcactaactgaactcactgactaatcttggtgtcactaaacttggataatacagatatccagatactttttgcctcctaatatgatgcaattgtgaagcaaaacccaaaatattg

SEQ ID NO: 24761 - DNA, 1044 bp, Homo sapiens
agggagccattcaaggatgcaaagcaggaagagacaagtaagttttgcatgcagaacagttactggggcacacagatctgaaggcggccctgtagaggctggggggtgggccacgggagggcacgggaactcagcagggggatggcaagggccttagtcatggcggcaacaatggagctgaagaggaagagagagagacgtaccaaggaggcaaagtagagggcacccattctctgctgtaatcggcctgtggagagaggcctgggggttctagcatgggtgagtgggaagacagtggtgtctttcaccaagataaggaacacagggggaacagtcagtgtcatgggggcagcagagagggaaaagagcagaaacatgtctgcatttctgagtgtgaggggctagtgagacctccagatgaaagagacaaagaactggatgtgtggaactgatgcttgagagagctctgggctggaaattgtgattctcaaattgttgttgtgtggatgagtggctggatgaggtagcgtgaggccgtggtgcactcttgagccatttctctatcacctgcatgatcttctttcacagtcacttaccgcttattccattatatgaccaatgcttttctgtaaataatctcccattttgcttaataaaatttattttataaggaaactttatatcattactataaattttttaatattatttgtcattaataggaagtaaatataaaaataaatatataacaactatgtaataatataacctcccttatatataaaacacaccatgtggccaaattacaaaaagaaacgaacaaacccccaatcatagtgagagatgttggcatatttccctcagtaattgataaatcaaacagatgtaaaagtagtaaagacatagatttgaatgctagtcattcttttcaagcaaatatagaccattttttttaaaaaatcaccacatactaagccacaaagcaagtctcaacatattatctaagaatctctaccctactgaccacatatcctaactataatg

SEQ ID NO: 24762 - DNA, 1045 bp, Homo sapiens
ataaaacctaagatccgtgcttgagagattttgcagactgtgcacttgatggatcggctagcactacacagatcgataaactggctcatctgatcttatggcccccgcccaggaactgacttggtgcaagaagacagctttgaatccttatgatttcatctcccacccaacagatcaacactccagattcactgtcctctacctaccaaattatccttaaaaactctgatccctggatgctaagggtaactgatttgagtaataataaaactccagtctcccacacaggtggttctgcatcaattactctttctctattgcaattccccagtcttgataaattgactctgtctaggcagtgggcaaggtgaacctgttggatggttacactcccatcataacttttccttttcagggagttttccagataagctgaaacaggggggattttatacaatacagtgagtttgcaaagttgcaatattcttccatttctggaaatcctgtggacattctaagattctcaatggctctaatgactttgggactgcatttaacttagaatcaaaagtctgaaatgttttctaaacctattctgtatccatgagtgattataaaagtctttgatgaatggtggtaaatgctagaagaagaatgtccttggcaaattcatattcttcgaggatctctcactcttccatttcagtaggttcttattcctataccactgattctaaccacttcccttttccaggatgctgaaggtacagaaaggtcttctcctagaggaatcaaaatattctttcttatccctgaaaacacatttgtttgatatctctgggactctgtgcttcaacatagaaaaaaaaatgcttgccaaatgtgataattaattctttagacatacaaatttgctgtatccagtcacaaatccaggcaagcaaaagccatcccatcatgatttctgatcactgccccaacctaagctctcttcacttccttcagatgttttcccctgcccttcaaaatcacattcctaggcaaa

SEQ ID NO: 24763 - DNA, 1027 bp, Homo sapiens
atatttttagaagagcttgtttgggagattagagaataagataaaagaaccaaaaccttaggatatactgtttctgggtctgaaatctctctcattgtttacttctgttcactcagtgaaaacagaaacaagaatgaggtagtggcaatgaaatagaattattagtatattatgaacattataacattttgaacactataatgcattatatattatgaacttttatgaactttatacatgagtaatagcttcctaaagtttataaaacattgtttaggttacataaagattaccaagtaagactcaaaattgcaaatataaacaaaagaaaaatccaactgaaaataacactaagtatttttgagttcctagaatgtccattttggtatttggttacattatcatatttactagtcactatcagcacaattaggttaataaagaagtgggtcattatattcaaagagtgctcaggaagttatgtgttcaaagttctctcataaataccatcgtctgcctgatactgctcttgtctaatagagggttgacattacaaaagaaaagatgtctgactcaagaactcagttgattctgtttgccttaagtttggttcagtgataggctgtcttctaacccctatactcctcttctctcctttaatagatgaggaaactaagggcaaacagttcgttacacttacgggaatcttatttccctctctaggggcagcatgttttcaccttctcctttgctgccaccttggcctaaactagcaccgtcttttagctagaccattgcgttaactgttctcctacacccatttttgttctttatttccacccacatgagtcactgcagccaatctattacaaatttaaatctgattatgaattcccctcctaaaactcttttttaaaagagactttattttttggagcagttttaggttcacagcaaaattgaacagaaagtacagagttccaatacagcccctatcagcatacatgcatagcctcccccactatca

SEQ ID NO: 24764 - DNA, 1037 bp, Homo sapiens
ttccgttgctggtgaggaactgcgttcctttggaggaggagaggcgctctgtgttttagagtttccagtttttctgttctgttttttccccatctttgtggttttatctacttttggtctttgatgatggtgatgtacagatgggtttttggtgtggatgtcctttctgtttgttagttttccttctaacagacaggaccctcagctgcaggtctgttggaataccctgccgtgtgaggtgtcagtgtgcgcctgctggggggtgcctcccagttaggctgctcgggggtcaggggtcagggacccatttgaggaggcagtctgcccgttctcagatctccagctgcgtgctgggagaaccactgctccagtatttttattatttactactgacccatgcataacactttacaaaacacataacactttacaaaacaatttttattcacccctatttgtgtatgtcatgagaatccttgtgacagtaactggacttggtcatgcaaagaaagacttgcataatagaatatccaggagactctcaaaaatgaagtataatatggaaaataatatgctttaaattgaccaaaagcttgattttcttttctctctctccttttttttcacccagtttcagggatagtcaggaaataattaacattcctacacctccctccagttgacctgagaggtgaggatgctctcccatccccatgcttcctcacatctcaggccaactgatctctgaaaatggtttccaaacattgagaactcacctcaaaccaggactcaaaaattctcatcaattttgatttttaaaaaatctatactgtaggtcattaaaatgaccactttcaggacaattagttctagaaggacgcattataaggtgatttcttgttatccttccttgaaacagatagctgcattttgtcaaaaataaattcagatcccaagggggcctaagtttagttcaaaccatcagaaaggaggcgactcaagctgtgtttacaatctggcagtttacttccttcgta

SEQ ID NO: 24765 - DNA, 1050 bp, Homo sapiens
ttgcctagggtttttaaaatatctgtttttaatgttttgtttctccctccaggccagtataaagggacttgaagtattttttaataatccgccccccaatgaacttcagaagtgccattctgatttaagggtttttttaaaaaattactttatttgttcattcccagcactgattatcttcataatccattaggacagaatggttttcagtcgttcatatcctgtaattaggtaattgaatcattagctctcagcagttgccctgaggcaagtggaaaggcaggcagtgctctggggtcaccgagaaagtctaaaaacaggaggctgaaggtactgtgatggctttaaaaatggccaccttattaaatagggattgtatcaatattgaaatgaagacaatctttccaactttgggtgtttcacttgctgttttaattgtttgtttttaacactttgtaggtttgtgttttcataatctttaatttgaaactcatgtgtcctcatggatcgtggatgccttcatttcttgagctctcaatgcagacatttaaatggctgcaatcagtagagtgacccgcggatggcataaatgcacctccttttcttggccttggatctatgggtctgggattgtggtcatctcctcaatcctcaaaaagaggctgaatcaatgtggccgtgggtgggaacttacatacagaacccaatgaagaacttgactgtctaaacaagggggcctcgcatggagctgtaaagcatctaacaaatatgaaaaatgtgaagttccaaggtccaagaagaaaaataatgatgtttctgaaagtgatgataaataattacttttaaagtgctgcatatttatacaattgagagattatttttgtaaatgcaatgtctgtgagctgggatacatgggcagtgcttcagacatttaaaaatcactttttactcctagggagatgccaataaacagaactcttttgtttcttctgagtccttatacatttgttttattttttcaagtttgtgtttcttcttgaaacgattctt

SEQ ID NO: 24766 - DNA, 1057 bp, Homo sapiens
ctccaggaagcgccctcaccccagccccactcacccaccctccttcccaccagcctgctctccgcaggcccactgtccttgggtttaatgacgtctcttctctgtggaacttcacgattccttcccacggtcaactcgggacctcccagcgaccactgcagcctgcggacgaggccgggacttggccgagcggatcctaataaggggaaaatggtaaatgcaaacgtcccgttacaattttaccgccagtgtgctgtcgttccccctccccctctccgagtcctcgtggggacacggcggggtctgtaggaagttgggccgggttgggggttgctagaaggcgctggtgttttgctctgagttttaagagatcccttccttcctcttcggtgaatgcaggttatttaaactttgggaaatgtacttttagtctgtcatatcaaggcatgagtcactgtctttttttgtgtgaataaatggtttctagtaaaatggaggttacagcttcaatacactgtatgaattctcctctttgaggtttagtgcctccttaggatattttagtggccagaacccatgcaactgaaaatcgaatgaaatactttttagtcccactaaaatagtagtcgtaccctcccaccacctctaggttacactggttttaaaaatcatgttagtgatgaatttctgaattgacgatgtgaccaagcaatgctggcgctgccttctccaggcagtaaggctggggcagcaggaacctaagaagaaaactcccacccccaccactagtctagtgaacttgggatttctgaaaagacagcaaccatttttaaaaactggttagaaaatccaaatgatctcttacaagctaacaaggagtcacagtcccttaaaaaagaagaaaccaaaattagaaacttccattgaagggagaagttttcgaaaaggaagtcatcagtaggtggagagggcttgctggtgtcataagtggacctggagtagggaaggtaaaccctccccgcccccactgaaatagggccaggagctgcagaccctc

SEQ ID NO: 24767 - DNA, 1050 bp, Homo sapiens
cgttaagaaggggattcctttggtattctagacatcggttaaaatgtcagtgccctaatagtgtgatcgttccatgagcttaaaactgttttttttctttctgtttccatctattttttaaaactgcatctaaacgtagcaagcttgtgtgcccaccacccaaggcaagccgaacccgagataccattttccgtttgcaggggcctggagatccacacgagggcgcgctcacgttccagaagccgcgtttgaccaagaggccgcggtaccttgtctgtccaacactggattctaataggcgacctcaaccccttagaaacaggcggcagctaaggtgtttgctagtttatttgttctaagcagccatgaggtgtgagaagttgtatagagacagaaaacggagcaactagattcacgaaacagcctaatctttgtctctttaaagacaaagctgttgcaaaagaataccttggtataaccagatggtgtggagcagagttttaaaagataaatgtatgcattttgaaagataccatagccactgctggttaattaaattagggaaaatcagttttcttggtttcagtgtggagagccttgtctagggttggacaccccctacttaacatccccctcccccccgcaaaaaaaaaaaaaaaaaaaaaaaccttcatcggttttaccccctctcagacctcctgggatgattaaaaggcttttgtttataacagatcagggagcgggccacttagccaaatgtctctcagaaaaaaataagacgcatgggggactgggagaatcgttctgggagcccgcggccgtgcctggagtgcgcggctaccagtggcgaccgagtggcgccggcaggactgtgagttggtgtgcccaggccgggctgggctgatgcggacacgggaggcagcaggcactcgggggaaacgtttatacttcaaggcgttgtaaaacggggaatgtatttgaagcaaacgggctttgcgtttgacagaaaactggccacccttccaagctgcacgccggtcttgagcagag

SEQ ID NO: 24768 - DNA, 1034 bp, Homo sapiens
ctcaaggcggccccagcggctgcacatctggctgtgcgggggccccttggacttggctggcagccgcctgcgaaacaccgcttctcagcggtctgcagttcctttcctccctgcgcccaagatgggcctgacaagggcccgggatcagaccagaacctctgggggctgaagacctctccccacccccatcttacaaagtgtgtggggcttgcggagagtggccttggatcctaaggcgccaaggtctcagactctgaagtggaagggaaatgcgcgaagtaggagtcttttgtgtctgtgcagaaggaggttctccggccgccggcccttgttgcacgtctggatagaccccttattgcattggtggtagactccccatttgccccctagatttcctttcaccttggcttggaggtgcacagtgcaacccggaggagcgcccggggaagacagcttttaatcgactccatccgctctgtccccaaagagtgacacagcccagaggtggctcagaaccctaatccggggtgaccctaagagcccacaggtccactcaggcccagggcttcaacttttcttccaggagacaagagtgcagatgcaagccactttttgattacaaatgctaatttcttgttcaagctgttcttttaatttttccctggaaagaactgtggcagggagaagggcgtcttggtacaaatatgggtattcatctcctttatggtgcaatattgatttattattaatggtaactgctccaactgatctaaagatgatggaaaacatcagctacattaaatactcataagcaaaataaaggctggcctgtagagcacggcctttttattccatttgtctcacctcagccttagagtcttaggcacactttccatcctttggggctcggatcattcttttgtattatttctatcttgctcaattttttaatgataaaatatctcaaaatattgacagtctcttgtctcaaggagcgggtctgaaagcagaaattttaaagataaaaaatagaa

SEQ ID NO: 24769 - DNA, 1103 bp, Homo sapiens
ttcataaagcgaacgccattatggtaaatttaactattaatcttatcctttacaaagtctcgattgatttgttaataaagtatcttcccgtgtgtggcaacagcgggcataactctttaaaaaccttcagaagcaagaaaattaccaagtagcccaagaatgtagatgagaattttattgatcgccctgattcttcttaatatgtattaataaattccacaaccttttgtaccttgcacttgtcagaaaccagtgcttttacaaaatccataaaaggaaaacatttttctttgcagaagaaccaaaatgacacctttgcatttctctctgtccttcttggcccagtcagttttctaaaacttctggattctgagggtcagagtttccccttttcttaaattattttttcctttcttccttcctgtttgccctccattatcagggtgtggggagagaaacctctgtttagttctcctacagggagcccgagggacgctttcgcggatagtgaactgctggcaaagaattgtctctgggctgaaagctcccagaggtccggccccgcagaggtcagggtgtggttcctctgagagccgaagcctcgtgtagccctccggggcgcataggaacccggagccaggcaggaggaccgagcgggaggacaacgcagggaccaacccatccatggggatccgggcccggccagctgcttggcctcccggccctcgcggccctttttgcctccgccctcctagagacaccttggccgcttcttagccccaagggatctttcctttggacccctggggtgggatgtctcagggcccgcggaatccgactcaccttcccgctgggctgcccgggactaaattaaccagcctgcgcccccacccgcttgtcctggacccggccctcttaagcgcgttctgcctggttgtgtgtggggggaatgcttctgtgcgctggcgccagggcactctggcttccctccccgtccgtgcgtgtccacttggaggcccctagagctgagactttccttccgccggttgggcccaggggccgaagcgggggacgcgagtggggcgggctggccgagcgagccc

SEQ ID NO: 24770 - DNA, 1593 bp, Homo sapiens
tccacaattacacggggaatgttttcctagagatgtcagcctacaaaggacacaatctctcttcttcaaattcttccccaaaatgtcctttcccaacagctctcctgctgctaatacttttttagtagattccttgatcagtgcctgcaggagtgacagtttttattccagcagcgccagcatgtacatgccaccacctagcgcagacatggggacctatggaatgcaaacctgtggactgctcccgtctctggccaaaagagaagtgaaccaccaaaatatgggtatgaatgtgcatccttatatacctcaagtagacagttggacagatccgaacagatcttgtcgaatagagcaacctgttacacagcaagtccccacttgctccttcaccaccaacattaaggaagaatccaattgctgcatgtattctgataagcgcaacaaactcatttcggccgaggtcccttcgtaccagaggctggtccctgagtcttgtcccgttgagaaccctgaggttcccgtccctggatattttagactgagtcagacctacgccaccgggaaaacccaagagtacaataatagccccgaaggcagctccactgtcatgctccagctcaaccctcgtggcgcggccaagccgcagctctccgctgcccagctgcagatggaaaagaagatgaacgagcccgtgagcggccaggagcccaccaaagtctcccaggtggagagccccgaggccaaaggcggccttcccgaagagaggagctgcctggctgaggtctccgtgtccagtcccgaagtgcaggagaaggaaagcaaaggtcggtatgagcagagttgccaccccagcggggcgcgcagcccgggaacccggcagagagggagtgccggggtgcccagcgccgagccggagcccgacttggcaggtgctgctccgcctggttttagaggggtgatctcagccctgagatagtccccgcttctcccctgctgccctggccctctccgccagtcctggccccacgctgatggcgcccgggcagaggaaaagcttgccggttttatttttcctgagctagacctgaacacaacaaaagagcgcaaaggagacctgcggctcataaacacgaccacagagcctcttttctcctgctcagatttgcagttccagttttgccttgagcccaatgatcatgttaaggtgatccagggcaccgtgttcgtgttcaagtgtatgcaccccgcatcctgcgagcttgggggtggtgaggggaaagagatggctgggctggttggtgcttgagttgggaaacagggcttactgcctttgctgggctaggtaaccttggctttgtttaggaaaagtgctgcagtctttgcaatccgtcggcaaagagggcaaaggcggagggggagagtggaacccgcattgccctccctgcaaggccagccttagggctgggctaaggcaaagagccagggatctggctttttgagaaggaaccctcctcctctcccccagtgcttagaggtgggccacagtagggggctccctttctgggggaatgctttagtgtgggggcaaga

SEQ ID NO: 24771 - DNA, 1207 bp, Homo sapiens
aaaccaaaacaaaaacaaaaacaaaaacaaacaaacaaaaaacctcttgatttttttcttcttctccctttaattttgttagaggaaatcaagtctgatacaccaaccagcaattggctcactgcaaagagtggcagaaagaagaggtgcccttacactaagcaccaaacgctggaattagaaaaagagttcttgttcaatatgtacctcacccgcgagcgccgcctagagatcagtaagagcgttaacctcaccgacaggcaggtcaagatttggtttcaaaaccgccgaatgaaactcaagaagatgagccgagagaaccggatccgagaactgaccgccaacctcacgttttcttaggtctgaggccggtctgaggccggtcagaggccaggattggagagggggcaccgcgttccagggcccagtgctggaggactgggaaagcggaaacaaaaccttcaccgctctttgtttgttgttttgttgtattttgttttcctgctagaatgtgactttggggtcattatgttcgtgctgcaagtgatctgtaatccctatgagtatatatatatatatatatatatatatataaaaacttagcacgtgtaatttattattttttcatcgtaatgcagggtaactattattgcgcattttcatttgggtcttaacttattggaactgtagagcatccatccatccatccatccagcaatgtgactttttcatgtctttcctaacacaaaaggtctatgtgtgtggttagtccatgaactcatggcattttgaatacatccagtactttaaaaatgacatatatatttaaaaaaaaaagattaagaaaacccacaagttggagggagggggacttaaaaagcacattacaatgtatcttttcacaaatgaatttagcagttgtccttggtgagatgggatattggcgatttatgccttgtagcctttcccttgtggtgcatctgtggtttggtagaagtacaacagcaacctgtcctttctgtgcatgttctggtcgcatgtataatgcaataaactctggaaatgagttcactccctctgctttctgaaatggaaatatgttatggtggaaatgaaagcctatggtgagattatcttctggttacactccctgtttggggcatttgggcaggggagtgatagactagtaggggaagggagatggggg

SEQ ID NO: 24772 - DNA, 1042 bp, Homo sapiens
aggtcctgcctgcagtttcaaatagcttccagcagttttacaaaacacatcctttccatttcttccttttaaatgtttccctaagaacgatccatttaggtgctataagtcctcagccagggagtctctgggacactggcattcaaaattttaaacttccgccccaaaaccaggaacattccaagacagaactcttttagggggccatttcctgggggtgggggagagggcttggaatcaatgctagattgaaaacgttgtaatagctttgccccagacttaacaccggttgggcaggaggagggtaatttttatttagccgtttctccgatcatgtggggaataccattagctgttgatagcgggccatgtatccgaggaaagcctgagctacaaggcaaaggcatcccatctggaacaaaatcagaaagctattggcaaaggtaatcaatcaggccataaatagccatttacccgcttccttttcggggctggaggtgggccgggagccctccaagggtgagctgggcaacttgtagagcaaggaatatgccctccgctgccggcgccccggccgcttttgtctgggctcccagccgggcttccgaggctttgtaccatggatttgggagtgacaatgggcatttccctcagattcaaggctgctcaacctcacctctgtagggggaaaaaaatcagaagggagtgtcccaaggacctagccattcggccgaattttttagacattttgggagtctcctccgaggcctttaagtgcgaaccgcgcgaagcggccctgcccggggagactcgctgaggcagggctgaggcggcgggcgggagcaagctgctctagcatttgggttctgccctgtggcgtgttctcttccagggcctttccagcatcatcggagaagacgaagcaccctggccgccactgtccgtgctgcgccaactcgcccggccgcccgcccttccgagggcaggcagaagcccctctgtgtcctccaccgccgcgccccggctcgcccctcgggccgcg

SEQ ID NO: 24773 - DNA, 1056 bp, Homo sapiens
gagctcctgcttgctgctcttgacttgttgacagtcacaggaatgaagcattattagtgtcagcagtccaagccccaaattgaagaacgagattagaattggtttgagatgaataaaaattaaattcagtggactggaggtggcatttggccactagagagcgctgttgctccactttctgatctcgtaaagctggaattgcggcggagaaaggttttgattaaaaatattaacaatcttatttttaatccgaaattaggataattttaaccaaaaataaacaaggtgtactattaatttctgtgtttgctgggcataaaattttggctcgatcatggcttcagaaactttggactgtggcacagctgaaactataaaacatgataaattaatgtattatatcaaaacagaaagctgtaaaaagcatagatcttttcttactaagttaatcgcgctctttttctactcatattataaacggaatgcttaaataaatgttaaaaactgttttgtcccaagaggaaatgttgtaacgttttctaaatttggcctgaatgtctataaatgaattttctagtgttcatttttcttttattcccccgaggaatcacacagttctacaagatgcctggtattgttgagatccaggctctttcattttccccccccccattccattccaaaatccactcatttatccagggttcaaacacacacacacacacacacacacacacacacacacgccaaactgaaaaaaaggggcacaattacaaaggtagctccaaggctttattgacaataataatcttttaattgggcatttgcaagattgaaggacaaatccttaattgtcagaatcaattcgttcgccttcggatttaaagaaagtcattatacttggcaataaccagcagaaaaaaaaccccacaaaaacaaacagcaacaacaacaaaaaaacccttgctctccaccaccccaagtctgcactccttactaatttaaaaattaaataaagcatgcctctgtcatctccagattcattaacgattcctt

SEQ ID NO: 24774 - DNA, 1059 bp, Homo sapiens
gttttccccgccttgaagaacgactcaaagggaagcggtgcccaagatgtgacatttctgatccacataacaaccttcagagtgttcattggcaacgaggagatgctgcttgttcggcggaatagggtttgcaaatcagaaaggacagttgaagcttttaatacatgttttcctgaaaaagaaaagtgtgtttcctgcttcttgagatgaggttcccaagctcctctgcatccaggcgtagaagcagtgcgcggtaccttatccgcactgcgcggtgcaagccggccgcacagctcacggtcccgcagcgcccgccacacacccgcgccagaggtccagcgcatgtgcagtgaaatggcctagcccgggaattcgatcggcaaagcacgggtgtgggggcgggggggtgggggggggcgagtggactcgagcaggaagatacacccgatctttccattctccctccgtcaaggctcgctactcatcttgcctttatctcagccttccctgtatagctgaacagttctacctttggctacatttccaatcattatgacttatcacctcaccccagtttaaatctgtacgctagacataggctgaaaatacgagacgagggccaaaggaaacactcttctttccagtttatatatatatatagcatatatttgcccctcggggaaggctgtagatttttttttttcagcctgctgctactactttgggaaaaggccttttctcctggcgcctgttcaaaccgccacacttcaggccaatccttcggcctgaccattcccggatcttgttatgccagcacagcacattcgagggctctggggggcagcagctcggcgaagagcagtcaaataaataaataaataaacaaataaatgaacggacatataagggcttttcccgcctgggttcgcttaaataatgggggacaagcgcctctgggccacgagcttgttgtttgtcctgggatggggggtaggggatgagaggtggcctcaggtccctcttgctccttccagccgccccaggggacactgtagaacc

SEQ ID NO: 24775 - DNA, 1027 bp, Homo sapiens
ttcctacatggctaatgaaacaaaaaaaggagaaatggatgccttacaatccaggctaatagccccctgctttctagctaatgacagtgaaatcaggaaatgggtttgaaaatgcatgtagaatgggtggaaattgggatgcaaagagatctttgtatgaagggatctcttttatgggcttgatgggtctttctgatgggaacagttgcaactgaatttgatttagaaatcatatgtgtgtgtgctctacaaatctccacagaacatccattattttcatcagaatagtcaaaaccacacgtttttacactgtttggtggcaactctggtgggctattgaagggtgctggggggtcaattctctttttatttatgctccttggtgggagctgagggcatctttccctctctcttacccccaccccagcctcccccaagcagagaatgccacattttcctagagagcagcttcaggcccaagctctttccttggctttctcagcaggacagcggcagtgtactactctctcttcctctcttaggctctctccctggtgggggcagcagtgtgggtgtgggggtagtgctcctaaaactcccacccagttttgagcccccaaagttcctgagccttaatcactgtgcttggagacaccatgggagtggggacatctgacttcctaggcttggattccttgagagtctcatttgcttcctcacaccctgtcgccttcacaccagggctgttttattgttttataaccttctttggagctttagttgccaaagattctaatgaggctattctccactttctcactttaccaaaccccaagtcttgctgtgttaagcagtttggtcacttgcaaaggctttcctttcagatctaagcgaattacagaaacctctaggcatgtggctaccttcaactttgtccaagcccatgcacaacaatatggagggagccaagtgttaattccaactgctactcccacccccaaacccacccagcctctccctaaccacc

SEQ ID NO: 24776 - DNA, 1055 bp, Homo sapiens
atctagaagtccacaaaagttagccttagagtttttttccccctgaagttttaatttttttaaaaaccaaatctaaggaagttttcctcagctcattaattagaagcagaatttgtaaaagtataaaagttttcaagcactcgtctttgccttgagaatagtggttttttaaagaatcactctcaacaggggagatgtcctctagtcgtttttcttctgcctctcctgggaagggttcaaagttcatttttctaaaatgctgaccctcaagcataaggaggaagaagtcaaagttaatggccagagttcatatactcagatgaaaccagtcttcccaaggcctcaggctccaaaaaaggttgtagctatcaaaaagtgaccaaagtgggaaagggagaaaggataagcttaaaatttaattttaagatccagaaggggggtatttttttcagtacttcaaaaacactttagaaggtttctgttgtaatttaaaaaatatatttaagtgggagggaaaaaagagtttctctgtaggcttgttctttggctgtgtctcctgagagctgagggcaggtattcactgcagtccctaggctgaaattccgcttctctgaagtgtcttccaagccttggtcttttgtattagaccctggggactgctctttgtttctccttggggtgagcctggctctcagacttgcacatggcaatacttgaatgtcaccacgtcgggatattaaagatggatattcgtgcattattcacatcattgtttctatgacaaaaagcacagagttcatacatagtcaagacgtcttttttctgacgccctcacgttgagaagctgaaaaggtattttaccgaagttcgggtaaattacagaatcaggttcatccagaggacaaattttctatttgattagctgtatttcagccgggaggactgacctctaaacccctaaccttttggactctaactacccttctcttcttttttcctctctaacatggagagcagtctttggatgtaccatttgaaaggagccgctatcctta

SEQ ID NO: 24777 - DNA, 1034 bp, Homo sapiens
gaattcttcctttgtagtgatcattagttcatttctaaagaaaacaaacattccccaagatgtaaagtaataatatttcattaatgaaacataacaagtataaacaccttgtttactcctgtttcttatacaaaatgggcaaaaatgtcttcaaggatttataaccattttgtaaatattaatgtggcttctgctaggggtggacaacttcccggcttctatgggaggggccacttagaaaacgccttcagataaggttcaattcttttgtatttcagcaaagtcagcccacgcatctctatttggtttgacaaataatgcaactcctactacatccccgatgacacgaagtgaaattcctattgtgtggaaataatttaacttctaatcttctggtggaacaacaatcgtttctatttggatgtttgtatttcactaagtaatgatggctcaaaataatatttagtttccttgttcctttgtgctgtttttaaaatggcatgttagatttgggggtgggaggggatatccttttgctaaatttcactttatctgagcaggtttaaaatatatatgttgtagaagtgtatcaacagaataaatgacttcaatcgaaggcacattttacccactttcaaggcttaacattgttttctatgaaatttgcatccataggcagaatttctaattgtcttgtaagaaattattttttaagctattagagaaatcaaaggagagctcactgccttgcagggattacaaccacctttcttaactggctaaatattaactagctgaattgtcaggctgcttagattcagcccgattttccctcatctcctcttcctaccataaataataataaaaatacgtaatgtgtcatggctccaggcgttttccagcacagtgtgttaccgcaggagtatctgctgagtctgcgggtgtctgcaaagccccaagtgtcatttgcggcttagggtttcatggattagactttaaacggtgtctagcccggctgacattagcttcctctc

SEQ ID NO: 24778 - DNA, 1035 bp, Homo sapiens
tctgaaatgtatgctttttccctacaccacctgtatttgcttaatgtattttaaatggttatgtttaccttagtcacccctaatcccacctccctttttgttcttcacctgctcaacaaaattagatcctagagggcaatgacagttttatattcatctttgtattatagttgtgggtacattttggatgtttatcacctatttgttcatttaaatgcctttaatattttttagggggaatcctctgagcattttctactgtgttctcatactcttaaggaaattcttgaccgttacctcatttcctgtttccttcttcttggagaatcttgcagttttgtcagcatttcaggtggtataataataagtcagattctctgtgggggataatttgttctataactagctgggaggagtgaaggaagaggaatagagttttttggttagctagcttgatatgagatagcaaagtatatgtacagtacctggaaccataatcacatagtagatacttaaaaacataggtgctgacattacagtgattgtatttggtttagatgggaagaactacttagtttgaaggatatttgttttctgtctctagagttagatttagagaaccattaaactattgcactgtgaaggttaatgttgttgaggtctcacagttgtgtggggctgtttttgtatctgttttttggccagatggattagacttttactcttaaccagctgtttttctatagttctgctgttgatctcatattcatttttagttctgagaaaaactcatagtatcagtgcttcttttttttttaaatttcagattaccattttaaaaatgaaaaaagtttgagtaacaattacaagactcttctgttaatttatcattatcatatgtagttggcctgctttttattggaaattaatgaaaaataatggatttttttcttttttttttccttttctttttgtgatggggtcttgttatgttgcccaggcgtgcctcaaacttctgggctcaagggatccttc

SEQ ID NO: 24779 - DNA, 1058 bp, Homo sapiens
tcttaatgtacataagactttcctgttgagaaaacaaattttagtaataatgaatccatttattattccacacatctttcttaattatattctcccataatacagctggaagaagagagattgtagaaaaattaatttgtcgttagatcttgaagtcatcactgaatgtttttggtttctaattattttttctaatgcttaattttaacaggttttgagatgctttagcttcctattttttaaaatcagtattatctttatgtcagtagattaaattactgttttaaataaataattcaaaatttttaatataaaaatgtgctacaaagctgataaataaatgttatatataattatcatggatgattattgtaattatggttttgttggagcaataatacgtagaattactcctttttgaataaattattaagtataactgattggtataagtgtgtaacattgctttttagggagacatttttcattttgatatgataatttaggagtgacttgtgttaaattttttttttccaccttaagtttttaagggtggtagaaattgttaaaaggtatgaagacaccccttctgtacataatgttcttttatataaatacctggttttagaggtttatgaatatacatttagaaaacatttccataaaataatttctaggcttgtaaatgtaaacatattttagattcttggagggcattcattgactcatttttgtgttggttttatacgtagattttaggaactacagagttctggtgaaataagttatgttgtgttttgtccatccttttcctctatgtagtcatacaaacagtttgtatatttatgtaaaaaggttagaaggttagtaatctaatgctaaagttcagatctttggcaagtgagatatcaatatagtttatctacctgtttcctaaaattactatacttagtgtcatttaggtagatacctattttctttttattagattgcgcgaaagacaaacataaatattctagagacatacaaaaatatacattctttcataggagtctcct

SEQ ID NO: 24780 - DNA, 1078 bp, Homo sapiens
cagctcactgcaacctccacctcccgggcttaagccattctaccacctcagcctcccgtgtagctaggactatagccaagcaccaccatgcctggctaatttttgtattttttgtagagatgaggttttgccacattgttcaggctggttgtgaattcctgagttcaaacagtccgcccacctcagcctcccaaagtgctgggattacaggcatgagccaccatgcttggcctatattgttatttctaatcttttaaaatattttggatctgaggttagttgaacctacgagtatgggacctgtgggtgaagagggccaactgtgttttctattgtaaaagttaaatgctacttactcacattactctcatttctacttttaggcctactgaacttgacgcactggtatttggccatctatacaccattcttaccacacaattgacaaatgatgaactttctgagaaggtgaaaaactatagcaacctccttgctttctgtaggagaattgaacagcactattttgaagatcgtggtaaaggcaggctgtcatagagttatgtgttagtctcaggagtcttaacttttgaaatatgttttacttgaatgttacattagatattggtgtcagaattttaaaaccaaattactgctttttgaaacctcaaattatataatgtatcttatgtatgtgctttatattgttatttgtgtatacattaaaataattctgaattatttaatctgatatgttgtattctgtatcttgaaatttttgtttccttgaaacatgcatgcatttaaaaataaagcttaaacaactgtatggatgttacatttactttcttttgatttttctgaaagtcattcactgaattttacacatgtggaataaacagtgtcttttctaaggcaagtaatttgtgttacatactcccaagattcccttgctagttacatggtgaagcagataatgggaataaacgttcttaacaagtgtgcacttagaaaatatggatggttttaaggtaattaaattttggtgcagatttgacatttaagaacattctttatatag

SEQ ID NO: 24781 - DNA, 1028 bp, Homo sapiens
cttattaaatgttccatgtgcaatagaaaagaaagtttattttgctgttgttgcatggaatattctatcactatcagttagtgaaagtgttggatgatatcaagttggttgataatgtagctgatttttctgcctacatgttctgtcaagtattgacacacggatattaaaatgtctgactatactggtgggtttgtctgtttctccttgctgttctatcagtttttgcttcatgtattttgaagctgtcatattaggagcatagatatttaggattgttctttcctcttgattagctgacctctttatcattatgaaaagacatttttttccacaaaagtctttgttctgaaatgtactttaatagcataaatcctccagctttctttgaattagtagtagtatgatatatctttgtccattcttttacatgtaacctatttgcatctttatgtttcacagtgagtttcttagaagcagcaagtagttgagtctttatatacaatctgacaatgtctgccttttaattggagtgtttagaccatttacacctaatgtgattattgatataatgaaatttgaatatactttcttgctatgttttatgtttgccccatctgtttctgtttcctttcctgtttttctgcctgcttttgttttaaatgtttattttttatcttaacatttctgttagttcactacctataactcttcattttgttatttagtgattgttttaggacaagcttgtctaacccattgtctgtgggctgcatatggcccaggatggctttgaatgtggcccaacataaatttgtaaactttcttaaaacattatgatttttttgcaactttttttttgttgttgtttagctcattagctatagtgtattttatgtgtggcccacgacaatttttcttccaatgtggcacaggaaagccaaaagattgcacacccctgttttagggtttctagtatatatctgtaacttataatggcctaccgtcaagtgatactataccatttc

SEQ ID NO: 24782 - DNA, 1032 bp, Homo sapiens
aaaactttttattttgtaggtaatgagagacccccaaacaaaacgttccaggggctttggttttgtgacttattcttgtgttgaagaggtggatgcagcaatgtgtgctcgaccacacaaggttgatgggcgtgtagtggaaccaaagagagctgtttctagagaggtattttaataatacattgtgtaatatgtgaaattgttgtgaaagtttgtttcttgacttaatatattactttatttgtaggattctgtaaagcctggtgcccatctaacagtgaagaaaatttttgttggtggtattaaagaagatacagaagaatataatttgagagactactttgaaaagtatggcaagattgaaaccatagaagttatggaagacaggcagagtggaaaaaagagaggatttgcttttgtaacttttgatgatcatgatacagttgataaaattgttggtaagtagcaatttatggtaacttgaatgagaaagtagaactggtttttctgttttgaactaaatttgctaaattgtaattttctgttgcgtgtaatggcatttatagtgtatagtcaattttcatagtgtctgcctgtgtaatcagtatccagatcaagaaataaacataaacatctcagaatgctccttcattaccagagtcactacctgattatgtcttaatgggttacataatgacagagggtatctcatatatgtgcttttccaaacataaaataactttttgttttgtttgattgaaaaaaaatttagttcagaaataccacactattaatgggcataattgtgaagtgaaaaaggccctttctaaacaagagatgcagtctgctggatcacagagaggtgagtaggaccatacacatgtatacagtggatatgagtggtgtttgtaaggttcttaaaaatctcccttgcctgtattaaaggtcgtggaggtggatctggcaattttatgggtcgcggagggaactttggaggtggtggaggtaattttggccgtggtggaaactttg

SEQ ID NO: 24783 - DNA, 3098 bp, Homo sapiens
gtataattgtccaaaataacctaactgcagcagaaatgtagcacagttgcttagtacaggcttctcacttcctacagacctgaattcaaatttggatagtctgagttcttaaattcccaaagaacacactgttatttcttgtgtatatttcaacataaatcatgttgttaccaatttgtttggaaggccctggttgagaagagttttagttaataaggtcatatatacatatattaatataaaccaatgtctactgttttgctccagctagtgcttacagtttcattcgagccctgagtatgtgccctgctgttactctctttggtagttgaacgttgaattcaagtcttttgttttaagaagtactaagcaaacaagcaataaaaaggggaatggggtgtgctagtgtttgaatatgctctcttgttgctctaattctgtgcctctgtgcattaatatttggatgcatgcaatgccagcatggaaattggtcttcacacatactgcagttttccagaaacattcacaaaccaataaatgtaacagacattccatttgttaatgggcatatatgtgaaaagcagtgtagaaaataggctaatattagaaaatggttaagtcctaaataacttcaagtgtggttatataatggacactgtcaatgttcataacttaaacctgggtacctggtcaaaataatgcttgggaaacattaaaattgagctaaattgtctcaagttcttttattcatataaataaagtttaaaggaatgggggagattaacatttcctgttttatgtttgtgaaattgtttgacacaaccttgacagtatcctttaatggcatgaggttaattgtactgttaaccaactttctatgttctggaactagtattatagtgaaaacatttacagtaagttgatgtttacaacctataagcaggtgaaatctgtgtatgtgacctgtttataagttgtattagcttagctcttgtgaacagtgtggaaaagtaagccatgaggagagcgatttaaccacctttaaaggacctaagatgtgctttttaagcacagtgtggatcacagaaactcactaagacaggacttcagcagccttttgtgtttggacaagtcagcataaataaagaatgacaaggcagcagcaagagcttcaactacagagaagtgaaggcataagatactatgatgatagtgagcaactttccaaaagctagttaaatctgcttattacaactgaaatatcgaagaaagtctagcaggaaggagctcttcgccttttggaacatcaatgagagatagttgccacagtcactaggtctagcatttagacctgcaaggaagggcaataagcattaggtaaggcttgaatttgaattttttcactaattaaagagtaattttttgtaaagcaaggtaagagtaatctttttgatttgcaggttgaatgagaaccctacttgcctaaatgaggaatgtctttcctaccatctaaaatacgaaggtttctggctgggtaaggtttgtagttgacagtaaaacctgatgacaccatttgtttccctgcaagtctacattacatatttcacaactttgtccctctctagtaggcacattggaaaaattcttcaactgaaaactaccttggtaccatgtcctacacgttttaaaccttagttttaaaaattcccctgcgaaatagccataagtattcatatcaagtcagttgtgactccttgtgtatacaattcattttttgtgtcttcagggtaaactcaatttttggtaaagtggtttcagcttttgtgaaaaccgttttggtgtgtaagcatgacacacaacagactcagtaagctgcccatcctcatactaggaaaacaccttcaaaggaacattaaaagttaccagggccaggcacagtggctcacgcctgtaatcccagcactttgggaggctgaggcagatggatcccaagtccaggaatttgagacgagcctgggcaacatagtgagagcctgtcaacaaaaaatagaaaaattagttgggcttggtgatacacatctgtagtcccagctatttgggaggctgccttgatatcaggcagtcgaggctgcagtgagctgactgccccactgtattccagcctgggtgaccccatctcaaagaagaaaagttaccagatgtcatgggtaaaggttggtcttcaagtggcctcataagttgtcttgcatttaaattcagggaattcattggaccaataggttacattttcgttccttttttgttttggttcatctgttaagcagtgggggcctaattactgctcctttgtaaaaacacattttcccaaagaacactgaattaccgttcaaactggttgttgatgggtaataagggctgtttttgctgccccaaaagggcttaacaatttagtcggatagtttacttaaaaaaaaaaatcctttggagacatactgaaaatgcaaactagtttctaaattatcaattccctacatgaagaagcagtttgccagagtttagtctcagaaaatgactggttggctctatttaaatcagaacccaatttctacgcgtgttgaataaggtaacagcctttgatgaatttccttcacaacatggttttagtgaagcaaacattttttttttaagggcattgttctttctagtttatttctttttatgaaataaaattattttatttaaacagttccattgtcgtttctgaaaactacagtattctcagaagttgtagcagcagtaaaaaaaaaaaagttgttatataagtgattggggcagatttaactgattttgttaaaccaatttgtaagttactgcttctaatattacacttctaaaaagctgaatttatactcatgtcctaaaggagaatatgtggtaataaagtatatttgttaagtaactaattgaaataggcttggttttaagagttccagtatataataatcacaaattgaaacctgacagtatcttgggagttccagtaatgtcacaaattagtgaataagcatgccagtgtgcaagggtaatgtaaggattgt

SEQ ID NO: 24784 - DNA, 1027 bp, Homo sapiens
gcttagttgagaaattgtgtaattcaggtagaagggatttctggttaatatcagatttaccagtgttctaaatgtggaatcttttatgttttatttaaatagaataatgcctaatacaatagaaacatcgatgtagagatcggcttttcaaaatcttctgaaggagtaaaaattaatcttctgaacttagaaaaccgaatttctctcttctcggacactgtcctcatttctccttctctttttctctgtgtttggaccttgaaggtatacagtatttctgttttatggaacagggtagatagtcacttgtatttcagcaaagtcttctgtacagtactgtaggccatgtaatggtttatatgagaaggtgtgtgtgtatgtgtgtgtgtgtgaaatgaatgactagtcataaaacatcacaggtaattataccttagtgggtcccatgttttcaggatctcgttcttattttgggtgttctggcacttgatttgtcagtttcctggaagagatgaggctgtaggggtctgacacacatgccacacttctaagaaactgatttaaaaaattagaacctcagtgtattcatttatggttagattattgctttttcagggtatggaatacttgttagtgccctttctgatgttagggtatctagagaacaacatttgcaacttagatattctttggagagcatacattcagaacaaaggagatttgatggtcttgatagagatttttatacaggctgtaatagaaccagagaatttatctgttggttttaatgggttactaccactcctaccagaatgcattccttaaaggcctcatttctttgcattgttgactcctaagtcagagtccagtgggggagagggagaataagggttcatctgactggaagagcctgcaagggagaccaggaaagtgaatatctggcaaatttgcattagtggagggtagcttttgccttccttcaagacttacaaaaaggataattccccaaacgtataaatgggattta

SEQ ID NO: 24785 - DNA, 2015 bp, Homo sapiens
ctgttttgtttatacattcacctgttgatgaacacttggattatttctagttttgggctattacaaacaaagctgctatgaacgttcatgtgaaagtttttgtatagacatatacatttgtttcctttcggtaagtaactggaaatggaatgaatagatcaaaatggtaggtatatatttacctttttgagaaactatgaagttttttcccagagtgattatatcattttatattcccaccagcactgtataagagttccagtttctccatatccttgccaatactttgtattgctagtctttttaattttagtctaaactttagtaggtacatagtagtatcttattgtaggtttgttttgttttgttttttgagacagtgtctcatgctgctgcctgagctggagtgcagtggcacgatcatggctcactgcagccttgacctccctgggcttaggcaatcctcccacttcagcttcctgagtaactgagaccacaggcaagtgccaccatgcctggataatctttatatttttctgtagagatggaattttttgccatgttgcccaggctgttcctgaactcctgggctcaagtgttctgcccaccttggccttccaaagtgttgggattataggctcgggcccctgtgtctggcctcattgtagttttaatttatatttctctaatgactagtgatgttgaacatcttttcatgtgcttatttgccatccatattctttattggtgaagttctccttaaattatttgcccaattttttttttttgagatggagtgtcgctctgttgtccaggctggagtgcagtggtgtgatctcggctcactgcaagctccgcctcccgggttcatgccattctcctgcctcagcctccccagtagctgggactacaggcgcccaccaccatgcctggctaattttttgtatttttagtagagacgggttttcaccgcgttagccaggatggtcttgatctcctgaccttgtgatccatctacctcggcctcccaaagtgctaggattacaggtgtcagccaccacgcccagcctatttgcccaattttaagattgggttgttttcttattattgagttttggaattctttatttattctgggaataagtcttttttcagatatatgctttgcaaatattttctttcagtctgtggtttctcttttcattttcttacactatcttttgaagaccagctgtgtttaatttttatgaagcccagtgtattaatttgtctttctatcatgcttctgctgttgtgtcataatgcaaggttatagagattttctcccatttgagttttataatttttagtcttagatttaggtctctaatcagttttgaagatttctgagttattatttgtatatggtataaaattggattgaagttaatgatttttgcacatggatatccaattgttcagcaccatttattggaaaagattatcctttcttcactgagttgactttgcaccatcatttaaaaaaatctgttgtctatatatgtctgcttctagttctggactctatatatgtctctgtgctaatactatactgtttggattactatagctttatcacgagtctttttcaaagttgttttggctattctaggttctttgtatttctatatgaacttcatgttcatatggaaatgtcagtttctgttaaaaaaagaaaaagtcccattgggattttgattgggattgcattgactctatatatcagtttgaggagactgacagcttaacagttttgattcttctgacctgacccatgaacatggtatatctttagttttttgtaggtctgtaatttctctcagcagtgtcttacggttttctatgtacatgtctttcatatatatatattttagagacaagatctcattctgttgcccaggctggagtctagtggcaccatcatagctcactgtaaccttaaactcctgggcttaaatgatcctcctgctacagcc

SEQ ID NO: 24786 - DNA, 1051 bp, Homo sapiens
tttgcttggtgtattttaaagctcggttattaggaggataaatgttcaggattgttatggcttctcgattaactgacccttttgtcgttatgaaatgacctcctttatgtgtgataacatgctttgctctgaaatctgctttttctgatactaaaatagctattggagttttcttagcatggtatatctttttgctttttccattattttactcttaattagtttgtatctttatatttagaatgtttttcttataggcagcatataattggttcttttctttttatctaagttgacaatcactaccttttcattgaggtgtttagatcatttaccttcagtgtgatttattgtggtttagtttaaatctgtcatcttgctattcattttctgtatttcccatctgtttttgttcttctttccctcttttactgcctttttgggatttttttttaaatgatatgctttatctctttagtttctttagtagttttaagtttttgttttgttttaggatttgaagtatacatctttaacttgtgtcagctacctttgagtgatattgtaatactttgcagtatcatttaaaaaatttaaataatatgaaagcatcttgtgtatttacccatctagttaacctttcctatacccttaattttgtctgatgttatttgccttctgcttgaaggacttcttttaacatgactttagtgtgggtctgctgttggcaaattctaattttgtctgaagaagtctttatttcacctttgtttttaaaaaagatatttgaagtgagtatataattgtagattgatattctttcagcagtacaaagatgttgctccactgttacctacttcattgcttttcatgagaaatctgatattatctttgtctttgtttctgtgtatgtaatatgctttttccccctctggctactttttttttttttctttgagacagagagtttcactcttgttacccaggctggagtgcagtggcctgatatcggctcaccacaacctccgtctcccaggttcaagcgattctc

SEQ ID NO: 24787 - DNA, 1321 bp, Homo sapiens
ttcacttatttagtaggaagttagtaagattttaaatgaagtaaatttaaattggtgtggtagagctcattcagcatggggaacatctggtttttttggtatctgtatcttttgctttacacaattcctggtatatagtacctgcttgtaattggagaagataatgaagtaacctacctgacaaaagaaacaaattaatcgtatatataatattggatatactgatagaaataaagtgtaacaccgcactgttaatactagacagatcaacgagacagaaaattaacaaggatattcaggacttgaactcagctctggaccaagcggacctaatagacatctacagaactctccaccccaaatcaacagaatatgtattcttctcagcacctcatcacacttattctaaaattgaccacgtaattggaagtaaaacactcctcagcaaatgcaaaagaacagaaatcataacaaacaatctctcagaccacagtgcaatcaaattagaactcaggaataagaaactcactcaaaaccgcacaactacttgaaaactgaacaacctgctcttgaatgactactgggtagataacgaaatgaaggcagaaataaagatgttctttgaaaccagtgagaacgaagacacaatgtaccagaatctctgggacacatttaaagcagtgtgtagagggaaatttataacactaaatgcccacaagagaaagcagtgaggatctaaaattgacaccctaacatcaaaattaaaagaactagagaagcaacagcaaattcaaacactagcagaagacatgaaataactaagatcagagcagaactgaaggagatagagacacaagaaacccttcaaaaaatcagtgaatccaggagctgttttttgaaaataccaacaaaatagaccgctagccgactaataaagaagaaaagagagaagaatcaaatagatgcaataaaaaaagatacaggggatatcaccactgatcccacagaaatacaaactaccatcagagaatactataaatgcctctacacaaataaactagaaaatctagaagaaatggataaattcctggacacatacaccctcccaagtctaagccaggaagaagtcaaatccctcaataaaccaataagaagtcctgaaattgaggcagtaattaatagcctaccaaccaaaaaaagtacaggactagacggattcacagctgaattctaccagagatacaaagaggagctggtgtaccattccttctgaaactattccaaacaatagaaaaagagggactcctccctaactcatttt

SEQ ID NO: 24788 - DNA, 1055 bp, Homo sapiens
acatccaactcagaattgtgttttatctcttcttctcactttcagctgcttgaccaaagttttatcttctttgctcattaacattctaatacaaacagtccccttcattttttttattataccccattctcaagtagttctagactagagctgcttatatcaaatctttgccacttcttttggataacaccatctacctatagtggcaagtcaggaaattttgatttagcccatttagcttgaaattatcttacagtatttgtacagaacaagagtacatctacattgtagtgtttacttactaccaaattcaacacaacttcagaagaagaaaatatttaattataaggtgttaattgaggtgataagataaacaatttttcctttagttgactaaagttaaaattttaatttctgtatgataatggaaaaagcataattaaaaactatttactaaaggtagtggaaaaacagtattcattcattgtcttttaaaataagaataacttttacaaacaagagtacttggactgaattatatatttgtatgggattaattctaactagatcatcaaatacaatttctatggatgaaattttccaattgaaagagatagtttatatgttcatagtagtaagaccttacctgtgttggtcttgtgtttgtttatacattgctttataaaatatttctatgtaagtatgttttgtctctcatttaaatcataaatttcataaaataaacaccacatctaacattccaaatactatgtactcatcttgtattctggaagcttctcagtattggggagttcctagtcgtcacatttcttcaaatatgagtgagacagtaataacatatgaatatatgagtaagaatatgatgagtaaaataagaatacttgtgtgaagattatttcagcttatttgtttctcatagttaattctttctgtgcttttttgagaatatgggtagaagtagttgagtttatgagtcaattttatttcgtggataaaagtttgaaattaagatgaaacagaaatattaaaagtgt

SEQ ID NO: 24789 - DNA, 1025 bp, Homo sapiens
aataaatgagtgcattagagaaaaacacatgctttagatcagatcagtaatttggggatttttttgtttttttccccaaacacaggtgggttgaaatgactcattttacttgaagtgaaaacttaacatatgttgagttttctgccttataaaattttctttaaaatctctggacttctgtgaagctttctttccaattttgataacaaaacaatattgctctgggtaaagaaattaagtattataagttacttgtaatatgagtattatatcctctatactgtaaaatattttcgtagtagaagtgcctccagatgtttgatctattctgtcacttcagatagctgcactatattactatgttttctaaatttgtttttaaagaaaagttgattttaagaaaaaaatctcctcattctaaacaccttccccctgcccctcacttcttgatcttcctactcctttgatcttgactaattttcgatattggttaatttactatttatgccactaaaattctgttctgtcagtattctctacatgtacacagactgttcctggatagaaactccattcactaaagaaataaatttgagttcttgccctgagtcaggcactctgcctggtgccaaggatacagagaataagacagacaaggttcctttagttacggaggctgcatctcactccagggacaacttttcagtgctcttatgaggtggatagtaaagagtggatgaagttaaatgagaaacatgtgatactaacaatgaatatgaaagactaacagtgttattgattcttctgcatctgttgtagtttcttgatttttctgtttgtgtcttaataggacttggctttggaatactatgtattaggagaatcttttgagacttctgctccttgggacaggtaaaatatactaaagtgcctgatattattcaaatatgcgatatgaattgcttgaagtaatgtttctttttgtgtgaatatgtaagtttaaaacattttatgaagaaacattg

SEQ ID NO: 24790 - DNA, 1027 bp, Homo sapiens
tttggtgaaataatttattttttaggaattattgggttgaagttgaatctagcaacgtttgatggcatattaatttatttagaggttttgcctcatttaaatagaaatcttttatgtctatcctatttcttgtatttttattttctatgtggtcaaaatatgaccgcatggaaacagactctgaaatacctggttttctctagtgcttagaaaaagaaactttgataagtctgaatacaaaacatactttaggtatgctgataaaatgaagatgctttcccttttctattttttttctcttctaaattgctaaatattggagtcttccagggctcagccctcagaccttcatttctctatattcactcatttatttgatgattatctcaagtttcacaatttaaaagaccatctgtatgctaactcccagatatcaaaagataacacctctataccactaccctagttgcaatcactattttctgcagtagcctcctaactggtctttcttccactctgctactgtattctcatttctcttgctgctcgattaatctgttaaaaaaatcaatggtttcttctcacattcagaacaaaatgaaaactccttatcatgaccttcaaggatacattgtatatcactctgtcctcagctttgattactttgtacctctagcagcattggccttcttgctattcctcagacatactaatcccttttcccattcaaggcctttgctgtttgttccctctttttataatgttctttcttttgtcctctccttcagatatttgcatgactcactttctaccattgtttaggtctctaataaaaatgtcaccttcttagagggatcttccctgtcctcttgtgtagtttctgtaatccccatttgaattaaatttattgaggttaatgactttatcttgtttgtcactgtatttctcactccctaaacagtgactggctgctctacatagttcaacatcataaatgctcaatgaatatgttaaatgagtggataag

SEQ ID NO: 24791 - DNA, 1129 bp, Homo sapiens
gtctgcgcaacatagcaagactctatctctacaaaaactaagaaaaaaaactagctcactgtggtggcacatgcctatagtcctaactacttgggaagctggggcgggaagatggcttgagcccaggaggttaaggttgcagtgagctggcatcgcaccactgcactccagcatgggtgatagagagtaagatcctgtctcttaaaaaaaaagaaaagaaaaaaggcagtagtcttgtagttaatttagcttaacatttggtaactaggcctaaatattgaatagagggtcatatttagtcatagaaagtctcagtttattctctaatatttctgggaaagcatattagcagagtgagttagttattcactggagaagtagggtaaaataatgtgcatttttctgcaactccataccaccaaccatttagtgttcttccataaatgcattaagtatgtaaggtttcattcgaactttttgtcttaaaaccaatataaatttgagtggctgaacaacagaggggaaataatgtaggctatggaatcaaatctatattggattcctggttttgcatttaactgtgtgaccttagggaaataatttctctgacttacactttcctcacctgcaaaatgggaataatggtacctgtctcatatgtttattgcaacacttaacgtgttaatctatgtaaaacatctaaatgccttacatttagtaagtgcttaaaaaacaatagttttgtttgtttgtttgtttgtttttaataatagcaataaacagcaccaggtggcaatctgtttggcactcttgccttaaccattaaagaaaggattacagtgtatttgagaaagatccatacattcaagggatatgattcaacaatagttttaacacttcatttataaactacagttgatctcaccctataggaaagtttcttacaatcagcatgaaagaaaaataaatttccttcacagtattggctatgaaatttgctatcgaagaatgttattttcataatagcttttctgtttataggtaatcatataatttgtgtatttcaaatgcctgctgctattcagtataattgcataaagcagaaaccttttcaacataaattttaaat

SEQ ID NO: 24792 - DNA, 1022 bp, Homo sapiens
tgaggcaagaagctttgggacatgaacctagagtaaatatgtttccatttggtaagtaggcaacctttacttttaatagtataatgtagtatatgcaatctaatttgggttttaaagaatactctgttattgggcatctataaatttcacctagtgaataaaaatcttaaatgtagtttttttattcctaaaatgtggattatgactcctaaagttcttaatatttaacacttattttgtttaactgatttctaattatagttttctctgttaagttacgcattcctcatattagaaactattaccactgccacttttttgggtgagcttctgcctctatatagctgaccaaaaacttaaaaagacatatgtagagatcctctccgtatgagtcctaaaattttgttccagaactactgctactttaaaattagggctacagaaaggagaggaatggtaaaagtagaagctctaatagaaaaaggggaaaatgggtaatgaaagtaaggcctgtgaatgttatttgacgtaaacattcaggtaaaatacttaccatatttttcagttttgcatactaaacttctttctgtgaaattagactatgcatttcttcttatatttctgcattaaaggtaggggagtggggagagttgtctcttcttgtcattagtcccatcggtagttctgatgaccagaagcgtactacaaaatacagtgcctttattcagtacaatggactctgttttctagtatttaaaatgttaagcgaattgttggctgtgtagaaatctaaagatttacttttttttatattgtcggagaacaacaatctgaattttcaagttttgacaagaatgatagccgaggccaggaagcaatctccaaacgcttgtcagttgtatcaagagttcctttcactgaagaacagcttttcagcatttttgatatagtaccaggattggaatattgtgaagttcaacgagatccttattcaaattatggtaaaataatgttcacattaa

SEQ ID NO: 24793 - DNA, 1063 bp, Homo sapiens
gtgacgcatgagtaaaatcaccttctgtcacttggatagaaaacgcaaatgggcttttttcctccatcttccaataaactctgctttatgtgtgctgctctgttcttgtcaatgtccttttaaaaactatcttacaaattttatttctacgtcatacatctttttatcttggagatcccaattcacaaaaattatttcaaattgtttttgtttagtatacaaaggagtagtttgcatgtaacactggaaaattccttccttcatcattgtggtgtaggggaagtaactgaaggcttaggtttcagttttgtccccatccctgccattgaatcagccatgtccttgatcagtggagcagccagaaggaagagctggctgctccttgctttctggtcccagctgccctgttctgccccagcagctgtctgccagctgattactcagggatgttctgggttatacgtcaaagattgaccgcagttattttaggaccgctaaagatgtccttttgggagaatataagctgtgcaatctagaattatgaagaattagtattacattctatgccaaaacaggaataagatgaatagtcttatttataaaaattgacgtgaagtcactgcaacatcaactgtcctagaacctaatccatagaaccttaactattttctgtttgttaaggaggtatatgtagtattccacttcccatagataagttaaagattactttgagttcacttaaatacagtacagaaacatcaaatcatatatcctttcagcctatttactagtcttttgatttcagattcagaaaggaaaggtccatgggagcatagatgtgggactctcagtcatgtcaattaaaaagaaagctcgaagaatagaccttgacaccgaagagcacatctatcatttgaaggtgaaatcagttttcaacagtttctctgccattatcaggggaaacgatttgcctacaccagtggtaggcaggagagttattttacaattactttctcctctcgttcattgttttaggtgaaatcccaggactggtttgatgcat

SEQ ID NO: 24794 - DNA, 1049 bp, Homo sapiens
aagttatgaagatttttttgagtcatcaggagaaaatgtccaaaaagctagaaaatattcattcatacttccgccacatctttgggtggttcatttgtttttaaatttttatttatgctatttcaccttgtttgtgactttgctaagggtaataaaatggcctttgtaattctagtttagttacttttgagggaaattgaaatcatctcatccctcaaagacactcaaagacaactgcctattggaagtgggagatttagttccaattccaagaagaaacaaatagacagtaagctgttaatcattcccagagaaactccacttccacctggactaaaacaaaaggtattttaaggggaacacagcagagcttggtcctatctgtggaccttttctgcttgcccaaaccaacaggtcttgcaggagcctcaggatactcattctctactactgggaagttcctccaagatccttcaaaattcacacttggctagggaatcataagttcatctaggatgagtatgacaacatgaaaatctttactcagtattttgcctagagagaggcatagcatctaattttactctagtggattaaagatacccaccactttctcctacctcatacccagctttttcccctcctgttttaaatgttttgatcatgagaattctatctaatgagtccaagtatttgttttgagtcaatgatcatctcaccactcaaaccactttcgctgatgttgcagccaatatgagaggctctcaagcagtgagagctcattttctgtccccactcttcttcgtaactaagtacaacagccattgtgaaggtgcccagaccattcagtggtggtggttgtggtattgttgctgctgttgttgttatcaatgttgtgttactgaactttgtattcagtattccatagtagttgtcattttgaaaaaattttaaatagatcattaaaaaaattgaccgcaagaaagtaaaaatgaaaaacatgttatactggatgtttgattgcttattcttgtgtaggttagattgtg

SEQ ID NO: 24795 - DNA, 1041 bp, Homo sapiens
tgctacagctactactgctgctgctgctgctaattaatagctgacatgtgtcaagtgaatgcttactatgtgctaggtattgtgttaatgactttgcatgtgttatctcatttgacactctcaacaacgctctgttaggtggtattattattccatttttcagattgaagaaaagagaataggagaacattcagtatatgggctaaactaaacttaagtgtataattctgtttatgactctccataaaattattactttatagcatgagaacttacactttttaacagtaatgttagagctttatatacagtggtgatatatgtaacaagatgagaggtttaactgatactaaggtcatatttgtaccaaaaacatacattttactagaaatctataggtacaagggttctaacctcttaggaaacgttatcccaggacaacttgtctttgacttaagttttccaccctaaatccattcacctccatgggccctgtgttctcagataacacttgtattcactcaactgcccagaatctagaagtatttctaaaatttgtcattcaaaaataatttgataatctcagttggaatcttcttttcaacctgaaatgtgcactagaatatatatatacatttctcttacattttttattgaaacttaaatagcttccttgaaaactatttatcacttattgaataaaagtataatttgaaataaggttcaatattccagtcatgtgttttattggttaaaattcatgatcaaattggaaagtgacgtatatagtctgtctcaaaaattagttttatagattttcttagcataactctagtagtttctacgaatatttcttcatgtttaatgtaccgttagaatatgacagacctaagaataagagaatgaagttgtctctacagtcaatcagggtattcatagcggcttaacctgactcagtatcaatcaatcaaagatttaaaatcaaggcacagtaccaacacctttcaactattccttttggggtctttagacacattggaa

SEQ ID NO: 24796 - DNA, 1074 bp, Homo sapiens
gaatgcatctcctacagctggtgctgctgagtaaccactctgatctggcatcttctttgatcaagttacagagcagagtttccagggctggggattgaagtcctgcctcctccctttgtctctggttgtcctcggtaatgtttttccctcaaggtactcatgatacttcccatggggtgagtcagggacaggtctctttccagggaatccaggatggtagggaggttggttgtctaccttgatctcactttttccattgtagaaactgtgagttggggaaagttttccacacacttggtgctggacagattgtggcaaggggcaccacagatataaaaatctgattcttttaccatgctcagagttttttcacttctgtgtccccaggaattgactcatcctcatatctgagttctgggatattgttggtgataatctcagtgctgtatatttgtttttggttttctggtgtggaagtgaagccagcttgcgtctacactgccatttttgaactagaagtccacctgatgccatgtgggtctgctctaacaaagatgcctgtagctgtctctgtaggtacaattggagctactacctcataaagtttgtggtagcccactatctggtttttggaggggctagactggtaaattaaatggagatacaatttgaaccatcatccccgaatcttttaggtcttttaggatggcattaatttctgccattccctgaaatattattttttgatttactgtattggtatggagaagaggtcaatttttaaagcttccacctggccacttggcctttatcactatgttagctcttaccacacacaccgagaaacctggtgccactaatcaagtgtatttatcacaattatacactcaaggactaggtgggtctgtggatatattgtgagccagacttgggccaggacaccctaggacttggcctccataacccttactctaatcaagggcatatagtgagagttctgtgatatcattgttaactcagaccctgtttccaacagatatcaaaatgttgagtattcccctttcaccactgtat

SEQ ID NO: 24797 - DNA, 1010 bp, Homo sapiens
ccttagcctcccgagtagctgggactacaggcatgtgctgctgtgtgcagcagatgtgtacaaaagagctttaaaggtagtactgaaaacagttcctttatagttctatgttgaaaataatttcttcccacttttttattgtcttaatttacagattttttgctgtgcagtaggttttatgttgtcaaatgtattaatcttttaacctaggttttaagttaaaatgctttccccatgctaagatttttaaaaagaaaaactcttccatgtttcctaatatttatactgtttcaaatttttatgttcaaatctttgatccatctgaaattcactttggtgtaaggaataaggaagcattctaaatagatgtcatacacatcaacaaatatatatatatagcccccacccaaatgtggatgtaaactgtttctacatcattattgaataatccatcctctcacccactgatctgaaatctcactgttgctatatactatggtcctatgtggattagcatctacgcctggattctctattcgctcctctgactattcctggcccagtaacttgtctgacaagttcagttttacagtatgttttgttctctagtaaagcagcacacccttgctctcccaactcttccttttcagttttcttggctattcttgagggtttttttccagataaacttcaataaacgtgtatcaaggtccaaaatgaacgctggtaggtttttttttttttcgagttggggtctcactctgtcgcctaggctggagtgcagtggcgtggatctctgctcactgcaagctccgcctcccgggttcatgccattctcctgactcagcctccggagtagcggggactacaggcgcacgccaccaggcccggctaatttttttttttgtatttttagtagagacggggtttcaccgcgttagccagaatggtttctatctcctgacctcatgatccgcccacctcggcctcccaaagtgctgggattacag

SEQ ID NO: 24798 - DNA, 1862 bp, Homo sapiens
gaaatccatttattctgcttcttctcacgcttctcaaggtagtaatttctaatctttgcacctccatcactggcaggtggcttccaggccacaacacaagaatcttttgtgacagcagtaatagttggtttgccaggagcacctggcttttctattaaacaaaaaaaagatttgagtcatgagatgaaacaggcagctttattaaagcttatttttttaaaaaagaatgttatatgagtccaaaattttgttaaaaaatagctattccagaaagatgaaattggttactttatactaagacatatcaaaaaccaaagttctatttttacaatggggttaggatatatatttctccttttagatatgcaaacattcaattaaagtgaaagaaaaggcacttgtactttatctgaatctttgctatttcctttcaaaatttctttctgtttaaaagaattttatgcaaagatggaactttaccataggaagatacagaaatcaagttgtactcaccaaatggactcttaatgatcacaactgaggacacttctagagggtcactgatgccgaaagtgttctgagctgaaacccggaagtaatagccagcattttctgtgaggttcacaattctacaggttgtcactgagatggctgaagacaccaattgccattcagccccctccttggcctcacatttttccaccacatagttggtgatccaggagcctccgtcatctgcgggtggtttccagctgatcactgcggagttcttcaatagagcttcgatcacaattggtcctgtaggtttgtctggtttatctgttgggggaaaatacaattgtggtggttttcatagtgtgtttttgagatttttttttctttaaaaataaaaagcactgaaaataaaaataaaataccttgtatttccacatcaaggatggcatcaactgttccaaaaacattgctgagctggactttgtatttcccagcatgagtcttacgttggacattcttcatgacaagatgagtatagtgctcagtgttttcaatagtaatgttttctgagttttgcaaaagtttctgaccatggaaccaagtcatggcaggtactggacgaccaatgtacataacatgaagccgaagtgtggaacccacagctccataatatttctctttcagtgggtaaccaggatggaactgcggtgttgcttgcaggagaagcttactactggtttctacttctccaacctcattggtggctatgcaggtataaacaccttcatcttcctgttcctctgtcattactgtaagagtgtgtgtgcgtccatctgaagacattttgtatttccggctttgtatgagctctttaccaaatctgtaccatttaatgtcaggaagaggccttccaacaatctggcatgagagttgagcagcttcacccaattttgtggtaacatccttcatttctttgcgtattcctggggcctctccagctgaacaatatgaaagataatattaagtgactgttaatactcaatctgtaatcctttgtccttgtatatcaggaatgaatttaccttatttactgacacataccatgatttacatattagcctaattcttaaaaactctttgaagtgattttcctaggatcatatggtaaatagggattcaatgagcacatcgtcacattttatgtagagtgtttttttctctttatgattggaaggggattaataatgtataggcttttaagggactgtaaattctctctataattctgtagtattcttgcccttacttaggttcattgaagtggcatacaattgttgacctttcaaatcttgttgggaaatattttt

SEQ ID NO: 24799 - DNA, 1033 bp, Homo sapiens
aattttaagtgtgatagaaagcatatattatgaatctcatcttaaagaagtggaaattgactccagagaagaatattaaaaattatttgccagaaatcgctagcagctggggtggggaagggactgattacaaacggacacaagggaactttacggggtaataaaaatattccacattttgattgtggtggtgattacaaaacagtacatttttcaaaagtcatagaactatatatttcaaaaaggtgaattttcccacatataaattgtaactcaatcaatttgactgatacaaaatgtccttaccaattggatccatggcaacgatgggtttggaaggacgacttggtttcccagaccctcttgcattaatggctgtgacacggtgttcatattctaagccttcagtaaggccagtggagcggtaccgtgtcattgtcacaggtactttatttacacggacccatcgatctgctctcacttctttgcgctccacaatatatccagtcacttgggagccaccgtcatcctctggtgggtaccaagtaagtgtcatgccatcacgggaaacatcaaatatctgtaatgtttctgggggtccaggaatacctgcagcaagacagaggttaacacgatatggcaatatgaatacgttaaaacaatgactcatatatttgtgttttccttaggttttggttggtattttaaaaggtacataaggcacatgactatttttccaatagtttcacttttgtactatttgtaaattttaatttaaatcatttaattatttaattatttttattaaaaatttttgacttttagcttcaggggtacatgtgcagtttgttacatgggtatattgcatgatgctgaggtttaattttgtactttccttgctgttcctcattttcttcaattctacatttattaagcatgcactctgtatttttttctcactataacattgccagtcctccttcctttcctctcttcctccttcccttctctcttttcttccttccattccttt

SEQ ID NO: 24800 - DNA, 1024 bp, Homo sapiens
tataatttaatattattatcttaagaattaaattgctttaggaaagtagatatttcttccctacttctttggccagctttactgtgtgttctctattagctaagctcattacttaaagtacccattcttagggacttttctttagttgcttatctttcactgggttagtatcacttgccaccaatacatttctaatgaatacaagaattggtttccttagcttccccaattcagtcccagtgactattcctttatagttcttgggctcagactctgtaaaaggatttgccacttatttttgaagctcttgtcacaattactttgtcagtaacttatgaaaccactagaaactgtatgttcctgctaaacctcttcttaaaaggagttttgccatttttcttttcagttattacagtacaatgcatttttctctaaggaaaatttataaaatagattcttttcatattgatagaatattttttcattaattggaaaatgctgtacaacttttagcaattctaattgctaacttaacagatgtaatagttaaaatgttctctgacttaagctatatttatgatcatgcaaataagcatgtgcttttctagaccattcataaattctaaaaattcttagagattgtgtgttggaaaattatctgtcatatagttttgaggagcattgtatttatgtatgattcttggagctcacatgatggttctctgcatgagatgaagttggaagcttcgctgggctcactgttaccagctgcattcactgcggtcacccggaactggtaatcacaaccctccatcaggctggtcaccttcagcctggtatcatacaccacatagtctttgttgacacgtgtccagcgcaggctcttcttctcacgtttgtctactaggtagttgctgatttcattgccaccatcagattcaggttttgtccactgaatgatgatatgctctttgccagtcccaacttcttcaggtatgccgggtggtgatggaatagctgttta

SEQ ID NO: 24801 - DNA, 1038 bp, Homo sapiens
caactgctttaattgtgccagtcacttcacagctgtcgccttttccagcaccattgatagcactaactcggaatttgtattcttcacctgcttgtagatcagtgactgtatatcttgttttcacacatgcctctgcattcaccttgtgccagtctcctaagtcggccttacacatttcaataatatacccaattatttccatgccaccatcaaacactggtttggaccattctaagctcacagttgtctttgatgtgtctgttactttgaccactgtgggaggacctggtgggttgacgggctctctacatttaatgagtcttgagatgccacttgcaggtccaactcctgcagcattttcagccatgacatggaattcatactcattgccttctgtcagaccagtgactttgaatcttgtttcagagattggtcgtttgctgatcacttttacccatcttgtgcttttcttttctcttctttcaaggatatactgttgaatttcactgccaccatctgattctggccttgcccatgtcagggtaatgctgttgcctgttatgttgctaggttctggaatgccaggggcatcaggaacagctgtaaaacaaaaacaaaaccccaaatcaattagatgcatttgcttggaaggttaaacttttgacatagtaccgcttagtaaaaacgcaaacttactatattgtatttgagcaaccactggatcagaatcaagtggcctgccaacaccaaacttgttaactgcagaaacacggaattggtattcattgccgtttattagtttaatggcagtgtaactttgggcttcacatttatcctcaattagtgcccaggcaagtctgctggtttcccgtttttcaatgatgtagtgggttatgggagcacaaccgtcattgagtggggcatcccaccacagagtcatcttctccccagtaatattggtgaatcttattggcccaactacttttcctggtgtatctataagaaaaagtttctagagttagtttctttttccttgtc

SEQ ID NO: 24802 - DNA, 1053 bp, Homo sapiens
tctatattctcttccagagattggtgatgtattaactttttgccagaggatgctatttctttctttcttttcaacatggaatccagtaacttctgaaccaccatcataaactggagcatcccaagttagtgacatgccatcagaagtcacattgtatataactggctttcctgggggaccaggaatcctgaactggtgttttgccacaataatgcttgagacaagtggttggctgactccgtatctgttttctgctctcactctaaactggtactcagcatctttgactagattaggaactttgaaagtcgttctggcaacacttgaacacaccatcttccagttagtttgtgaagtttcccgcttctcgatgctgtaacaagtaatttctcctcctccattatcttcaggtacatcccatgacaggatgacactatcagccttgatttcatcaaatcgaatgggtcctttgggctttgatggtgggccaagggtgatgactgtaatggggactgcaattctacacactgcattatcaagaataacagtgtattttcctccatgctccttcttggcattcttaatactcaaagtaattttgttttcagttttactgaagcgaacaaattcactttctttcagtggcaagccatctttcagccaactgatggatggtttgggttttcccttataaggtaattcaaggtgcacattgtgcccaattctcacagtgacttgtgccccagggatatctgacaggtcaacttcaggtgtaataataagttctttcactgtaattggcccaatagtgacaggatcactcagtcctttctcatttttggcaaacactctgaactccaggactgactgctccttaagttggctaacctcaatttcacatgtcttacttatgccagcgtgggaccacgtctgttcacctttacctttcctttctacaacatattctgtgatgacgctaccaccatcaaagtcaggtttggtccagctgaggatgacagatgtctttgttgagtctttcattgagagatcacg

SEQ ID NO: 24803 - DNA, 1051 bp, Homo sapiens
ccaagactcggaagtagtaagaacatccttcttgtagattttcaattctgaaagtagttttagtgcaattatttgtaatggtagcataggcttttcttgtagtttctcgtttttcgacaatgtagtttgtaatcttagctccaccatcaataagtggtggttcccaggacaacgtcactgagtctttcttcacttctcttatggtcaaattcacaggggcacttggtgagtcaagaactctgacgttaacaaaagctgttttggagccactattattttctaatgtcagattataccgaccactgtcaaatctggtaacattatcaatcaccaacattgtaaatgagctggtcacctctatctgagccctgtcagtgagaatgccttctgccttttcccatttaacttcgggttctggtcgacctttgatagtgacaaataagcgtaaagtagcacttgcacgcagaacgaccacctttctgagatcagcatcgagttctatttctggtggctctatcctctcctgagcaaccactgagccaggtagagttgcaggttcacctacaccttcagaattgatggcacaaatacggaagttatattcagtgttttctttaagcttggtcactgtgaactgctttccttgtaatcctgttggtggagtgcaggttgtccattcatccgcagcagcttctttgacctctacaacatagcctttaacaggtgcgccaccatcataaattggcttactccatgccagggagacagaagatctggaagtgtccgtcacttttggattgcttgggggacctggtggatacaaggcatcacacgcacggtagaaaacagatggctcactaggttctcccacaccagctgcattttcagcagcaactctgaattcataggaatggccttcggtaagaccagttaccctgagccgcagatccgttaatgttttcttgttgcacttggtccatctaacgccttccttatctcgtttttcaagaatgtagccctcaatttcggtacctccgtcgtctactgggcg

SEQ ID NO: 24804 - DNA, 1049 bp, Homo sapiens
gttgagggaggacctggtggcttataaggattacaggccgtaacaggcccagattccaagggctctccaattccatatttattcacagccatgacacggaaaatgtactcattaccaggaagaagtttagtaactttgtagttaagggcctgtacctcagttgaaacctgggtccaagagagtcggcttgtctccctcttttcaatgatgtaatgtgaaatattagcaccaccatcttgcaaaggtgggttccatgccaggtaacatttttccgcagtaactccagtaactttcagaggcccttcaggaggccctggcctgtcaagtacctttacagtgatgggtatagactttgtaccaccaacattgctgagtttcagaatatattgtcctccatcagtccgtatacagtctttgacaacaagagttgttttctgaatagtagatttaatttccattctagcagctgtttcttcaagttcttttccatcttttgaccaaacaacatcaggtataggtttgccacggatgtcggcttcaagaacaaaagtctctcctgcatgaacaacgatgacatctttatattttggatccagagaggcatttggtgcatcaatttcatctcttgcagtaatggcaccactactatcagatggttcactaaagtttccagctgcatttcttgcaattactctaaattcatatctttggtcttctacaagtccactcactgtaaattcagtttctaatacgttggtaaagctggctttcatccagcggccatcaggtagatctttcttttctacaatataacctgttattttgctaccaccatcataggcaggtttcttccatttcagtgtgacattgtttcttgtaataacaatggcttcagggcgaccaggtgggtcacatggatcacgagcaacaaagcattctgacactttgctaggcttgccaatgccaacaatattttcagcagaaactttgaactcatactcaaggccctcatcaagcccagttgttttgaatttggtgtcctgaatggg

SEQ ID NO: 24805 - DNA, 1055 bp, Homo sapiens
gtctttcttttccaaagtgtagtttatgatttcactgccaccatcatcaaggggtggttcccatttacaaaggactgaggtctttctgatatcttcaaatacaaagttgattggtggtcccggtgtatctaatatttcagaagagaacagtaatcaaaaatttgtgtgggaagggttgctatggaaaatataaatgtgagcatgctcctctgacatgatttgtggttttcccacatctatctttgtattccattagctaataaataacaagatcaggtgatttcttttacatggccagcagataaaatatgattgaggataacttgctgaagctatgtcccatttcttttaactctctcccaaactttttatttttatgttttactaaaacctttttccattggaaagtgtagttttaatgactcacctaacacactgacagtacaaggagcttttgcaataccgtggtcattttcaactttgatcatatacagaccatggtcaggtcggagagaatctcggacgcgtagctgagattctccctttttgctgttgtcaatactcaaacgctgtgtcagaggcaggacaaatggttcttcttcttgaacttcacccttccttctcctaaccaagggtgctgcacgcttcttaatttcctctggtacaataacattttcatcctttatccatgtaatagttgggtaaggtgatccagaaatacttgcatcaagtgctatttcatcacctcgtttcacttctaggcttgttctcagaatgactttgggggcatctatagtgatcataaccaataaatgttttcaattctgatgaaaataactgacaaaacattattttcatttatttcaaaatgggaaagtggcaactccatgaaacaaaacttaccaatgggatctacagctttggttggaggagtagcccgagaaggttcactaatacccgcggcgttctctgctcgcacacggaattggtactctttcccctcttcaagtccttttgctgtataggtcaggattggtaccaggtgttcattgcat

SEQ ID NO: 24806 - DNA, 1062 bp, Homo sapiens
aactaaggtattctagtggaataagaagtgtgaccaccagggaaataaatatttactttccacttctagcttaatgggtacatattgggtacttagcaggtaccaagtcagtagggaatttttttttttattacaaatttggtaaggctcacaagacaagacaattacaattatacaatccttggttgagctacctcaggaagcattagcaccgatgcattcttaaaaagtttttgtacattttcagtgaggtaaaggtaagaagttgtagcacataagacttttgtatggcatcccaaccttctgggatttcccctactctcatttttggcattgatgcagtgctgctcaaaactcactttagtccatgttttccggctgacttctcgtttttcaacaacgtatccagttaacggacttcctccatcatcatcaggtggttcccaagtcaaatgtactgagtccttggttatatcaccaaatttcaattctttgggtgcacttgggcgagctgaaaaaaaatgcactcacgagtcactgttaatagtctgaactaatatttgttaatactgccaaatcaccttagatgataaatgttttgttccttaccaattacattgacatcaatttccccagaaattgttttcacacggttttctaatttcagtgtataaatgcccttgtctgaacgttcacttggagaaatgacaagttcggcataggcagacaaggtcttcattttcacccggtcccctgtttctagtactttatctccaaaacaccaggttgcagttggccttggatagcctgtacttggaaccaggatcgtgataggatttgggacaataacttccagaccatctttaaatgcacttaaatccattgttggttcaactacaaagaagaaaagttaatgagtttgcagtgccatatttaagtccctgttgccccaaagtagctatgtgctattccccgatctaaaaataaaatatctatttaccaaatgcatcgtcagcggtgagaggaccaagaatttcagatggatctgaaacaccagcttta

SEQ ID NO: 24807 - DNA, 1028 bp, Homo sapiens
tttacgcaagatgaacactccaggttgttggcgttttccacagtaactgtgtatgttccagcatctgtgtcatctgcatcgttgatggtcagagcccgcatcaagccaatgacgcctggcacaattcggccaggtttctccaccacaatcttgccatccttcctccagaccacgtcacgctctttgtttaactcgcagctcaagtacaatggctgtcctttgaccactgtgacttcctcttccagtgtttttacaaaacgcacaggaagttctatggagaatttcagtatatatttcaataaatacaatattttcaatgaaataaaacttggaaataagaggttttgtaaaactacaatgcaagttgctactaaggtttgttacattaaagtttaatatagattatgttcagaagactagaaattaccttctacaacaagtttagccgtggaggtcttttctttgtttcccaaacgtaaaacacaggtgtattcaccagcatcggaaagttgaacatcaatgatgtgcagctttctgtctttaccatctgcaataaacctgtgcttgggactctcacggatattgctaccgtctttcatccaggttgtaattgcagtggaaggggagaccaaacattcaaagattgctgaagagccaacgaactctgattctgtcaagatgatgtctttgatttctttcacaaacttcagtggcacagcctttagctggtaggtgaacggggcttcatcaggaggtttctctccaccacttcctggccttaactttctcctttcggcttctattggtgaaggagtctttttgggtacacctaattcaaagtaaaataaaaagttgatttggcatctccttaggagtcagaaagttcatacttggctgcctgctggataaaaccagccgtaaagcaattagaagacgagaaaactaaagaccaggcaattgaaaggccaattgagtttatactgccttgtttcaggcaggaaaatgagatggtataaggaatccatgaa

SEQ ID NO: 24808 - DNA, 1072 bp, Homo sapiens
ttctaacttaaaagaagtgtaactatttcaaaaataaagcagtcaaacatgctagactgctcttgtatataatttcaagaaggaatattgtcctgtaaatgcttttgtaattctaacaggaatcttcaggagattaaaaaaatgtatatatatatatatatatataccttcaacagggggagtctcttttctaccaatggttatagatgctttttcttcatatattatttcctcaggagtctcttcaactttaaaaaacatagtattttattttagactatatttagaacagaatactgcaactactattctaacatatcaacctagttacattaagtaacactctataacagattattcagatgaccccccaaatatcaataacttcaatacagacagacaaatacgtaagattcatctacaatcaaagcaagaggatgaagacaattgtcatctttccaagatttatggagaagccgtgtaccttcagcaggtggaacttctggctctgcagggataggcacagacacttccttttctgggatgattttctcaggcactttgggcactttaaagatatgattttgtttactattaagaatttagaagacatgcaagattgtctaaagagcaggcaaagaatgcaggggcaagagcttcatcttagatttcatggggaaaatggcttctgagacatggcaccattttggacatcctaattttatatatgaatcttctcagctttcttcatttgcttctagtcctctgtgtacacttaaatgaaggtggtctaactttgacacttaaaaaaatttgctctacattttctgagtaattgttcctgcacactcaattcttatttacatgtgaatgactttaagatctacatctctaggcctgatctctttcttaagctcctgatacacactcccaacttttatgctttaaaggtgaaaagcacatctaccattttcctctaacgttagttcagagacccaatgaaccattcttttggccatctagctttaaaccttacaatgatcttgggctcctcaatttccctaatggtttt

SEQ ID NO: 24809 - DNA, 1034 bp, Homo sapiens
tattctagtcaccttctgagacatctaagattacattaaagcataaatcttcactaacagtgtgagaattaggaagtaatttaaatatgcctacttgtggtagaaatgaaagctaaatacctcaacaccatatagacattacatacattacacaagcagacaaagacccagttagcgtgatctggagtttagaaatgttaccaatacttgtataacacatcaccacaaataaatgaaatcaatatacacagaattaaatatattatagatggtttacagatgctattttgttaatacacagatcttatagaaaaagatacaagatggatgctaagaattatttttttcacaaatattattctaccttttggtgctgggggctccacttttttagggataggaacaggggccacttcttctggagctggtttctcaggtagctcagggactttaaaagaaaagtgccatttttgagaaagtgtgcatttgacaaggcatatgttgttgtaagacttagaattaaatagagattccctttttataccaactgaatgcaagaaaattatgctttagaaatgagagtaaatgaagatggctgaatggctaattagaaaatgtgactgctgtcacctttaactgcagaagcctctactttgtcaggaacaggtaggagcaatcctccctcggaggtgcctgtgtcagttcctcagaaaccagctttttatgaacatcgataactatgaagttagtttttttttttgtaacctttacttttataaagcagtttcataaatacaattgcattagatttttttgtgtcttaaatgtttaacaatttgggtgggatggagggggtggagccttgatctatagtgcttgcagatttccgatttccaaggtggtataaacactccctcccaccctggctgtcaaggtgatgtcattgtcctggagttggaaagagatgtgcagtagtacattatatggcatttccaccacacagacacaaagatggaaacaatctcagaaacaca

SEQ ID NO: 24810 - DNA, 1047 bp, Homo sapiens
tgcagagagtggaataaacgccctttctgattcttttgattgtagattaaattattatatttttgagaatcaactatttaaagagtatatacaagaactataaccataaataattagctaaaataaaatgagaaggcgtttattcgaactaatacagccataaagtcacaatgttatgcaaagaaaagcaggcaataaggatcacataaggcagctatctgcaagccagtgtaagagacatatcaatgttaaaatgatatatgtgaatgaagtgtaaaccagatgggaatgtaatgttttcacacaacctcagtaaagtagcatttcaatcataattcattcatgacattgcattctgagaatgacagctaggttattgtctattttcaatgtaattcaccgtgattttgaaaacaaacttctacttcatgatttcatgcattaagatgacaacttctcctaatatacacttttggaaatgactgcaaacataaagttgaatttggctgataaattttaaatacaaaattttaaattaacttacaataaattactgtgaaatgcatgtaaccatcaaaattctaaaccaagcatgcgacatagtaatatatactctaagagatatatttgtatatctatgtcatttttttctcaataatactaagagaaagaaggcaactcaaggatcctattaatcctttagaatttctacttaaatctcacatccattataacaatacctttcatttccatctcaatctcttgttcaatcctctcatgcaaaattgattcaggagctaaaatagaaaaacatataaagagattttagtgattaattgcatatattttctgcatcaattcatgacttgtatgattaaagttttctttttattataacaacagaaaactacattccccaaatttaccaaaaagtccatgccaaacaaactattgagctgataaaacacatgacaatgttgacagaaagatttaaaacatttttattttaggttcttcatgaaatttccacttttagttctataattc

SEQ ID NO: 24811 - DNA, 1035 bp, Homo sapiens
cgcggcggggccggctgggctgctcgcatcacttggcgcccggcgcggcgagcgctacccgcggcccccgcgcggccctccccacaaagggccgcggagctgcgtggccgccgccgccggccgtggctcgcctccgcgggcgcggaaatttgttgcacttcttggggctttgtttatttgtttgttttttctctgggtttcttatttttttcgttattttggacaaaatgtcggtccgtgatataaaaattgagcgaggaaccttggtggcattgggagctttgcagaaggtgcagtttgaattctgcttttcccagggtggcagctcggtcttggccggatgaatcttcgctgctggccgtggaaacagctagagcagctcgttagttgatttttaaatttccaagtgttgtgtttaaaggctttacgtgcactgaggaggaatcgccaccttaaataagcatatgggcgattaacagggtgtgttttcctctcggaaagggaatttggtagctttgaccaatgtcagtgtgtaaatatttagacgttattagtgacttttaaacatttttcagcgagatctgttatttacagtgtgtcatatgttattaatgcttgttgcctaagttccttggcaaatctgtttcatgccttctgagaaagtagacaattgatagattgtccaagagacggaaaaaaatgtgagtgggttttctaacttgagttcggcaaatcccttaacgctggcgttgtgtgacacatcacctcccttgtacgtacccctgttgtacgatgaaataagtgtgaacacttttgaagctttttcattacaagacgattttagatgactagaagaaaatgctgttggtttatttcctagatttaacattttctcctcctcctcccctgttctctttaaaagttttccaagagataacttcaccaagatgtccagtgataggcaaaggtccgatgatgagagccccagcaccagcagtggcagttcagatgcggaccagcgagacccagccgctc

SEQ ID NO: 24812 - DNA, 1074 bp, Homo sapiens
aactttcttaaaacatgagattttttttgcgattttgtttgtttgtttttttagctcatcagctattgttagtgttagtgtattttatgtgtggcccaagagagttctgctgctgctgctgtggcccagggaaaccaaaagattggacactcctggactagagcatatacagtatggataaactggacaaaagtatgattcaagcccaagtggatggagcagggcaatgtgagatttcatcgtgctacttagaatgaggtacgatttaaaacttaagaattatttctggaatttttccatttaatatttttggactgtggttgacctagagtagctggaactgtggaaagtggaactgcacagataggtagggactgctctgctacttctgttacgtgaccatgactgaaattacttactactcatgatgaaagggtattttcatttgctttgctttcttttttacctgtttcctaatagctgattttggtttctcagttgttgtttttggtttgttgggttttttgtcttgtaacttgtatgcttaagagttcttttctcttaaggtgaaactatcagtgtctactcgtttttaagttgttctttgtttactgggttgtttttccactttgctttcaaatactcttttaatcattccattcattctagatacacagtattacacagaaaggaagataatctttaattcttaaacacaagtattaagtaatacttaatactttggatgtattttgccttgcattatttaagtgcaattagactataaaaggagatgttaaatttttctggttgtgttgtgattacaaacaaacctagaaggctcagtggctcaatgtataaagatttatttctcactcatgtgaagaccactgtgggtccagggactatcttgggcagctcttctctgtgttgacttatatctgtgtatcttgtagctctgacatttggaacatatgcctcaagcaatcctcccacctcagccttccgagtagctgggactacaggcgcaccccaccatgcctgactaactttttttttctttttggagacaga

SEQ ID NO: 24813 - DNA, 1034 bp, Homo sapiens
cccattgtagtacttcagtatattgctgttatcatctttatagaatttcttaatttaaaaaaaacttcagcttaaattgctttgctctaggaaaccttagagggtaaaagtcatatggacctatttggtgtataacaatgcgagtacatacattcaacttaaccattgctctaggtattattttgaaaactgaatacttattgaagctgttgtttcaaacatgacattctcctagccacttccttgtcagttgtcagagataattaagtcttggcattaggagaactgagagatctttattataactataggtctgctttaagttttgaattaaactgagggggtagtttaaggtagaacgcaaacctttatcagaatcaaattaatttgtcacaataattgaacttaaatattaaccctgttgttaatatacaagaagcatcctcctttgtttagtgtttctcatcaggggcatcttggttatttttgactggattgtgctttgacttggaagacattgaacatcctcagactctgctgactaaatgctatgttctggccaccaaaacctgcctcttcccccccatttccaggtatcttggaggggaggggctgtcacttggcacttgcaaattactggcctagattccacattgtagtgatagcaaatcataatgctgtaagaaaccaattttatatagcattactttgagtaatatataataatttgtaatagttgtgtttcttacataaaatgtatgttgaccaagatacatttgtgtgatttttactgcatatgtaattgtctgatatgcaaaaaaaaatttcttcctctagccctttagtttttacacctccccgcaattctgaaccctcatagtacatttgaactttgtgcatgagcttaatgtgtacgtatgcacacatggctcttataaatatgtgactctgtgtatccctttgatctttttattattaatgaatttttttttttccacttacagggaaacttgtgttcttaaaaggatttctgt

SEQ ID NO: 24814 - DNA, 1102 bp, Homo sapiens
agataaagggctttggacttagacaaatggaagttcaagtcttggctttacaattgagtaactgtaaaagcttgagcaagttatctcctctgattctcagaaatgtgaataatacctgtttcatcattcttaagtgttttagatattatgtaactggtatattttacatataatgatataaaaagcagttatatggacaaataaacaggcatgtttatgaaagaacattttgaaaaatgaagtattaaaaccagttgtaataacaagatatacttttgaaagtggttctggcccacaaatagcaatgatcagtgatacagaataaagaatattaatacagtttggtgattgttttgtgtttccagctgccttttgcaatttttgttcttggcatttaacccaatttctagatgtattagatacatacatatttatagttttaaagttttgttcactaggtgttcagaataagactcactgtattataaaacaaacacctctttaaaaaatctattaaagtagctttctacaacatggggttaagattattaagtgacattgggatacatgaatagtgatttaaaaaactgttaatcacaacttctataatctaaacataagatggatgaaaatcttacattttgtaaagggttaagctattggaaaactttgcaaataggcatatatattactggttgaatctaaaatgttaacactgtacaactccagggggtaccattcatactgtactctgtattcagcatagcacagcacagagtaagtatagtataaatggtatcccctgagttgtatagtgtggtggccaggattagaccttaaagaataaccttttttttttttttttgagacagagtctcgctctgtcgcccaggctgcagtgcagtggcttgatctcagctcactgcaagctctgtctcccgggttcacgccattctcctgcctcagcctcctgagtagctgggactacaggcgcccaccaccacacctgactaattttttgtatttttagtagagatggggtttcaccgtgttagccaggatggtctcgatctcctgatcgtgtgatccgaccacctcgggc

SEQ ID NO: 24815 - DNA, 1061 bp, Homo sapiens
ggattttaagtaaaacccaaaacttttatttgcatatacttgcatactgtcagcctataagacaaactcagcactgtgtgtaagttacttttaaaaattgactttgaatgcctgtatcagaacttatttggttgcagcggcatacaactcaaaccaaaccagcttaagtaaaacataaatttgttggctcacataactgataaagtcagagtagatttggcatttggcatgctgtcagcatctgatttacctttccatttgcttgctttccttcctcttagttgactccatgattagacagactttctccttgtgatcataagataactgatagtacctcccagctgtgttcttcagattgagatgcagtgtgaaatagcgtgaatcttggccccagttttttcatcagaagtctaatgcatttcattaactccagctgagtatattatatccatatggttcatgcctaggccactgctctatccccaggataggaatggcattaattccattggaagcatgtagactgtgagaaggggtgcaaaggtgaactgggttaccacaagttaagtaaatgaagctgatgctgagtagcaaaattagtatgtatctttttggactgataggcattatctatttctccatagtccttacctcttcctattatgatggttcacttaactaatttatattacctgtgtggcaccttactgacatttgggtttgattcttctggtttataatttcctgttatctattgaataatttgttacggttatatagttatatattttttctatttaacagacctacatttttagctttaatcttttgtatatgtatttaatatttttgtgaatctgaagttacctttgtttgagttgtgaaatggcaaggatgtttataaagggtcaggttaattagtttttcaaatggctttaccaaacacaggtttatgtgttggttaaagctcagctggtagtcttgaactgcttctggcaatttcttagaagaggctgtagcccagattttggctcatgtgtataattatagctaagcca

SEQ ID NO: 24816 - DNA, 1023 bp, Homo sapiens
aggtttctgtctacactagtgctggacaggagaactttccacaatggtagaagggcttgatatctgccacatgtgggaaatcgaacacttcaaatatggctagtgtgaataagaaactgaatttataattcaattttaattattttaaatgtataaatagccacagctaacatttaatgaagtcttgaacccttatcaaggaaggtttctacaggaaaagtttgttaatccttattcttcaagcatccactgaaattaaagccaaacaaatacagtactttgtattctgaattgtctttttaatctggcttttaaaaaagtaggacttgaaaagtattgagatttaatcagtttaaagttgggcctgggtgataaaaataagcagttgtgacattatgggatctctgcggtatagacaaatatgatgggtatgccaatcaggcatatgttattttgcttatgatgttttgtttcttctgcatgaggattggatggaagctgtgcaaataattctgctaatatttattgaccaattactatgtggcaggcaatagtgtaagtctcaaagcagccttatgaatgttatcctcattttgaggtgagaaaactgaggtacagagagaagttcttccgaggatcacatggttggtaaaaggtgaaagcaagatttgaaatcaggcagtctggctccagagttcatgctcttaactgccacactgcactagtcttgtaaattgttcttaaagtggtcatagatgcttcgtatgtgcatttctagttctggctgaggtccaactggatatatacagcagtcctgactgggtaagggaatgtttccctgttccaagccatgctcagggcagcattaggggcagccccaggttctagcagagagaggaattaggcctggctgtggcggagtctctagtggtgagaggaggatggaggatttccttagtggactagttaaagggaacgtcagtgggaatgcttagagcaggtcagagagcactgggtgtgcct

SEQ ID NO: 24817 - DNA, 1050 bp, Homo sapiens
ctaatataagcccttcacttaataaaattaaagagagactaggtgacttgagcacagggtcttgacttttttttttttaattagttagagccagaacaacaattcagatttctaggcttcagtcctgtcttaatctgttttgtgttgttgtaatggaatgcctgagacagtaatttataatggacaaaattatttgactcatgttatggaggctagaaaatccaatatcagggtgctggcaggaccttctttctaggatgctgcttatcccatggcagagttcaagagagagaggtgatggggagaaaacgggggtgataaggaggtagggagagataactgcacacaagggcaaaagggggccaaactcagtcttttataattaactcactctagggtggagctcccgcagcccagttacctctcagaggttctacttcctaatactgtcacagtggcagtcaaatctcagcctgagttttggaggggacattcaacccatataacaagtccagtactcttcccagtgcacctaaatcaaaactaagtcaaaaattttttaagaaaaataatgcactggctgcacaggaacgatggtatagaagtgccattttaactgttagttgctaggtaatgtctttctattctttaacttccagcttaatgccagccttgtgtgagctgtaacaatttaatcattcaggtcctctggcaagtagtgttatagaaattggatcataccattatttgttgtttttattttggcttttaaaatgaatgaaccatgtgtcctccttttaagtgattttaggaagagcaaatgataaggatggactgtaacattttttccagttacttaatttcactttaagaatagtgatttttatttgttttaaaatttcctgagtgagggttgttaggcaaaatggactccatagagtgtatcatattttcctgtcactttagtgtctcagaattaaaccatcattttatgtggaagcatagctccgctttgctctactgcaaggtagagtgctcagttattaggtt

SEQ ID NO: 24818 - DNA, 1520 bp, Homo sapiens
tgtgttttatatttcttttgcatttgtaacctctcccagtactcatgtttgttactaatatggttagtcatttttctcctattgatactgtcgttgtaggtcaggtaaacatgtatgttcagtccttcactatgagtgagccaaaagttcatatgaagacttcagcattgagtccccaaaggattttttagaaagttcattaatatcttcatttgtcttcttccaagatgagcctcttgactgactcttctcagaaaatgattgacactttatgtgagagtaaaacttaaagtgagctatgaattaatgttaaaaccagattacgaaaaagtaagacttcatcctacgattctaccatcctattatccactcaccttgtacaaaaacaaaatccagaaacattttcaaaaaggaaggaaaattcagtcaagtattttggaaactgagttccagtcatcatggagtaaacaagcaataagcagattaggtagcgctgcaataaattaaaattgtaacagagctataaattagattctgaatgttttctaaatttattttcaaacttgacttttaatatatgtgattattaagatgtaatggtgatgtgctatgtagatatgaatctgttacagtaatctatttttctcttaacattttattatgaaaatgtgtaaacatacaataaagctgaaaattttagtgactacttatatgctcatcatctagattctatccttgagtaatctatttttataaaggtattgatgtaactattttataaatgaaaaactacacactaaaaaccaaatatgtgatctccagcatcacagaaatgaaataaggatttttttttaacttaggtaatattgcttgaactgtagtaattcaaatgtagcaatttcaaaggtagaatttcccatgtattactatactgcttcacatcagctctattaataaaagtagaacagttgcaaaggaacttttatgatctgttttgacaggacagacaatttaaaaagttgttaataaaggtttttagaattcactataagcctttcatgtggctttagttagccacatggagatacgttctgggacgaaagttggaagtattctcaagaagtaaaaaataccaaataatttataggggcacgagtggtttgaagtactgtttaggattagagtgggtcttggcatttgtccagaaaccagactactttgcacaattatacttgaattcctaatcatatccactagcctactctcttaaatagaccacagaaaccttgctcttaacatttaagacaatggagtgtcttgctttctagaaatgcttttatttttattaccactatgcaaataaatgtaattttcacagtgtcataacattgattttgtcattgaagatattatctattttttccctgacagtttatgttaaaatacatttagctttgttaggtaagagaactttgatacttccttttcctctttattgtgtatacaggtatatttgggat

SEQ ID NO: 24819 - DNA, 1047 bp, Homo sapiens
tgcatttagccttttcataacaataaattcaattagatgtcatttatttcttttatccctactacagtgcctggcttatgatgtacataaaataaatattagtggataggaaaatttttttataaagaatcaattttttgccacagtgcattttttcatggttgacatttattcaagaagcatttattgagcaactcttatgtggaaagcattatactggctgctttgagatatataaaagaactataacatctaaacatttaatgttagaatgaaatgtaatttctatttagtataaggtatactacaaattataggatgaaggtgggtaatcactagaggtttcagatggatcataggtaaaaaatactggaaaaacagtttagtctgatgacaaaggaaatcactttttagtagctatggtattcaaaataatcatagtttaaaatgtcatttaacagtttctggaatttttataaaatcattctccttgctgtcatattgttagatccagagagttagactgtgcagtaaatgagctatttttttaccttagaaaagcagaagacttgaattttcataagtagactcttagaggttccttctgatgcttcagcacatttccttttctccaaagaaatgcttcagggccgagtgcagtggctgacgcctgtaatcccagcactttgggagacccaggcgggcgaatcacgaggtcaggagatcaaaaccatcctggccagcatgatgaaacccagtctctaccaaaaataaaaaaattagacgggtgtggcagcacgtgcctgtagtcccagctacttgggtggctgaggcaggagaattgcttgaacccgggaggcagaggctgcagtgagccgagatcatgccactaacgacagagcaagactccgtctcaaaaaaaaaaaaaaaaaaagatagattttttttttcttcatatagagtgtcaaatagcgcttgaaccaaagccctttacctctcctcataggggcattgaacagtaatagaagcttagaacatactactttt

SEQ ID NO: 24820 - DNA, 1190 bp, Homo sapiens
gccattttatttttatgttcaatctaattcctttaaacaaaagactatgaaatactactacttttctgtaggccatgtgataaggttgttagggctggacagaaagaaaaaatatatttatttgccataccctgaatatatgaaatgaagactagatttcaaaaatcttactttcaggcatcacagtaatttacaaaaaggccaataagttacacaagcatttgtagtaatttatgtaaaagatgtgaagctggtaagggatggttcaaaaacttacatatcagaatctgcttaatacaaattttaggaaaagaatccacttctttacaaggcaatactctgatcactatttcctgaacagttattgaaggtgtttcaagcaagagttacatactagtatagatttttaatgcaaatggccatatttgttttgaaggtgataccttgtgggttttcttcaactctttcaaaacttgaattttatatcattttgtttttcctcccatccccacatcctaagtgctaaaagactctaaaactcatcttgtcacctgctgttttgttcaacgggattctcttcagaaatataatcctaaagtttgggagggactcttagagtagacacttaagcagagatggaacaaagaattaataatccaaattatatgaagcatttaaaagtctgtagagtagaagccattacagaatcacctttagtacgtgattagatacctttatttctgaatctgtttacattttatttttggcaggagctgggtaattaaaaatatttgtatggatttattgctttcaaatttgtggtgaagacattttagaagagaatcttagctctgcatatacgaccctaggcaagtcacttaacctttctggctcggtttctcatctgtgaaattgtgataaaaatactcgaacaggattactactattgagttagatgtgatataaagcacctggcaaagagtgggcactccataaaatgttctttctttctttagttatgttaatagtaaaatagagctctggtgtgctttgaaacttccttctttcttgtttcaacgtacagtaataggtaagacttgagtaataatccagtaatcctttcatgtattctagcttgaacatttttttaaaggaaataaaactatatatagttgaagtttcttcgtact

SEQ ID NO: 24821 - DNA, 1050 bp, Homo sapiens
acattttctttttggtactaactctttgaaatctggtatttattttacacttctagttcgtctcaattcaccttgccacaatttaagagctgtatatgcacatgtaactagtatatgctgtattggtcagagcagttctagaggggcatactctcctcctcccccactaaactagtgtgttggtcccctaccccctccctgtcatgcattcttttcaggaagacacttttgagagcatttaatgttttcctcccagattcaacttttgcgctcacagtacactgctagttttcaaatgatcagaaatttttttttttctcggcaactccaattatgaattagctatccaattagtgtttgtgattgttttgagacttggcagtgtttgttcttatgatttatcttcttttctcacacatttcagggatatattagtttcctttatccagtagctaaaaaccttgtttattttattttaatattttagcctaacaagacagtgaaccagctgtagaaataaaaggctaagaaacagaaaggcaggtagtgtgaatgattttaccaaccgtcttctaaatcctccagtattttctaacgtttggtaagaaattagctgaattgatactgatcttttctagtaagaaactgatgtaacttttatgttttaaaaaaaaatcttcatcagttcctcttaccttcggcaccaaaacatttcttttcttcctcactttctgtctttctgtatgtatgtgtacacacacagttgtatatgctgtggatgtgtatgcaaacagacgtacccacacacatagatggaattactgtatcagttatttaagtataactgatcagttcctcactttagttctttctatacagggtaaaaacaaaaaatttttttcaactgagtcaaaagcatttaattttgttattaaacctaatctaagtttagctccagtcaaataatttagtatcatctatgatatattacccttcatttttttttagtgttttaattggtaatacagcattcattttccttctgttttt

SEQ ID NO: 24822 - DNA, 1016 bp, Homo sapiens
aatattgtcagatggtaactgtgatgtggtagctagtctgtgatgcactttttacttctaatcctggtcttgaatgttcatgttgtgtattaccattcttactatggcaagtggccagcaaatacagccagaggcagagatgaacacagaaatctttgtctgccttgaaggtagactagaactgtgttagtgtacagatgtgatattatttctcaattggtaaaataccaaattgtaaggtttttagaaggttaaatttcttctttctagttgtaattctgaagtgttagatttcttgaaagttagaatttctttgcaatatttagatttgctaaacagagtataattgtgtgtggtggtggtgttttgttttgttttgtttccctgtgactaaggtaatcatctctggtcatgtaaccaaggttgtggtatatggggcaggtgtcttctccagtcctcaatatggaaatgaagtatcatcttaaaaatgtatagagtgaaaatattaacataaaaaatgcttccggataaagtaaaacgtgtagttgtgtgtgtcactagaatagcagactcctgtttgtcagtagaagtcttatatcagagtaaaattaaaattacacttacatatctgtttttcacttaaactccccacccccaacattattacagaggagcactatacaaaggtactattttgaagaattcagactttacctctgtgaaaacctaactaataatttataatggagtccaagtgaatgtgatgcaagtggagaccgtttaagttgtaaggttttttatcaaccgtagtttttcctccactgccaaaattgtacattctacaccctagagtaataaacttctctcttggtgctagaaaaacttaaatcatactgaatgttgggatgtttggggatgctatgattagacttcctttagttaccatgagcctaattaccaccgccaaactattttgcttacttgttggctgtgtccatactggtgtgggataaagt

SEQ ID NO: 24823 - DNA, 1049 bp, Homo sapiens
ttaggattcttaggtttgtgggctatgcactattttgtatgaagaagtttcaagagtgtgtgtaaatatatataagccatcttctgtagaagagtgtgtgtgtgtgtgtgtgtgtgtgtgtgtgtgtgtgaatcttctgtataaaatagcttcagttgtcctgtttcaaatgtgggtgactctaatgtttcaaaaatgcttagctcagtactgacacataatacattcaaaaaatagtggttcttctttattgtttacttaaatctattatctgtatgttatctgtaacaagcaggctgaggttaatagggacaattgataaactgaaccaaaagtttaaaaattaaaaggtaatacattaaaaggtagaagttgaaatgaaacacaatgagaaatttttgttggctgaagaaaaaaatgttataatgattaaagatcgatctgtgattgccatgtcagtaaggtatcttctttcctttggaatagctttacttgctatcaagaacctgaaggtgtagggtcttcaaatggtgcccatctcccacacaattaaaaatatccacatggactagtctttgagtctctgtagaatttcagatcagtggttgattcagatagactcctcccctcaaaagagaaggtccatatctcgcctaccctaccctctgtggacaaggtgtcccatatggtatattcatgccataagcagaagtgagcctgcctgtttatctagaatgcccagggtgagagacgttaggcatgagataccccttttagtcaagcaagttgactgcagagccagcaccaagagagttgcctggatagtaccgcaaggtgcttttcttcctgcatatatattgttggcctccttttacctccctgactccccaagagacatctcttctctcacttcttttgtaccagaggaaagtggtctctctgccaggagggtctgggcccagacttgctcgtgaagactatatctgaggagacccaggtgatttctacatgtccactttccacccgggcactctgcatcatcaggcttg

SEQ ID NO: 24824 - DNA, 1048 bp, Homo sapiens
aaaaacatgtatgaatgggagcctctctgtaccccacccatcactagcttccccctacttcccttaccctcccaggaccccaggttgggcattggctcattttcataaataacctcatcccagacaggggtgagggaaggtgttgtggctgttttgtttaaattggagctgtaagagggatcatgtcatattttatgcccttcctagaaaggggacgggacacctggtttgcattcctgtattgaccactgctgccgtcactcgtcacattgagttcacatctcctgagagtttgtataaattcaggtcagcgctgctcctatgcagccatccagtgtcatagaaaagcaattcactgataactgatctctccattcagaagtgtgcagttttaatgtatagcaataagaaattgttatttatctattacaagcctggtttgattaaaaacaaaaaataaaatgttattatgcttgatgttacatctcataagtaaccagcaattctgtgatatttattgaacatttattttgggtcagatgtaccataccaggtacagaatatgtgccataataaatgaaaatgaagaaaatagtggcacccttttttatagctctaccatcaagtagaaaataaaattaatacttgaaaacataagccttatttcgtggcaagtttaagggttctacctaataaagacctatggataaaaccatgtttatgcattttgatttgtcatgtgtgttgtatgagacaacccaattctttcttttaaaaacacaaaatcactgtttagtaaaacacttattttgtctatgatttctctgtcttgttttaattgacacatttaaagaagaccattcactatttttactcttttgaatgtgaaaagtatatgtatgtacacatgagaaattatttttgtggcatcaaaatgtcaatgacaaatttgaattattgttagagctgtaaaactgttgtgagcataggcaaattcccttatcaaaattactctatacctgggaaaagcccaagtaattttccagtg

SEQ ID NO: 24825 - DNA, 1048 bp, Homo sapiens
ggctgaaaaggctcatctgtatttttcctaaatatttgccttaatctagatcactcttgctaataacaggtactgtaagaattacatcgccgggcgcggtggctcacgcctgtaatcccagcactttgggaggccgagacgggcggatcacgaggtcaggagatcgagaccatcctggctaacacggtgaaaccccgtctctactaaaaatacaaaaattagccgggcatggtggcgcgcgcctgtagtcccagctacaagggaggctgaggcaggagaatggcgtgaacccgggaggcggagcttgcagtgagtcgagatcgcgccactgcactccagcctgggcgacagagctaaactccgtctcaaaaaaaaaaaaaaaaaaaaaaaaaagaattacatcaaccacttcactaccaaggcttgttatttttttcatgtgttatgaagaatcaatatataggaaattctagagatgtaaccacagtggtggaagtataaacccagccctgattaaaataaattgctgtcttcccttcaatggctataaaatacttttccccactccttcttctcacatccctcttctcctcctcctcctctttctcttccttaccattcctgctcctctgttcctgtatgtatatattctgcacaaatctgactccagttattccaaaccaattgccattcttcacatgtgccatgctgcctattgcttccctgcccttgcacaggcatttccctgcctctaaattgcatttccccttttcttcacctgtctatgacctatggatactttaatctcatcttgggcatcattttctatgagaagccttttctaatttccaccacttcctcctcatatgctgtgttattagtctattcttacttgccattcctccccactagacaatgagtttcctattgtgatactgccctgttttgccagctcctggcaattgcctggaatatagtaggtgctcactagctgtccgatgaatgaataaatgagtgggcatatttgtatatgaaagtttgaaaaact

SEQ ID NO: 24826 - DNA, 1056 bp, Homo sapiens
aacgcatttctctccttaaggaaaaataattctgcaattaacattgctacttttatttccttctcaggacaagacctgtagtaattgttgacgcttctttaagccaccctgagtcagtaaatagaacgaaatttgactgtgttgaaaatggatggccttctgtgtgcatagatctaacactttgtttctcatataagggcaaggaagttccaggttacattggtgggtatgccctacaatattaatgcttgatggggtgcggttcattcattaatcccacaatcctgcttggagccctcaccggttttcaccacggagatcttctttagagcgggggagagaagctacctgatgcatgcttttcctctccatcttccagattcttgcgttgttctaaccaatgagttgggcacattagaaggctgtagttgtttagagattatgagaagcaaaggacatagtatcacttgctatattagtttaaggtaaaccaactgagcttaacctgtgaaatctctttcttcttgacattggataaaattgacattttatcaagtgtcaataattgaggaaagccaggcatggtagctcatgtctataatcccagcacttgaggaggctgaggcttcagcccaggaggtccaggctacagcaagctgtcatcacaccactgcattccagcccgggcaatggaatgagaccctgtctcaaaaaaataataaccataaaaataaatattaaaaaaattgaagaagctagacttgattctgatttctataaataatatgcttgttaataatttactgcgactacaagctcctaagaaccgtcacctatgtccctctgtataggcaactctcaattatctgctctggagaaagtatcattgatatagctcatccaaaatattgtggtggggaatcccaaatcatgtatatatgactttataagtatttttgctagcagattaatgttcctaattatgttttatttaggctaatataagaataactactagtgaaatgagcctgtggtaggagaagagcatatctgggc

SEQ ID NO: 24827 - DNA, 1046 bp, Homo sapiens
tggatttcaccatctttctttctgtatatatacatgtgtttttatgtaggtatatatttaccattcttcctatctattcttcctataacacacctttatcaagcatacccaggagtaatcttcaaatcttttgttatattctgaaacaaaagattgtgagtgttgcactttacctgatacacgctgatttagaaaatacagaaaccatacctcactaataactttaaaatcaaagctgtgcaaagactagggggcctatacttcatatgtattatgtactatgtaaaatattgactatcacacaactatttccttggatgtaattctttgttaccctttacaagtataagtgttaccttacatggaaacgaagaaacaaaattcataaatttaaattcataaatttagctgaaagatactgattcaatttgtatacagtgaatataaatgagacgacagcaaaattttcatgaaatgtaaaatatttttatagtttgttcatactatatgaggttctattttaaatgactttctggattttaaaaaatttctttaaatacaatcatttttgtaatatttattttatgcttatgatctagataattgcagaatatcattttatctgactctgccttcataagagagctgtggccgaattttgaacatctgttatagggagtgatcaaattagaaggcaatgtggaaaaacaattctgggaaagatttctttatatgaagtccctgccactagccagccatcctaattgatgaaagttatctgttcacaggcctgcagtgatggtgaggaatgttctgagatttgcgaaggcatttgagtagtgaaatgtaagcacaaaacctcctgaacccagagtgtgtatacacaggaataaactttatgacatttatgtatttttaaaaaactttgtatcgttataaaaaggctagtcattctttcaggagaacatctaggatcatagatgaaaaatcaagccccgatttagaactgtcttctccaggatggtctctaaggaaatttacatttg

SEQ ID NO: 24828 - DNA, 1039 bp, Homo sapiens
tcatttctggtagggttatatgagaagtaaaaaaccctatgtttccttctagtccctcccaaggacatttcctacaagtgaattctgctgaaaatgaaaattagacagctttaggaggtaaagaagtagctaaaaggaagaggtattacaggcaacgctataactgggtagaaagaggaagcacctgtagctcattgccacctttgtgttctgatgctcgtcagaggtcttttctcagtgtataaattgctgagggtgtgtgtgcaagctacttactaccactcatgaccttttttctgctatcttcagtgatttcacaaatctagctacatggatgtagaaagagtgaaaaatagaacctggggcattcacactgatttgccatttaatggagattgtattgctgaccatgttctgtgataaataaattgtgctattattgtttagttcaaaatgtattttaactgcctgcttttctttcttagattaatatttttggggacagatttgtgatgcttgattcacccttgaagtaatgtagacagaagttctcaaatttgcatattacatcaactggaaccagcagtgaatcttaatgttcacttaaatcagaacttgcataagaaagagaatgggagtctggttaaataaagatgactatatcagagacttgaaaaggatcattctctgttttctgatagtgtatatggccattttagtgggcacagatcaggatttttacagtttacttggagtgtccaaaactgcaagcagtagagaaataagacaagctttcaagaaattggcattgaagttacatcctgataaaaacccggtaggtaaacgtttgtttttaaaaatatttgattatatttttggtacattttgatatttatttaaattgctttaaatgatcaaatgcttaagaataatcatatgtcaaaattataattcaacttgtatgctagaaacaaaagcaccaaaatgttctggattatttaggatcccgtgaaggaatgtcagtaccaaaaattcagtt

SEQ ID NO: 24829 - DNA, 1042 bp, Homo sapiens
tttacctcaaatagaaaaataacctacaaatgtattgatttataattgttataggagtaaaaaatatttatgaaattaagagtttcaacaggcttattattttcagctgcattttttaggaagaataactcatggtctgataacgtctgtcaaccttttgaagagtcaattatttcattacttttcttacttttttttttttttttttgaagattatagtttcttaaaaaatacttcatttcaacccatggtaactcatgtcatgttgtattacccctccttatgttggtatatggtctcccagaagttactagattaattaaacctacatatatgttttgaagaaacttggattgtgtatctgaaataattgtattatatctaatattttttaacagaataacccaaatgcacatggcgattttttaaaaataaatagagcatatgaagtactcaaagatgaagatctacggaaaaagtatgacaaatatggagaaaagggacttgaggataatcaaggtggccagtatgaaagctggaactattatcgttatgattttggtaaggtgatacgatattacttatgaaatgtgttttatctgagtaaaagaaaagtgaattctgtttcaccacttagcttatatatttaagatgcgtcactttgattagctccttttaatttgctgtgggagtgaaatttaaaaggaatgtcagttggtatacagagatgatctgtacagatatgaagttgtattggttaaatcttgttaaatacttttaaaataaggattgctatttaataaaaaatatgcattcatggactgcataatgacatttcacttaacaatggattgtatgtaggacattggtcccatgaaattataataccatatttttactgtaccttttctatatttaaatacaaagatacttagcattgtgttacagttgcctatggtattcagcagtaacatgctgtacagatttgtagactaggtgtgtagtaagctatactatctaggtttgtgtaagtacactctgt

SEQ ID NO: 24830 - DNA, 1061 bp, Homo sapiens
ctttataaagaagaaagtaaaaattacttagaattttctcatgcagagatatggctaatcaaattttggtaactgtccttttaagtgattctataccataaatattttgatgctgaattttctctttgttatgatactaaatttcagaatttttaagtgatgctcaatgtataatgattcgtttataatttaaaattctttatcttttcataaccgtagtatacctaaatatattacatattaacatacacatattgaaataaattatatatagaactgcaactttatagttttttttctaagacctggataatggcaacgagagtagcatttttagagatttcagaggtagaatctgaggatggagaagaatggcaggataagactaactttaaggtatttgcttttgagtgactagtcactgacagaattagcccatatcggggaaaacaggatgatcagcactctcctgttaacgttctagacagttgggggccatttatcttgaaacattatcttgtagtaatttgcattcacattgatagtagaagctgacgttttctttggacaactctttttttcaggtttcctcaagcatctgcttcctacatattactacaatttgcacagtatgggaatatcttaaaacatgtggtaaggcttaatttttttcagttcagagttttgactaaagagggataagttgtgaattgagagaaactgcttctgaattttgtgggttttttttaaacttaaatttttttttgagttttgatataatacatcctttgaagtctggaaggctggaagttgcctaatttttgataaaaagagatatagtgagaagatatggagaattgagagtttgaaaatccacctcctctcacctcctttcttaaacagtttacagtcttaaaaaagatagattatgccaagtattatattactgttttccaatttgagctgcttttattggggataaaagaagtaggaggcagttcctgagcttttagagtttttagagctttatagctctaaaatttaaaaaattatcttacctt

SEQ ID NO: 24831 - DNA, 1027 bp, Homo sapiens
gatgaaagtcttgtatccaaagcaatggagtacatgtttggctggtagtagaacaccaagaaggaggttgctacactaaaacagagttagcagagtgctgctggttccttcggttagttatataactgttcctgcagtattggatagctatctcatacttcttttagaaagaagcctttttcattaaggatacaacctatttgtagctcgcactttaaaagatgcttgagatacattttaaagaaaactaaaaatccctgtaaataggattttgtgctttctgtaacagtgcatgcttcagcacagaaaactcagcattgattattgtaaattaaataactgaaattgtggtgagacgtcatagtcttcatgagaacgtgggggtgaatttcatgaaggggaactatagttatttctaccgacacaaatattataattagcaatttgaattatggtcttttaatttagatagtatttaatattttaattatccttgtttgtatatgtcctgtcacagagtgtcctcttggtgtattctaaaacgagcattcttttaaaaaacctaaagtttcttgataataaacattgtcaatgatatgtgtattagtctgtttgcattgctataaaggagtacctgaggcaggataatttattaaaaataagaggtttatttggctcagggtttaattggcttgtagctgtacaagaagcatgatgctttacttgtggaggaaagtaaagaagagtgagcatatcacatggtgaaagagaggaagagagcaggaagaaggaagttctagactctttttaataaccagatctcacatgaactcattactgcagggaggacaccaagccattcatgagggatctgcccccatgatctaaacatctcccactagtccccacttccaacatcggggaccatatttcaacatgagatttgaaggggacagatatccaaatgatatcaatatgtattgaacattttttgaaagggtgatttattataaaaagctttaagtat

SEQ ID NO: 24832 - DNA, 1043 bp, Homo sapiens
cagttgtttaatttccatttaattacatgattctgagtgattttcttagttttgatttccatttttattgtgctgtggtccgagagtgtgtttggtatgatttaaatttttttgaatttggtgaggattgtcttatggctgattatgtggttgattttagagtgtgtgccatgtgcagatgagaatatatattctgttgttttggggtggagagttctgttaggccccttggtcaaatgttgagttcatgtccggaatatctttgttagttttctgcctcagtgatctgtctaatattgtcagtggggtgttgaagtctcccactattattgtgtggttatctaggtctcttgtgtcggtctctaagaacttgctttatgaatttggatgctcctgtgttgggtgcatatattaatataaggatagtttggtcttcttgtggaacactttaccattgtgtaatgcccttctttatcttttctgatcattgttggtcgaaagtctgttttgtctgaaattggaatagcaacccctgcttttttctgtttactgtttttttgtttgtttgtttttgagacagagtctcgctctgtcacccaggctgaagtgcagtggtgcgatcttggctaactgcaagctccgcctcctgggttcacgccattctcctgcctcagcctcccgagtaactgggactacaggcgcccgccaccacgcccggctaatttctttttgtatttttagtagagacggggtttcacagtgttagccaggatagtctcgatctcctgacctcgtgatctaccctccttggcctcccaaagtgctgggattacaggcgtgagccactgcgccctaccatttgtatttttgtctgacagagttattttggagaagcagtcttcaggttctgagattgtttcctcatcttggtgaattctgctgttaatacttgtggttgtattatgaaattcttgaagtgagtttttgagctctgtcaattcagtagttctttcttaaaaggatcattttgtcttttatctgct

SEQ ID NO: 24833 - DNA, 1032 bp, Homo sapiens
gcagtggcattatctcagctcactgcaacctctacctcctgggtgcaagtgattttcctgcttcagctttctgagtagctgggattacaggcatgcaccatgcccagctttgtatttctttttttttttttagtagagatggggtttcaccatgttggccaggctggtctcgaactcctgacttcgtgatcaacccaccccagactcccaaagtcctggtattacaggcgtgagccaccgtgtccggccctcagtctctttttctgtcttatgcccctcagtcgaattctttcctgaggaggcaggaattgaggttgctgcagacctgtacagattttgcccatggtaactaggataccttacactggtaatggtgtgctttgaattctttatttttatcctgtgtatatctactataggtttttgctttgtagttatcattaggcttgcataaaacattttatactaataacaggctgttttaagctgataataacttaactttgatcacttgcacaaactcaactcttttactcccccctctcagtttgttttgttgacatgttttgtatattttatggtttgtgtcccttgacaaattagtagctgtagttgtttttaatagatttgttttttttgtttgttttttttttaaagaaaggtaggaggatcacttgaggccaggatgaagaaagcctacttaatataacaagaccctgtctctacaaaaaaataaaataaaataaattaggcatggtggcatgtgcctgtagtcacagctactgggaaggctgaggcagaggatggcttgaacccaggagttcaaggctgcagtgagccatagtcacaccactgcactccagcctgagtgacacagtgagatcctgtcaacaacaacaacaataacaaaacacaaagaaaaagtgagtattgaaatagtctaaagtgaaggaataaaaagataatgtcttatgaaaagggaatgttaaaatgaaagcttcctaacttgtttcaatgtagctagctcctgaa

SEQ ID NO: 24834 - DNA, 1030 bp, Homo sapiens
tattagcgatatcctactgtatctataccaaggcatgggaggcactgacgattgcaactaagacttaccaaaccacaggggttctcaaaatttagggtgggtaagaatcacttggagtaggttgggagttgaagaaaacttgttaaaaatgcacatttcctggctgtaacataaggtattctgaaccaatagatttggggcctaagttggtaatctgcagtttcagtatgctcctctggtgatcttgaacaggtggtccatctcgcctcctttgggaaacactgcaccaatgtttattatcgtagaagaaaattacatagaagaaatctagaagaaatttcaacgaattttagaacactgaagaatttaggggtccagatagctttcttatttttttgttgttcaaatcttatcttttgtaagagaaatttgaatagctagggacattggtgatatcagaaacctagatttcacttcctctatcattgtttataaaatcaaaacgatggagtcctaagaacagactaaatttattttataaacaccaaaagaatgtatttgataggaaactagcacctgatcaaagtgaatattgacatggagggagaaatttcctgagaaggctgtaaaactggcgttatgttagtttacaagaaaatgaagctgcatgaagaggatatttattaaatagtgaaacattaggtctctctgttgtttgaattatttacagcaaacaaaatacttttaggtaaaatatgtaaacgaatacgcagataagaaaatggacacaggtttttttcatgcgtcttgtaaccgtttaaaggagaccattggatttagtgcttaaccaatatatgttttattgtgcaaaccaagtatttggatattaatattttaaaaaactgataaagtctttatcaacttttactgaacaccatattatctacttgactgttacattgctttaagagtccagtctcgactcacctgtgatcctaagtgaaaaataaataacatgagatcattaaaa

SEQ ID NO: 24835 - DNA, 1044 bp, Homo sapiens
atatactgattctgtatgtttaagagaaatttgtacactgtataagcttgtttcactaaccagcagggctgcaactactatgagtaaatcaaatgtttatgaagccctgtggccttgcttgcctgactcttcacctttgctgcatggcaggaatccagaattgggagaagctcagcaggtgcttttgtgagcagtagactatccaccattgtggcagccccttcctcatttggtcttctgcccttgctgctgctgaagacctggaagggggagaggtttgcattatcaccaaggttgctaataaatgatgtttttcaatataaacatgtaaaagttttgccagagtagtcttactttccccttaaatactccccaaaattaccagaatattttaaattatgacacaatgaaaatgttattgctgccagagttgacatttttcttgcaaaaccaagctttaagtgttttaattttaaagaagacatttccaaagctagggttgtatgcataacaggattcctatcttttttttgtgccgtctattaagaggcaattcttttcttttctaggactgttcttcctttcatgttaagagaaaaggctgtttttggatgactaagaggatcccagagacatgaggatagcatctttagctgcttctgatacatattatgttcttcatcttgatgctattgatagcaccattgcttgaattcattcttgttcatcctcacttactttttttttgtctcgttacatagaaaaaacttggaagcattttaatgttgaagaactttctttcctctgcccaccccgccgtgtccattttgtctatgatatagctgaatataaactctaatacctttttgtagttctttattggccagaggaaagtaaacaacttgattgtgctcagagcctgtctcatgcctcattaggtactgggggtaagcagacggcagcagcattacatgcagaaactctgcagaaacatctgatttatttttatgagcaagttatagtctttaagacatgagcaccaaa

SEQ ID NO: 24836 - DNA, 1022 bp, Homo sapiens
attataaatagaataatatgaaactcaggatgacaaagacatattgcatatcttggcttcaacctgtaataacattgttttataggaaatatgtaaagtgtataccctttatcattatgtataccctttatgtatatgtgtaccctttatcattaagttaaacaaatattttgtttctggtcaaaataggttctggtcagaatattgaaattcagaccagaatctggccaagaggttctggtcagaatattgaaattcagcaatctgggggtgatagaattaaacagagtttgacatatgcattgttgagaattagagaaacttataaagtttcaggctcttgcttcctattttttgaaaaatgttcatgcaagtaatgtttttcagaaaaatgaaaaattctttggctcattttcttttgttatatattgtcctccatggctttatctattttttttttttctgaatgagtctattgaaattgctccaataaacttttcgggtaagaactttttcacagcttgatgatgacctataggaagaaacgttttttgagtgtacttatctgtgctatgttcttttatttgtttaattaagaaaatatctattatgaaatataagacacagataagtgcaaaaaaatcaaggtatagtataatgaattgttacaaagcaaatatctctttaaagcatcccagattaaaaacgagaacatcaacagctttcagaagttcctttctcccagatattctttcatctcagagagtagatatcacaaaattaattctgtggttaaaatgcccttgattatctttcttgtttagccacctatgtgtgcattcctagacaatacagttttggaaatttatgtaaatggaaccaggctacatggaatatttttatgcattattcttttactcactatcacgtttaagacacattcatctttacttcattttgagaaatcttaattgacttccacatgaaataattgtcaggatttcttagggtttactcttatc

SEQ ID NO: 24837 - DNA, 1145 bp, Homo sapiens
aaatgctttttctgcatctatagagatgatcatataatttttcttctttattttgtaatgtggtatgtcacatttattgatttgcatatgttgaaacatcctaacattccagggataaatcccacttgatcatggtgaattattcttttaatgtgttcttgaatttggtttgctaatattttggttaggctttttgcatcttggttcatcagggatattgacctataattttcttttcttttagtgtacttgtattgctttggtatcaggataatgctagtctcatgaaatgacttagaaagtctttgttcctctttaaatttttggaagagtttgaaaagaattggtgttagttctttaaatgtcttttagaattcagcaatgaagcgttctggttgcgggcttttctttgatgagagatgttttattactgatttaatctccttactcattactggactgcttagattttcctatttcttcatgattcagtctctgtttgttgtatgcatctcagaatttatttttttatagatttcccagttagctgatgtaaaattgttcataatggtttcttataatcctttgtgtttccatgatatcagttgtaatgtctctgttttcatttctgatcttatttgagtagtttcttcctttttcctagttagtctagctaaggatttattgattttgtctttccaaaaatttagtttcattgattttttttctcttactttctagtatctatatcatttatttcttatctgaactttgttctttccttccttctgctaacttcgggcttaatgtattctttttatagttccttaaggtgtaaagtcagattatttgtgacctttcttcttttttgatatagacatttattgccattaatgtccctcttaggactgcttttctgcacctcaggagtattggtatattttgtttccattttcatttgtctcaaggtgttttttaatttttttttatttttttatgtgttgtttaggcgattgttttttagatatccactatttgtgtatattcctagatttatcttgttactgatttctggcttcatgccattgtgatctgaaaagatatttgaaatgatttcaatcctcttaaatttgttaaggcttgtt

SEQ ID NO: 24838 - DNA, 1040 bp, Homo sapiens
tttttttttttcattcaaaaaacaactctcggccaggtgcactggctcacagttgtaatcccagcactttgggaagctgaggtgggagcattgcttgagcccaggagttcgaggctacagtgaactatgattactccactgcactccagcctgagcaacagagcaagaccttgtctcaaaaaagaaaacaaaacaaaaaacaactcttgtgggtcaggcagaaaacacaatatctgtcttaaggggcttacaacttagaaaaacaaggctgaccgatactcctaattcattatgaacaatgctgtgacaggaagcagagaaggtgcaggttggatggatctgtggttggggatttgctggcaaggtgagtggaaaggcacaggagagcaggatagagatagatattgggaaaggagcaatggggaaggggctgaaaatgtacgtttctaacaagtttccaggtgatgctattgctgctggtcctaaaaccacacactagtgggaaattaggaaaatagattagtcggccgggcacagtgtctcacgcctataatcctagcactttgggaggctgaggctggtggatcacctgaattcaagagttcaagaccagcctggccaacatggtgaaatactaaaaatacaaaaattagctgggcgtggtggcacacacctgtaatcccagctactctgaaggctgaggcaggagaatcgcttgaacccgggaggtggatgttgcagtgagcggagatcatgccaccgcactccagcctgggcaacagagcaaaaactccatctcaaaaaaaaaaaaaaaaaaaaaaaaaaaagaaaatagatcggtaatacagaacaagcagagggaaatagtattgcattgcatcttaagaatttactgtaggatgtccagaaactagaagacatatagatgggtaacagacagccaactctattctgaattctttaaaaattcactacaaaatagtatacatgtgcaatttttatactctttattattttttttttcacttttcccacctcta

SEQ ID NO: 24839 - DNA, 1034 bp, Homo sapiens
acctaacagaaatttatagccacaagaacacctttaaggggaaattaagactaaatatgagagagcttcaaacacacaaacatggcacaaacatgcaacagattgaaaaaatggtgggaaattctactttcagagaacttcctattggttattatgttgtcattatctggatgacaaaattatctgtacaccaaactgctgtgcatgcaagttacccattttacaaacctgcacatgtacaccttgaacctaaaataaaagttgggaaaaaaagaattgttgaaaatgctacttctgccgaggcgggcggatcacgaggtcaggagattgtgaccatcctggctaacacggtgaaaccctatttctactaaaaaagtacaaaaaaattagctgggcgtggtggcggacacctgtagtcccagctactcgggaggctgaggcaggagaatggtatgaacccgggaggtggagcttgcagtgagcggagattgagccactgcactccagcctgggcgactgagtgagactctgcctcaaaaaaaaaaaaaagaaagaaaaaaaaaaagaaaatgctacttctcctttttagctgaagtacacatgggaaacaatgtaaatcatctaaacctagtgtgcaatttatatttgtaacatttactattttgtaactagaaactgtggtatttaataagttgttgatcttgttgacctatcacttatcataatataattatttagtaggctttatgaggttaaattgtgtcttccaagaagatatgttgagattctactcctggaacttcagaatatgaccttatttggaaatagagtctttgtagatgtagtcagttaaattaagataaggttatactggagtagggtgggccctagtccaataatactagtgtctgaataagaggaggaggaggaagaagaggaagatgaagaaaagaaggagaagaaaaaggaggaggaggagaagaggaggaggagaggacgaggagaaagaggagaggaggaggaagataagagtg

SEQ ID NO: 24840 - DNA, 1047 bp, Homo sapiens
aagataatcgatcaatgagctttttgtggagcaggcaaaagaacctttcatttcaaagtctctgagtgaacttgtatgttacatgaaggagaataacttcggtgtaaagtaacaaccttttgaaaattcttaagatacaatatcactgcctttttttttcccaaagaagagtcattgatagttcagttaattactgcatgaaaaaaattcaaagctgctacatcaaaaatatacctgtacacaaatttttatctcagcacacttcacaattgcaaagatatggaaccaacctaagttcccattaactgatgagaaaagaaaatgttgtgtgtgtatatattacagtatgtatataatggaataccactcagccatgggaaaagcaacttggatggagctggaggccatttttctaaatgtagtaactcaggaatggaaaaccaaataaatactacatgttttttgcttagaagtgggagccaagctatgggtatgcaaaggaatacagagtgctataatagacactggagacttagaggagataaggatggcaggggaataaaaaactatgtattgggtacaatgggcactactcaggtggtaggtacactaaaatctcagactttaccactatataattcattcatgtaaccaaaaaccactggtactcctaaagctattgaaataataaaaaaagcaataagtaaatgtcaagaaatgtaaaaaaaatatagaaacaaatttctctggtttattcttggattattcagccgtatgcatatttctatgcatatggagacatccagtagagctatcttgaagcttaactttctgtcaaacataatttaatgtatctggggcctcaggcaaccataagagaaacgatatacatatccatgcattattggctattttacgaagtgatacagtgagccctctgaaaaagaaggatggtgacattgacatggcttgggaaagttaccatttttcttggctcgtttagctctcatccacaaagacttgttaaaggcagtgtatgggcaggct

SEQ ID NO: 24841 - DNA, 1028 bp, Homo sapiens
caaggaggaagtggcgggattgagtgatggtctcagaaagagtttgtattccagctctttcctgaaggactgatagcaaacttctccagtgagaagttgtctgtgctaagcttaagagagtgactctagaaccttatgctgtccactttcagctattcactgtaaagtggtggcggatatgtgtgaaacactatcactatgtcaccattagagccactagggaaaacgtgaggcagatagaacccatgcagttgctggaaggttctcactggatcacagagcttcatttttcaggatcctagtcggaagagcactcctgattggtgggagaagatgtactgagcattgagatagtgcaggatgattgctcctacttctcatccaaatccccctttagctataaaacctccctgcagaactgactttcatgtattggtatgtttggagaactatacacctccataaagtaaaaaaggaagtagaataaaggctcattaggcttagtactgcaaagagtaaagacaaagtagggtggcaatatgaaaatgtatgattcactgaagtccatgtttattagcaagcagcctcccttcccctttcttacacagtggtaacttagcctgaatgaggagagtagaagtttaaggacagactcaaatagtccaaaaataaatatagcgttcttgatcgaattttctttatgtatcttaaaatatgtttctttatgaataaagaaaatatgctgtgatgtgtgttttccaagaatgaaaagttctcatctaaagttttacgtaaattcttgatgcatttaatttcattctttttacttgaatctcttggctacttgctttcagcccacttaagactcacaaaagcagggctagtttgtttcttttattgattttgtggatgtggttgttggttgttgttgaacaaaagaaagtgaaaatactcttctgcagtcttctttagtagagtagcacaaagagcagtagccaaaggctaaaggagttattgaaattgttctg

SEQ ID NO: 24842 - DNA, 1028 bp, Homo sapiens
cataactgtgatatagttttaatttcatagaacaagaaataagtgaatatttagtagttctccagaacatttctggataagttatagggcttaacagaaaagaataaagtttatcttccatctaatctcattctttttatttagattttcccagttaatcattgtgtaagcaattgcttactgaatgaagacatttggtacatcctttttggaattgatttacaaagtttgtcttaattatatatttaaataaatacagaatatttctgtatactacatatttaacatggaatttaaatatccctttaatcactttaatatgtaatttgggatttgtcttgggaaacttggaaatcattactaatttgttcattacattctattatttggtcagcattttagtatctcataataacattatatctatttcactgactatagaattcaaaagaatcagtgatagttttgaggtcacacaatgagtcaatattatcaagcagatttcctgactccagacatatttcctttataatttatatgctaaattatggaatatctagggatcattatgataatatgattaagagatggtattgtgttatctgtttggtcgaaggcactttatttttccaattgtctacagatgtggataagtagtgccagattcacagaataatttgattaaatttgttttactactcatcctccacatgcaaatatcactcatttctgtcggacctaaatgccttgtttctgtaggctgccctgcatttctaatatatgaaatactatgttccgcaagaaaagaactgctaatttactaatcggttcacaaaatatttgttatttagttcattcaaatttatcgaggtgcctcaattacaaagcactgttctaggcaccacaggctctgtattaggcactaaataatacatgctaaggagcattttgggctgctcttgctcattttgaatctgttaaaaaatatattcacatcttttgacatgtttgtaggtttcttgtcactc

SEQ ID NO: 24843 - DNA, 1025 bp, Homo sapiens
gagaagtgtcacaattattggtagtataaaatgtgtagtaattacttgattgatttcattagttgtaaacttaaacatcctatcgatatttttataattttagtatacaaggaatggtatcataaatggtagtaaatgtttaataagaagatagctgcaatttatttcacaattatttggatttttaatagcatttatttttctgtatctttaatttcctataataagaataattaatagatgataactagataatgacagaagcagacagaaataacagacgaacataaacaaacattcaagtctgtcagttttggaatttcagaaggctagaaaaaaatgtatgtacgtatataaaatactcaaaattttcacatattatctcatacatttttagttctattttcaaaatatagaatcatttagaaaaataactttccagatgaaatatatttctttttttaacaacactggtagataatttttaaatcattgggataaaacttagaaattgtaacaaatatcaagtaagatacactatacatttgcatgttgatcccagcaacaaattatttcccattaccagcacttgtattaataattatgtatgtgcatgtatttgtatatagctatatatccatgtatccatatttctagatggacaatccgacataaatggcttcagaatttgtggatttaatttctgccgtattgttcctggataattacactatgctactagagaaagtatgtgtctgcattggtgtgtacatattcatttatttctatatttctgtaacaaatgtctattgattgcctctatgtagctgatactctactaggagtattaatacaatgtcctttttttatagattgtactgtttagtgcagtggtctccaaagtaggatgcatgtaccccaaaaaagtgtgtagtataatttactggcagcaagtagaaatatttttaaaaattatctggatatttgtgattatcttatttaaaaatatttctataacattttat

SEQ ID NO: 24844 - DNA, 1048 bp, Homo sapiens
gtaactttggataattccttaaatagctctggattatatgttgatatattgtttatttattttgtgaaatataaacagccattcaagcttccaaatcagcttgcaaactttgtacatttctaggtttctttgaattaagtgtgtctccagacagtgaaagcaaattttaccatatacgtaagcaaagcatagataggaaatctgcaactcctttcactctgctgtcccccagcaaaaataaaagcaatagtagaaaacaaatatcaagaagtcagttctaaagcttaacacaggtgctttggagttaccattattgcactaattttttatattttaaaagttgtaaagtgcaaaatgttatgccggcttcattaatatattattctaggtgataatactaaaagtcactggcatatcatcttttgctatgattgattctgcatatttaattaggtttatttaatactaaatttgggagatttctcaatatattgaacaagaacaacccggacaacactggcactgaccaaataaaatgaatacaagcagctaataagttacagttcatatacagttaatatcagggttcatagtggaattctgtccactttttcaaagattaatgaaatgaaatttggtaaacaatctctttgttatgttgatgtctaattttaacatgcagatttctctttttcccttctaactcaattgataactttgatttatgaaacaaaatcactccaaaaagcttattgtctgcattgaaataaaggaagatagtatattaaactagaagtaacttaacttttatgaacctttgatgtaggacacttggatttggagaatgtgaatatgaagttggggatcaaacagaaatattcctataaaagggagcaaagtgtataaagaacaaacatagagaagctggcctacaaagtaaagtaaaatatagatacaaacactcactatttgacttagaaagaatattaagtaataacggaatgtcagacttgataaaaaatagattttcatactgatgttgggaact

SEQ ID NO: 24845 - DNA, 1050 bp, Homo sapiens
ttattttactaagtaccatttagtgttgcttgtttgtttattttttgagatggagtctcactctgtcgcccagactggaggcaatctcagcttactgcaagctccgtctcctgggtccaagcaattctcccacctcagcctcctgagtatctgggattacaggggcgtgccaccacgcctggctaatttttgtattttttagtagatacaaggtttcaccatgttggccaagctcaagggatctgcccgcctctgcctcccaaaaagctgagattacaggcgtaagccaccttgcccagtcctacttagttttaattgtcaggctcatattcaaatgaaatggcttaactatcttatattccctttctaaacctcagaatttcttattttgttggggtagaagaaggaaaaggggaagacaaagaaatgtgttccttccctatctggccagagtttagcaaacattgctagtcatatatagaaggttatcagtctaacattgactacctatgaatgcctccatgtagcaaacatattggtctggggactgaattcttagaaagtaatgcttagtagttttgatgtgtgattctctcatatccagacgaagtttgaccttttctacccagcttcggctttgcttaccaaaacattttgcttctgacagcccccaccccaccctttcttttttataaacagctctcttgattagggtgtcagaaagatggccccaaatcttagtttattctatgatgtttgcctgaccaacaggaagctcactctgcattgctattcccaacagttagcttttaagctatcaattctgtcctctctctaccctgctataatctcttaattctactttatgtagtcagagcagatacatgtatctattgcttcaacagaactcttacctgggaatagaatgtcagttcttctatcttgcaaacattactagtctctgtaacagattcttttgggatttttttaaataaaaagtaggtggcggaagaagtgctacttaaaattgctctatttcccaccaggcac

SEQ ID NO: 24846 - DNA, 1034 bp, Homo sapiens
tatatcctgttcttattaaaatgtctttagtaaaagcatgcaagagctttcttgttgggaactatctcacacatcgtgattagggtgtcagaaagattgaatgattatttgcttgtttttaaaagacagcaagagctataggaagttatttaagatcatagacttagcatacactcattgactagttgatagataatgatatgttaaggaaataccaagaaagattgttaatttgcatctattgtgcctgatgggaaatgaaaacaaataacagtttgattcttaaattccactactatttgaaaatactggaattcttaggtttgtattttaagctattttatctttcttgtccatttttataattctaacatggattatgaagtaaagttgaagtaagtgaaaattatttttattattttccaatagctcttaattttttatatatgcatgtacacgtatacccactgcataaattgtataggaagaaaaaaattactttgctgatagtagaaaagactgaaaaattatgcctttaatcaaatattcagtgactcaatggctttttttttaatgtttctcccattaaaacagaactaatactatgccactgaaatgctgatatttttattttcttgttttcttttgtgtgtgtgtgtgtgagagagagagagagaaagagagagagaaatatttgtgttttttctgtctctcaactaggtgcttgggctaggacaaagcattgtgagactggctctagggctgtgtgtgtgtgtgtgtgtgtgtgtgtgtgagagagagagagagagagagagaggtaaatatttgtgttttctctctcaactaggtgctttggctaggacaaagcatgtgagattggctctagggctgtgtgtgtgtgtgtgtgtgtgtgtgtgtgtgtgtgtgtgtctgtgttagtgtgttcccccagtcataatgaaaaattgttccaaagcagtgtgtgtacttcactgtttttttctttattatttgtcctagatccttttttttgt

SEQ ID NO: 24847 - DNA, 1056 bp, Homo sapiens
aagtttatttgaggtcttgtcctgtttttgttctcgagctctttcaaaatgttctgccaggtaatgtatctgaggtaaagggtaattttttcattctaatttatgttttccaattaggtctctgttttcaagttgaagttctttaactgctaaatatcatagaaaacatttttgtctatcctgaaaatatctagcagtttcctattttctttctttgtgcatttgtgagatagaattctttttagtttgtttgtcatgctctatcttccaggctggagtgcagtagcgacataatggctcacggcaggccttgatctcatgggctcaattgattctcccacttcagacttcctagtagctggaaccacaggcatacaccccaatgcctggctaatttgtgtatttttggtagagatggggttttcgccatgttgcctgggttagtctcgaactcctggactcaagtgatccattctgtttggccaccaatagtgccaagattatagacttgagccacagcacctgatgttgcctatgagattgaattctaatcacttgcttttaattgtcaatgtttcaggaattgctcttagtagactttgccctacttttggggctttttgttttttgacgctcaggcttattaaaagggattctgtacatcccttttccgataactctatttagctttttacagagcaggatttatcatctgagatttcttacaatgtatacaatttggtgtatgtcaagaaacctgagtatatgcacccaaattaattattatttttctatgaataatcactggtcttctctgggtttaggaaaattcttaattatgattctttgtccagtttgggctgaaagtttaaattctacagttgcctgaatacttatctaatgggagggatggatttttataagcaattggactatttggagtcattatgaaaaggtagttggtctagaaaggggaagaggagaaaggagttaacaggctgtggaaggagagagatcaaatggataattggagtatggagaactgtatataggaaa

SEQ ID NO: 24848 - DNA, 1046 bp, Homo sapiens
acataatgaaaagggcctttcactattcataaacatattaggaaatttagaaaatgccattaaagagttaacatcaaaaatgtatacgaattaagtttcttttttcctaagttttatttgtaacttgatccagttccagatacatttaaatctcagcttattatctgtagtgtggagaacatatatgttaattcacatataagagaattcttgtgagaattaaaataaatctttttgtgtgaaaattatttaaaatttctaaatagctatcatataatgtatctaaccaaaataaaaatatctgtgttttcataatatcttcaaattattaagtctatttcaaaataatgaaaaatcaagcattcttaatactcattgctttgaggcaatgtgatctcttggattgaaaactaattttcagtatattctagttcaagtttttttttaaaagggcaacagaatcaactttacaaaataagggctccagttatctcagatgtaaatttaaaaagatcaattaggacagctataacaactcaaaggacatattattttctatgtgttaatgtttattttaaaaaatgtttaataaattataattgtatatatttatagcatacaatgtgatgttttgatctatgtgttcaatgtggcatgattcaataaaatgaattaacatattcatcacttcacttacctatcaattttatggtgagacatttgaaatttactccagaggacatgttgctaagtgaaataagcctgacactgaaagatatactgtttgtgttcacatttataataaattacaaataaaatataataacctgctaattttttgacaattgaatttaaacagaacagtatcatcattgattatataattgaaataatgttattacttctctccatcaacaaattagcagaagaaaatgtatgattttctttttcttcacaataaaacatggtaggaaatttagttgccagaagcaacaggagcccctcagaaggttcaaaaactcttgagataagctacaatggatcct

SEQ ID NO: 24849 - DNA, 1031 bp, Homo sapiens
aacagacacagtttcaaatcgtatcttataagccgtagttccttagaaaaattattgaattattttctgaggttcagttttctcttcatttaataatacgtatttcttaagttaaaacatgaaaggcaagactggtaaaaagtaatttctaaaaattattgatctccttctttgccaccctggttctttatacatccactacccacatgaaatgttgaaaatggctgatgagtagttgtgaaataattgaatagatccacaaatcacataaataagaaaactattttcaaatttttatggctgaagagtttaaaattacatcaaatatcattaaaccatatgtcagtgatcctcctggatgacttggttgccacatctctctctcacacacacacgcacacacacacacacactcagaatattttttttctctaaattagtttcagctttttaaggacaaataataatttgtgttatttttatacttgagttaattacatttatctgacaaatatgaagactttgtaagccggcaattttttcttccattctcttactaagttgtattgtttgttaattatttcagtgatggtctgtggcttttaaactatactaatgtttgttcatatgaaaattcatttatttttcactaagtttttaatgatagcttagcagtgttaaaattctagcttaacacttatttttgtgaagcattttgaagatttttctgcctaattttctgaaagtgttagtattgcctaagaagtcttttgtcagcctaattgctattcctttctatataaatatgctttttctgtctgatagctctatttttttctgtttattctgaatgttatgtactatcagcccaatgtatttaattgttggtttgatttaattaacctttccagtacatggtttgtatctttaatcagagtaccccagttattatatttctaggaaattctcacttttccctaaaaaatagagcttccccattatgccctttattttattttttttctggaact

SEQ ID NO: 24850 - DNA, 1938 bp, Homo sapiens
tttaatatgtaaccacctcaggctttcttcctgctttaaacatctcaaggatttcccactgaactcagaatgacattcaaactccttatcttaagtctatttcaatcttcttactactgtagtcccatctcccacttcacacaccctcgaaactccattgagcctccacgtggctgctctgttcttgtcattcagctctctccagtcacatgtcatctccccagatgaaaccttcctggctatcaaatccaaacgcctctgcagtttctattacttcagtgattctaccttcttgaggaatacatcaccatgtgaaatgaccattaatatttttactgccatgagcaaggacttaaagagggtttgtactgccctttggggtatacaacaatcctccacttggtctggaatttgaattcagaatgtcagtgcctgcttttactctctgaaactaaagaattttatctaaagaaacaagttgccttcagatcttcttttactctcacaaatgaaaccaagtcatgtagatatgaatcagatatgaagtaatattgaaaatatatttgaattgcatttatatactttaatatagaaaattaaatgaatatctatctatctatctatctaatacttctgatttctctgaaatttttttcctgtttccaatattattctgagaacaatcctgtaagttaaggaagtttaagaaggctgatatttcctgactataaggaatacttttgtatatttgaaatatttaaaagtggtacagtttgcacatgagtgtagagtttactgtaactaaagtatcaaaaaaacctcgagtcttctctcagaaacaatctaaaaagaattattttagtagatgagaagttaccaaaaaatcgtttctaaaggtgacttccaaaataatgatttttgcatatacttttttaaaaaacattcttggctccaaacataaacttcctagtgtactgctttccttctttagacttttcatatatatatataaaatattgtgtattttaatatgaggaaaatatatttttatagtatatattataaatatataatatattttaagactgcataaaacaacaaaaatcacataaaagcataaagtataggaattcttccacatttcctttatattaatatacctaatttagttatgtaaatatatagtatttatattgctttgtgggcttcacaccaggagttcaaatagtttttattacaggaaatgatacatttgtatctgtttttttatttgttattctttttcttaatacaatggaagaatctccaagttattaccttcaaagtggtcttgtatttttaatttaatgttttattcaggtataattgacacacagtaaactgtacatatgtacttacaaaattgtgtaagttttgaagtacgtgggcatgggtgaactgtcactataatcatgataataaacatatccatcaccctcaaatataccttgtgcccctttacaataatatttttcctactgttgtgagccctgaattcccaagaaaccattcatttactttcattcactgttgaattgtttgcttcttttataattataaagaatttataccatatatatatatttattttttgtgcctttaaaccacattctgaaagcaaataccttataattttaatcttcataaattttaccctttctttcttgcttttattgtagtgagaacacttaacatgatatgtagcctctcaacaaagttttaagtgtataatacagtattgtgaactctaagcacagtgttgcataacaggtctctagaacttattcatcttgtaaaactgaaactttataccctttgaaaaagaactccttatttttttctcactgcagcccctagcagtcatctttctattttgtttttatgaatttgactgtgtta

SEQ ID NO: 24851 - DNA, 1044 bp, Homo sapiens
ctgtaagtcttcttgagtaatgaggacactttaccaatattaagtcatccagtccacaaacatgggatgtctttttatttttttgtgatctctttaatttctttcatcagagttatgtagttttcagtgtccaagtctttcaactacttgattaagtttattcctatgaagttaattctttttgatgatatcaagtgggtgatcttcctgcctcagcctcacaaaacagtctacttaatttttggtggggagttttaccagacatagtatattcctgggttgcaatttttttatttcatccttttgaatagataatcccattgtttactagtctgcaaggtattgctaagaaacccattgatagtcttattgaagctctcccatacatgatgagtttatttcgatgctttcaaaattatctctttgtctttaatgtcgacacgttggctgtaatgagtcttggtgtaagttaaacttttggttgattctgtctgcaaacttctgagcttcgtaaatctcaatgtctatttctctctctgtatttgagaagttttggccattatttctttaaataagcttttgattcctttcttttgttcttccagaactttcataatgcatatattagttggtttgatggtgcccgtaattctcttaaactttcttcactcctattcattcttttattctttttgtttctcttataatttctaatgaccttcaagctttctggttctttcttctgatcaagtctgctgttgaactacactaggaaatttttcagtttagttatactcatcagctccagagtttctctttgcttctttgcatagtttctgccctttgttgatatccttgatttattcctgtatcatttttttcttatcttatacagttgtccatctttgttttttgtaactcactgagcttctttaaaacaattatattgagcgtttataaggaaatttatagatttccatttctaatttaggtaactggagatttatttattttttaattgagtcatgtttccccaattctttt

SEQ ID NO: 24852 - DNA, 1035 bp, Homo sapiens
gagaagaaaataattttttgtttgtattaaatgtcagattttctttttgtacttcgtacatgttaataaactttatactcctccaactgtcctcttttgaccacagtgtagaacaccctggaagagcctaggtggaaaccctgtcataactcctctctaaaatcataatataataaacaccaagcactacaggcatcccatcctggcagggtatcagatgtaaagacaaacgaattagacataaataaataatttgaattatgatttactgaaatttattgaaaaatggcagatggagataatatttataaattactatgcttcttaaaattagtttttgtacgtctctctctcatgatccttcttgtgcagcaactgccctgaaatcttttcatttatttttgtcttcccagttttttagaattattttcccaaatttctttcaattatgtactcttacctttctccagattcttttttttagatctatttgctgttgttttgttggtttcatcagtaactctgtcctgctgttccaaaataatttttcaacatccttttaaggcacctcagtgcttccctttacccagttttcaaattcttcacagtaaatgtccaggtttcaaattggcaaaactagaattctttgtgttgaatacaagataggagagaagagagatactgtgaattcacacaagtaagattctcttttgccgccatccattacaagaactgtggaaaagggttattgcattacatgtaagttggcaaacaaaccatggtcacttttagagtatactcataattatatgtattttattttatttttattgagacataatatttgtgcatgtttatggagtacatgtgatatttcgttacatgcatataatgtgtaatgatcaagtcaggttatttagtgtgtctatcacttcaagtatttatcatttctatttgtttttaacgtttcaagtcctctcttaaagctattttgaaatatacatcatatcaaatggggaaaagctcaaagctttt

SEQ ID NO: 24853 - DNA, 1060 bp, Homo sapiens
gcaagctgttggtggacctaccattctggggtctggaggacagtggccctcttttcacagctcaagcaggcggtgccccagtggggattctgtgtggggattctgcatgggggctctgaccccacattaccttgcccttcccccacactgccctagtagaggttctccatgagggccccatccctacagcaaacttctgccagggcattcaggcatttccgtacatcttctgaaaactagctggaggttctcaaaccccagttcttgacttttatgcacttacaggctcaataccacatgaaagctgccaaggcttggggattacaccctgaagcaatagtctgagctgtaccttggcccgttttagtcacggctggggcagctgggatgcagggcaccacatctctagactgcacacagcagagggaccctgggccccacccatgaaaccattttttttttctcttacactttcaggcctgtaatgggaggggctgccacaaaggtctctgacatgccctggagacattttcccattgtcttggggattaacatttggctcctcattcattatgcaaatttctgcagctggctggaatttcttcccagaaaatgggattttctttactatcatgttgtcaagctgcaaattttcggaacttttatgttctccttcccttataaacctgaatgcctttaacaacaagcaagtcaccttttgaatgctttgctgcttagaaatttcttccaccagataccctaaatcatctctctcaagttcaaagttcaacaaatctttagggcaggggcaaaatacagccagtctctttcctaaaacatatcaagggtcacctttgctccagttcccaacaagttcctcatctttgtctgagaccacctcatcctggatttcatggttcatatcattatcagcactttggtcaaagccattgaacaagtctctagagagttccaaactttcccacattttcctgtcttcttctgagccttccaaaatgttccaacctctgcctcttacccagttgcaaagtcacttcca

SEQ ID NO: 24854 - DNA, 1049 bp, Homo sapiens
aatggtcattttatggctcaatattagaataagatgattttcaaaatgtttaattttttttaaattgggagaaaaattaaaacaagtatatttggattaaaatgtcatttcattttgcatacatcatagaagttactttgggctgtattgtaactataaatactgaagctgattttcctgcatggatatcagtttcattattttataggaacaccattcaaccattacatattagtgttttcatccgaagttgtaaaaacacaggttactttaatgaaaacattttttaagtaagctctttatttcagttaagtattggcttattgctttcagtctatatattggtctgttaaatgtatattttgatcactgtgaaaacagcaatgattttccatacaagattgtgtaatccctagcaaaactgtaatgattttggtcactagattggtctgcaatggtgtaggtatttggggatttctatattcaacaaagtatttattttgcttctgttctaacacttaattatgtattagaaggacagatacatagatggatggattttaaaaatctcttttattcttaaaaagttagttgacatattgacatgaaaattaacatacttagaaattaatgaagatccttatatactgtagaatctgtgaagttcaacatagttttggcagttgttatatatctcttataatattgtgcttattcttttacttctatttctcttcctcatcaaaatctcctagcactcatatgtgaattaaatttttctaagctatgcaccaggaaaaggccattgtaatcctgcttcaagcagctggtagtaaaagaaacacattaataaactgtgcataaattcttaaaagatggaagaagaaatggctttgaattacatttattactttatgtaagtaaatgaagtaccgcatgtagaatatatgtatttaatgctctatgtacatttatttgtcttaagtgaagaaaaatgatagctgctataatttaaaaatgtacacgattttgaaatcatgatatttccc

SEQ ID NO: 24855 - DNA, 1033 bp, Homo sapiens
actaaatagtggtggtatttatgaacattcttgtgttttttctgttttaaagaatatattaaacattggttcattgagaataagttttgttgtagatgttgttacttatatcaaattttaaaaattccctttactacttttttttgtttgttttttgttttttttttgagatggaatctcactttgtcacccaggctggagtgtagtggcgcgatctcggctcactgcaagctccacctcctgggttcacgccattcttctgcctcagcctcctgagtagctgggaccacaggcaatcgccaccatgcccggttaatttttttctatttttttttagtagagacagggtttcaccgtggtagccagggtggcctctatctcctgacctcgtgatccacctgccccggcctcccaaagtgctgggattacaggtgtgagccactgcgaccggctttactactcctttttaagctatttttaaaatcatgaaatagtgttgaactttgtcacgtgaattttctgtaataattgataaactgtatgcattttcttctgtaatacaatttaatgatttacaatgatagtcatttgtgtaaaaccttatacttggtgcttttgaacatgtttatgtaattatcattaatatctctctaaactaaaaaataaacatgacttgctgacctatttacttgattttaattaataaatatgtttaattttctcatatttatttcaaattatatttgtctatgccattcatgagaactaaggtgttataaatattcatatggactttcatagtaatatacatttctgtagcctatatgaataaactcttcgacttgaataagtattaactgggtccaggacaagaattgcatttgaaaagataacctatatttctcaaaagaaaaataaagaaaatatcagatctgtccaggcgcagtggcttacgcttataatcccagcactttggaaggccgaggcaggctgatcacctgaggtcgggagtttgagaccagcctgaccaaca

SEQ ID NO: 24856 - DNA, 1024 bp, Homo sapiens
gtagagacagggttttgccatgttggccaggctcatctcaaactcctgacaagaagtgatcctccagcctcggcctcccaaagtgctgggatgacaggtgtgagccaccatgctgggcctcatgactattctttatagaactaatgcaaaatacagatatacaatagcttacctccatacacaaccactcaatgtcccaatactttaatctcccctgctcttcagatcttacatgttttagcctttttgtctctgcctgtatgccttagctgtaagccaaatataatcaaataattgaaaactgactatgattagaatcagtgcagacattctccaacattcatttctatatttaaacattcattttcttcaaaaaaattaactcagttgttgaattaattgaaatagaatgaaatacaattttcttgtaagatttatcacttgtttttctgtattttagtcaaccatctgtgacaattttgttcatgacttggtaaatgaatcctgaaactcattcaacacctgtttaaattcaatatttcaagggactcatagtctcatactgtgccacattagtgcttcagtcaactccataagtggaatttcatattttttgtatattcttaagactcctcaagtcaccatcttctctattaaggctcatgtgcatttgttagaaatatcaaatgtgactagcaccaggtgaatatattttagaaatgcccaattgatatttatggtcacaataataagcaagggagatgagcaagttttctaagggtgttaaatagcattagagtgttggcctctttacggtgcttacataatatgcttagtgaacactatccaaagactgcactttgattttctgatgacgctgaagaacatgtctcaaaactcagaatatttcagaagacaaatcttttatttctcaggcatagatttattagttttttcaaaattatctttccctgtgattaaataaaacctcaggaaacttttagaaagatgatagctgtgagaa

SEQ ID NO: 24857 - DNA, 1063 bp, Homo sapiens
tagaaaatataggcctctttattttgaatttccacaaataatattaaaatattaaaatgggagaaataagagactcccaagacttaaaatatttaatggtggtatattttgtatatatctatacttagtttattcttactgcgatttaatttataacagaataaactggaaatgctataaatttgatgagtgtttttagaagcactctctatatagcattcaaaacagacatgaagtataaaagcctaaggtgaagggatttagtagtataagaagtaattagctgcctagagaatcctgtaagtaatgtgtggtcatcattatattgacatctatgtattagttttggattcatatggtaatatcttattttaaataagcattaaaatgaatccattttctattacttaaaataaccacttgttaatgggcacaaataacacaggaagtggagaactgctctatttcagctctaccatctcctagccatgtgagcctttatgtatctaggtaaatgcctttacttttctgctcttcattttctttatctactaattagaactatacataactaccctttataactcatagattattacaaggatcaaaccaacacattgcaattattttgtattatatacagtataagtacatcatattatcatagaatgtactatggtctgaatgtttgtgtctccccaaaattcatatgttgaaaccctaacccctaaggtgattttaagaggtagtgcctttaaaaagtgattagaccatgagggtgcaaccctcatgaacaggattagtgcccttataaaagaggccctagagagagccatgccccttccaccatgtgaggacacagcaagaaggaatatctatgaaccagaaagcaggccctcaccaaagtccgaatctattgcaaccttgatcttgatcttccaatactccagaaccatgagaagggaatttctttgttttttaagccacccattttatagtgttttgttatagcaaaccaaacaaagtaagacataatgtttccaaaaacaataatatggtttcc

SEQ ID NO: 24858 - DNA, 1562 bp, Homo sapiens
tatacagcaagactagtatgtgcatatattatttcatgtgtccatttttaagtaatatcctagaaaatgattaaatggtcttaatgtgtgtatgtatatacatagacatttaaatacatgtgtgtataggtgtacgagtgtgtataggtgtaactatgtagatacatgtgtcttttttcataaatacatttctatttctaacttgctatttttggtaaacaaaatactctaaaatttgtttccctgcttttataactgatatgttgaacacaccagagacaactgggaaaatgagcagtttagtgccaaacaatttatgactttaaaacttagctcagtcttccatctttctaaacagttattttatgtaggtttaatcagcaacttcagttttcctctacgtctggtttaaacattccacaagtctcaaggtctccactaaattcttgctttctcatgctgagctgtcatattaatttatcttacatgataaactctttcagtttccagagctgtagtatatcaccatctgatcacgtgaccacatctttaatattgtaaaaacagcttcctactctcataattcagttgaagatcaaggaagtgatcttcagagggtaattgaaattcatgtcaatgtgaacttcaggtttgttccatgaatcaaaagggaaacctgacccaaatccttgcacaaagtctgtattttcctttccacacactctacaatgtctaaacactaattctcacctcttaaacatgtgcaggttacacttccttcatcatctcctgcttgaattattgcaactatctccacattaatcttgcttgttccttgggatatctgttcctcttaaatcaatattttattttactactgatttttgactgtggccttttatttaaagaccaagtcatcttacatttatgtttcttggatgcttttctctttcagtctttttgaatgacaataggtatctatggaaaattataacacaatgcaatcaaatgatttgaaagttgttttgtttgtcattatagtttgaagagtagaacattcaccttaaaaaacactggctagttctgaaattatgtttaatttgtattttttaaaatgttatctggaggatgctgtacttattctttcatccttgccatgagattcaaagtgattatgtgtaggggtgtgaaaacaaacaaaacaataaaaatatctaatgtaagcagaaagacttagctgatccctctagagcttgaataaatagacatttcagtcttttcctgtttggagtttcactaattttcttgaagggaaatagaaaaacttgagaaaccatttgaagatttcccttactgtgtagccttcttctgttttattgatgggctctttctgtttcaagaattgcaaagcctgggaggtattgttgcttagcattgtgcaggaaaagctatcataatggagaattttaaaagaaaacattgtcaggagtgcttgtagactctactatggggaaatttgacatctcttttgcatattgccacatatttctgtggattcttaa

SEQ ID NO: 24859 - DNA, 1039 bp, Homo sapiens
aatagccaaaatgtagaagcagcctgccttgagctgaactgtgtcccatgcaaaatttggaggttggaatcctaacctccaatggtactgccttcagaggtagggtttttaaggaagtaattaaggttaaatgaggttttagggaaaggccataatccagtaagactggggtccttataagaacagcaggacataccagaggcatgcaactacagaaaaaaggccatgtgaggacacagcgagaaagcagctttatctacaagccaaggagaaaggtcttagaagaatgtaaccttaacagcaccttgatcttggatttccggcctccaagactgaggaatacatttctgttgttaaatctacccagttgatagtattttgttaaagctattctgactaacacacaacccaaatgtccactggtggatgagcagatagacataatggagtatatgcacacaatggaatattacttaatcttacaaaggaaggaaattctgaaacattctacaaaatggatcaaccttgaggaaattggggttagtgaaataagccggaaacaaaaaacaaatacagtatgattccacttacatgacttatctgaagtagccaaactcatagacacagaaagtagaatgagttaccacgggtttgtggaagggggaaatggagagttgtttaatgggtatagagtttcagttttgcaagatgaaaatattctggagatcacaaaacaatatgaatgtattgaacactgctgaactacgtgcttcaaaatggctaaggtggtaaattttatgttacatatatttgccacaaagtgtcaaacaaacaaaagtcaccactcactttattaaaatgatcaggctacttaaagataagtctttaaaatattattaactattgcttttgaaatgtaaaagtaaaattataatttcaatattaggagtaaaaaacactttaggtaaaaatgtaaggaattacaaggagtctaccttcttaaaaagttcaaagggaaaaacaacatgaatagtaattg

SEQ ID NO: 24860 - DNA, 1053 bp, Homo sapiens
aatatctaaaatcaaaactatctgaaatgtaaaagatatatagaaacccaaatttttgtaccctcctggcatgagtagaactattgtggaaaactggcagtgtcaataattctgaatatataaatattagatattctataacccaaaatcttgtctataggtatattcaattgaaatatgtgtgtgtttgtgtatatttcacccaaagacagatacgtaaataagaatattcagagcaacataactcgaacactacaaacaactctcatgtaaatcaacaacaaaatggataaataaattttgatatattaatttacacagtggtatgccatacagtatgaagatgagcaaactaataccacacacaaaagaaattactctcataaccatgctgttgggcactggaaaccaggaaaaaatatttacattctttgattctaactatgtgcttttaaaatagtcaatactatttcaacatttttgaaattaaaatattggtcatttttgacaataaggttgtagtgcttgagaggagaaaatatcagcaatgtatagctgcataacaagtcaccacaagcttagtggcttaaaaaaaaacaaaacatgtatttaatatatcacagtttctgtacgtcaggtgtccagacaggttttgctgggaactccacaacagggcctcatcaggctgcagttaagatgtctattgcagttaagatgtctcctggggctagttggggtggctcatgcctgtaatcccagcactttgggaggccaaggaaggaggatcacttgagcctaggagttcaagaccatcctgggcaatatagcgagaccccagctctatacaaaattttaaaataaaaaaaaaaaagaagatgtctactggcctttctcatctgttagatcaactggataaaagtctactcccaagatcacttcagttggcagaattcactaccttattgttagaggactgaggccctcagtttgtagactacctgcagctcctggcatgtggacatttccatagacaagttacgatgatgcccactt

SEQ ID NO: 24861 - DNA, 1015 bp, Homo sapiens
ctaatatctgtatcatatgggtattaaacagttcttttagatttttgtttgtttgtttttttaacctggtcatcaattctctctccaaccaatacctgtatctcacacctctgctgtgaaaatagaataatgcaagtggaaatcctggagaatcaatgcctctggtctctatttcaattgacacaccattagaccatgagcaagagaacaaacctgctaacaatggtcaggaagggaaaccaagtagccgattaaaattaataggtctaaggaaataatggcattcatagcaacctggttggaattgcagaccattattcttagtgaagtaactcaggaatggaaaatcaaacattttatattctcactcataaatgggagctaagctatgaggatgcaaaggcataagaatgatacagtgaactttggggactgagggaaagagtgggaggcaggtgaggtataaagactacaggttgggtacaatgtacactgctcggtgatggatgcaccaaaatctcagaaatcgccactaaagaaagaattcatgtaatgagaaaccacctgttctcccaaaatccattgaaataaaaattttttaaaaaattataaatgattaataggtctagcaagctagtatcaaacagcaagaggggagccaacagaaaacaccatattgaagtttagtattaagtgttaatgtaaagtcaggagacaaaatggtagaatttagggcactactgattgttcacttcatctgcacattgggtttgaatcgagagctgtgtcagtaaaaattagaaaaatacttagtctgctgtcctccacagttatttattcaaaattgtctgtcttaacaactttcctaaaatcttgccttttttaggtattttgtgtatttaaaaaagttaggaaaggaatcctactatttgatatgtatatagtgtggggaatttaaaacttattctatggctttgttggtgatgattaactgcttttatttgctgttgaatcg

SEQ ID NO: 24862 - DNA, 1059 bp, Homo sapiens
gcaacaaataggaaaccagtatattcaccaaggtttcaagggtctcagttctgtgagacagtcttcattataaaaaaatttcgcaataatttttgtattagataccatggtcccacaggctcccaggcttcacaggttcacgaccattctagaactttctaaatgtgtatatactgactgtatgtacagctcagactgtgtgatatctccattataaagtctacctaatactgattaaggtatgagtaagaacatgcccagtaaaatgtttccacacaggtgccaggttttacaactggccatgttatgtagtaccagagcgaaaatttcagccaaaaggcatgttgatgtcaaacaaacaaacaaacaaacaaaacaactatgtagagttacggagaagggtgaggctaaatcaccactggaagggtttaattcttagtgaaaccagtaaataataatttatatgctacgttttaaacttttttaaaaaaattatggtaaaatagacttaggaattattccatcttttacaggtaagaaatctgagaactgaaaactgagaactgaagaattattcttaaaagtggttcctgtctttctgtttgtttttccatttgtgcttattccatttcagaaccttaatcacagatggagggaggtacatgaaatgaaacagaaaatgaaaaatggctctaaactcagaggttaaacctgatgggagtcaaggcaaactctggggcaaggtttttgacaccagagcttcttatactgttgaagtgaaacgaagaaaagcttttttatcttggagaaattatcccttccctagacatcttgaaaccataaatgctaggtcttaaaaattctggctacactttaaaaattctcttcaataatggattgagtgcaatgagcagtaaactgaagactagagacttgcatttcaatcatggctctgtccttaacttcagcaggagctatcaattagttatttactccacttgcatcacaaatttctctctaggggtgggttagtcttctgaaaaggacacaagtaacctg

SEQ ID NO: 24863 - DNA, 1089 bp, Homo sapiens
ctggccatgaagggccatgcctgtagtcccagctatgcaggaagctgaggtggaaggatcgcttgagcctgggagatcgaggcagcagtgagccatgatcgcaccactgcattccagcctgggtgacagagcaagaacctgtaaacaaacaaacaaacaaacacaaagtgttgtgtgaaagttttgtaagtttaactgcatgtaatatgatatttattactaggaatttgtaataacataaaaaggcaagccagaaattgggaaaatataactgcaacttacaaaaccaagaagaatttagtattatgattttattgtagaaatatgaacacatatgaaaaatagaaatggcccagtagaaaactgaacaaaaatatttgaggacattttacaaaaaaggaaacactaaaggcttatatgtgtattagaaattgttcaaaaataagcgacagttttacaacatagatttaaaaaatgttgataatatcaagtgataatgtggatgaatagaaaatattacacatcatttttgaaagtatgattgatttagcaactcaggaaaataatcttgtaaatttatatattaacatattaaaagaaaacaaatccctaatgttaattctaataggtatgaacaacaatatttgtaaattaattaggatataatcacaaaatgcaaaattattctgcagtgcaaattaactgtaggtaggtgtttcatgaaagaatcttagaaataaaaatagtgaacaaaagattgcaaagactacaccttttttatattcttcaaattaaagcaaaatgtaatgttttcattttcaaggatacagacatgattaatctctctttagaaaatggaaaatgatgaatacaaaactcaggatagtggttacttcaagaggtgatgtaggatgatgggataccataggagacgtaaccatgtgaaatatattctaattattaaactggatagtggtatcagagttattcaacttagtatataatgctttatgtgattgcatacatctcacatcacatactacataataaatcattaagccaggaaatatcataataaagcaaatatta

SEQ ID NO: 24864 - DNA, 1024 bp, Homo sapiens
tacagacaactattcactatgtattgtaacattcttgtggttctgaggtgaaggtaaatcaacaggagagattactgcttgtaactggctttggtttaagcgatttttcacatttttttctaagcataccttcttatcaaaaatgtagcaattacatgttactgagggaaaatagtactaggttttaatatttgcaaccaactacttcagctgacacaggatgccatcaactgttaaaatttattgatcatagttagattttctaagagtgatcgacagatagcaaagatggagcccttttgggaaaaaataaaatcccttctaccccagatttgtcactgttaagaggttataaaggaatgttaaattatttaagatatttcaaaaaaaattaagaatggaagagtaagttatgctggaaaagatatgacagctttaccctaagcaaagtaaatcatctacagagatgcagcttagctttttttattacaataaacatacttccataaggtgctgtaactgtgcagctagttcttttctttgtacaaaattatttttactgaatgtttcactcatctatgctttttcaagcttctattgttaagacacattttttaaaaaaaaattagacttgggagaagttataatataggcaaacacaagttattgtgtaacctagtatcatcaattcttcatttattgaaattcttttgtgtcttagtaatcaattattctgtggacagacaacttttttttgagatctcatgtttcttagtctgttgtgtgctgctgtaacagattacattgagactgagtatttgtttggatagaaatttattggctgacatgtctggaagcagggaagttcaagattaaggagacaacatctcctgaagtccttcttgctgtgtcatcccatggtggaaggcagaagggcaagacagagcaagagggtgcccaattcactcttttataacaacaccaataccacctatgaaggcagaagccctcatggccttatcat

SEQ ID NO: 24865 - DNA, 1060 bp, Homo sapiens
cccctcccccactcacgccgcgagccctccggaaagccacttccccgctccgggcttccctgggagccggctcgcttcctcgggccacgtgttcctcccttaggcctgtgtggcccactgccccttctccagcccctgatgacgctagctctctcattactatagtgacgctgctggcgcccccgcacctgggctttgcctctccgcccacacgcccgtgttcacccacccatgcacccgggtgcgaaatgacccctcgggactggcacagggttttatccttcgctagtcctctcagaattgaggagattttccaaggttatgtgtgaagaaatacgctgaacggtctcgggccagcgtctttctggaagaccgactcatgacgagtctttgtgttcgttatttctttacccgtcacccagggatggtactgttagttcttttgaaccaacaaattacgacttggtggctttttcgatccacctctgaaatgtttaaagtcccataaagaatggaaggactttccgtcacaacccagggtcttgaacgcagagcttggtacttacattctgaagtggattaaataggataacgccttaaaagagattaggtttcagtgtcactaattgtgtgaagtcccgtaacccagtttgagatatatgtgtgtgtgtgcgcgtgtatatatgtatacatctatgtgtgtgtatatgtgtatatatgtgtgtgtatatatattcgtttaacacattgagcctgtagccctttaatggccaaggaacgctattgacgttcttacatgttgtgcacttgttttccaacaactgaattgagtttccttaaaagatgaaccatatttgacattacgtaaacataccatacagaccccaacgaggtatttcttccctcgatttctgctattaatcctcctcataattaaataggacctcttgtactttggatataattagaaaaagccatgaccattttaccgcataaggtgtaaagtctgctcattggatttaagaaaatgcttaagaattttgctatacttggccaggtt

SEQ ID NO: 24866 - DNA, 1030 bp, Homo sapiens
cagtaggtagcctttgtgtccttcttcttgctttcacaccatgcagtgtttttgagatccatgcatgttgtgtatatttctagtatgttccttattgctgaaaagtattctcttgtatgggaaccattacaatatgtcaccttttgtgtttagtgtctctctctacttggaggaaccaaaagacgttataattgacgcttgaaaaacaaacttaggattccaaaatgggttagaggcggtgtttgttaaaatctcggcagccagaatggattattttgtggctaatggagtcatctgtagggaccttaaccttggggcatacgctgagttggcatgagagtgtccaatcatctgtatacattagagctacaggataggcatcattaggggatctgggtggtgtgtctatttctctgggaaggactggtcttgactacaccctcagttaattgcagttgttgagcttcttgcttttgctgaatatgcttgcattttgctttcttgtgttttgtgctatcattctttaacctaacctgcagtaccgttggatgtatgtctttgaggccatttctttctgaagactgaggtttgggtatgggttcttagtgaacaagatgttcaaatattccatttgtttctcagtgatcatagtttgtttcctttgaaatgtgtccacttgcctttaagaaggtcctcctagcctgacatcttgtaatctagatgttcttttatgttctggtccagggacctgatgagctttttcaaaaaatactgcaacaaagtttgtcagactcatgtgcaacattgatatttgctactactggagaggtacaacaatattttgaattgtagtgttaagttacagcatttgtgaaattagatttatagagactattctgttattcagcctggttaggaaatgatatagtctgcttcattatataggcaactttttttttaaacttccctaaaagcctagcacgtctcagtgactattccaagaagataattgatctctgtgactgttata

SEQ ID NO: 24867 - DNA, 1050 bp, Homo sapiens
ctactttttctcctgacaaatctgtcctttttaaaaacagttttattgagatataatttaccataacattgacctgttttaagtgtacaattcaatgaatttttactatatttatagagttttgtaactattactacagtctaattccagagcatctccatttaccctaaaaagaaatgtgtccaacatcagtctctccccatttgtacctccagccctaagcagctattaatttactttctgtgtctacatatttttggttttggatattttatataaacagaattatatgatacatagtcattcctattgtagcatgtatcagtgctacattccatttttattgcctaacagtattcaacggaatgaataaacattttgtttataccagtagatgcacatttgagtgttttctgcttcttggctattatgaataatgctactatgaacattcatgtgcaaatctttgtggggacatatgttttcctttctcttgtatagatgtctaggagtggaattgctgcgtcatatggtaatctatatttaccttttttaaaaactgtcaaactattttcaaaagtggctgtaccattttacatttctattagtaatgtatgagggtttcagtgtctccgtatccttgtggacactcatattctgtcttttttatattataataaccatcctaatgagtgtgaagccatattttattgtggttttgatttgcatttacccgatgatgaataatgttgaacatcttttcttgtgcttactggctgttatttcttctttggagaaacatctattcaaattctttgctcatttttcatttggttgtttgtcttactgagttgtaggagtttttcgttttttttttcatattatttaggatacaagtttttaatccagtatttgataagcaagtaatttccccagttttgagggttgtctttccactttttaaatggtgtttttgtagcacaaaagtttttaattttaattggctaatatatctactcttttatcattatgcttttggttttctaaatc

SEQ ID NO: 24868 - DNA, 1031 bp, Homo sapiens
cagtagtagtagttacacataggggagccaattattatctgttattaataattattatctattatcctcatgacataggcatccatataaaacttgttgggttcaatcacaacatttgtctgtgactatatatctttgttagtgtgcttgtgtctggtatgttttgggaagtggagagaaagggagatagtagggtaggcctgagaaggagaattgatagtccttagacttaaatgtcatatatcaacaacactggaaggatatacatgtaatatattgtgtatatacatgtaatatattgtgtccatgatctaggaaaacaacaagcctcattacctgattgtcattgtgttggtagaataaacaaaagacaagacatttagattgaagcactatatgcagagaaaaaaaataaccctatttggtacatatattacaaatgttaattgtctaaactaattggatgaaatataaacatttcattttcatctttttatccagatggctgcatatttcggattttctgtagctgccactgacattaatggagatgagtaagtttaaaaaaaaatgtttccagaaagttatcttctcatgtttacgaatactttactcaaactaaacatttttttcttctgtttttgtattccttttctgctaatctttctgtttaaggaaacaatttgaagcaaccttaatcatgaattctagaaaacctcatatgtttgttctgttttttttcagtagcttttataacatgaacaaataaagtaattttatgaattattcatagtttcttaaaagaattaaaggaagtttcaaatttgaaatgagtgctctggtaatcattttgtgtttcactgtgggtgtgagagatgcagaaagaggaaaagtgagttgtagtaagaaagaaaatgcctactaagacatgaaatttgttcttgctttggtgagaagtttctgttcttctagttatgcagatgtgtttattggagcacctctcttcatggatcgtggctctgatggcaaac

SEQ ID NO: 24869 - DNA, 1027 bp, Homo sapiens
tctttattttctgtccttactgctcactatatactgagtggtaaatattctgtcatactaaattttcattcactattttttaatcatatctaagagtttatatcaaaatgctgatgtaaaatgtttttcattatcatttaccaccattttattaatgtgattgcattagatctcatctttgcaaacaactgaaaagaatgacacggttgccgggcaaggtgagcgggaccatctcatcactaagcgggatcttgccctcagtgaaggagatattcacactttggtaagtgccatttcaaatatgtgcaccatagacatttaaaaatatgtgactatagaactgacgccaaagaacatttcaaaaataacaacagctgtgcttgaacaactacatttatttttataccatgcattcctctcactttcctttttcctagtcagattaatgccatattttcttcaaatgagctatttttgtagatggctaataaaactagtttatgtcccaactttgattctcctactctagttctttaactgtcctctttctgggcctcctcctaatctctgaggctttagtacgatactaaaaaatccagaaggtcccaacaaaaatacattggaataataattagcacttgattaacctttgttgagttagcctatataatggctataatgtttttaaaggcaattgtttttcttttttcttttaattaacaaatctccagatctctagtagagaacctggtatagtgttttttgtttgtttgtttgtttgttttttgacacagagcctcactttgtcacccaggctggagtgcaatgacacaaacacagctcactgaggccttgacctcccaggctcaagcaatcctcccctatcagtcccccaagtagctaggactataggcgctctcccccatgcccagctaagttttgtattttttgttgagatgaggtttcaccatgttgcccaggctggtctcaaattcctgagctcaagcgatctgcccacctcagcctc

SEQ ID NO: 24870 - DNA, 1035 bp, Homo sapiens
gcttggaataaaaactcttaaggcaactcactgatttacttctagcaatagcatgatgttacaggaatattacctctgtttaagcaaggtaatgtgtaaaatcagtctcggctgtcagaataacttctaaaaggtatttttataagcagttcaagttactgaaaaccttttaaacctttctgaagttcgttagtataaattacttttctaggattattaataaaagccacataggtggcaagttgtagttttatatggctctgtagagtggtgaaccttctagaggaatatatgatttattcacagttcctcaaggcctggggatgatgatcagttatacctatttttgtgcaattacatcatgttgtacattagaaatggagagtttaatagctctttaactgctgtcctcattaggtaatgataaatatttcccttaaataattgactattttgctgtgttttaaaaatgattgaaatttatcttgccatatctcataatttcatgcacaagttgactgagctaatcttgagaatatattcgtaaaataggagcacatttagttgaggtatacaaggtaggactctagacaaaaccttctattttagctttagtgaatttcaaaagtaatgggtcttggagtatagatttttattagtagcttgaaagagcttaatcatatgcagtaagtatttttattaccaataaatttaaaattttttaagaaaaatatttttatcctagggccaagtgttgcctgccaccaatcagtaagttagtctataacaaattttaccctaacagttttaccacctagtaacagtcatttctgaaaatatgttggatagaaagtcactctttggcaaaagtgttagaatttgcttttgtgccatctattccttttatggcatctatcttgaaagtaatcttgtattggagattgaaagatgctgtaatttagaaattaacatgatatcttaaattacctttatgaaatatagttttgtataatagcatagattttccttcaaaaa

SEQ ID NO: 24871 - DNA, 1074 bp, Homo sapiens
ctttgcatgattcattactgcagtctcaactccagcttctttcctacttcatcattgcttcagttctctgtacctcgggagtgacaggttttgtgcctcagtgccttaacacaggttgcttctctgtttttaacactacccacatccaacacaggcagtgcccatcctccaccccaatcacctggataattacattcaaacttcagatattagcttaaataccactttttttttttaaaaaaaaaaaaaggtttttcattgactttcctgtctgagctaggttcctctgttatgcactctcagaggcatctcctacttgtgaaaggtctgtaattaattggtggctaggcatctgttccatatttccatatttatcttttcctttagtttggaagccagatcaggccaggtacaataattgctttgcttggggctatatccctgtataaatatttattgaatgaataaatgaaggtctcggtatagataattatttgggtaattgaatatgttctttcattcacatgcttgagctggcttctccagagtatataacaaaaggatcttatgtagggaaaaggctgtaggaccttgggactgaagtggtcaaagtatacaggttttggatgaagagcaatacctgcttcgaaaagcaaaatttggcatttatgcaaatttaacacatcatatgccagtttatccatagggttggtgagaatatacaagattcctacaagactgatttcactatttttttttctttttaaacaaaactcattgaatgtctatgtgccagataccatgcatggtgccaaatatatagaaataaaatacatcatcattgcttgcagagaacactcagttgagacatagataaaaagaccacacataataatagtgtgataagtatatttgaggtgtgtatagctactgtggaaacaggtatgggggaaagtaatttggcctgagtttcccagaagaaagcacacttaaagtgagtctagaaattatgtagaaaggaagaaaaaggaaattattttaatttttgactgagatctattttatctttctgtg

SEQ ID NO: 24872 - DNA, 1047 bp, Homo sapiens
agactgtgtctcattcatgctctgctattcatgctgtgctattcgtgctgtgctattctttaaggcactcaatgttctcatagcacctgaatttgtatttaccggtcagtattcctttcagatgttaaattacagggaaaaccgtacaatttactaaggtgtcagagaaacattggagaaaatgctccatctaattctgtttaaatctaaccactttccccactctcccagcatggtgtgtctcatctacttaaatgaaatgctgacagaaggtttcaaaccctttctaaaagacatgccgaagcttgtatcttgcagtttctgagttccatttttttcttcattgatctaaacatactttgcgcattgatagaacaaggagagaaaggcttctgtaaaagggaaaaatggatatttcattaagttttccccactttatttcactgtaaataaattatgtgagtttaccaatggaatcccaaaacaacaaaatagtatatggactgttgttgctctctatcaggctattgtttgtgtgtttagttttctttataagaagctctcttaatctatcaagagactgttgtgagaaaaaaacaaataaaacaacaatcttgggaatgaaagctaagttaacggaaaatataattatttcaaagcatactgagcattaatttccctgttaactccctgcggagacaggagcagtcacattgatatattgactacagtaaaataacataggaatactctcctgtttacattataaattggcatcacattctggaaagcattttagcaatgcacatcaagaagctatgaacagttcacagctttgacctattatttctcctccccaggaaacaattgtaaatttagacaaaggtatatgaaaatatattttgattaaagcattgtttccaaatgtgaaaaattaggtctaaacatacagtaataagaaaatagttaataataacccatagaattttcttaaataagaaacaagataattttagaaatatttagtaccatggttgtgtgtttgca

SEQ ID NO: 24873 - DNA, 1025 bp, Homo sapiens
ttccagcttgtcaagacttcttaggatcatttagcaggatcatgatatacacacgatttatgctgggggtcctgtgtttttgctgccctggctagttatgttacaggaatgtgtccacatgaccaatgccttgacagctttggaccctaagactcaattggccttccctatgtagagacactttgcctgtgtccctgcagctcacagctagaagaaatatgtttttcgtgttgttttactcttcatcctttactataataaagcataattgtgagtataacctatcaaaggacatttgattccttttggtgaatcaccaggcttaaggtggtcttgggacccctgaaacacgggaaagtcagattgggaggacaggagtcatgagaagtgtcattttgacaaagacttttagaaagtgagggagtatgccatttggatttcagagagaagacaattctaggaggaaggaattacctatgcaaagacctggaggtgagagcgtgcctggagtgttcaaggaagtgtaagaaggccattgtggatcagaatggatgaagatgaaggaggggaaatgagctcagagatgcagtgggctcagaaaaggacattgagtgcagaggatgatgtcagttagcacatgcttgctgaatgaattgctaaattctcgtctttcctctaaggaggaatatcttcttatgtttcatcagcttatgtatttctatttttggcagagcctttacatattcttcttaacctctttgttctttcctcagtttttaagaatttttgctgagtaggccaggcgcgatggctcacgcctgtaatcccatcactttgggaggccgaggcaggcagatcacgaggtcaggagattgagaccatcttggctaacacggtgaaaccctgtctctactaaaaatacaaaaaattagccgggcgtggtggcaggcacctgtagtcccagctacttgggaggctgaagcaggagaatggtgttaacccgggaggcggagcttgcagtgagc

SEQ ID NO: 24874 - DNA, 1074 bp, Homo sapiens
caatttatataacatttgatttgtgcttgcagtggatggcttacaagcatgccagcctataaaatatgtatggcactgctttgctcatttaatatttgtctttcaggtaatttagtacagttaattcttatatttaattgaaaattttcagtaagccactacttggcctgtttgacggctgaagccattccagatgataagcagtcatgataatgaggactctttctgtggctgccaagaccctccactcttgcctgtctcccctgctgccctctagccctgtggccacctttctttcctgcacctgccaagatcacttctaatttggaggctttggacttgtttattctgcctggaaagttcttgaaggttcttcccatttggctgcagctcagatgtgccctcctcagagaggaggcctttcttgaccgcctaattatgtgccttttctagattatcatgcacttacatttgggtgggggaaaaaactgatgaggagtaaatacatgggggcaaaaaaggatatttgataggaattattatgaaaaaatattgcagacaatatcagaaatatatttactgtgtctttggggcccatatgagtacatggtgctggtagggactttgtaaatatttgttaaatgaatgaacaaatttctagttttgaagccaaagattcaaaagtgtagaccaaaagcaaatagataaaaagtatactttctcccatctatttgtagaaatactgtaattttaacatctgtaatagttttattcttcataaatattctggtatatattataactttgtttggcattgctaatatttcaaaagcaaaagaaaggcactttctgctccctctctccgcccagagtaacagacatctatagatagttcctgatatttaagaaagcgtactgtaaattgtattagtaaatctttaaaaccttaggcaaaacaatataaccaattctgttatctccctttctcctgcttttcaagctttgaagtctagtattatatttaaaatctaagtttatattctttcagttgtatgaataatcaagtatattaac

SEQ ID NO: 24875 - DNA, 1010 bp, Homo sapiens
ttagtaggtgacagagacctcctcttattaacttaaatagaagttggtatttctatataattctgaggtacagtgcagaggatgttgaggaaggaggagtggggaaagcgggtattcaccagtgtgaagggaagcagtgtatggaaagaatgtgtgcaggtgattcttagaccaagtcacagaggatgaggatgagttgggcaggcattgaaaagggacagtgtcagtcagagcaggtgggataggcaagaaggcatgaagccatgaatgtggtttaggagaacaacttgtggattttacagttatagagatgttcctcctttatgtttccatgttcatgaactaaccattagtaattacataaaggagttttagctggattaatagttttagctgaataattttagctggattatcttgcaaaacaaccatcttgtttttctttctttttttccatttctccagacctgatcagcatgtaattggaatcacaaggagtaggttgtgctctcgatttcatatttatatttaatttcagaacatgcaaattaaaaaaatttttaatcacagcattaactatattgggaggagttatgatttggctctgcatcttgtcttatatttgtttatttttcatatataaagaacagatgtgttaaatagttatctacttggtagtaagtaactgtgccagtattaacaatttttatgaataatattgaaaaaataatttttttctgaacatatggaaacttgataatttttctatgcatcattgacttatttaagattatatatttggttatatggtgtggattacttactgatcattgttgataaaaaatttaaatgtgtgctaagaagtttggaaaacgaatttagaatatgtacaagtacaacaaattactatcttatgaaggggacctataattaaaacatatataacataatttagttcgctatattcccttctttttgcttggcttgaccattctgtgagatacatctat

SEQ ID NO: 24876 - DNA, 1030 bp, Homo sapiens
tggatgagaaagcacatgttggcttttgatatttgtcctatctggaatacatgcttcttcaaattgctacagggatcatcttttgtcacgaggagattcagcttgagggcaaaacaaatgccttaaaatggcagaaaaaatataaaaccttgggtacttgatggaatcattgggttcttgactccctactatatttctggatttactgctgtgtgagataatgaatttctttctttttcaaaccaacttgaataaaatatttggctacttaaaatagtatcctaattatagccattattaaatgatatcttaattttgtaaataaaagttttagaagtagtaatttagattattgaagaaactttacagactacttgggttttgtaaattttagatatggttagtgctattagtctataaaaacttattattcaaatcaccatgcattaagtttttaatacagtagataagtcaatcatcttattaactagatttattttaaaatgaataaattatgcaggaggtagaggctagcaaaactaggaataatctaacaagctcagacaatagagaactaaatttaaaattttttgaaatataaattcataatctaatcagttcacaaaattataccactatttattggctgtgtggtatctttagtgtattgaaaacattaaatatacataaagaaatattgaagcaatttcagtgcctggtctgagtaatttaaaacttacagtgtgatgttaagactaattagtaactatttaaatatagaagataaagctgataaaagtaaaattttaaaaaatggtaaactatagttccactcacagaggtataaaaaaatacagacatacagtaaacttttaagtaagagctagtgacaaagattttctccttgaccaaatcctggtcaggctcttgtgcgtcctcttctcaaccaggccttgacttttgggcttctgtgttctgatctgcattgccaaatttagcaagaatcctgctaagtgtctttggccatcct

SEQ ID NO: 24877 - DNA, 1032 bp, Homo sapiens
atttaaaataattcttaagattaggtaagtattttataaaaataaacttatctattttataattagcaagtatactacctaagtacctataaataggtatatccataaaatactgacatgtctatgtaaactcaggtagacatataaagtatgtataacacaagaactatgtttgaaaatattatttgtctttttggtgggcacttttaaatgtcagaaagtgagagtaatcactgattttcctgccaaacagaattaaattacaactctgagaggagaacataaggagtgttattgcagctatccttgaaatgtcagactgcttttaaaatgtgattattttaagccctttgtttacactgtggcatctttatatgtaaaaaaatttaaacacttgggcattctgtgatttatgtctaacttttagtattttgaataaaaggcaatttgcaatagtaaagaaatctttattaccaaaaacagtagactaggagtcagaagtgtggatttctagaatattttgtcaccaacaagccatgtaaatttataatactgaacttctctgggcttcgtattctttgtttgaaaatgaaaaggttcatctggattactggtgtttccacagttccatagatgtctctctctcagctcccccgacaatgggtcaggtatgccaaagatgcctgggtccttcactctgtttcaaccagagccttgagcttttacttgttctttgttagtgctactaagaagatgttttgaaccacaagatcaccagttaaatggtcttaatcttgtgtaggaaaaaaaagtttcaattagttatgtaccaagtttttgttagatttgagagctgccttatgactaaagcactccctacaaaacatatcccgctaatttcacaaccatcttcccaggtaactattctttttgttttctttttctttttgtctctgaagtataattgagccttagcattctttaattatagagtcttaggatcttacagttgagacaggccttagaaataat

SEQ ID NO: 24878 - DNA, 1036 bp, Homo sapiens
atgccaaaattctagattcattatacattgaacttccaagaaaatgatgcaaagtagaggtaaagaagtttgctaattcataaaacaagatgacattgatgaagcacttaaacatatttatatatttataatatatttctactttaaaccattaaataaagtcattttccctattgaagttgatcggtaaggttttggcagaaacatgagctaagtttgtatgcaaaaacttatgataaactataaacctggaaaattcatgggataataaataagtaggtatacaatggcaaagtaacacattctttgagtatttaccatctggcaaatgctttatgaggttctttatatgaattattttaggaaaagacttggtagggataaggaaaacaaatctgtagtagaaaatactaaataaaaaatgaaagctgacatttaccaagtgctcactacatgccaggcactgttctaaattctttatgtgtactaactcgtttatcctcacaacaggttatgatgatcttattttaaccttacgactgaacaaaatgagacacagagttgttagttaacttgcaaggccgctctctgaaaagaatgtcttggtggagccactctactccattttccctgagaaatcattgctgtgtgctgcccataggggcctgagctgaagctacacattgcctctgaggaaacagtgctttggcagagctactccatctacccattgtagtcactgtgccagagctcaggtagcaccgtacatcccagaaaaatgatgccttggctgcctagagcagtcaccgctgcctgtgcatgagctgaagcagtatcctggcccctgggaaaacagtatcttgaatgcccagagtaggtatgcttccctcctccccatgacaggaaatggtgtcttggcctcctagagtggtaatgtaccctagtacccaagctgaagaggtgccctgtatcccagagaaacagtgctttggtcacccagagcagataccaaacccctcctacccctacagagggc

SEQ ID NO: 24879 - DNA, 1042 bp, Homo sapiens
tgcctgtaatcctgcactttgggaggccaagtcggtggattaactgaggtcaggaggtcaagaccagcctggccaacatgatgaaaccccgtctctactaaaaatacaaaaattatctgggtgtggtggcaagtgcctgtaatcccagttacttgagaggctgaggcaggagatccccttgaacccaggaagcagagtttgcagtgagccgaggttgcaccactgcactccagcctgggcaataagagtgagactccatctaaaaaaaaaaataaagaaaagtgtatattatatatgtataatcttccacattgtttaaaaatacaccatttagaaataatatcaagtatacatttatctaattaatatttattgaaaacttatacttatcaagcactgtgattagcaatggcagtgaggatggtaaacattagagaagggaaggcacataaatagttccttgtcacctctaactttcaataaaatatggcaagataagaaatacgttttggtttcttatgtttaagtaggctgtattaagtgacaagaaagaagtaaaataatagggcagtttgtaatggtaacactttcagcttgggaattgaggaacactttcacaaacaaaagaccacttgagttgtgctttttaaggtagagaggaacactgacaggcaaacatttaaatggagagtcaacttggagcaaaggtactgggctggcaaaccatagggatgggatgttcaggaaattggaaagagagattagatatagcagagtagttggaagtgtgttctgtgatttggattcttataactaggcatttgtgtctcattattatatggagaggaacaattgcaggggagccagatgaaccatgctatcctttaagaagttttttttttaaatttttttgttattattatactttaagttttagggtacatgtgcacaatgtgcaggttagttacatatgtatacatgtgccatgctggtgtgctgcacccgttaactcgtcatttagcattaggtatatctcctaatg

SEQ ID NO: 24880 - DNA, 1097 bp, Homo sapiens
cctaaatccagaataattttatcttaagattctgaactgattgcatctacaaagaccatatttccaaacaaggtcacactcagaggttctgggtgaacatgaacttttgtggggcactattgaactaccatagtggggtacattgttctgttggtgttcctagcagggtctgggtaagaggtggagaggagagatgatggtgacgaggctagtgtaacagatggtaaggaaacatgtaagggatttgacattatcctaaatgtagtggagtgccactggagggaattaagcaggtggatgacctaatcagatttgtgttttacaaagatcatattggatacaatgtggagacaaggagtaactaagcaatgctggaagaaaaaagctagctaggatattctatagtaatttaggtttgaaatgatgatgacttggagaaggacatgctgttgggaatgaagaacaataaattcaattctggtatgtttacaaaagtggaatgggctttgtgtgaattagagacaaaggatgctagaggaatcacatgtaatatggcccaggctgctgggttctgagactatgtggatgaaagttctaggctctgaaattggaagagagtggtgtgtttgtgtgtgtgtgtgtgtgtgtgtgtgtgtgtgtgtgtgtgtgtaagagagggagagagagggtaaataatgaatcagttttggatatttcttttagttttggttgctgtgagacttccaagtgagcatgttcaatagccagttgtctagtggcctgtatgagactagtgatgttgaataaacaaatcttagtatgttagtatataaatggtacctgaaattgttagagaattgaaaaaagtatatatgattactatagccaataaaggagtattatgcggaattaaataatgacatatagaaataatttttaatagcatatgaaataactattataaaaagctgagtgaaaagaagaaaactaggacacagctgtatctatagtaagatctcgatactatatatttggctacttttaataataaacactataagtgaatgcacttaaatgtagtggctatttctgggtgc

SEQ ID NO: 24881 - DNA, 1030 bp, Homo sapiens
cttaatgcggtaggcctcattttcaaattgtagcttatggaatagcgacataaaaattaactgaggcatttgcaaaagtaatttctaaggccccaaatttgcccccagaatcagaacctctaactgtggaaatctgtagtaaagatcaatggcataccttcaacttcccatattaaagagcaatggcattcctttaaacttttcaagacgtgaatttaagtcctctcaacaattatcctgtctaatcttctctattattcaccctcaatattcaattacaaacaaagatgtgaagatttactttagttacggcgattctaaaataactactgctaaggtggctgaaaacagaaaaatgaaatggtgaaaagatagtagagggttgattcaagcatataatgggatatatgtagtttgctgggaaacaaggcaattgaaagcaaggtatgaatgagataaattcattaggcaattagcagttacataaagaacaatagaccaaggaagcaataaattacagaaggacaatgcaatcaaaagtgtagcaacaaagtgtagtcttatgtgtcatgaaaataagaataatcctattcctacatcttcttttcaaaattaaaaggatatagagtggtaaatgtccagccggaatagggtatttgtaggccatgcttatgttgaaagtttttttctacaccatatgaattaggtagctgttttggagtgtgtgtacatgtttgtgtgtgtatgtgtaattaatattattttcaatttcttatctgaaggtttggggcttgtcccagcacacattaaaatatataaagctgataatatactttatgtatcattttcgtatgttcttgttattttttatttgaaacgacctatggtatattctaaactctaataatttcactacgttcatataccataatttaccaaattattcttctattattgaacatatggaatgtttcaaattttttgttagttgataatcacgtttaaatatttacaaaatacaaacacaatt

SEQ ID NO: 24882 - DNA, 1030 bp, Homo sapiens
aaaagaaatgatagaatctacaaataaatggagagatactattttcagttcttcatactgatgtatagatttaacacaattcctgtcaaaattatagcaaggttgtttgtagatatagacaagacaagattattctaaactttatatggaaaagcagaggaactggaatcactaaaacaatttcaaaaaaagagcagtgaagtgaaagtaattcatctaccctgtttcaagacttattagatacctttactaatgaagactttagttttggtggagggaaagacaataggtcaatggaagagtgaacatataaattaacacacagaaatatgcccagctaatgtttgtcaatgctgcaaaagcagtgcaataggggaaagaaggttttgttttgttttgttttgttttgttttgttttattttgttttcagacagtgctggtgcaattggactttcataggcaaataaaatgcaccttgacctaaacctcacactctatctaaaaattaactgaaaattcatcatggacttagatataaaaatacaactataaaacatttagaaaaaaaacacatgggaaatcttcaggatgtagggctaggaaaagagttcttagaattgacatccatagcaggatttaaaatgggggaaaatgatatactgaacttttgaaaacatttttctatgtataagtgctttgttccatgtcttaggaaagcattctttttttatcataaagtaaaatatctgtattttgtttagatgctccttatcaaattagggatgaaaagacggggagaaagtattagcaaaccacatatcagacaaataactagtaaaaaatcattcaacactcaacaatatgaaaacaatgaaattagaacatgaacaaaagacaacaagatgcatttcattgaagaggatatacagatggaaagtaagcacgtgaaaagatgtcaaacattggtgtccattagggaaatgcaaattaaaatcaaaataagatattactacagaattatcagacagg

SEQ ID NO: 24883 - DNA, 1414 bp, Homo sapiens
ccaaagtgcagcgattacagtgagcaactgtgcccggcccacccccacaatattctgcatatgagtgtacgacaggtagttgttgaaggtaatgcaagcatgactgaaagagcttttataaattgccttagaagccaaaaaaaaatgagtcctgtggctttgttgacattgatcttatgaatcaaaggaagaaacaggctttaagaggctgtcacactgtgacgcttcggactcatatccatgtaaccagtactgttcttataccttattcattataatgaggtccattgtgtgtttgatttgctaagcccaacaattcattttttaagtacttgtcaactatatattatgtataacatgctgcagtgacaaaaactaagataattttaatattgatcctgccttcgaggagcttacagtctagtgaggaaaaggaatactcagtaacagatttttcttactgtggtcctgtaggaaggagctcataagaagagattacttcccaaactaagaaggacggagaagattgctgagcaaatgacatttgtgctaggcctagatgatattttaagtggggaatatggacagaagacatttcaggtggggaggacagtgtaagcaagaaagacagaagtgatttctgttgaacaggctggtacagttagctagtaagaatggtatatattaagggaggtagtgggaaatgaggttggaaaggacacgtgcagccagttgttggttgttgtttggaccaaagagaatggttttttaattctttaaggggacggcggtaatcagttgtaatttgattgtgtttcttcaataatgttaacctgaaaactgtaaaactctatgatacatgttggtgagtggagaaatgagagctgggtaggctgatgtacataaagtacagtgatggcatagaagagggagttacatagtcagttttaccttcagtagtggttcttgcagcaatggcaagagtttgcctcaccagtaatactgggggatggaatgccaggcaaacaagcttgaaatctgggggccttgaaaactggggggattgagccttctatgtaaagtcagtgtaattgcagcatagggtataagagatggcaggaaaagactctggaagaatagagaccaggggttagaagaccagtgcaggcatccaagcaagaaatcacttttgcccaaactaaggtaatattgaacatggagaaaagagacagggttttagagtgatttcacagtcagtgtcaatggggagatagagttcagttcggggttattaactctaaggtacctgtaaaacaaccaggtggatatagctagtagtaggtagaaattcaggactgaagtttggagaacttggtcaagatttagagattttttttttgtcatctatatataa

SEQ ID NO: 24884 - DNA, 1028 bp, Homo sapiens
aaattctatgcgttcctgcctaaaggatttagacctacctgtcagtgttctgagaaccccctacatgaagtacaactgcctagatatgaagataccaccaccaccaccaccgctatccatacctagcctaaagatgtagagccctctgctggggctgaggaggagctgtggggtgctttctaagtagactttccaccagcccgtctggtttgtctagtcccattttcaccccacatccagagttactattattaccaactcctgagcatttgcaggattctgtagtatgaattgggatgcttcttggctttccctacagccagcttagaattgtgctttctcaggtctactaagttcaataccatccttcagcctgctctccagtttccaacatgttactgttaaggccttttccctcattttctatcattgtgagtatgtgccctttgaaaacccttttgctgtcatttttgtgggatttggtgaagaagcagtggtaaatgcatgtattattctgtcatctaagtgttcactgttagctcttctcataagtgggatgctaggcctcagttgctttctctgtgaaatgagaggatcatactaactggataatttgtaaaattcctttcatcccagactttttatgattctgtagtacttactgttaagtcaaacacagttcttccttttttctgaaataatttctctttgtcttaaatccttaaagctgctagcagaagaaagtcttcccacaaccccattttatttcatattgggaaaacacaggcaacagcaggatgaaaaactaaacgaaactttagagaatgagctggtacaactacccttaacagaaaacatacccgcaattagtgaggtaagtaattatgaaaaccatgtgaaacagattaaatgcacttaaagcacctgaagttggagttttgacacagtcaatctgtaatttgtatgctgtacaactttaatacccaaactaaataactaacaacaaaccgagtaacttaaccttgtga

SEQ ID NO: 24885 - DNA, 1369 bp, Homo sapiens
gtctgcatgttggtcaggctggtctcgaactcccgacttcaggtgatccgcccgccttggcctcccgaagtgctgggattacaggcatgagccaccgcacccggcctggtgtatatcatatatttttaacaaaaggtataaaccttgtttagtaactgtagtccttggcatgattgctggttatgaacacgaaaatccctgtctggtcttaatgggttacctaacattttgcaagtctaatcactgttttttctcctccagcttttcctgaactgtacccccacacagagactcctgttgaaaatgatctgtatattcacaaactgcccgtttggaaaaccagtacatcatagccccttatcccatctctaattttaaaacaaccccttaagggattttcattgagcatactttgaaaacatctgacttaaggagtttttctttatttcaatagattaaagaacaaaaaattgtggtggatgaactttctaaccttaagaagaatagggtgagttattataggaattctgaataatatgtgggaggtttatttatgttaactatatattaaagttataagaagtatatataagatttaatcatactttaataaaatgtatagtatttcagcatcttttaaaattgcaagtgtctagattctttttttaaatggatagatctcatagctgaagatgtcttttttctatcatatgccattcacattgcctttgcaacaaatgatactagttgtattttggtatcttggagctataatcactaatgatgttttatacctgaatttgatgttttcttttgatataaacgaactttatattgagatgagaagaaacttttcttttaaatgaatgtggataattattgaacaaaaaaggatacattgcttcccctccctccaaaaaatttttacatagattttcctaaatgtgtaacatggttatttaatgccatttccattaatatgttacaaacaagtaagctactgctttgtgtatggttatagtgtcaaattgcattttaacattcaggaagaaatgagtttgagctcttaaaagctttgtaaagattatgtaataactggctggttagatatttctgatattgtcacttatggaatattagaagttgaggcacatacaaaaattagccaggcgtgtgcctgtaatcccagctactcaggaggccgaggcacaagaatcgcttgaacctgggaggcagaggttgcagtgagctgagcacaccactgcactccagcctaggctacagagcaggactccttctcaaaaaaaaaaaaaagaagttgaggcagaattaatacagactttctctagagggcaaattggcaaaaagt

SEQ ID NO: 24886 - DNA, 1033 bp, Homo sapiens
cagcaccttatacagtgcatgacttatagtaaactttcaatacatatagaaattaaatgggtaataatagaatataagggaattggttgggcacagtggctcacacttgtaattctaacacttgaggaggccgaggtaggtggttcgctttagctcaggagttcgagaccaggctctacaaaatatacaaaaattagccaggcatggtggtgcacgcctgtagtcccagatgctcgggaggctgaggtgggaagatcacttgagcccaggaggttgaggctgctgccgtgagccaagatcataccactacactccagcctgggtgacagagaccctgtctcaaaaaaaaaaaaaaaaaaatagaggttaaagctgtggaaacttttgtttcccctcattcccctcatcctccaaatttcatttgatccaattttttattaaattcttttttattatttactttcctatgactgtacatattccttccagctaatttacataatgtgcactttgttttctgaattttttttttaaagggacaagctcttactctgtcacccaggcttgaatgcagtggcatgatctcagctcattgcagcctcagactcctgggctcaagtgatcttcctgcctcagcctcctgagtaactgggactacaggaacttgccaccatgcccagctaatttttttgttttttattttttgtagaatgttgtcccggctgggacatttcctttctttaataactttctttttcttttttttttgcttctggtccttgattcagggaacattatttttcatgatatgaacaatcgtggtttttttttccagtagctaacttctccatgtacttactactaattcagttccagtctttcaaagggaaatattgaattcttcttgataaaaaaatgggatatgaagttccattttttccttagagatgtctctcttgataacttcatcctcttccttttgtcagaactcattgctttaagcccacttcaccttcctttagcacccctccct

SEQ ID NO: 24887 - DNA, 1029 bp, Homo sapiens
ccttctgtatactatgtgtctttccttttgtattttttcctcattctcaaagtaaggattagatatattcagctgctatccgggtcttctggaatagtaaatttaaaatttgtcatttacatgtatactctttcatacaaagaattcttataattgtttagatgtgtctaaggatatgtctttagtaacataactcatattttagaaaaatttagaaaaaatacgagattgtgctgctaatacatttatagaagattcaggatataaagaatattactcaataccagtcatggaatttcatggaaaaaggtacggagctttcactaattactgacattaactacaattttttgcacgttagtagagaacaaagaaaatgacaaaatgcaaaggttaatgtaaacctttacaatggcgattccacaataataaccaccatgaatgacttatggactcaacaaaatattaaatgttatagttattacttcatgtatttgatatagtctgtgtaacaatccttagagcttgtaattagttcttataattaacagagtggttaaataggggtagagatggggatcaaatcccagcctatttgtcttttatgtgttgtggttcttggatttttaaatattggacactgaaatttggaaatatgggaagtagagctcagaggaaacattttaattagaggcaaagatttaaaaacaaataaggaagttttgcttgttggttcgtttgtttgcttttaaggcatgcaagcagttgggaggataggaccaagtctggaactttggagaatagtaactgaggtgggaggattgcttgagcctaggagttcgagaccagactgggcaccagagtaagaccctatctttgtttttgtttgtttgtttatgagacagagtcttgctctgtcacccaggctggagtgcagtggtgcaatcttggctcactgcaacctacacctcctaggttcaagtgattcccctgcctcagcctcctgagtagctaggattacaggcatgc

SEQ ID NO: 24888 - DNA, 1038 bp, Homo sapiens
tatagaaattcagagaacagcaatagatatgactgtcaggtcccagtagaacaatcattctttattccaggatcctcaaacagggaatagtttctttatattacatatatttaaattacatttaataacaaaaaatttctttatcataataatgtttagcattaatagcccctttaaggttaacctcatttaaactttaaaagctatttttgtgattattaaatatgcatggatattttataatcattgaaataaatttagctagaataaaaacagagttgaaaatgaaattggtggccctccataactggaaaggaaaatatagataaattgtcaggggcaggtgtagtggctcactactgtcttgccaacactttgggaggctgaggctggaggatcactttagactaggagttcaagatgagcccgggcagcataacgagaccccctgcccataaaattaaaaaaaaaaaaaacttagccaggcttggtggtacacgcctgtagtcctagctactctgagaggctgaagcaggaagattgcttgagcccaggagtttgaggttacacatatatatgtacatatatatgtaaattgtcaggaatggccaatgcaacaatattggcaataagaagtggtgattttatatttaatgaagtcagctatcttaataagctatgttaaatttttacagacgccaaaacaaaatgttttgctttaaccgtattgaatatccataaattctgtactctatcagtatgattaaaatgttttgatattcagattcttctgttactgaaaatattcaatacataatacataatgaacctaattaaaataagacacaattcaatcacatttaaatgcaataggtaacactatttaaagatgtattactttaagccttttttagtgtggaaaaagtctttgataaattaaaagtttctcatgcgccctctgactgcttgagtttccatttgctgagaattaggtagattttgaagtgtggaaaacatagtactctacttccaatatta

SEQ ID NO: 24889 - DNA, 1063 bp, Homo sapiens
tttagacttggtgatgggctggttatggagaaggaaataagagggaggtgccaaagagtcttccagatttgtggtctgtacaactggctggatcatcatatctctcactgatttaggaagcaataaaagagaaccaggtttggagggaaggatagtagttcaattttgaatacattaagtttgaggggatgtgtgaagatgctttacaagatgtcaaagatatagatctgcaaatcagaagaaatcagatctagagacataatccttggagtcatcaagttgtatatggtaagcaaagccactaagaagagaaaaaggcccaagattgagccttaaagttcatttggatattaggacaatgagaaggttccaaaggagactgccaaggtgtaaccagtagggttggacaaaaattgggagtgtgatatcacaaaagccaagggaagaaattattttaaataggaagaagtggtcaatggtgtaaaatactactgagaaataagtaagatgagaattgaaaaatgacagttggactttagtgagaattcactcactatcatgagaacagcataggggaactgccctcatgatccagttacctctctccctcaacacttggggattacaattcgagatgagatttgggtggggacacagagccaaaccatatcaggtagtaaaggtatgaattgctattatgctttgggagaataatttggcaatatatattaccagtaataatgatgctgttgataattatacagttttacccagtaactctcattattgggaattttttttttttgagatggagtctcgctctattgcccaggctggagtgcagtggcatgatctctgctcactacaacctccgcctcccaggctcaagcgattctcctgcctcagccttccaaatagttaggactacaggcacgcaccaccatgaccagttaaattttttttgtatttttagtagaccccagtttcaccatgttggccaggctggtctcaaactcgtgacctcaggtgatccacccacctcagcttcccaaagtgctgggat

SEQ ID NO: 24890 - DNA, 1058 bp, Homo sapiens
caccactgcactccagcctgggtgatagagccaaaccttgtctcaaaaaaaaaaaaaaaaaaaaaaagggtggtggggagggaatgttttaattgtaagtaaaaatgcaggctgttgttttaaaatacaactatatcaaatacatctataactatctaaatctatcttcataagaaatagtacatgagattatgccaaatgtttgattgtgtttaggtggtaaatctagccagttttgtttatttctatttttctttattttctctaagctttttataaatttgattttataatatgggaaactaatgatatgctgcactttgatattcttatttttcataaggtttatttaacttgttcttaaattcatttgaagatgtgttgaaggctgtatcttctgctgcaattgctgaggttgggcgtgacaataaggaaattcaggatgctatagctatggagggagcgattcctcctctggtggctctttttaaagggaaacaaattagtgtccaaatgaaaggtgcaatggctgtggaatcactggcaagtcacaacgctcttatacagaaagcatttctggaaaaatcgttaactaaatatcttttaaaactcctaaaggtaggaattttatgattactggtcatttttcttagatgatgttttctattttgaattgttaagtgaatagaaaaactaaaccaattctagaataaacattttataaaatatgcattcctaaaatgttcaataaatgttcactgaattaatgaaatatttttaaaaataggcatttcaaatagatgttaaggaacaaggagctgttgcactttgggccttggcaggacaaacactaaaacaacaaaaatatatggcagaacaaattggatacagctttataataaatatgcttttgtcaccatcagctaaaatgcagtatgttggtaagttattttccttattttatttttattttttagagacaggatcttgctctgttgcccagcctggtgtgcagtggcacaattatagctcactgcagcctcaaacccctgggctca

SEQ ID NO: 24891 - DNA, 1065 bp, Homo sapiens
tggagaaaaatatcagcattaaacaataataaactatcccattttgagatgggtaatgggcagatgacatatctatgtaataaaaatttggaaagaaaaaaattactaataattctaatagcatacaaacattactagcatttttgtatattttcttccaacctttcatctaaatatttatttaatataatttcaatcatagtacactattttagaccctgaaatttttattattttgtgcattttactacataactctgaaaaaattattctttgatatccatgtaaaattccatctatgaattactaccatttaaacattttcccactttagtttataatttttaaatgaataaagtttaagatacagttaaacaggatgtttgtcaaggcttttaagcacaattaaagggattttggctggtacaatatagtggattatcagaactttatcaacattagtgtcacgaaagttggtataccacctcccactgctaaatttgactggcttattaaaaaaacaaacaaacaaagggatttcatcaaaggatgaaggaaatccacctatttttctaaaaatagtgatagcagttactgcatttactttctttattgtaagccctcttttaaatccaacaagaagatgcaaaattagacttatgtgccatagaagctatacagctgtcccataaagctaccaaactagtacaagaaatggctgttagtctttcctatcctgcataatttcatactgtcagggctagcataaggcataaagatctgttcatcctaaacacaaggtcaaggtcttgggaaaaaagtaacatattgcaaagtgtaactattactataaaatgagataaaacttaccagtactgcattattttgaggtaacaagtctctctgcttacaaaacagaatagcccgatgtgttcttttcacaagatgacatgccattgtgtgctgtactgtggcagcaatgtctgctgctgaagacaggatttgccccttctcaatacctgcagaaatgagcagctatttttaggcacaatccaggaatattta

SEQ ID NO: 24892 - DNA, 1502 bp, Homo sapiens
tgagcggttgcggccgcgttgccgacctccagcagcagtcggcttctctacgcagaacccgggagtaggagactcagaatcgaatctcttctccctccccttcttgttttcggctttgtgagaaaccttaccatcaaacacaatggccagcaacgttaccaacaagacagatcctcgttccatgaactcccgtgtattcattgggaatctcaacactcttgtggtcaagaaatctgatgtggaggcaatcttttcgaagtatggcaaaattgtgggctgctctgttcataagggctttgccttctttcagtatgttaatgagagaaatgcccgggctgctgtagcaggagaggatggcagaatgattgctggccaggttttagatattaacctggctgcagagccaaaagtgaaccgaggaaaagcaggtgtgaaacgatctgcagcggagatgtacggctcctcttttgacttggattgtgactttcaacgggactattatgataggatgtacagttacccagcacgtgtacctcctcctcctcctattgctcgggctgtagtgccctcgaaacgtcagcgtgtatcaggaaacacttcacaaaggggcataagtggcttcaattctaagagtggacagcggggatcttccaagtctggaaagttgaaaggagatgaccttcaggccattaagagggagctgacccagataaaacaaaaagtggattctttcctggaaaacctggaaaaaattgaaaaggaacagagcaaacaagcagtagagatgaacaatgttaagtcagaagaggagcagagcagcagctccgtgaagaaagatgagactaatgtgaagatggagtctgaggggggtgcagatgactctgctgaggagggggacctactggatgatgatgataatgaagatggggggatgaccagctggagttgatcaaggatgatgaaaaagaggctgaggaaggagaggatgacagagacagcgccaatggcgaggatgactcttaagcacatagtggggtttagaaatcttatcccattatttctttacctaggcgcttgtctaagatcaaatttttcaccagatcctctcccctagtatcttcagcacatgctcactgttttccccatccttgtccttcccatgttcattaattaattcatattgccccgcgcctagtcccattttcacttcctttgacgctcctagtagttttgttaagtcttaccctgtaatttttgcttttaattttgatacctctttatgacttaacaataaaaatgatgtatggtttttatcaactgtctccaaaataatctcttgttatgcagggagtacagttcttttcattcatacataagttcagtagttgcttccctaactgcaaaggcaatctcatttagttgagtagctcttgaaagcagctttgagttagaagtatgtgtgttacacccccacattagtgtgctgtgtggggcagttcaac

SEQ ID NO: 24893 - DNA, 1024 bp, Homo sapiens
ttgttacctttcagttacatgcctttgatcctaaaattctctacttttgttgccttatcagttctttgcaatctgcctgtggttatcagcacttaaagcacaattttgaaggggaaaaaaatgataatcaccttagtcccaaagaaataatttgtcaaactgccttattagtattaaaaacagacacactgaatgaagtagcatgatacgcatatatcctactcagtatcattggccttttatcaaatggggaaactatacttttgtattacatagttttagaaatcgaaagttagagactctttataagtaatgtcaaggaacagtaatttaaaaacaaagttctaacaaatatattgtttgcttaatcacaatgccctcaacttgtatttgaataactaaataggacatgtcttccttggagctgtgggcattagttcagaagcactacctgcatcttaattttcaaaacttaagttttattagcaaatcctcttctctgtaagacttagctatgaagtggtatattttttccaaatatttttctgaaaacatttgttgttgtaactgcacaataaaagtccagttgcaattaactagtgtgagctcttatttaactgaagcaaatgctttctgacagtgtgtactttgaattttttaacaatataaaagacaacattttctgcattgttaacaaatatagagaacaaaaatccatttatacaaataatttcttggatcattcaggtccaatttaggacctttaagagtataaatgtaaatgtatccgatatcatggcatctttattccagatctgttactgaattatttgaaagaaaaatgcttcacataaaacagattaagaactgagaaaacataaagcaataccttctgggctgccatttcctcatctatgagaagggtgcaggacatgatctttaatgtctttttcagttccgttggctttttattcttacaaacctgaagttcacttagtttctaaagagtatgggatgaaggaga

SEQ ID NO: 24894 - DNA, 1028 bp, Homo sapiens
tccaggcttggaaaaaaatatttttggagaagaatccaatgagtttactaatgactggggtaagtataagaatcttaatgtgtctttgtaatttaattatcatatggtattctagtctctagtttataccatgaactaaatgtttggaagccacttactgtaaacaacataatatatttgaatgttaaggttcattcaatttctacctcagaatatcatgccatttaacttaagtagagagatgtggtatcttagaataatttagcaagtccatgtatcattttagatataaatctgtggcatttaagtaacttataactcaagctttgggaaaattgcatggccctttgggaatctaatgtaagttattaatgccccaaagatgcccatctacaaaattatgcagacaatttcagatcctaggtttaaacccatctgtgcgctcttgggggaagtccatggaccttggctaaaagtacagaggtggccatggttctgaaatactgtgtgatcttgagcaaattaactcatcatttctctaagtctcagaacctctgtgaagtacttggattaactaaaagattccttttagtactaagttttttggtttgtttgtttgtttttgagacagagttgctctgttgcccaggctggagtgcagtggcacaatctcggttcactgcaacctccacctcctggattcaagccattctcctgcctcatcctcctgagtggctgggattacaagcatgtgccaccacacctggctaatttttgtatttttagttagagatgggatttcaccatgttggccaggctggtctcaaactcctgacctcaggtaatctgatttctttcagagaaacaatttttttttttagtttgtttggatttaatagtagaagaataaaatagtgaacattaaatactgatcatgtgacaaatacttatatatctagaaacacaattacaaagaaaaaatgagtttctagattaactctgaaaattttttagtctccttcatgcac

SEQ ID NO: 24895 - DNA, 1045 bp, Homo sapiens
tgcatatgtcgaaccatccttgcattccttggatgaattccacttgatcatagtgaatgattttttttttttttgagacagcacctcactttatcacccatactggagtacagtggcacgatcatgggtcactgcagcctcaaccccccaggctcaaatgatcctcccgcctcagcctcctgagtagctgggactacagacgcatgccaccaagcccagataatatattttactttatgtttggtagagatagggtctcactatgttacacaggctccttgagttactcctgtgctcaagcaatcctcctgccttggcctcccaacttgctgggattacaggcatgagccagcatgcatacccagcatgcatgatctttaaatgttgttgaattcagtttgatagtattttgttgagcatttttgggtttgaggtttattagggatattggcctgtagttttcatttttgtgtgtgggtccttatctggttttggtgtcaaggtaatggtggcctcttagaatgagtttagatgtattccctcctcaatttttaaaaagagtttgagtagaattggtattagtttttctttcaatgtttggtagaattcagcagtgaatccattagatcctgggcctttctttgatgggagattttttattatggcttcactctcattattcatcattggtttggtgaggtttttaatttcttcaatcttggcatgttttatgtatccaggaatttttccatttcttctaggttttctgatttgttggtgaatactcattcacattagtctctaatgattccttgtatttctgtggtctcagttgttatgtctccttttcatttctgattttatttatttgggtcttctcttctgaattagtctggctaaaagtttgtcgattttatcttttcaaaaaaacaatttcattttatatatatgtgtatatatatatatatttggtctccattttatttagttctgctctgatatttactacttctgttcttctactaatttggggtttggtttgttc

SEQ ID NO: 24896 - DNA, 1050 bp, Homo sapiens
aaatcgtaagatctagattgcttaagcactctcagtctttgtagcagaccttttgcactcacaacttgtgggttgggcaagacctacccacgtgtttcccagtaaatagctgttgctgttttgggcttccctcattctcaagtctgtcaaagtctgtcaagtttcattgcttccccccttgcttcctcctgctcagatgctgatataattcaggtcttgtggctgtttggtggttcgtcttcattcatcagtgtggatgcctggtaactagtcattataaatattgtctctgagttttttattttgttaagtagttactctgtttttatgttgagatttggattttaaaatatactgctgccactgtcatcttcccagaacccactgaatagattaaaaatattctcttctttggctggtcaaggtggctcctgctgtaatcccagtgctttgggaggctaaggcaggaggccaggagttcaagacaagcctgggtaacataccaagaccccatctctaccagtgaaagaaaaatagccaggagtggtggcacacacctataatcccagctacttgggaggctgaggcagaaagattgcttgattccaggagttcgaggctacagtgagctatgatcccaccactgcactccagcttgggcaatagagtgagaacctatctcaaaaaaaaaaaaattctctttgctacgtagaatccccattttcacaagaatcagaaatggtaaattggtattaactttctaagctttgataatgtaattgtaacttcaacagtttagggaatgtgttctcaatgttataaaatcctctaagaattgtatagcagtgtatttttttcagtctactgctggtatggttaaagagagaaaatatctgtgtcctagaaccagttaaaaaaaattaagtgttccaagtattaatggaaaccaaatttacacaaaactttggtacaaagcagttcgtaagcagaatattataaaaataacaatttcttttttttttttgtgaggggttttcctggaaaagctgc

SEQ ID NO: 24897 - DNA, 1039 bp, Homo sapiens
tctgttgtttaagccgctcgctttgtggtgccttgttatggccaccctaggaaactaatgctgtgtaacaatgtggcaatggcaggcctacgttggtcttgactcaaagctcctggaagggtgctggtttgatggtgctaagaaatgtgtactgtccaaatccaaacatctggaatgaaacctatgtaagttgataatagacatatacatataaggaaataaaaatataatttccgagcaactccatgaaaataatgattgctgaaactacttgttatgatacttaacgcaaatgataaaaacctgtggtcactgttgggcttcttatatgccaaagaatctgtttctccaggtaccagggcaatcccaggagctaagcactccaggccatctccttctataactcagctcaaccaatgtttactaacctgaccaagtactaagaattctaagcaacggcagtagaaataaaaaaaatcagacacaatccctgccattaagtagcttgctgcatagtaaataataagaaaggtagaattttggaagaatctttcacttattagcctatagggaattccatccacttacaccgaggactgttgaagactcttagttacaggtgatggaaatacaactcaagctggctaaaatgaacacacagataaaaccctgactaatttgaggatgaaaatatgattttattaatgtattagtcagggttctctggagaaatagaaccagtaggagacagtgagggaaggagagactgagatagggagatgggagagaggcggagaaggaaggagaaatagacataaagaaagatatttattttaaggaatttgctcatatgatcgtgggggcaatttgtagggcaggctggcaggccggaaattcaggtaagagttaacgttacagtcatgactccaaattctgcagggcatcaggctggaaacgcaggcagcatttctgtattgcagactggaggagaattccttcttctttgggaaatatcagtctttgtacttaacgccttcaa

SEQ ID NO: 24898 - DNA, 1119 bp, Homo sapiens
gctgtcagtggccaaattaattgtctcagaacaaattaatataaattacagttataaatttggggaggaggatgttaaatatctatatcataccatgtaccataacacattctagatggtttaaatacttaggtgggaaaagtaaaacgattagactaaattatggaacatttatatattattagagtaggaagagattttctttgcctgtcacccaaggcatagaaactgtatggctaatgacaaacttaaaaaaaaatcccattacatatgatgaagagttaatgctgttaataaagaattcctgaagttctaagaacatgaaacattgtaatgagtcaaagatgtaagaaaaacctttagtttcatagtcaaagggatgcaaattacaaccaaatgctgttttagaaatataaaattggtaaagttttaaaaagataataactagtgttggtcaagattgtaggaaatggactcatcatgtaattattgacagcattatgatttagagaaacttttctgagggtagttaggtggaatgtataaatttcttaaaattttagtataccctgtgacctaactggtctatttgtaggaatttattgcaaagaaataattggatatgtgtgcaaaggtacacatttaagaatctcttatgcagcttttttttaaatagtctatggaaaactggaggtagtttgatgtccagagtgaaggtagtttaaataatatatggttgttttctacaatggaatattgtatgtgtgggtagtaaaagtgatattataaaggatttttcaattcattcgtcagtcaacagatatatattgaacttccagcccatgccagatgctaatgtaaacaagccacgtctctgccttaatacatcggtagaaatgaaaaatatagcatatgtaactgaaaaaagtagattacaaatttgtatgtacatatatacttaatgtttatatgtacactgaaatattggaataatgtatattagaatattgtcattctggatggaatgattgcatgctatttatttttgttttcaaaaattttaagtaagaaaaattattctaaataaagatgagatgcctgggtagggagaaagggtga

SEQ ID NO: 24899 - DNA, 1026 bp, Homo sapiens
aagaaataaccatgagaaaattaaattaacattttgtaaaaggcttagaacaatatttggcgtgtgttaaatgacacataactatttattaaataaatgagaaaacattgcttcttcattattgtaaagcctgttaaagagattggccttggaatttcaggcttgcacatgaaggtttttaatttttttagtttccacaaaaatgtttatcttgagaaattgctatacatctgtcttatatgaaactatgtgagttgcactgtttaccttttgctctgctgataaataagttcagagtaaatttaatgcttaaccacaccaatttcatcagttcacatggctgggatatctgcgtttcctcctttccttggtcctgagtttatattttatttactttatattctggaaggaggcgtgatataagcaagttactttacctttttttcacaaactctttgaactaatgtcactttagactatgctgtttccatcacgcaactttagtgtggtttaggatacgaacgtcttaatatcacatagaaaaatttaatgatctttgctcagttttgtctttagtgatcttatttaattttgttatggttcattctgttatcttgaaaaccaactttgcttgcctctcttcgttttcaaaattgttctctcttctttcctagttctttttgaatttcctcactgggtaaaaaccctgaggctgaggcctttgtccctttcccacttgtctgccttctcaacagcgtatcccttctttcagctttgactctcatctttgtgtaggtaatacttcacctcttaatccaaagctctgttcttaaatttgtcgccacatattcaatgacttcaaattttaagtctgtaccctgatattcattcttttctccaattcaacctattttgcgtactgttatgagagtaattttagagttttaatttgaaaatagcactctcttccagaaaaccagcaggatctggaatgagcattatattaaagtcacaaactatgttatg

SEQ ID NO: 24900 - DNA, 1187 bp, Homo sapiens
gggatttataaacatcatttgtttgaagaacttggtacatattaggttctataatacaccgggctaagagtattctttctttaaatctgttctaagcaaatttagccaccgatgtttccagtttacagtacttggagattgcattcagtttgagtagagcacatcctttgtcctgtcattgcttatattgatccccaattcatctgcatgacttgcacgctttctcagcatggtctctagttcttttccacaaggtgatttaggtgacatcataaaatgagagggcttcagacagacctgtgttcctcacatttacatacctgcattgtctgctcctctcctctcttcagacatattgatacataggcttttggctattttcattttcttcaaaacagtaaagaactaaaggcaactttggcgattaaagccttgatttggttgaatgagaatttttactttgatgttcctgtatttgcatatatttattatttatcttcattaatgtgtttctattagtttgattacttaaagatttaatggacatgtgtgtaatggatcccaaagaatcaaatagtattttaaactactactatttaagtagaaactagtataaaactgtaaatactactataagacattggctttttccagacatggatccaaaaaatttctgcatctactttgaaagtttgttatgtatggttgtatttacttttgttttatcttcttttgggggttgggtgatttgttctagatgtctcctggagtatgaagtcatctgaaggtataagtatttaactgtggttctctgaagtttcctggcatgctgtgaagcactgctgacagcttgggtttcttatcttttcacgaggaggttcttgtttctgttaacttagctgaccttaaagtgtagactttaggtccgtgttgcagttggtattaggaattttgacttccagaacctgctttttaagagacagaaaaacatcatttctaaatttatttgtgtctttgcggtaaggattatttttcgtgttcatgaactgtctgcacaatattctgattaaagtgctttctgtgggcattattttgttgtatctgtgaatgaagttgttagagtaatggttggtagatctgttgataatcagtaggggaactgctttggaattttaagtggaagcagt

SEQ ID NO: 24901 - DNA, 1854 bp, Homo sapiens
aattcttttaaaggtactgattaaaatagttaaatggtagtaggttaataatttaaatttgttcagcagctctcatttttgcatttataacttcttgaaaaatgaggaagtgcatttgatttgttgtagatataaatactggtttaagatcaggaattctatttttctttcctctgagaaaggtgttctttgatgtacatctcttgcaactctgatacttggaagttggattttagaagctatttgaaacattaaaaatattaaaataatggtaatacttttgagattaatattgaaactatctgaaaatgattgcttattgaagtaaatatttcttagctctggggtgtcaatactatataagttatggaaattaggactgtaatttttttaatgttgtaatagggggatccttatgactgaaacaatagtcatttctattaggattttatttttaaactgttaattttatattgaacaaatgagtatatattattctgaattcttattaatagttaaactgtgaaacctggcttttagctttaatttggtttcatctagaacaacttgaattaaaatattgacatttaaaaatttctcatttattacagactaaacaagaaatactgagagtatcttactcttaagatttattatcgttggtattatggcttaacaccgtgtttagcaagtcttcctttgttaattaaatattaattaaatattctattactgcattacagagacttaagaagctcagaatatacaattggctgtaatccatttgcaaaacgttttaaaggctacgttaatatactgattttctggcttaaattctttttagcaaaaagcagaatacagttcaaattattagatttcagaatatcatgctctcccatccacttggtttactatatttttaaaatacttttttaacagtgaaacatttttattctgcattatatttacatatcttacattaaatagcatattgtaatataacatttttggtgactcaaataatataaaattaattattacactacttcatatgaaattttatttcaaattagagattatttttacaagcatatcaacagacatttcatttaagacataaattaatctgactaaacaaagttgatataattaaggaaaatatgttataatgcaaaatgtttaatttttgaatgaaatgctagtaatagttatataagaactaagagatgtatttctgagattacttggtaaataaacaagatctcaaccttggcagtctgaattttgttaaccagatgtcgtcatgctgaatgttaccaactctgattgagtaagaagcttgtttcagatggtcttaatacttaaacctggtggaacgccttgtcttaatttgtgacacaattttaggcacatccagattaatctcttacacgttcaacagcttacaagcaactacttgaaagactgctagaaggaaagataatgtagaaagcataatttatagaatttagttgtataaaatgataaatttatctattatttaaatagtgtcctaattattactgttattaccaagttctgatatttgaaatgtacccagtttattaattatctttttacattctacagatgtgttcagagcaacattgttttgttgacacaagcatttagaagaaagtttgtgattcctgactttatgtcttttacctcacacattgatgagttatatgaaagtgctaaaaagcagtctggaggaaaggtaatgcttttgatgtacatattttcataaccgaatcacttaataaattcagcttaatttgaggtctagagagtaaattgtgtagttgtgttttg

SEQ ID NO: 24902 - DNA, 1046 bp, Homo sapiens
aaaaagatggatagttgtggctgtagtaaacatgtacagacattttttccttgtcattattccctaaataatacagtacacctatttatatggcatttacattgtatttggtattataagtaatctagagatgatttaaaacacatgggaagatgtgtgtaggttatatgcaaatgctatatcattgtatataagggacttgagtgtccatggagtttggtatcacagggattcctggaatccacctcccacagatatcaaaggatgactgtacttaaatttattctgtaattttgacataaacttgtggttgaattatgggaaaatttttgttggaattgttaacatgtaaaaagaataattccaactatgcagttacatttttttcccagttgatgttattttttaaaaatctccttttaaataggcattctactggagataccaaagttcccttctgtcttcagtcctgtgtaaaacctttgaaatatgccattgctgttaatgatcttggaactgaatatgtgcatcgatatgttggaaaagagccgagtggactaagattcaacaaactatttttgaatgaagatggtaagaattacataaacattggttgaaaaaagaaatgtctcattttcctatgtaaatctaagtcgttttaaacattttttgattaaaattaaaagtatttgtcatgtgatttctatataatccattgagagagtttcatcacctacttttaaaaatgattattttaggcatctcataccactgggaagtgggctagggagaacatgaacttctctcttcataaccacctttagggaaatatagcgaaatctcaaaatacatgagatttgctttaaaataatttagttaaggcagctgggagtgctgggtatgattattactatatgttggtaattattgcagctaaatgataggtgcatgggtgtttgtatattattctatctattatattgtatatagtagttgaaagttttattgtggccctggttgagatagtgaggattattatttttcag

SEQ ID NO: 24903 - DNA, 1061 bp, Homo sapiens
gccttgtaaatgcattactgtggataaggtaccctggttacatgaaggatatttgagtataaatgatacccttggcccagttcacaaaatttcatctaacttgtatactagaaagcctttcttaacttttaagagttttatatctgtgagaaaaagcttttaaaatagaaggctggtatcttaagaatctatatgtttacttgttacttcaaggcaaattctttgaaagtattggcccatttaattcttataactctaatgaagtagatgttatagccaagtgtttttaaaatgtaactaattgtaataggatatggagaaagctgtcagtttgagctgaaagaaacttgaaaatgcgattatttgcaaggcacagtcctagctttaggtagcttactttgtagtgtgggatatgcaaaagtaaatgggtccttataagaaaattcaataaatgctgtgatgagagaaaagcctcattaataattgcttagatttgaacaagtaacttaaagtagaaataaggaaacacatactataatgtatgtgttaatgcttgatgacaaaaacaccaaaagtgtttcttcccagaaaaatatccacataccataattttacataaactttcaggtgttcactactcttcgaggctgatccatgggtcctagtttaagaacttttaaactgaagagagattaacatacactacgcatagtctcaaaagggcttatgtaaataattaatagaagacttccttcactgcacacagttaaaaatctttcatttaatgattcatgggtttaacagactacaccgaaatgctgcatgtgggaattgcatgtctggttatcatatcacactatcatttcattagtttcacttgccatgtttagtcatgagtcataaactatacattgagctgcattttagtatgagtgattataaacaaagttaaaagatacatacaacataagtgtggttcagtgttcaacagtgcaaaaatttaattgagtcatcttgtacctacaaatttgatcagtgattttcataaaaatttaaattta

SEQ ID NO: 24904 - DNA, 1026 bp, Homo sapiens
aaaaataatacagtatctaataatgcttgtacagtgatcttcaaactgggataaatatatctttggattccatacttggaattctttccaaggaataaaggggcattgacagttttaagataagtcagtttcaaaatctgtttctagatgcgccttttaaaaaattaatctgcctttagtccaggtgtcctcctattttccaaaagaaagacatagtctcatgtctttcaaattttagtacagtgcactgcttcacattgtaaaaacctcagcccaccagcaaaagaggacattttgaaatattagagtcagtgttattaagggtgtgaaccattgtaataactggtaataagtcctgttatatactaggttgtttccagttctttggtttcagcaaaatcgaaagggaatcttaagttgtcagtcaataggagcattagcataatttttgaggctagagtactgtatgacttttggcatgtaatgagctggaggcatataaagaactgagtaacattgctataataaaacttttaaaatttcaatctacttgtctattataagcaattcacacctctgtaaaaattaaaaatcggaagagaattagtcctgagttcattctagcaatagaagatatccactgatatatgaactaaaaatcaattactgtttcaaatgggaaagaaaaatactcaaaaggaaaatcttacaaattagtatgggaaattattagcaaataaatatttttcctttaattttttattgtgaaaaaattcaaacatacaaaatacacgagtatgaccagctctcatttatgcatgcctagcttttatttttgttaacatctgtttctccacccagctcaccccactactccataatgataaagataatggattttttatcatttttagttttgattttgcattgggggtggtttactctcttttgtatatgtaggcatgtgcttttcctaagagctttgcaaataaactttttactgtaactttttcagaattaatatga

SEQ ID NO: 24905 - DNA, 1049 bp, Homo sapiens
tatgaactgtgtttcttaaatagtaagacttgaaagttgaagttactccttgatccatgggctgcagaatggatgttgtgttagcaggcatgaaaacaacattatgctccttgtacgtctctatcagaactcttgggtgactggtgtgttgttagtgaacagtagtattttgaaagaaatattttttttttttctggctggtcatggtggctcacacctgtaatctcagcactttgggaggttgaggtaagaggattgcttgagcccaggagttcaaaccagtctgctcaatatagtgagactcccatctctattaaaaaacaaaatctttttgagccgtaggtttcaacagtgggcttaaaatattcaataaacaaggttgtaaaccgatgtggtcttatctaggcttgttataagcccaggcagggtagatttagcataattcttaaggactctagggtttttggaatgatgaatgagcattggcttcaacttaaggttacaagctgccttagcccctaacaggtcaggctgtcctctgaaaccagacattaacttcttttggctatgaaagtcatagatgtcatctttcaataaaaggctgtttcatctacatttaaaacctgttgttagtgtagtcaccttcatcactgaagttaggtagatcttctgggtaacttgctgcaccttctgcatcagcccttgccattgtttcaccttgtacttttatgttatggagacggcttctttccttaaacctcatgaatcaacctctgctagctgcaaacccttttccgcagcttcctcaattccctcagcctttatagaattgaagagagttagggccttgttctgaattaggccttggcctaagggaaattgtagctagtttcattttttttttatctagaccacacaaattttctccatgttaccggttatgctgttttgttttccatcatttgcgtgttcattgaagttccatttttaatttccttcaagaacttcaagaaatgcaaaggaaacttcatttacaacttggctaactt

SEQ ID NO: 24906 - DNA, 1694 bp, Homo sapiens
cagaatgaagttcaacataacttgtttattttacattgattgtttaaccagtaattatccatatgacatcccaatgcaaatgctgacatccatttccaaaagagttgtttttttgtgctttttctaaggttacaaaggtttttgtggtttaaatgttgttacatattttacagcattaggatctatggaatattttgacaactgcaacagttcaatgaagttggtaatttcttcttttaattatttttcattgaacagctttggagttacatttctacattttgatttctggtatattataaggaaagaaaaaattatgtcaaaggatactttagagaaaatacatagatagtgattacaatatggctgtaattaaattatccttaatcttgttgaagttttgttagtgcctaattttgatgaaatagtatggtgttccttccagctactgattgtatatatgtgattgcacatctttcttaaaaaagtggatttgtaggttttcacatattgtcagccacactctaatcctcttgtaaagaatgaacctggctttattcaattaaataattctctggtacaggttttcctcccataatattttaaagtacaatgttttgggttttttgagggtaaagtaaaagaaaatatgttttaaaaactttagttgtcaaattattttattttaagcctattttagaaattagagatgtattgtttcttttgggtgcatatcaccaattaatacgtttgatttcagatctacaacttactgctttgtaaacttcgccgaggtaaaatgaaaccatttggctacttgaactgatctacattacatagatttttcctattgacatttgcagtagataacatgtcagaaatgaaagtgatgaaacaatacatcttccatattctgaattggcataatgctaaatacaacagaagctaattttttagagactgtgaaatataattttttttagttcaagtatattatagcaagtgagagctattaagaatagagctttctctgcagtagtaaaatgcaaccagaatgtttgcatatactggaattaaaagattagttttgcaacataattcatttttctaactctgatattagtttaaggatttaataaaatataagtagattgttcttaattgaaatattttatatatacttaattcttttcgaagggtgaaactttattttaagtttttttaaatataagattaaataaataacacattttagcaaattatgtgctgtcatgaaagataagggaattcatggtaacttgtatttaaaattctgtaactttgggttgggtaaagatatacttaaaataaagcattccctttgtaattctaatgcattctcaacatatgggtattaaataacatgaaaaaaagtttatataaatgttaaattactttagaactatttcctagatttaaaaatactaatgcagtatattataatagtagctttgaaattttgatattggcttgaaacttaactgtagtggtacctatattaacgtatttatgtctcttatttttttgcagcaaggagtaaataatgctgaaaaatttgactatgtaagtgcaacatgtcattcagttttcatgccacattctctatatatttgttttttgattactaatattccctacttttggtttctaggtca

SEQ ID NO: 24907 - DNA, 1050 bp, Homo sapiens
cagtgcctaggcctcaccctgaaatctattagtccattgagtcctgcaagatccattttgtgtttcccactctcagtgaaagttccatgattatgtcaagttccctgattatgtcaattaaaatggactcttattgtacttttgggtagccagaggattctgcagtttttcagtgtattttaatggtagaagatttgagaattttaaaattagcatttttgtttacaaaatatgaagactagaaaggacctgaattcgtttcagtcattttatagccaagaaaatgaagattgaaagaattaccacttaaatgacttgtccaaagtcacacaaatagcctattgacagaattgattggaactctgtagtcctgaatcttagttcagtgttctttatgctgtacattgctatgcaaatgaaattatgaacaatcacacttttaaagaaagtacatagagcaaatgtttttttttcttcttccaggtttcagtctgaaagagaaagtggagatcgaaattttgcaataggatattacttaaaagaaaagaaggtttttaaatttttgtttctatttcaaattattctttcatttaataaaatacatgaagatgtatgctaagaattcaacaatagcctttaagcaactacctattactatttaaggtgcagaagtttttgcagagtgctcgtgagtcagtgttatcaaattgttaatgttattgttaatttgatttgtatctggcagcatttaaatatttgactcatattatttattaatacaaattttgtttgaggtttagtctattttttcaaaagcatgatgcctgattactgttaactactcttgatttttttaagtggctggtctagtaacttgatttataaatcatgaatcattttatcattgtcagttaaactagtatctagaaacttacatgatgtgataaaattttgcttttttatttcatgtttatactcttttagaagttacatgctattttattaattaaaatgaaacacttgtgtacatttgaaatttttcatatattt

SEQ ID NO: 24908 - DNA, 1263 bp, Homo sapiens
ttaattgggttgggggaagttcttttattttataccccaacctccagctagtagtttattaatctgaataccataaaatgcacatgactttgagaaatttagaaaactactctaagaggatctgaggcaatatttatccaacatgaaacagcgggcaaaatgtgatgtttcgtagagttcttaactttttaaatagtaatagaaaaggtacttatttttaaaatagtatgttaagtagactgattataaatgcttatttaacaaagtgattctgttactatggtcttaaaatgttttctattttatgaacataggagaggaagagaatttaagttgactttgtttgccatttctattttgtagattgtagatctactttagtaatttttgtaagttgtagctaatagagattttttaaatatgccatgtatagaaaacctgttttcataaaaaactttataatggcttcctgatccattaacccttaaccaaaatgaataggatactaattagcacttggattgcattgcttttttggcggaatctgtgggtttttttttttttttttgtaaatttcattcaccagtaaattacagaatacttattattgaaaaccatcatgtattgctttaaaacaaaagttataatcttgccctcaaaaggcaagcgttagaaacaggtgagctggtgccaactgcttctgtcggttaatcttgtaacatttttactatacatttaactctaaatctcatttactaattatggaatttttttaaagaaaaattatataccacatctcaatggcaaagaataattcattgtatttatttttaagccatatttcaatatctgaggatatgatttttctgtacatagtatgattaaaaataatggtattttttcattaggtatttaccttgctgaaacactttcaggccttaaaaccacagataattaaaattatctatttggaaggcttagcttttgaaagaaaaaattcttacccaaagtagtttttaaatttctattttcatattatgtttctggtgatttatgtttatataatgaaaatctcctctgcacagcaattatatttggaatcctgagctataattaaatttatattctgtaaaacagccgaaggctttcttttgtttttaaaacatagtccaacctttctagaattttgatgtacttttatttaccataatcttatatattttttagaatcacagatttgaatttgaaagtaatcttaaatgt

SEQ ID NO: 24909 - DNA, 1079 bp, Homo sapiens
tggtctttttttctaccaagtaagaactaaaaaagattaccatccccctcagcatttcactagtttttgttcaaacagcacacaaacagaattatttcaagatatttagctaattaaatttgattgtgcaattcagatctatataaattaaccttagcattattcctgtgctttattattcactgataggttcttattcaactaatgtttatttcttgcctaatatgtgccagaaaccgtgaagtgtttaggatatgcagtgagtggttaatgagacaagtatgatccaacttgtgtttgcaattaagcagggatacaggtactgaataaatactgaaaataattaaaatggtaataagtgatttgttaatactgatgcatgtagatctaattcattttaaatgttacaaaataagttacaaaatggtatatgccatatgatgctatttttgtacatctataataaactttatgagacacaaatatgcaatgtagttactaataaaactataagaacatgaacaccaatctttagataaagcttactgccaggagggaatggaatggatgcagagagcatggttagctgtatctttaatgtttcatttctttaaaaaatatttcagcaaatataatgataatgatagaaaagtaaaaaaatgctaggagagggtacaataagaacttgttttgtctgggtggttaaatatggttggttttcactggaaggtaatacagtgtgtaagttttgaaggagtcagaggaaatatggaatagtgttaataggctagtctgacttgaaggccccagaacaggaaggagtttagcacatttgagaaggggaaagaagaaggcaaatgcgctgaagaagagtgaggtgaggtggatggagattggctgtggatgactcctaagagatggggccatattatgtagagtgggccttctcatatttcgatgtacatcagaattgttagagtgtcttaattttaaaatacagctagcttcctggggcccattcctacagttggattcaaaaatctaaatgtttaatgtgcaccccaggtgcttctgctgta

SEQ ID NO: 24910 - DNA, 1141 bp, Homo sapiens
atttttctttagccacagtataataggtagtatgcctcaatttgaccttaagaaaatataaaagcaggctgaaagcttattttcatttaaagactataatctgccaagttggagtgaagcctttaaaacaaaattggatctggagtcatgatggtttatttaacagttgaagaaaagtatctattccatgacaacagatactgtactgagctggaaatgagagcagcttatctcaaactagaggtggtagaaacagaaggatgttttttcagttacctgcttttttttttcattatagcagttccaaacaggctgaattcatgtttatatgaagacagaaactaaagatgaaaaacagaggaaattttggtttggcagttggtaatggagttagaaattaaatagttgaagtaaagtgtaaaaccagtgaaccaatttttcctccgtctctccctccctccatcttctccctttcttccttttctcccctcccgctttggtcccatctaggcttccttccaatattgagtaaagaacttttatggattagagctaaattgatatttaatccgttggtttccttctgtgctttggataacaatctgagatctattaaggactcacatcatcatggtctagttgtacagaattgggaatccagatacctgagttctactcaagctccatcactaattcatatgctgtgtgaccttgagccagggtccttaatctcagtggtagtaataaataaaatatatctatcaacatattttataaccagcctgtcagggatttttaaaaacaactataactgtttaaaatgttgaatgttttagggtcatccactatataaatacagagtaatgtgagtatataattctaataattgctacttactcataagtacagaattattagggcatttacagaagtcacacaactcaacctttaaacaagctcaaactgagtaggataatgataggattaaagacttaggaatgccatgttttagatgtgtaaaactgatacactccccacctgcttctagctgttttggaaaaaagtgagatttgctatgccaagcatgccagtgttaagtgaactcatgtgaactgtaacattttttgtcccactgttgtca

SEQ ID NO: 24911 - DNA, 1051 bp, Homo sapiens
atgattagaagtatgtggagaggttttggagggtggaagaaggaccagaagcagaggcatcagttaatgattgaataaatcttgtaatgatattcaaagatgtaaaagttaaggtagatgggctgggcacaggggctcacacctgtaatccctacactttgggaggctgaggcaggcagatcgcttgaggtcgggagtttgggaccagcctggccaacctagtgaaaccccgtctctaccaaaaactacaaaaattagattagtggtggcacatgcctgtaatcccagctactccagaggctgaggtgggagaatcacttgaacccgagaggcgaaggttgtatgagccgagatcttgccactgcactccagcctgggtgacagagcgagaccttgtctcaaaaaaaataaaatgcagggttgggggccgatagaggaattaattttgcaatttaatacccaaaattgaatatttgatgccttgagggagaatattcacttagtcaatagatatttaatgagcacctattatgtgtgatagacactgagtttacggtggggaacagaaagacaagtggtctctgcccacatggagcctatatttaatgagagagacaaaaaacaagtatatataaaaatatatatactttatatatagttatatataacaaatatagttaaaaaggatatagttaacaatacaatatatatatatatatgaaggggaaaagcaaggtaagggataaggagtgatgaaaagaggggagtgttttagagtcttgagagaacatttgaatggagacctacccaaagggagggggagagggagcctcctgacagcctggggaaagagcatctctagcagccagttgtaggccttgagtgcctgagaccagccagatgttctgaatggagtagagctggaaagggaagagtggtaggaatgatatgtgcagtgtaaccaggaatagagcctttagggtcctgaaagccatggtaaagagtttgattttcctttagatatgatggaaaggcacgggagttccttgat

SEQ ID NO: 24912 - DNA, 1030 bp, Homo sapiens
tctcttgagtatctgtaattacatgatctcttaaaaacctcttatccatgtactgaaattcatcttgaattgtttatttttatcctgcattcacacaattcacactttaaagatagaacttgattatattggtatttttatttcaaattttcaatttttggaatggcagaatgttgctattgaaaagtgtcttaaaggtcaccactgtaaccccttcattgtgcttgagacctgctcagctcctaaatttaacaggggacggatctgagaaactgactccaagttgtaacctcttgcttagttttctttctagggagatatccgtctctccaaacctgtcgaaatctaaatttattacctcttacctaatacttggtcccctgtggacttcacttcactgtttgtgctaatagccttttcatcaccatcttgactttggattctagagcatcacctacttccccattttctgtgacccttacattcctcctgtcagtcactatgtctgatttattgttctcccctatcttttgccctttgcaaatcctcaagccctcattctggttcagacctttaaaaggctgagttactggagtatagtgttacccaaagtgagttgttccataaaaaattagtaagttggaaaaaaaaacaaaaaacaaaaaaataccctacccataaagttggtaaatgttcctgtaaaaagggttccttggccaggtacatgttagaatagctggttaagtttctttgcagaaagacttctcctggccttcatttgtgactgtgtactgtgaattcccaagagaaagatacagtattcacttgtcccaacttatgtcaccattgtaccacgttttggggggatcatttcgtagataacactgctatagtcacttcactgtagctttttaggttctgtcactgcctggcttcctgtgggaatgtgcattccatgtgagccgtacttggttcactctcaactgtgtcttgtgcttttaccttgttgttctggatcgttccttccccc

SEQ ID NO: 24913 - DNA, 1034 bp, Homo sapiens
aaggttcacccgcatgatagctgttccctggatctctatgagctccatgctctgctgcccacagccacctgactgtggtgtctgtgtcctgctggcagatctttggaagctttgtttgggctggtgtatacccaccactcagttagctgtggtctggctgaaggtgctgtggcaggccttggcatctttgtgtgtgtgtaagtggggactgtgcaggggagagattggactaaggagaaaggctgtggaatcatgtgttctctgctaaggaatttcttttttaacttggtaaaatatacataacataaaatctaccattttaaccttttttaagtgtacagtttagtcacattaagtgcactcccactgctgtgccgccatcaccactatctctagagatttttcattatcccaaactaaaactgtagccgttaaatagcacctcctcattactctctcctcccagcccctggtaaccaccattctttttgtctctatgaatttgacttttctgtgtaccttatataagtgggatcgtatatttctactcttgggactggcttatttcacataacttagtgccctcaaggttcgttgatgtagcatgtatcaggatttccttcctttttaaggctgagtaatgttccattttgtgtatgtaccatattttgtttatccattcatccattgatggacacttgggttacttataccctttggctgttgtgaatgatgctgctatgaacatgggtgtaccaacatctgtttgagtgccttctttcacttcttttaggtatatacccagaggtggaatttctcggttacgtagggagtctgtgtttaatttgttggaggctctgctaaagaatcataatgctggctgaaaggcactggagagttattgaagggtttgaagcaggttatgcctaatcagattgtgatttgaaaaagtaacttgggtggtgtgggctggggaaaaggaaagggctggcaaggctgtggtggcgagacaaggcagagagaccccttagaaa

SEQ ID NO: 24914 - DNA, 1043 bp, Homo sapiens
accaccctatttctctggtagaactctagtagtaaaatggagttcattcttcttttttatagttttctcttgttatttttctgcttgacaatttgttctattggtttcagtgcccaaatcaccacttgaaatcctcttctccttgtcatcttccctggatttagtccttctggggatcctgttgccctttatcagaagctggaaaatggacagcgcttcccagggcttgtcaccctttcctctggtagtgccattgtgtttacagcacatagaattaggtgctgcttcagggaggaggctggaggagggtccaacagagacgctagagcattgcttctcaaatctgtggtgaagcaccagttccaaatctcatgttcatcattactagaaaaatgaaataatagacaaaatagagcatttaaaccttaattttttcttttagtttcaacaggcaaaacaagcaaccaaattagtacagaagcttttaaaagcctacttgcatgtgtagatcacttaatagtctgtggattgaccaacttggagtcgtgctggtccttggaccatacttcgagtaacactgcctagaagtcactcaaagcatttgtgttgtttttgagctactgtgcttcttggaccctgtgatgaactatcgtcttgggtgcttcagctgtctgttatcactaagacgcctggagccgggaggtggataccgctcctgagagtggttcattttgaatacccacttagctacatgcttggtagcacctagcccttgagtccttttcacttatggaacccaacagcttctcctacctctcagtccactgtagacatacagtggtttgctgacttactctattttctttcttttttaaagcagtggtacaaaaactgcttaatattttatgacggttttaattgtctttagtctatcaaattgagtaaagccaagaatattgtgtgttgtttaaagtctctgttttatggagattacttacaggaaaataaaatgatggaagataatatagaaatttcagtatata

SEQ ID NO: 24915 - DNA, 1097 bp, Homo sapiens
agtagcaaaacctcagtgtaaaaaaaacgacatacatacaaactgagctgctgtggttgaagtggaagtagggacccaaggctctgctcccagcctcctgtttcttctgtcttcctctttatgtgccctgcaacccccgccacagcaccagaggtacccccagggttcctcgaatcacagttggaaaccactgaagatatagctttgtcttttatgggtttttttccccagaaataaatctgtaatatgattcattaaaaaagaaaagaaaataactataagaaaaaaatagttgcttttttttttctctccccagaatgccatgcagattgtgggctttatggatcatgaagctgagtctgtcttggcggtggtggcagcagtgttgaaactggggaacattgagttcaagcccgaatctcgagtgaatggtctagatgaaagcaaaatcaaagataaaaatggtacatccgtggagaatcaactttgtttgtttaggaaacttgctttgaacttctccccactttttaatgtagaaagtaaaatttttgctttgcattggtttgagaaagctttctaatgaaactgagcagaaatagaactgtggctaagctttgttttttgatgtatacattttatactgatctgtttgattatgatttagaaagaacatcctaagccttcaaaattattattagcagcacgtgtacagtcactttttgtgtccatcccctgccttcccacagagttaaaagaaatttgtgaattgaccggcattgatcaatcagttctagaacgagcattcagtttccgaacagttgaggccaaacaggagaaagtttcaactacactgaatgtggctcaggtgggtgaaacataatgtacagacgaaagtttcttaaaagtctgtgctaattttcatataagtataaacaaagattttagtttacaggctgttacctgaatcgtactatgttctaggcattgggaacagagcagtaaactaaacagataaggatccctgccctcatggagcttaaaattctggtagagggaattagatgataatcagtagacataagaaacaagtgctgtag

SEQ ID NO: 24916 - DNA, 1027 bp, Homo sapiens
tttgaagctttaaagcttcaggcaagttatatgatgtatcattatttcagtcaaactgtttttatcctgaagaaccctcccctagcaaaccacagttcagacaccacaggaaggtattgtggtcctgtcttttgaattgactggatatgggtcttgatccaaagttttacactgatcaaaaatacagcctgaatggtaaaagccatcatttgtaaccatgaataactatcaatacatgctcacttttagaagtttattgctaattaagaactgactgcattttgtgtaatttgtccctttttgcaccagaatgcagtaagtatgacctgtttgcagtgctggtctgttgcatgctcttgtgttaatagcttctctagctgtgtgagttttgcagtaagtggttgttgaataaccatgtggatataaaatacagaatccatacaggaatttttaaaggttatgggcaaatttaatttagttgtaacttaatccttaaattgttttgtaattgtgaagctttgcctctggtttctaatctgcttgtgtgtatttcatggtcctgttttagaagtgtactttgagctgttcatagctacacaatgtgtctgaggacactagtgctttcctttccttctcattatttgctgtttgatgatttagcataatagggttgaaatagctccatgggcacagacttgccagataacacatttgttccatgagactgttgtctaaaaaaaaagtcaaagatctgctcttataagttattaatgttttacttttacttataggttttatttatagttgcatcatatagggacatactttagcaaagcaattgagactttctgatatatggaatgcctttatgctgagtataataataataaggcatctatactagaccaacttcagtttctaattgaaattgttagctctgcgaatttgagcacagggttttaaaaaatttgtgtgaaaatgaggactgaggagtgccctttgtatctgactatatttgtcaaaatta

SEQ ID NO: 24917 - DNA, 1029 bp, Homo sapiens
tacttttaaacagactagaattggtatgtgagaactaaaaaataaaagtaaaaccccagaatatgttcagactcctaaaaaatgcaaaatcctttgaaaatgttatgataacatttttggagtttattcttgcaaatcctgaatggtaatagaatttattttgatcttgtctgtgatttagacagatggaatttaaacttggaggcgaactcattatgagagtgtgactaacatgtcagggattttttgatggtgaaggaagtggctgcaatgtagatagtcttggagtatttttaatagttgtttgacattatagcatgcaatgtgcctgtcattgagttacatgtgctgcttataggtgctgtaccaggtggaaggattcgttgacaaaaacaatgaccttctctatcgagacctgtcccaagccatgtggaaggccagccatgccctcatcaagtctttgttccccgaagggaatcccgccaagatcaacctgaaaaggcctcctacagcaggctcacagttcaaggcatccgtggccactctgatgaaaaacctacagaccaagaacccaaactatattaggtatttttggcacatgaaactttcacagttcaaatgtgagagcaccccgaaggaatatcatttttccctttgcttcaatctgagtgtagcccaagcagagggtaactaaaatacttacagattaaataataccttatctgggattggcttaaaaaatgctccactatcctttcccctaaaataagaaagtaaaaaagtaaagtgtggtggagaagatagtagatatttaatgaaactcagtggttgagacctaggggttttcaactttctgtatgtttattattatttttttaatggcaagttaaaaaacaaaatgcaagtgttttttctggtcagtgttttgcagaaaactcttgttggcttcatttgggattcttgttctattagcttagagcacagcattgaagcaagtgctttagttaactgctctggcacttcttagga

SEQ ID NO: 24918 - DNA, 1050 bp, Homo sapiens
attcctttcctgtatgctgtgaggtttcagaggatttttgataagtccatctatcatttcttattagttattcaaattagaagacctgaggaagcaacgcctggaggacttggccactctcattcagaagatatatcgggggtggaaatgccgcacacacttcctgctaatgaaaaaaagccaaattgtgattgccgcctggtacaggagatatgcggtaagagtctcagtcattttaaatcagtaataacaatgctaatttgccaacatttattatgtacttaccatgtatgtgatttttacatacttaattctcccaacaacctcatgagataatggatgttcttaatggttcttttttttaaagatgagaaaactaagacacaaagctgttaagtaatttgcccacagccacatagctataagtggtagagctgggatttgaatccaagacagtattagagctcaagttcagtgtgccataccgcctttcactgatctagctgtatttggttggaaatacatttttaatttggtcatcagattggaagagacaatatcctttaagcttttgatttggttgggctagtttttcaaagtaattggctattctttggctattctttattgtagcagctttgaaagtggctttaattccagaaagctaatgccatgtttttgtagatttctggttttggttaaaggattgcattctctttagtccttaggtatctggctctattaactatagggaaagattcaataataaataatgtttacctagttaatatgaaatttctttttggcatttccttcctcatttgattgtagagattttgttgaaggcataccacaggtatgagagaagcctgaaggtttgcctcagggttaattgaaacttgggctgtgttctcacaaaatgaattaagtttgcactcacatctcctttcttatattcttcctctttttcagccataaagagactttgctatagggctgtatataatcaagacataatttacgctgacctattctcacataatacatttt

SEQ ID NO: 24919 - DNA, 1969 bp, Homo sapiens
gtaagtgtaatatataaaataaattgaaatcaatttttatgaagttgtcagctactccttagaatcaactgacctgtttcctttttttagtggtactttcatttgaaactatttctaatgtgcaggaatttttttcctttagtgttgggcaaccattccaaggggcttacctggaaatcaacaagaaccccaagtataagaaactcaaagatgccattgaagaaaagatcatcattgctgaagtcgtgaacaaaattaaccgtgctaatgggaaggtaaaaatgctaaccttgaagactgataagaagtacctattagttgggatagtcaccctgttttctgaatgtaaaaatttgcatttcatgttctcagtagagttaactatgaaggcggctatttccccttacctttaagcttaggtggaattttgcttgttctctgacatttttatgaaataaaacatattatttatgttctttactgcgttcttggtttacataggtatgtttgttgaaggatattggaatttttgcaaataatgccttaaactcatggaccatttttgagtatttgtgatcattggttttatactattttttattttgatttagagtacatctcggattttcctcttaacaaacaataatctccttcttgctgaccaaaagtctggacaaatcaagtcagaggttccattggtggatgtgaccaaggtatcaatgagctcacaaaatgatggcttcttcgccgtccacctcaaagaggtaaaggttcaacagaagatttctgtgcttaatctctcagccattgatttaaaaaatttccatatctgataatcctatcgcagtttatatatctgccttgctaatttgcaaattttggatattcacccctatgtaaaatctccgactcagtttttcagtaattgaataaagttaatcacttttattggccagtttactttactttttgagactaatacatagaaatatcaagatgttttaaattttgttttctcctgttttttcttctatgtatcaacttagtaaatgtcttaatgttcatctctaatctgggggtttacattaaaggatacaactaaaataaaataaccgccagttaattttaacctaaataatttttagtgttctgtgcctttagcttaaccaggactcctggcttggatgcagtggttacatgtaggttctggagttggtctcactcactttatgataattttggccaaggcatttaatttgtgtgtgcctacctactttttctcatctttaaaatggggatagtaagagtgcctacttcatagcattgttgtaaggattaaggattaaatgagacactggaggaacagggcctgtcacataacacatagtcactgaataaacaaaagttaacaaatattgatcatatgtagggacatgtgtctagctaataatgttactctctggccaaccctaaacttagaaaaatccccaaagcttcccttagcctgtttaccctactttggatcttaacttaaagggggcatatcaaatactaggacagtgattctcaacctcagtgacacatgtaaacagcttgggaactttaaaaattctgatgcccaggccatacccctatgaaatcaaattagaatttctcagagggggcacaagcatcatgtttttttttttgttttgttttgttttttttttgaataaacccagatgattcccttgcacagctaaggctgagagccactgccctaggatatttgttggaagtgttgtcattagggttttaaccaaatcactgaaaagttttttaatcaagtccttcagaagagttgcgggataggtccatgctcctcaaacctgaatgtgtaaacccatacctggaggttgcgttgtggtttcatattcactggggctgtggtagggcctgagattctgcttttctagcaagctccaagtga

SEQ ID NO: 24920 - DNA, 1043 bp, Homo sapiens
taggagagctatgacgtcactaagccataggaatttttccgcgcttatgggaccaccatcatatatgtggttcattgttcactgaaacgttgttaggtagcccatagactgtacttgcattatacttaatgtttcagtcttaatctgaaatgttccagcaagcatttcctttaagcatcatgtcagtgctttaaacatttcagagtttggaggtttcagattttcggattaggttagggatgcgcagcctgtactcgtcaagatcagtatccattaaaatacaaaagcaagtgttattgtaatcatgagctgttttgtgtatactttaatttgttttattcttttctcctaggttcctggtacagttcagacaggacaaagtatgtgtgaagtttattcagggaaaccagaaaaatgggagtgtcccaacatgtaaacgaaaaaacaaccgtctccttgaagttgctgtcccttaactggcgcctcctctctactttcatggacttgttcctttgtaatagtgcaatttggttttgttttatttggggttcattgtatgtttgggaatcaccaaaggcttttagagttctttggcaaaataaaaatatttgactaatcaatttttattattggaatagttttaacctttcaaatacatgttctgtcctggagcaggattgtagaaactaacagtgtctattttcatgtctgatgtgttcttcctttagtcatcatgttaggtctgtgtaccctaaatcagcatattactcataaatcattaattaatataagcataggaaatggtcttaaaagatactgcattcattcatcagatatttattccatgcctactctatgctaggcactgtgctagatggtatgaaaacttattaggaacctttttgtttttgagaccattgcattctggctggtttgtgctggtttaacgacatctaagaaggtttagaaatggtgagaccaaaacaataactgttaatgatggacagcattattaggaaccctgtagtatgatatttaacaat

SEQ ID NO: 24921 - DNA, 1050 bp, Homo sapiens
gccctttcaatgacttacagtggagagccagtacatcttaactactgttgtagtgatggtatcaacctcatggttacttagctctgcatttgttgctttgttttttttccacttcaaatcacaaaataagtagattttgttttctgaaaactccatagcatttgaatacaaaaagttgtgccagattgtttgccctaattcactgtgtttaacaaatatttcagtacacactatgtattaggcactgtgtggaaagtgttaaggggtagacaaaataccgaataatctccacaagtttatttgtggtctatagtacttttgtaactggggttacaaaaattatagaaatttttttcctttgttcatatgcatattcatgattataatttggctttgtttgtgattaatgttttcttaagattttcacattatagaatacctcaaaagaagttgtctaaggactgggatagagagtatgtttcataaaattgtagatgtttagaatttttaaaaaccctacaaattagtatatgattgttttatataagtaagataggagcaacactttaaattatttgtgggagaatacagcattaaaggtgattttaaaagaaaaaaatttggaattttagaaaatttaaatgctgtcaggtatggaatgctgggcttccaatcctggcctcattgtctcctcacctgtgatgttggatgagttattacacttgaaatgtctttaagccttaggttccacaagtatgaaaacaagtaagtaacagtatcctttctagacttgtttaagatttccatgtaagtaattataatgacttctgacacataataatgtcgtcttataccccaacagtaggaaaaaaatgcagaattcagtatgaaagtattgttaccctttaacacagtggtccccaacctttttggcaccagagaccagtctcctggaagacagtttttccgtgggatcgggggatggttttgggatgaaactgttccacctcaggtcatcagtcattagttagattctcataaggagcgtgc

SEQ ID NO: 24922 - DNA, 1847 bp, Homo sapiens
ggttctagaaacaacaaactgaacatgatatgaaactaacaacatagaatgccccccaaacaaattcctctaacctcactgagtttacttgccctattactattttttttttttaagatcttctgtctcttgtttttgttttatcccttacctgatgaaagtgaacatttctagtggagaaagaagatcacagttctctaatatgggcattaagagaggggtacagctagaggggaggtgaaaacctgcctccactggggtgaaaaacagtgtgctgaggtttcagccagtgattacactgggtaatcaaccagtcccatgtttcacaaaggagttgtaatgattaacagttcaggtatgcttctgaggaaatctaattgagacctttggaaaatagcattgttatgaatggtgtggtgttacgccctgagggaaaagctagaaaaacattttacttttcaagtgtatttaaattacatccaaatgtttcagtgtgctttactggagactgcctgagtttggaattcaaatattgtaaccaaattactccaggtttctgaactaaaatgatctattgatgtttctcaaagtatagatcacagagtaagaaaagaggaaatcaagtctggtttatgacaaacttttttccatgttaacattggacccaaagatgttactaagagctttttactactgtgagagaaccagcgtgatgtgaagacaacgaacattttaagaagtttgactagtagacatttcgtttaagtcttttggagggtcttggttgacaacccacaattttattgtggctccccaggctttgagaacgtgtgggcttggatgatcattgttgacctataaaagagcacaggtctcttgagagtttattgacacactactgatcagacccccacaatatgtctcaacctctgttgaagggctagtgatgtttaaaaaaacctgttatttccaatcagaaattgaagttatgtctcttactccatcaaaatttatgcttttcagcattgggtaagtctagtttcttggtttgtatattaaatgcatattgagtaaaattcttagtgatttagaaaccatctacatgaggcttcccaggaacttgttaaaagtacaggttgcacctctgcattactagaataacatcagtgtacatttgggagatctgcatttgaaaccctgaggttgtctgcctcctgcccttgagatcttcccttgtattgaaattatatatatatatatatatatattttttttttttcccctcagtttcttttacctttgtgaggctaatatatgctgacgtgttggattgtaaaacaaaaaattgtgcttaaaagaatgtccctccagagggcagaattgttgggtaaagcatatagcgcagagcagaataagaggttcagtatggcctctggatgagggtattgcaaattttgaattaggctcaaataaaatgatttaaattatatatcaattcgaggatcagatattaattgggaggtcacatgactttccttgagcctatctagataaaagtaaaatgctttttttcctacgtttttgaaaatttagagtttattgttgctcatctcagcaaattaatgttaccagcatcttctgccttcctcctgtccctcaattccctactttactaaaagaaggctggccaaattgaaaagtagttgagttggagacttgataaatacttttgaaaatacttagagaaaccacccttcatcttccacgtaaagatctcagttctgtacagagaggcaactacaatgagtattttctgcaagtaacatggaaatcatgatttgattgcc

SEQ ID NO: 24923 - DNA, 1077 bp, Homo sapiens
ctgacttcagtcacatgagtgagaacaacagaaggacagcactgagctctgccaaaattgctgacctacagaatcttgagctaatgaatgattgtagctttatgccattaagttctgaggcagtgtgctatacatagcaaaagctaactgatacaaaactaaagatacaatggcacaaacatgaaaagacatgttcaccgaagcattgcctataatagttaaagactggaaacgactcagatgtccaccaactcaggagtggttgaacctactacagtgcattcaccccgtggaatactaagcagctccaacaggggtaggaaatttgtatactttcataaaatgatctttaggatatattgttaagtgaaaaaaacaaggtgtagaatagttaatagagtatgctacctcttatttaataaagggagaatataaatatgtattttgcttttatttagaaaatgaaagaataagaaaccactaaaatgattttttagaagaaagcaaggggacacagatggaagttagatttctctaaatttactttgttttgtagctagaactttagaaccatgtcaatgttttacacacgtcacacttataatcaagataaaaaatacttatacagtgatgtgtcacttaatgacagggatatattctgagaaatggtgccgttaggcacttttgtccctgtgccaacatcatagaatatacctactgcacacctaggctatatgatgtagtctattgctcctaagctacaaacctgtatagcatgttactgtactgaatactgtaggcaattgtaacagaatggtaaacatttgtgtatctaaacatagaaaaggtacagtaaaaacacagtataaaagtcaaaaaatggtacacttgcaagggcacttaccaggaatggagcttagaggttggaagttgctctgtatgagtcagtgagtgagtggtgagtgaatgtggaggcctaggaaattattctacactactgtagaatttatgaacatttgggctacactaaatttataaaaaacattttcttcttcaataatgagttagctcactgta

SEQ ID NO: 24924 - DNA, 1019 bp, Homo sapiens
aaaactgtttttgaattttctgctaagtaaatttttggcatactttctaataatatatgctcttcctaagacgttttgccaaaagtaagttaaaactccaaaggagttaattactggttgtaactggttaacaaatgcggttgcttccacagaggtcctttaaattattaaacagtttgaagcaaagccttttcaatgggaatgctgcaattttgttgcacttactctgtacttagtgttatagtgccaccaagaaacaaattctgaaactggcaagcaccaccaagtggcagaagaacatcactcattgagcagagaattgtattactgaatatgtaaataaaaatatatacattatttagacttgtcactaggtaccaaagaagtagacaagactgcattagcaattggattagtgctttaacttttccccagcaaggcaaaatcagtttacttattagaattaaatttaagtctatgaactgtactttgcattgcgtatcatatgattgctagtaatatgacacaatcataccatgtatttgcaaaattcttattttaaaatactataccatatttactttcaatcttcttgagctagaacactttatttgtggcatatacactctagaattgatgcagaggagcagagtccagttgttagatttttcagtagaaatagtgcagatatattttctccagaaaacttaagaacatttttttttctcatggaaagaacatcattataaagtgtgagattactcacagcttaagtagggggcttgggagttattctccaacaagaatagtttaagataaataaatgaacctgggaaaataagatacactgccaatcagaactcttatctccttcatgatttcatactttctgattgcttcaataaaggtaagatgtatcctttgcttcttaggtgtcaggcattgtgccatgtaggatagaacatgttatttttatttaatctttaaaacacccctatgagacaaagaatattatctca

SEQ ID NO: 24925 - DNA, 1034 bp, Homo sapiens
ttaaatatgacatctatattttagtaaagcattagtgaggactgtaaatgatctttaaagaatttggcttaaatttaatctaaaattgctatcaggtatttcacatcgctgtaatttttgcctgcattcgtaactgaagagataagtaaatgtcagaggttaagataaatctttttctttttttacctgtccatatttacaaacattctgcgttccgtacatagacgcctggataagaacccctgtgcaagaatgactttggtgctactttaaaaaaagtggttggggaagacctcataggaaatgacatcaataatagattgcatgataacctatactagttcttactgttaccaatttaaattctaactgcttaaaagctaacacggtccttccctttttttgagcacctgatttgaagtactttgagtaggcctcaagtgtcgtatgcaagtactaatctagggggtgtgcctttttcaaaagtgatttttggagaagataggatgtagtattatagcaaggaaaattcagcatctgggatgatcatttccttctgattagagaaatttaccttgttaatattctgttcacccaacccttctaccctcagtgttgaccaatactggaaaaaatttagggctttggagtgaaattttaaaagttcaaaaccttgatctattaattagtttgcttaccttgaggaagttgcttatcttaatcttctatttgaacttcaagtacaaaaaccctactcacggacttaactgtgaccattaaatgagataaccaaaaggctgaagatgatagtgagttgattttaccttttttctacatacagatgtttcagttctttcattagtggttgaaggtctgcgttctttttctccctccactccctccttgactacccccagaatgagctttgatggtctctactgggcctttgggggggatacattatcctgttgtttttgttctgttacttatatataatactcatggatttatttctacttctcttccattttcta

SEQ ID NO: 24926 - DNA, 1121 bp, Homo sapiens
attggaggaatgggagtttggaaccaggtgtggagaaaaaaaatcaagaaaaataggactgaactaacctttgtaacaataaagctaccagtaataagacttttttgttatctcatcatatgaatatatttccatttggggctatgttacatttcttaaactctgtattagaaagatttacaaagattgtaacacgttaaatagatacttggcttttttaatgttctcaggtgagttttataattatattctttaaataaacagctttattgttgtggctctgcctttagacttgggaaatttttatttatagtttagctattaagtgaatcacagccttcagtcattttaagtcactggttcttatctcgtgggccattgaaggtactatttataacttgatctgagtgtcttaattctttttaaaaatgtttaagttagttatatgtcatatttttgttttgtttttaaacaatgccttaaagctttcataatctgggtaaaatagtctaccttctacgattcatttatcttatatttttattctttttggtagtctgttggtttaaattgttatactaatgttgactcttaatttcttttctacagcctggatttgtggtatcatttctatcactgtcattagcctgctttccttgctaggcgtgatcttggttcctatcattaaccaaggatgcttcaaattccttcttacattccttgttgcattagctgtaggaacaatgagtggagacgcccttcttcatctactgccccatgtaagaaatgtttttaatgtttttaaaaatttaaaataaaaatatttaagctgaaagggtccttcattagcaagctatagcacagtaatctagtatttgtattgttttatttgcttataggatgaagtatttttttctccattttcagagttttaatagcaatatttttttaaataaattgaatcattaggtcaactttgctttcaatagtctttaaaaaaaactcattggattaaaatttgcaatatcagtagcagtgagtggtcttttttatctgtgtagcatatcaggttagcctttaggagaaatgcataagatatgttgtaatgattatgcctgtag

SEQ ID NO: 24927 - DNA, 1023 bp, Homo sapiens
acctcaacctccgcctcccgggttcaagtaattctcctgcctcagcctcctgagtagctgcgattacaggcttgtgccaccacgcctggctaattttgtagttttagtagagacggggtttctccatgttggtcaggctggtctcgaactcctgacctcaggtgatctgcctgcctcggcctcccaaagtcctgggattacaggcatgagccactgcgcccggccataatttttgtatttttagtagagacagggtttcaccatgttggccaggctggttttgaactcctgacctcaagtgatctgcctgcctcggcctcccaaagtgccgagattacaggtgtgagccactgcacctggccttaactttttcttttttaccaaggtaatggatgtaaaccatttcttttttattttagttggtatttattggtttaccaatttagtttctctccacatgcaatactactttggttttcttcttttataaattaaaaaacagtagcttaagatgtaaatactcattcacatggaaaatatctgagggaaatggagatggcattaatttgaaagaaaaaatgctaatgccacctttcgaatatgcaagggatttcttcatgtgttttctaatttaatttttctgaaaactcacctggctatgaaatgtctgtcatttgactgtgcgtaattgtcttgatttgtagtatttgctcattttgaatagaacttatcatataaatttcttgaaaaatcaataacttcttacataaagcagtaaaaatatattagtgcatacttggtgctaattccttggggcttgattctgtatggtttcatttaccttgccaacttcagacacataatcttatctcttgttcatgcccattatcctttatccagaccaagtcatcaccgcctttgtggtgtttttgcttagacagttttcatagtctttatatctctggttttattctgttgtagtatatcattgccagatatatctgcttaaatgtgatgttctta

SEQ ID NO: 24928 - DNA, 1034 bp, Homo sapiens
aatgttaagtaggaaaaaatggatccatattgtcgtcaggtaggtgttggccatatcctgacagtcgcacaacatgccataccaaaaagatgagagtttatcttgtaaactttggagagccatgaaaaagtttaagcagtagaatgacatgatcacatttttgtttcagaaagactttggctctatggaggaagacttttattgatttaaagccattcaataagatatcaacagtaccagaagttttagtttgagatacctataggataaccaggtggaagtatctagttgtagaggactttgggtggtgctgtttatcaatcagtatcaaagcatttttatgtaatattttaaacaaatatggccataccggtaggtgttggttggctcttagctgtggttatgacaaacagtgtgggtgttgacattcaggttagaattaaatgtggcaaagccatagttcctattctagttggtatgtatacatatctagagggcatatttctgtaaaacatgctgcatattgtttatgcttaagtatttaaggaaagtcataatgaaaaatctttgtaacaataaaaacttggaaggaggagaaaggatagagtaaaatagtcttactagaaccatatgtaggaagctgtcagtttgaagggccagatagtagatggtttaggctttggggaccatatggtttctgtcacagtttttcaactctgctgtggtagtgtgtggttcctgggacagcgcctctgctgttgtagcacaaaagctgccatagacaatgtgtaaatgaataggcatggccagattcagcatggtttgccaacccttagaccattagttgatttgataaagtgattttgtgaatggtttggacaagaaaataatctttactagctattatataccattaccatagacttttaaacagaatttatgatagcatgctgtagttcttaaatatgacctttaagagattgctaaaatataccatagcactgtcagagcatggtggttagattaattgtacc

SEQ ID NO: 24929 - DNA, 1028 bp, Homo sapiens
ataattgattaataacctgctattacagcattagagtgatttgaatttgacagtacttttattagtgatttttatgctttctgatattttcttttattaattagtatcctttaccttcagcttgaagaactttctttagtttttcttgtaaagtagtggcaataaactctttcaccttttgtttgtctgagaaagtcttcattgcctctttgtttttgaaagatagcattgctgagatagtattcttggttgacagttttatttttcttttgggattttgactatatattctactttcttcttgcctactaggtttctgttgaaaacttcatcgatagtctagtatgggttctcttttatgtaacaagctacttttcccttgatgcttttaaaactctttgtctttaacttttgacaatttgatgataatgtgtctgtgttagtccattgtgcattgctataaaggaatacttgagactgggtaatttataaagaaaagagatatatttggttcatagttctgcaggctgtaaaaacatggtgccagcaactactcgacttctgttgaggcctcaggacgcttacaatcatggtggaaggcaaagggggagtaggtgagtcacatggtgagagagggagcaagagagaggaggaggtaccaggcccctttaaacaaccagtgtgaactaacagagtgagaactcactcattaccatggggagggcaccaagccgttcatgagggatctgcccctatgacctaacagctcccaccaggccttacctccaacaatggagatcacatttcaacatgaaatttggaggggacaaacatccaaactatatcattccacccttggaccccaaatcttgttcttctcgcactgcaaaatataattatcacttctcaatagtacactaaaggcttattccagcgttaattcagaagtcccaagtctcaattccaaagtctcatctgagactcaaggcaagttctttctacctgtgaacctgtaagacaaaaagaaa

SEQ ID NO: 24930 - DNA, 1034 bp, Homo sapiens
aaaattggaaaaaccctcatgtcaaagatcaaggatatgatttaaaaagttatgcatttccaaaatgagcaatcttgtaacagtcatatcccaacacattttttacctcttttaacctttaaaaaatgttttaaaaattataaaatatattatccatagagaaaaaaatgtgtacaatttagaaaacaggtatagtatactcttaatgtcatctacgctggggttttaaaataggatttctttcagtttcacatcacttcttaaaaggaatagcattctctgcaattcccatttcaattggaaaggatctctttacctaataataaaagagactcttattaatggaaaggatctctttacctaataataaaagagactcttaaccttctttatattttatgtgattctttttatagtcacttattgacagaaataaggtcagtgtgcctccaaaacagggaagaaaaaaaaaaagtgtgtttttctactctcacatacctcgcagcagaacacttctgacacctgaagacacaccaagaaattctgttcttcagtggacaccagttgagtgtcctgtaattcaattcagtcctgacactgacactatctacctgaagacaggtgaggactcagtctcacaagattgccccccactttagatgccaattgcaagccccaagttgtccttctgactgacttgcaaaaaatcgatgttcccatgatgcccctctgcaagttgaaataatttgctggaacagctcagagaattcagagaaacgcttcacttgcatttacccatttgttatagaggatattacaaaagatacagttgagcagccagatggaagcgatgcatagagcaaggcatgtgggaagggacgcaggccctttctggggctaaccaccttccaagcacctccatgtgttcagctgtccagaagcactctgaacccagttcttttgaatttttatggcggcctcattacataggcatgattgattaaatcattggccattgatgatcaacttacctt

SEQ ID NO: 24931 - DNA, 1044 bp, Homo sapiens
acctaacaaatgcttgctggattttgaagttagatgtaatcatttctgggatggtgattcccaaatttagctgatgttttatatatatgtgcatctgcaacaaaaagtcaccagatatgcagtcaaattggagttacttatcacagagccaaaagaagtgtttatcatttaaaataacttttctcttggtacaatttgattgtctcaatattaggatcatagtgttgctgggctctgtgtataataaaaataatgaagtataaaatgaatgtgtttttaaatataataacatcaactactattactctttctatactaatagtaggtaacatttttactgagccccttctacattccaggcacaattccaggcaccttatattagtaacaaattgtaatcctcacaatagccctatgaaatggaaacttattcacattttaaagataaggaagctgatgtacagagaagttcaggaacatagataataggtggcagagttggaatttgaactcaggtaacctggctccaaagaaaagtagctatttcttttcaaggagcaagggttctctgtttcgtccccaggtattctttgatgaatagcttgtacatctgcatctggtgtgactttaagcccctgaatttgtttctaactactgtactgcctgcccataccacttgtgatgtttgccagataatcttttatttatcttttcttttactccattttattttttgtgtgttttcttcctagtgctctttcaaagttgcttgttcttgaagaacttgtttaaaacataagatctttgccaaatctaccttgcaaaaataactgataattgagataaatgtttctctcaataatacaaatttcaaattatgaaaagagaattattaactacctacatatatgatatatctgtgtagctcaaacaatttttgttttattttgaaagattaatctcgtgatggtaaaatcatctatattttgcttttatgaatattgtcagctggtggtgaaggagcttaggtattttgtgttacca

SEQ ID NO: 24932 - DNA, 1050 bp, Homo sapiens
aaaataaagaatcaaaagacccaaattaagctccacttgtcagctaaggcgaataatgctcagaatatagaaaggatgaaggttgtatgggaaacctcttctcacttcctggataccctgtgaggatgtagtcagtcaatggtgtctagggaagacaggttttagaaccctagcagccccatgtattctctgggaattatagccagttgtctttggggagactttttcagtggagtcactgctgtgtaaatgtttgatttctcatttgctgccagtgtcacattccggctccctatctgtcccttccgtgttgattgtactggactttgctcttttgggatcagtgggctagatgggaaagaaagctcagcaggaactggtaactttgggtctcatattggattctttctgtcatcctataggcaaaaagagcaagccagtttttccactgatcatctttttatgttattttccaattacttttagcaaatagaaaaagaattgaagcaaatggagctaattaaggatcaatatcagaaaaagaactatgaacaggtagatgatttccatatactctgtgtttacctttcatgcaaaatctcaaacttggagggtgttcaccaaatgtctctgtctttgtatccttccagtctttgagtatccagagatttgtgtgtgaaatgactaacctgcagaaagagatgcagatgttggctaagagccaatatgatgcctcagtgcggaataaacagcaagagctgcacctagaagcagagcggaaaataaggcaggagctagagaatcggtgccaggtaaaaggtttcctaagattcatcttaaagatggtcagcaaatgacatgtgccaaagcccagtagttttgcacctagactttctagagtctacagaagacaacacacatttacaaattgtttatcttagctaagtccttagaataatagtatctaggaagaaggctgtagtttgaatatggcaaatgttctccattttcagtttaataaaagtaatgtcaatttttaaagaacagcta

SEQ ID NO: 24933 - DNA, 1416 bp, Homo sapiens
gtcttctctgatttctttgagcagtggtttgtagttctgcttgaagaggtccttcacttcccttgtcagcagtattcctaggtattttattccttttatagcaattgtgaatgggagtttatttgtgatttggctctctgcctgcctgttggggtataggaatgctagtgatttttgcacattaattttgtatcctgagactgctgatgttgcttatcaacttaaaaagcttttgggctgagacgatggggttttctagatatagaatcatgtcatcttcaaagataatttgacttcctctcttcgtatttcttcctcttgcctgattgccctggccacaacttccaacattgtgtggaatggggtggtgagagagggcattcctgtcttgtggcagttttcaaggggaattcttccagcttctgcccattcagtatgatgttggctgtgggtttgtcatagacggctcttattatttcaagatatgttccttcaataccttgtttattgagcatttttaacatgaagggatgttgaatttaattgaaggccttttctgcgtctattgagataatgtgatttttgtctttagttctgtttatgtggtgagtcacatttactgatttgcatgtgttgaaccaaccttgcatcccggggatgaagccaacttgatcgtggtagataagcttttcgatgtgctactggatttggtttgccagtgttttcttcaggatttttgcattgatgttcatcaaggatattggcttggagttttctttttttgttgtatctctgccaggttttggtttcagaataatgctggcctcatttgatgagttagggaggagtccctccttttcaattttcgggaatcatttcagtagaaatcgtagcagctcttctttgtacctttggtagaattcactgtgaatctatctggtcctgggctttttttggttggtaggctatttattactgcctcaatttcagaacttgttattggtctgttcaagaattcaatttcttcctggttcaatcttgggaaggtgtatatgtccaggaatttatctgtttcttctagattttctagtttatatgcatagaaatgtttatagtattctctgatggttgttggtatttctgtggggtcagtggtaatatcctccttaccatttctgattgtatttatttgattcttctctcttttcttctttagtctaaccagcagtctattttttcaaaaaaccagctcctggattaattgatttttttttgaagggtttttcatgtctcttttctcattcagttcagctctgatcttagttatttcttatcttctgctagcttttgggtttgtttgctcttggttctccagttcttttagttgtgatgttaggctattaacttgagatcttt

SEQ ID NO: 24934 - DNA, 1129 bp, Homo sapiens
gagatgccctgcccagagaggaggaatcttgtgcttggttttttggcatggtggtgcatgcctgtaatactagctacttaggaggctgaggtgggaggatgacctgagctagggaggactaggttgcattgagctgtgattgcaccactgcattccagcctgggcaacaaagcaaaaccccatctcttaaaaaaaaaaaaaaaaaaaaaaaaaaaaaaagaggcttggcatccttggaactagttataacagaattgaatactgcttgtcctcttttatgcagttgcaggtcactgggccagaggtttctgtttattggctttctctttctcctctacacttgtctgaactccctgaatagaaacacctgactgtctactaaaatgccaagtggtcctgctaactctcactcttcacattagcatacttaccctgaactgcaaacaggataaatttggggtatgatcttcagggttatgattagacttttcatgcttcatctggttgccctgatacctgctagacttgtttaggttaaggctgaaaaacgggcagcaagaaacacatactagggtccagctgcccttctttcaatgctgatgggagccgcacaaacagagcttatggatctgattgctcaaatgtggagggcgagactgagatttttttctattgaaatgttgaaagttagacaaaacatattaagacaattaaattttatgaaatacagtcctaaatttatagaaatgcactgccatctactgcatataaaaaatcattgcagggtatgttcctcccactggaattatttataatcaagcagtcacacacactgaaatgtacatgaatttataagatgtggcaactgccacaaagaactcatttagacttttataacctttaattttcttatctgaaatgttctcagttttccattttgtctctttaaattctattttcatattttcattgaattaattcttgcaattacattttaaatcttataatgttctcattctttgaattccttccttttaatagcatcctcttatttcatgtgtatggtattgtcttatctggggatatgaactgcgttttgtttttctacttcctgcaccaattctgttcc

SEQ ID NO: 24935 - DNA, 1074 bp, Homo sapiens
acggagtctcacactgtctcccaggctggagtgcagtggcacaatctctgctcactgcaagctccacctcctgggttcaggccattctcctgcctcagcctcccgagtagctgggactacaggcgcccgccatcacccccggctaatttttttgtatttttagtagagaacggggtttcactgtgttagccaggatggtctcaatctcctgacctcgtgatctgcccgcctcggcttcccaaagtgctgggattacaggcgtgagccaccgcgcctggcctcccaattttctttgtattattttctgtctgaagaacttcctttagtaatttttttttttttttagacagagtctcgctctgtcactcagactggagtgcagtggcgcgatctcggctcactgagtttaagcaattctcctgcctcagcctcatgagttcaagcagttctcctgcctcagcctctcgagtagctgggattacaggcatgcgccaccacccccagctaatttttgtgtttttagtacagacagggtttcaccatgttggtcaagctggtcttgaactcttgacttgcctgcctcagcctcacagagtactgggattacagacatgagccaccgcggccagctgatcttcatttctaaataatatttttgttagatatagaattctggcttgacaactctttcagcacatttttatttttattttatttatttatttatttttttgagatagagtctcgctctgtcacccagactggagtacggtggcgtgatcttggctcactgcaacctccacctcctgggttcaatcgattctcctgcctcagcctccccagtagctgggactacaggtgcatgccgccacagccgcctcatttttctatttttagtagagactgggttttgccatattgaccaggctggtcttgaactcctgacctcaagtgatccatccacctcagcctcccaaagttctgggattataggtgtgagccactgtgcccggccttatttttatttatttattttgagatggagttttgctctgtcgcccaggctggagtgca

SEQ ID NO: 24936 - DNA, 1074 bp, Homo sapiens; identical to SEQ ID NO: 24935

SEQ ID NO: 24937 - DNA, 1074 bp, Homo sapiens; identical to SEQ ID NO: 24935

SEQ ID NO: 24938 - DNA, 1074 bp, Homo sapiens; identical to SEQ ID NO: 24935

SEQ ID NO: 24939 - DNA, 1041 bp, Homo sapiens
gagcagttatgtattaacaaattatatgtacttaacataagatttaccaggtgatataatttaattaaccataagaacttctttgtttttagtatattcaacagaacataagagcagattgctccaatattgacaaaattcttgaaccacctgaaggccaagatgaaggtgtgtggaagtatgaacatttaaggtaggaccttacatcaaaatactaatagtacctctcacaaaactagctttcatattaatgataattatgaattgtaaaatttactatgtaactgcagactaagaagccaaattttaaagctttggcattttcagtgtcacaaggttctcagctttcttcactggttgtttccaggtcaaattatgctgcagagtcactcattttgaaaggtggtttatttcagagttgataatttggacctgcctctgcacctctcttcttttcttttcttttttttttttttttttgagatggggtctcactctcttgcccacgttggagtgcagtggtgtaatcactgcttactgtgcctctacctcttaggctcaagtgatcctcccacttcagcttccagagtagctgggactacaggtgtgtgccagcatgcctcactaattttttaattttttgtagagacaggatctgattgtgttgcccaggctagtctcaaactcctggattcaagcaattttcctaccttgtcctcccaaagtattgagccaccctttctacatttattcatttgggccttattatccccgccttttttttgaaacagggtcttgatctgttgcctaggctggaatgcagtggtgcaatcttggcgcattgcagcctctgtctcccatgctgaagcaatcctcccacctcagcctcctgagtagctgggactactagtgcatgcctctaagcctggctagttttttgtattttttgtagagacaaggtttcaccatgttgcctaggctggtctcaaactccggggcttaagcaatccacccaccttggcctcccacagtgctgggatt

SEQ ID NO: 24940 - DNA, 1072 bp, Homo sapiens
tcaagtgattcttctgcctcagcctcccgagtagctgggactacaggcgcagccatgcccagctaatttttgtatttttagtagagatggggtttcactatgttggccaggctggtctcgaactcctgacctcatgatctgcccgcctcagcctcccaaagtgctgggattacaggtgtgagccaccgtgcctgacttgtcttttttttttcctttgtttctgtagagatggggtctcactgtgttgcccaagctggtcctgaaatcctgggctcaagtgatcctcccatctcagcctgccaaagtgctgggattatacaggcatgagccactgcacttggccactttatgtttttgtagaggattacttccagttcctagtctaggcttggtatctgataagttacctgtaaattattgcaaacttccagtcttctctttggtaaatagagattaattgtaatcctgaagtaaggagttttggtgctttttataatgccctttgaatgaaaaaattgataactagtggataggtggagataacattaaaagtagatatattctgaagttactaggtgtttcttgaaattataaattttccagtgcaaatgggagctgggatgagttgacagattattaataaatatagagaatgcagtatgtgttcattggggcttattatttgtaagttgatttttagataaatagagtagaaatatgacttttcctgaataaattagaccatgtttcctgtgttgtgtgcctcaacttgtagacaaggcactttttaaaaatatttactttttgatgctgcatgcttctttagaaatggctaagacattatgtcgtgtcataacagttcagcaatttcaggatgctaagacttctttgtatcctttgccagtttttagacaaattacttgactattttctaactttttaatatatatgaatgcacaataattcaaagtacgagtctgtagatattttcccatttttacaacccaagacagagagcactttagtgtagtacatcctttgctttatttttatcagccttgaaaataactgc

SEQ ID NO: 24941 - DNA, 1072 bp, Homo sapiens; identical to SEQ ID NO: 24940

SEQ ID NO: 24942 - DNA, 1072 bp, Homo sapiens; identical to SEQ ID NO: 24940

SEQ ID NO: 24943 - DNA, 1072 bp, Homo sapiens; identical to SEQ ID NO: 24940

SEQ ID NO: 24944 - DNA, 1072 bp, Homo sapiens; identical to SEQ ID NO: 24940

SEQ ID NO: 24945 - DNA, 1023 bp, Homo sapiens
aaacagtttggaagttccttaaaatggtaagcatagagttgcatacgacccaggaattccactccttgatatgtagttcccccaaaatgaaaacatttatctgcacaaagacttgtacatgaatattcacagtcacattatttatgatagccaaaaaatggaaacaaccaaatatccatcaactgatgaatggataagcaaaatgtgttgcagccatctctcagtagcctcagaggattggtcccaggacccccatgaataccaaaaccacagataccaaagtctcttatataaaatggcatagtatttgcatatgacctatgcacatcctcctatatactttaaatcatctctagattacatataatactgaatacaatataaatgctatataaatagttgttatactgtatttcttaatttgtattattttttattgttatggggttttaaagtgtagttttgatctgcagttggttgaatctgcagatgcaaagtgctgactgtatgtgtacaatggaataatattcagccatgaaaaggaatgaagtcttaaagggagaaacatacagtacggcattttgtatatattaaaaacattaaaggctaaaaagttttgaattttaaaaaaaggaatgaagtactgattcatactacaccatggataagccttgaaaacataatagaagccagacacaaaatgccacttattatattatttcattttaatgaaatatccagaataggcaaatcctgtgaaacagaaattaggttggttgttgcttagggctgggggaaggagagaatgggaagtgactgctaattggttcaaggtttctttttgggatgctgaaatgttctgaaatttagtggtaatggttgcagaattttgtgaatatactagaaactactgaatttttaagagtaaattttagttgtatcaattatatcttaaaagtcaaaaagtagcccattaattttatatcaattacctgctgaaatggtattattttggatatagtg

SEQ ID NO: 24946 - DNA, 1023 bp, Homo sapiens; identical to SEQ ID NO: 24945

SEQ ID NO: 24947 - DNA, 1023 bp, Homo sapiens; identical to SEQ ID NO: 24945

SEQ ID NO: 24948 - DNA, 1023 bp, Homo sapiens; identical to SEQ ID NO: 24945

SEQ ID NO: 24949 - DNA, 1023 bp, Homo sapiens; identical to SEQ ID NO: 24945

SEQ ID NO: 24950 - DNA, 1042 bp, Homo sapiens
acacaataataatgggagactttaacaccccactgtcaatattagacagatcaacgagacagaaaattaacaaatatagtcaggacttaaactcagctctggagcaagaggacctaatagacatctacagaactctccaccccaaatcaacagaatatacattcttctcagcaccacatagcacttattgtaaaattgaccacataattggaagtaaaacactcctcagaaaatggtaaagaacagaaatcataacaaacagtctctcagaccacagtgcaatcaaattagaatgcaggattaagaaactcactcaaaaccacacaactacatggaaactgaacaatctgctcctgaatgactagtggataaattatgaaattaaggcggaaataaataggttctttgaaaccaatgagaacaaagacacaacataccagaatctctgggacacagttaacacactgtttagagagaaatttatagcactaaatgcccacagaagaaagagggaaagatctaaaatggacaccctaacattacaattaaaagaactagagaagcaagatcaaacaaattcaaaagctagcagaagacaagaaataactatattagagcagaactgagggagatagagacacgaaaaacccttcaaaaaaaatcaatgaatccaagagctggttttttgaaaagattaacaaaatagaccactagccagacggataaagaagaaaagagagaagaatcaaatagacacagtaaaaaatgataaaagggatatcaccactgatcccacagaaatacaaactaccatcagagaatactataaacacctctacacaaataaactagaaaatctagaagaaatggataaatttctggacatatacaccctcccaatactaatccaggaagaagttgaatccctgaataggccaataacaagttctgaaattaaggcagtaattaatagcctactaaacaaaaaaagtccaggagcagacagattcatagccgaattctaccagaggtacaaagagga

SEQ ID NO: 24951 - DNA, 1061 bp, Homo sapiens
atggtgtaattgacaatacctcaataaggcagtggaggttagaagaacaatgagaagtcttctactgtcccctgccaatttcagtatatcacatggaagttatttttctgttatccttgtccctccaggtggcatttaagatttgagcatcatggtaacagagggccagagaatgaaggaaacaaatctcatgtcaactctttcttttttttttttttgtttctctatgtttcatttattttttaaggggtgaactctctttgttaagtataatttctattctataatagtaatttaataaatacttaataatgtgaatgcatatttcaatagcattctttttttttttttttaacacaggatctcactttgtcacctgggcaggagtgcagtgacacaatcacagctcactgtaccctcgatctcctgggctcaagcaatcttcctacctcagcctcccaagtagctgggactacaggtgtgtgccaccatgcctggctaattgttttgtagagatggggtttcaccatgttgccccggctggccttgaactcatgggctcaagccttctgcctgccttggcctcccaaagtactgggattacaggcatgaacactgcacctggccaattttactcttttaaaaaaatcttatttcaaccggacacatttttatacagtataaaaacatgttaaaaatcagcagttacagaagcggttaagaacttccttgtgaaagcaatgttcactcagtctttattttccaaatgacttgaatgctcttaatactaatttcaccttgatctaagccactttatattaaacccttttatttaaagttagttgcttttgagcccactgcatagagaccctctaattctgtgtagtgacttgtactttagtgcccaattagagtgtgaatcaaggttaattagcaacaaatcatctttttataattgaagaatctaaggtacagcaagataagtgacctactgagggacagagttcaaaataaaataggtttcagtcactcaatgaagtgctttgctgggagatctcgcc

SEQ ID NO: 24952 - DNA, 1031 bp, Homo sapiens
tacaatacttccattttgtttcttattggctagaatttagcaatataacctcacgtagcaacagaaggaggctgggaaatgtagtcttttagctggaataaaaatggggattggttactaaggaagaagtggaaagtgattttggctgtcagccaggaatctcagacacgatgttctcaacaaaactcttcatggcccctctccttagcaaattctatcactatccaccagatagatagctcactctgaaaatttgaggttcattcaccaatccttttttcccttcattccccatatgcaaattagcagcaatcccacaattctaaaatacatcctgaaatcggaaccctctatcactactattaaatccacaatttaaatcaccatcatctcttatctggattctttcagttacctcctgattaattccctgcttcttgtgttgctttccacagatcactgcctgcatagcaaacagaatgatttcctaaaaaaaaaaaattgagactgtattgttcccttgcttaaagccctccaacagcttcccattgcaataaaaataaatgtcaccttcttatttggcctataaggcctgacgtggtttggctcctgcctctgtaaactcatcatctaccccttgtccccaggttctcatgctccagccacagtggctaccttcctgtcccgcgaatgtacccagtatatactacctcagacttttgctctggaacattcgttctcatttttgcatggctaaccctttctgaattagtcagggttctccatagaaagataatcaattggttttttatatttttaaggagattttattatggagaattagcatatgcaaatatggagaccacaatgtgccatctacaagctggagacccaagacagctggtggtgtaattcagtctgagtccgaaggctgagagccagaggaactgatggtgtgaatcccagtctgaaggcaagggaagatgaaatgagatttcccagctcaagtggtgagacaagaaacagagaag

SEQ ID NO: 24953 - DNA, 1056 bp, Homo sapiens
cctgtaatcccagcactttgggaggctgaggtgggcggatcacgaggtcaggagttcgagatcagcctgatcaacatggtgaaaccctgtctctactaaaaatacaaaaattagctgggtgtgtggtggcacgcgcctgtagtcccagctactcaggaggctgaggcaggagaatcgcttgaacccgggaggggaaggttggagtgagctgagatcgcgccactgcactccagcctgggcaagagaccatctcaaaacaaaacaaaaaacaacaaaaaaacctgaaaaacgcttttgagtaggaggaactttcacagaataagaggtttgaagttagttaactgtattgagttacaaagccaccattgcttatttcttggtatagttgttccttaatcaaatttcttaatcagatataaccaacagatgaattataaagcagaatttggaatatctgtaactttagagtacctcttttgtctgccttcactacatatatactgtctcttattagatttgaacctttttgcttcaaagtagattctgtgtgttggctagaaagcataaatatcctttagggaagaatacttaaaaaaccagtatcttgtgtagtgttcttgagtaaattcagtgccatagtatatttgttgtcagatttgggagtgagataggtggcaactaaatatatatacagggagcataatacattcaaggagtatacaacttttacattcctatagcacgttagggtttattcaaagtgaggtccttcatttgaccctcagaacagtcatgtgaaataggcagcacaggcatcattacaaatgtgactttacaaatgtgagaaggctgaggctcagagaagtgaaatgatttggctaaggtcaaaagcaagtcacagtgaatgcctggtctggagtccggtgtgttttcatctcagcatgcaaatttaaacccaaagaaagttaggtgcttaaatgctctagggtagctgggctttacgtggctacttaccatagtgtttatttgaatgttagagaaatagcttcaagcaac

SEQ ID NO: 24954 - DNA, 1029 bp, Homo sapiens
ttgtggtaaatcttagtaacaacaacaaacagtagcactaaaatgtatgtagatgcattaggctaagtattttatgtgtatcactctatttaatctttacaacaacccatgagcaatactattattattgatacagcactttatagaccagggaactgaagtacagagggctaaacttgtttaatgaagcgctcacagggtcgagaccggctccagttcactgttgagcactgtgcaggcctgcctgtcagcacagggagagcaacagttgaatttagcatccttcttatctgggggggtcatgagtaggaacgtattcattatattctgaggacttaagtggttgactgaaaacccagagcatttcaggtattacatctagagtttttaacgttacatttagatattacatttagggtttccataatatttgagaataatctagaactgatcatagaataaagtgaaaggaatgcaaatttctagctgattccctacccatttgttgaataaattcgggcaatcaaacaatctgaaatgtagcataatattatggctttggtttttaagatggaaaaagtgatttataaatgaacagattaagaatcagttttttacttttcctgatgggcttttgtggacactgttgtagttctcaataatcttgaatttatgaatgtgccggctaggaaattatcaacaccacatgctgtttcccacactgaaaacttttaagtattgagaaaaaaaatctgtatttatatgggtgataaagtgaaaaatataaaataaaattttcagagttgtgagggatttgtttatgtgctatagaagtatattggagaagttttaaaaactggttggttaaaaaaaatcagttagcttgaattttgagtggggtgtttcagttctagctagtggattgcttaatcatcaacattcagcttctgagaagaaatttcttcccaagtgaatacagtagactcttggctttcccagatttaacattttcagtttctattatttggg

SEQ ID NO: 24955 - DNA, 1052 bp, Homo sapiens
cccggccaaagaactttatttctaattcactcttgctccttataggcacaaccacacttcagacctgcttgacatttgaaactgccccttatctgaaatgatcttctcggatgatacccagttatagttctgcctctttgcaatcttctcttgggctgaatcttggctttattctcagtgtaacagcttcttgcctcatccattgccttgacatgccacactggcctcacctgcctctctactcatgtggaccgtttggtctgccatttgagctcagtttttgatagttccatggacttcaggctctgatcctattttacttgctctgcaaatctccaattctaggtatcaccatctgatttctctccgcctcctcttgtattactgagtacaaaaaaaggacatgaatcttgatttttgttaacaataaggaaaatctgctataacgttttagcatgtaactcacagtcagtcccatgattggttaatttagcgatccaataacatcatcaaagaccttggatcttcccatttccccccgccccctcacctaaccccctgttgtcctattaggacagcttcagtctctagctagccaccagctgctgcatttccaggggccgtgcagagaccagactcagcagaaaaattggtttgattggttttaccacaaatatcaacccacaattagaacctcttctggcttcattgcagtctcattacaaatttgctcctacttgtgtttctcactggaactattctgagctttttccaattccaatcttatcaagccccacctacttgtttctttttttgtttcaaaagtgtcttccatatctgttcctattgcccctaccctaacttgcacccaacaattgtttaccttgcccccatccattcattcccctgtccctttcctgccaggttactgttcctgaagctggcgctgagtgtggcacttttttgttcactctgcctctagtgggtccctgaagttcagatggcttattgtagcatttgggatccattaagacctggccctggactacatt

SEQ ID NO: 24956 - DNA, 1042 bp, Homo sapiens
atgtggtctcattgtttagttcccacttataagtgagaatatatagtatttggttttctgtttctgcattagtttgcttaggataaagccctccagctccatccatgttgctgcaaaggacatgatcttattcttttttatggctgtgtagtattctgtggtgtatatgtaccacattatctttatccagtccactattgacggacatgtaggttgattccatgctttgctattgtgaatagtgctgtgacaaacagacatgtccatgtgtctttatggtagaaggaattatattcctttgtgtatatacccactaatgggattgctggggtcaaatggtaattctgttttaagttctttgagaaattgtcacactgctttccacatggctgaatgaatttacattcccaccagcattgtataaacattcgcttttctccacaaccttgccagcatgtgttattttctgacttttagctattctgactgtgagatggtatctcactgtggttttgatttggatttctctaaggattagtgatgttgaacacctttttatatgcttgttggccgcgtatatgtcttcttttgaaaagtgtctgttcacgtcctttgcctgctttctaatggggtgtttatttttttgcttgttaagttccttataaattctgaatgttagacctttgttggatgcatagtttgcaaatatcttctcccattctgtaggttgtctgtttgctgtcttgatagtttcttttgctgtgcagaagttctttaattagatcccactgtcaatttttgtttttattgtaattgcttttggtgtctttgtcatgaaatctttattaggtcctatgtccagaatggtatttcctaggttaacttccagagattttatagttttaggttttacatttaagtctttaatccatgttgagtgatttttgtatatggtacaaggaagaggtccaatttcaatcttctgcacatgactagctagttattccagcaccacttattgaatagggagtcctttctctat

SEQ ID NO: 24957 - DNA, 1039 bp, Homo sapiens
acctgtatctgtagtttttttcattgttcttttttgttgagacagggtctagctctgtcaactaggctgaaatgcagtggcgtgaacatggctcactgcagcctcaacctcccaggctcaagcgatcctcctaccttagcctctcaagtagctgggacttacaggcatgcacaatcacacctggctaatttttaaaatttttcgtagaaacgagggtctcattaggttgcctaggctggtctcaaaccccgggggttaagtgatcctcctgccttggcctcccaaagagctgggattgcaggcgtgagccactgtgcccagccagtagtctgttccttttatttacagagtagtattctatgtatggatatatactttgtttatccattcagcagttcataaacatttgagttatttccagttttaactctttaaaagttttgctttcctaaaggttaggatctatagacgatcatgccctaagtggtgtctcctggtcatgtaccttggagcttcctgtgctttatcaggcagctctcttaggctggaccctgttctggtcattctagcctgcttacttcagatgtgcactttatgtttataataaacagaaatttatttagctcatgattctggaggttaggaggggcctacatctggtgagggccttcttgccctgtcatctcatggtggaaggcagaagggcaagagagcactagggagtggaggaggggaaggagaggccaaattcatccttttatcaagaaccattaatccattcatgagggcagagcccttgtgacctaatcacctcttaaagatcccacctctaatcatagttgctttagggattaagtttacaaaacatgaactttggcggacacattcaaaccgtagcagaagttcactctgctctaagggcagaacacttagtttgaatctatcatttgtctaccaactcttagagacacatgtcaagatttcctaaaaatccattgttcgttacttcaatagcagtttggagtgggtctctgagttt

SEQ ID NO: 24958 - DNA, 1051 bp, Homo sapiens
tttctcttttttttgaggcaaggtctaactctattgtcaaggctgcagtgcagtggcaaaatctcagctcacagcaacctccacctcctgggctcaagccatcttcccacttcagcctcccgagtagctgggactacaggggcacaccaccacaccctgccaatttttgttgttgttgttttttgtagagacaggatttcacatgttgctcacgctggtctcaaactcaagcggtttgcctgcctctgccgcccaaagtgctgagattataggcgtgaaccgccgcccccagcctcaggctttttttaaaaatacaaatggttgcatagtgtactggattttttagtccttattttacaacccataggagtactcatagagctgcctcattcttttgaagcagaaataaatatccttatacatatttatttatgcatatatgtaagtatatcaatgagataaatttctcgaagaattactaagtcaaaaggaaggtgtatttaaaactgatagatactgtatatcaccattagaaataaggaaaactcacaccatttatcttatttttctctcaccttctatatccaatccatttgcaaatcctgttgactctaactccaaaataaattcaggacttgaccacttctactctgattcaacccaccttctcttatcaggattatatttcagtagccttttaacggtctccttgcatcagctattgccccttcattattaggagccagagtaatattttcaaagcatatatcagcccttggctccagatcctttcagagcaaaagccgaagtctttgtggtgtcttaaaaagcctgatcagcacctctccttttccccaaaccatctctctgcccccctttgtgatcacatttgctactgttgactcctctggagccacactgacctcattgctgtgtctgggttatgtccggcaagctcccacctcagggcgttttgcagttacagttccttctgcctgaaatacccacgtggttcactctctgagttccttcaggtcctttcaaactatca

SEQ ID NO: 24959 - DNA, 1009 bp, Homo sapiens
tacattttatatagagactgtcttttcagactctcttgaatctgctctttcctccctgtatcataaccttcattactgccgtggttcgggccctcatcccttctcttgaggattattgcagtagcctcgcaactggtctctctggcttctgcctggcctgtctccaatttgttcctcatactgctgcctttctaaaaggcaaatctgattacaactctccactgcttaaaatccttcagaggagtttctgcatcttcaggttaaaatgtaagctccctggcatggcacgaaagcttctttgtgatctgggccttcccttcaggtgtgtgtcagtctcctctaatgatcctggtccccactgtctgcccctgcccgtagcatctccactaaaggaaagaaatgataggagggatgggaatagaggcgagatgatagacctgctgttcagtactgtagccactagctacatgtggctgttgggcactggaaatacagctagtccaagttgagatgtgcgtaagtgtaaaatacaccatgctttgagactatataaaaaaatgtaaaatttcttatttaacaaattgtaatattggttacatgttgaaacagcaatagttttgatatagtaggttaaacaaaatatattactaaaattaatttcacatatttctttttatttttaaaaatgtgattacttagtggacgttaccatgcgacataaagaaataataaaataaaatgtgattactagaaaattaaacatcacctgtgtgctcacattatagttctgttggacagcattgttagggaacatctcattcccaggagatgcatcctgtacgagccaagcccacgagctttttgaatgattaagtcagccctattggcatagagaagtagcagttgctcagttttttcagtccagaggtatgaaatgtttggataagattcagaattggagagacagcttctgaacgctatagccaggagttacatgtacaatgggcat

SEQ ID NO: 24960 - DNA, 1084 bp, Homo sapiens
tcgtatttccttagcagggctgcagtcaggcccctagcttcgggccgccaccctctcctctctggagtcaccccacctctcccatcaggtgacagtatgagttggaaaagggacgggtgtagccacaccaggacaacttgtggtcagaaggtcaggtttcaagggccggctccgttactggctggatgcatgttggtaacctcataatccttagattctcacctgtaaaatgaggacagtgggaaagctaccacatgagctatgagagcatctatttatattcttttatagcacttttatagcacttgctgtgtgccaggcactgttgtaatcactttacaaacatgaactcatttcatccttcttaccacgctatgccgtagttactattattatccctattttactgatgaggaaacacggcctagatcaaagtacttgcccaaatcccaaaactagtaagaggtagagctgggattcaatcttggtgaatcgtaattgcttgttttcggtcataagaacataaggaagaatctgtattgcagaaaataggcagtgtttactctgcgagattacttaagggcccaagatcctgtgcttggtgacagaggcacagggctggtggtagcagctttctaggccaactgcttgtgtgtggtcagctagatgggctctgatggtggggcctgatctgagagggaagtgagcctttctaagaacatgtagaatgtatgtgttagatttctaaaactcaaaccagtgaacaggtaacatatataggactaatgtgtgtgtagatggagcaggtctgacaggtaagaaaaccctctccactctgccccaaatgtactctatcacatgcttctcaccctggctttttgccgttaaactgaataaagatcaggcaagaacttcacttccttgtgtgagcacatgccccttaataaaatgtatacccctagacatggtttttacattttccatttaatgcaaaattagctaacagatgttttcaattaggtgtagaaccaggaactggtttcagggtgcagtgtaagaatgtgtactaattgattgatatgcc

SEQ ID NO: 24961 - DNA, 1102 bp, Homo sapiens
gttggttttcatttccatgtatttctagaattcattcattgctgtctcttcccctgccttcccaccaaaactaccatcctcacttgcctgcactgcagcaatagtccactcattaatctcctagcacttacccttgttcctttgtaaatcattctctatcctgtaatcttttcaaaacacaaatctgacctcttacgataaagacaagaagacttaccctgtcctgcaagcccagcatagtctggcccctgtgtcccactccaccctccttgcatggcacattcgttcttgccctctctactttagctatgctggtctctgtttgggccctcatactggccatgtgtatcagtcaagatcaagtcaggagataagaaccatactggttatttgaataggagaaatgtaatgtaaagcattgttaattaaaacagtaggaggttactaactactagaaggggtaaaagaggaccataaggtgtccacatttagcatgagagcagttactatatctgtactgaagaaaatgagacaataaaggaactaaggcctaggggaggcccccaagccaagactgagattctgacctgatcgaagaaggtgtgtggctaccagaggaacgtgcagccttgtggtggtgaagaaacttgtcaaagggcacagactgagctcttctgttaagaggctgccattgccagagggtgtagatggattggagctgctcaaagccactgacagtggcgggaggtggggaatggcacgaggatgtaggttggagctcctctgaatggctgctgggttcctgtgaataataataattaataataatagagatccagaaccccaaagagagatatactcctgttcttatggccttgcagggtcactttattgccatctgctgacatcaaaagttaacattctactagctggcaaaagagaattgcttacagggtccagctccagtatcacaaagtagggcaagaagagtagatctggagccaagagacactataacttgataactggcacacaatgctttctcccctacaaatgtagtcactgcttggagtacaatttcccactcttttcaactagttat

SEQ ID NO: 24962 - DNA, 1052 bp, Homo sapiens
gacaaattctttaaaaacacaacttaccaaaacagacaagaagaaatagaaaatctgaataacactatgcttaccaaggaaattcataattaaaatttccaggcccagatgacttccttagtgaattcccatgaacatttgaggaataaatgtaattgcaatcttaaacagtttcagaaaatagaaagaaggaatacttcctaactcattttatgaggccagcataactcgtatcaaaacctgacaaagtcattacaagaaaagaaaattacagaacaatattgttaatgaataaagaagcaaaaatcctcaacaaaacattaacaagtgaagtaaacaatatataaaaggataatactgcatgaccaagtgggtgtggttaataatttcaggaactcaacatcagtttaacatttaaaaaaatcaacataatattattaataaaataaaggagaacaataatatgatcatctcagtgtgtaaaataaaaaattcacttgacaaaaactgtcagcaaagaaggaatacaagagaatttttagagtctaataaatacatggaaactctacagctgtgtaatacttgataaaatactgaatgcagtttccctaagacccagaacaatgcagggatgctcattctgctttgtagctaggattaataagacaaggaacgattggaaaagaagaagttagacttcattaccactgtcatcattgtgtttgtagaaagaaaatcttaagaaatctacaaaaaaaaataaagctgccagaactaataaggacattagccaggtcgctagatataagttcaatatattaaaaagcatttgtattcctgacattttggaattgaaatttttaaaaatgctataaacaataacataaaaattctaaaacacctaggaataaatttgactgtagatgcacaagactctaagaactataaaatgatgctaaagcaaattagaattgaaataaatggcatagtatgtcatgtcgagggtcaaaagactcagtattgttaagataccgcatatccccaaattgctt

SEQ ID NO: 24963 - DNA, 1055 bp, Homo sapiens
atgaaaggggggagagaagtgaatgggatgaactaatttgcatagactaattagagcccacccctggagcctgggtgtggccatcttcccagagttcctgagctagatggagaaggggtacttctcagaaagggaaaatggatacccaatggcccaaacccaaaatagccccagttcccctaactttgactacagggcagtccagtttgggtgccgcttccgttgcactcacatgtcctacatatctgttgactactcacaagtgcaaatgcttattctcaactcaacattaacattttttctggcaacccaggttcactggttctcttccacagagcggccctgagcagctgagcctgcaagccacgcaagcatctgtttcttcttttgccaagtacaggaggatgtttgctctctctgtagagagctttctgaggtctctgggtgtacccagagatttaatagaaattcttaacgttaagtcacattccaggaaggaaggaagagttgttcgttcaaataagaaagataaatgttcggcactgtaggccctgtttaccccatctgaggccctgaattcatatattacaagacggaaggattttgcacagttttttatgtagcaagattttgctcaccactgaaaaatgtcagtgtaaatgtgaccgctttaaagatgagtcaagtaattcttggaacagggaaaaaaatgaatttgccaggtcaggagttcacctgcctttgtcagagttgaacccaaccactcttgacctcgactcactcccttagggttaagaaagcccaaacacattcctgagcacagagcaaacactcccatgtcactgaaaagaaacaaaagaatgctaaaaagtgctcagacctgatcacattttttccaatattttttcctttttttttttttttttgagacagggtcttgctctatcacctaggctggagtgcatgtttttgagacagggtcttgctctatcacctaggctggagtgcatgatcatggctcactatagccttgaactcctgggctcaagccatcc

SEQ ID NO: 24964 - DNA, 1034 bp, Homo sapiens
tgaagaatgcctggcatatgctccaaacagctagattttggtggccagtatggcctgaggggaatgcgatagagggagaggaggaggagttcaaattagagaagtgtagagctagtggagagaccgtactaaggactttggagagaagtgggaaccatgggagagttttagattgtatagattagttcactgtagggacagcagcagtggaaatagggagtcaaagcctgttgcagaaactcaagtgagacatggtagtgcctctgactaggttggcagcaatggacatactgagaattggtcagattctaaatatattgtgaaggtaagttgagatatgagagagatttttggcctgagcaactggaaggatgaaattaccatgaactgaaatagaaaatgctctgagtgaagcaggtttggacaagttaaatttgatgcatctactttagttattaaagtggaattgtggagtagacagctggatacatgaatccagtgttcaggaaagagatccaaactgaggacataaattatggagttcttggcatctggctggtattttaagtgatgagactgtatgaaatcaccaaagaagggagtgtagataaagagaggaagttcaaggaaagaccccgttagaggttggaagaacctgtaaaagagacagaggaggaacaggtaggtaggtaggtaggaaaaaaacataggcgtttgatgttctggaagccaaggaaatacaatttttgaggaaggagaaattaaccacattaaaatgctgctgatagatcaagttagatgaagactgagaattgactattagatttagcagcacagaagtcatcagagatcttggaaaaaagcagttttggtggaatagtctaagtgaaagcctgattgaagtaggtttatgagaaagttggaaactgagtatagacaatgttttcaaggagatttgctgtaaagatctgcagagaattggagtggtagtctgagtatgaagtgggaacaaaagagggttctttaaggtgagg

SEQ ID NO: 24965 - DNA, 1049 bp, Homo sapiens
ttatcttcctgtttccataataggccataaatctaatagacaaatttaagatttcctatttctccaacccccttccccaccttggattgggtatatctcttctgtacttcctttaaactctgtgtatatctctaaggttatacttcttacattgtatgaaaacactgtctgtacccgcattgtaccatgcattccatgagggcagagaccatatcctgtcatctttcccctgcacctggtacatagatgattaatgtaggcttaaatgaaaaaaataatcatttacctttttggattataccttaagccacttttgattacattcatactttcagattttatgtaaagtttagcaaatacttaatgcacaaagtatattaagtcatgattgttactttttaaaatgtatttatcagttatactttttcttttattaatcaatactatgatttttttttctttcacttcagtgatggagtgcccagtgatggaaactggctcactttttacctcaggaattaagagacatttgaaagacaaaagaatttcaaagactactaagttgaatgtttctcttgcttcaaaaataaaaacaaaaatactaagtaagtgccatcagttttaaaatacactcacgttttaacttttccccagaattgttatatatttgctaccttattttatcaagtacagaaaattactaaaatgaccattttgttaactgataactttttaaatttgatccttcctatctccttcaactcctgttagttgggtggttttgatgatttaccctaagtgtgacacagttgaattttcagcagtgaggctgcagtgacccaagacagctactttctacagcgcagaaaaaaactaccaacatgacttttctggaacagatgtagtaagagtagcaggttgttctggcatgttgtggcaactggatgatgggtagccttgaggaggtgggctcacactgggtgcttatatatacgtgtgtatatatataatgtatatgtgtgtgtgtgtgtgtgtgtgtgtgtgtatac

SEQ ID NO: 24966 - DNA, 1066 bp, Homo sapiens
tagcttgttaaactgtggtatgattagaatgttggtggttgtgtagtgcatttggggtgctacaacgttaatcaaatataattgagctgttctgtttccagtcagtgtaaccatttaaaaataccttggcaaaacaagctaggagctagttcatgctaatattcttaaggacaaaaatagtttacagcttttttttttttaatctgaaatcctgaaggctatgcttaaaagttagagataaacctgttggaaataagtgattcatttatagactgaagcctctatgacttcaaaaagatactcaacagtctctggcatttgaagaacaaaatattttctctgtaaatacacctcatttccattctagttaggagcaatggcgcccaggacggcacacagaatggagaaaactggatagctggtaactcatttagctcttggcactctaaaaaacctcaaatacagccatccaagccagtaattctattgctgcgttatttctgtgtttaactgtgaaacttgcttcttgtctgtacccttgaaatggaataaaatttcatgagactccttgttaatgtagagaaaagcaatgactgttcagttggttgtacactaaggcctcagtccttgacctttcccattttgctcagtgttttaaatatgatgtaagggcctgtgcttccagatatttttttctccagtctcatttttgcatttgtatggctcatgtacttcaaactgttggtacatgttccaaaaatgccagtgtttaattcaaaagagatgaatgtgatctactccagaatgcttcaagtcctgtccactttaactccaaagtaatctcaaatgccaccgcagttcaggccaccagcatcttacctagttactaagtgatttttgcatccacttttgtgtatctcatcttttaacagcaagagtggtctttggatgtagtttaccagtttaaaatctttgtctttgcctaggtggtctttcatgaactattcagcttcatctgccttttcctcttcgtcactatgtgctgtgtagttggcagagcttgtca

SEQ ID NO: 24967 - DNA, 1062 bp, Homo sapiens
tggggagaaccttaggtaaatatagctccttcatctatccagtatgcctactgttaacattggacaaagatcgaaactcttggttgtattaatatgtgatagagaatgtgttagcagctcataggagataattggtttacgttattgattagggtgggccaggttctgatgtggaatacatctcattgacttaatcaatgagatttatttctctgtcatgctatgtgttcatttcaagttggtcattgtaggaagtctgaccattgtagactggttgctgttgcagagggagggagttttgcagggtcttaaaccatcagtttaaaattccaggaaacatgttaatttctgctcaactcattttccagaattagtcatgttgcccaatacaagcaagggaggcataaagtgcagtcttaccatgtgtcaggaagagagctggaatcatgattgctacaattacaacataaactttgcacttataagactggtaatattttctagtgaggtgctactgagtgatctgatccattgtagtttctaagtcttgtagttttttcttctggcctttcctggtacttttgagaacaaaaagagtgaacagacatttgttcaacaccttcagtgagcctagcactgtactgattgtctgtcctaagtacgtgagctcctgctggcaaaagcagtggggtacagcggttataggtgtggattctgagcttagacaacctggcttcagatttgtctgtcctgtttgctgcatgtctttgacaagtttatgccctctgtgtcacagtagcctcatctgtaaaaactgcattaataaaacctaactcagaaggtggtagtataatccatgtgacatggcacagtgattggctcacattaagtataaagtgctagctgttgttagttttgtggttggtactatttctcccattttataggtgaacaattgtggttcagagagataagtaactttattagttcgttctcacgctgctatgaagaaatacctgagactaggtaatttataaagaaaagaggtttaattgactcaca

SEQ ID NO: 24968 - DNA, 1027 bp, Homo sapiens
cttccagagagtgtcttcgagggtatcatcatttccggtttgttaatcttattcaccaaatgttctatcgctcgtaaggtaaaactgtaatataactaccatattaaataacaaatgttcattataaactctaggaaagattgaataaaatctgtttacttaacattctttggaaggagctcaagtgattctgtccttagtttaattgtagatgggatggatccatttgggtatctctgcccttggttagttaacattatgcttgaaaaacttgggcttgaacacttctaggtagtagcctttttgcagtgataagaagttctgtttgtccttgttcctagttctgcctacattccagtctctcacctaaatttcagaatcagaatgagatttatcaggatgttgttttgaaaatatgtatacacaatcattattcatattactgttactttattgctttttagatgacttacctgtaatttttttttcttccacagtcctttgttcccgatttctgctctgtcacttccctctcctggcaatgaacttggctgccgcaggcagggggcagggccagggaatgaaattccagagcagaaagaacaaagtcagatatctcaaaatatcatcctgccccatttaatctgggccttttatccatgtggatgcccctttctaaacagcacctgcgctgggctgcgaggcccctgcctgcctgctgctggttgggcagggcagatacacctttctccacctgaggactgcgttctcaggtaatctggctaaagcaatattccctccattttaggcattcttagattgcttttatgatttgtgctattttaccataccacatgtaatttttacttcatgcttttgtgtaaagcaactttttctctttttgtttattttttattgtggtaaaattcacataacataaaattcgccattttattttcctgccccccccttccaaaattcaccattttaaagtatacaattccgtagcttttagtacatttacagt

SEQ ID NO: 24969 - DNA, 1074 bp, Homo sapiens
aagtgagaacataatgacatttggttttctattcctgtgttacttcacttagaataatggtctccaaatgcaaactttttttttttcttttttctgagacggatgctctgtcgcccaggctggagtgcagtggcatgatctaggctcactgcaacccctgcctcctgagttcaagcgattctcctgcctcagcttcccgagtagctgggattacaggcgcacaccaccatgtccagctaatttttgtattttagtagagacggagtttcaccaagttggccaggctggtcgcgaactcctgacctcaaatgatccacccgcctcggcctcccaaagtgctgggattgtaggcatgagccaccacacctggccacaaacttttattagcatttattttattctgaatttattcccatgccacaagtttttgtttttgtttcttcagttacttttgagatatctttttcttcaattcaacttcctcttctggttaaagaataatttgttctggccgggtgcggcggctcatgcctgtaatcccaacactttggaaggccgaggcgggcggatcacttgaggccaggaattcgagaccagcctgggcaacatgctgaaagctggtctctactaaaaatacaaaaattagccgggcatggtggcactggcctgtaatcccagctactcggaaggctgaggaaggagaattgcttgaacctgggagtcagaggttgcaatgagccgagatggcgccattgcactccagcctgggtgacagagcaagactctgtctcaaaaaaaaaaaaaaaaaaaaagaatttgttcttttcagtaaggatcatctcgatgtggcaggcagaggtcacgtatgggttaatctgaccatgagctctgtaagtccagcagtgcatcttgggtgctttgttcacctggataggctcaatgatcagagaatctatatccaaaaccttaaattcagcattactctgcatttttaagcatgtgcagcaaaaattcagtactctttttgggccagcaaccctgtatctagccccactgtctggcctgggcacacct

SEQ ID NO: 24970 - DNA, 1067 bp, Homo sapiens
gttggccctaccctgctgaggaagtttatcagggtgggctcccttcctgcacttcctgcgcttggagacattggagagcccacattgaaaatctcttcagttaaccacatttaagtcccttcagtccaaagaggaaatggccactggagtctgctttagttcccacaagctttgggttgctccttcctcctgttcacatgttaatgtctttagaggttcagaggggcatggaagctactgagagactgacttcctggggaaaggaagataacttgtaaccttaagttggtgttttctttttttttttgagacaaagtctcgctctgcagcccaggctggagtgcagtggtgcgatcttggctcactgtaacctctgcttctgggttcaagtgattctcctgccttagcctcctgagtagctgggattacaggcacgcaccactatgtctggctaattattgtatttttactagaaacagggttttgccatgttggccaggctggtcttgaactcttagcctcaagtgatctgccctccttggcctcttaaagtgctgggattataggtgtgagccaccatgcccagccggtgttttttctctcgaccaccagccttttattatgttgataatgtgtatttggagatgataattattatcaagaactatactaaagagagctgaaagcagtgtgggctttggaaagtatatgagatttgaacttggaaagcctgtttttttggtttttgtttttttgtttgtttgtttgtttttgagacagggtcttgctctgtcatccaggctggagtgcagtggcatgatcatagctcattgtagctggaagacctgtttcaagcctcagatctaccaattatgggccaggcaggctgggccaatcactaaccttgttgggcctctgttttcctacttgtaaagcgaaaaataataatacctgactttacaaggttgttgtgagcatcagttgtaataatttactatgtgaagtactttttaaactgtgaagcactctacagatagaagggattattatcattgttattattatta

SEQ ID NO: 24971 - DNA, 1028 bp, Homo sapiens
atttaggattcagatccaggttttctgagctttctctgctattgtctgtctaatataaattatattgtcattcttagttaaaaaacctgccatatttttactattgtgtttctattttgtaaatgaagcatattcattgctatgtagcctgttgtgagcccatatgctttgcatattagtttctccttaaactttctatatttaatatgtgaccctaaggccgggtgcagtggctcacacctgtaatctcagcacgttgggaggccgaggcaggtggatcacctgaggtcgagagtttgagaccaacatggagaaaccctgtctctactaaaaatacaaaattttccaggtgtggtggtgcatgcctgtaatcccagctacttgcgaggctgaggcaggagaatcacttgaacctgagaggcggaggttgtcgtgagccgagattgtgccattgcactccagtttgggcaacaagagtggaactccgtctcaaaaaaagaaaaaaaaaagtgaccctgattattcattcattcatttagtaagcaggcactatggcatatgaatgcagtgactttcttaaaaggtttaggagccgaatacctagaagttaattcatatgaggctgcagaagtgcttcaaaaattactgtatgattaaatgccacaggataccacaagatattatagaattaaaaaattatggctgggcatggtggctcacacctgtaatcccagcactttgggaggccgaggcaggtggatcatgaggtcaggagttcaagaccagcctggccaagatggtgaaaccctgtctctactaaaactacaaaaattaaccaggcgcagtggcaggcgcctataatcccagctactctggaggccgaggcaggagaatcacttgaacccaggcggcagaggttgcaggcgccactgcaccccaccctgggtgacagagtgagactctgtctcaaaaaaaaaaaagaatttaaaaattatttggctacaatacaatgcttttaaaatccatct

SEQ ID NO: 24972 - DNA, 1073 bp, Homo sapiens
ttcctttttatctttagagtttagcagactctcttctacctatcttcccttctctcctcaaaaaaccagacttttatccaaaaagcatgcaagtcccccaagtatttaaagctttatttctttgtttgtccagtaaatgttcgttgagggcctactatgtgcaaagcaccatgcttggccctgtgtgaagcaaatattaaggcaatgaggtggagtctgatctcagagctgtgttgtgcatgaaataaggttattctttggtagttctttcttgagaagaattcttatggagttcagtaacctcttcttgaggcagaagtaaatgctcagggatttgggaactaattatctcagtttggtagaattgaaaaataagtctttggtgttgtgtcatctgtgtcagtgacagcaaagctggacctgtgctaggccctggtgggtcatctttaagcactggacttttatcttgttaggaatatagaagcaagcgtctcacatctctgacagatgggctttacggcttggcctaaagctctggttgtttttaaggcccttgaataaaaataaaagacgatgtttgcagattttaagaggaagttttttttttttttgagacagagtctcgctctgtcacccaggctactggagtgcaatggcgttatcttggctcactgcaacctctgtctcccgggttcaagcgattctccgcctcagcctcctgagtagctgggattacaggcacccgccatcatgcccggctaatttttgtatttttgtagagatggggtttcaccatgttggccaggctagtcttgaactcctgacctcaggtgatccgcccgcctcggcctcccaaagtgctgggatcacggggatgagccatcgcacctggccaagaggaagtattttttttttctatcctgctctttctgaaaagcttgaacatttttctgtactttccttttcttttttgagacagggtcttgctctatcacccagaatggagcacaggggtacaatcatggctcactgcagccttcacctcccgggctcaagcaatcctctcacctcac

SEQ ID NO: 24973 - DNA, 1050 bp, Homo sapiens
ttttgagaaatgtttatttctagatcttttgcccatttttaaatcagattgttagattttttaaattggattgtttgagctccttatatattctggttattaatcccttatcagatgggtaatttgcaaatattttctcccattctgtgggttgtctcttcactttgttttttcttttgctgtgcagaagctttttaacttgctgtgatctcatttgtccatttttgcttgattgcctctacttttggggtataactcaattaatctttgcccagaccaatttcctggacagcttcctccatcttttcttgtagtgatttcatagtttgaggtcttagatttaagtctttaatccatttcaattttattttttaatatagcaagagataggggtctactttcattcttctgcatacgaatatccagttttcccagcaccacttattgaagagactatcctttccccagtgtatgttcttggcttctttgtcaaaaatgagttcactgtagtatggatttatttctgagttctctgttctgttccattggtctgtgtgtctgtttgtatacaagtaccatgctgttttggttataatagctctgtagtataatttgaagtgaggtaatgtgattcctccagttttgttctttttgcttaggattatataatgaccttccatgtctctttttataagtttttccttgaaatttattttgcctgatatatgtgtatatcgattcctgttctttttcggtttccatttatatggaatatttttcttccactatttattttcagtctatgagtgtctttataggtgaagtgtggttcttgtaggcaacagataattgaatctttttttaatcgattcagctactctatgtctattcattggagagtttaatccattgacattcagtgttatgattgataaggacttaactgctggcttttgttatttgttttgtattctcttccttccttcctgtcttcttcttttttgtgaagtttattttctctggcagtatgttttagtttcttgtttttta

SEQ ID NO: 24974 - DNA, 1020 bp, Homo sapiens
attttttatttgtggtgtccccaggtgctcacgtagtacttagcacaaagtagtgttcaataattgtgttgaataaatagtgaatggattctagagctttgatttttaggacagcttttgtgaattgcttctggatttaagaaaaaaaaaaatatatatatatacacacagaatgtatttttattcaataatattgacaaatcattaattctcttccctaatctctaaagtgtcattacaaaaaattgtttaaagattcttgaaagaaaatcatgtttgtgtgggaaagtgttgtttgggttagactccaaaaagtaacaggtatgtttgtgtttatggttgaaaagaacattaaaatacagctggaagcaaaatcactttcaatgttcatctaaggattttaggggtttctttcaggttcagcaagtcaactcttgaggacctattttcctgaaggaatgagtgaaactttaataagaaacattctctttggagccgtgagagggttgaactatctgcaccaaaatggctgtattcacaggtatttacttatttgtatttattaaatgaaataattttaatggaagaactctttgaaggaggttttaggaaggagcagttgaatattagaaaaaagggataggaaacttgtaagtgaaaattgagggaggaagggaccattaggtgcagtggattgcttacattttatgtccattcgccaaacatgttcagaccacatcctctgtgccaagcagttattgggattggggtggagtgcctgccctcatggagctcacagtctcaatctaatgaggatgttcaggagatgagctgtaggaaatgggatcctagttagctgggtgtttttcgttttgtttttgtttaagcaaatgaagagcttcattatctgctttccatcttatgcataaattggaattaaacttttctttgatttcttattttgcagtaccttgagattatcatcctaaatatcacttctcttgttaccaaagtgtatat

SEQ ID NO: 24975 - DNA, 1032 bp, Homo sapiens
aatacatagggagctggggactctttttcttattttctttagcatccaatacttttgcttacagctatccatagggatctggcatcttgaaccaccaggattatggaagccctacagcaagctaaagactaactgtaaagtcctttcagctgctttgtgaatggttatatctattgctaaaaggccttaatatcatttgcaaatagtttatgatttctaactatttttctagagtttaacacgtgagaaaaatgctactctctggtcacaggacttagaatagtgcctatttccattggtctgagatagagaaaaaagaacaagtttcttgtggagccgtggtccagtctgcaaattgctcctatctccagttgccatggtttccaggagaacgtggctctcatcttttcctgccctgcctgtacttctccctgtccactctgttctctattttccctcagcttcctaactgagaatgccagcagaagtttagagtcacagatggattgtaggaaacaatttggatgatgccaatacaaagctactgtggtgggcatatgctgctcccccaaacttcagacatttgggtttcaggttggtccaggcaatcaacagtgatccttaatacaaaatgtcttggtgagagcaataatcaagaaacttggccaaagtgcttccctgccagattgtgtgcttaataagataactgggttccggccgggcgcggtggctcacgcctgtaatcccagcactttgggaggccgaggcgggtggatcatgaggtcaggagatcgagaccatcctggctaacaaggtgaaaccccgtctctactaaaaatacaaaaaaaaattagccgggcgcggtggcgggcgcctgtagtcccagctactcgggaggctgaggcaggagaatggcgtgaacccgggaagcggagcttgcagtgagccgagattgcgccactgcagtccgcagtccgacctgggcgacagagcgagactccgtctcaaaaaaaaaaaaaaaagataactggg

SEQ ID NO: 24976 - DNA, 1055 bp, Homo sapiens
gtgttttggtattctaatgtaacttatgtagattggtaatccttaaatgctttgggttcaggtgctagggaaagtcagtggatacttcgagattagaagccttgcttgtggagtgttctcagctgaaggcttccctctaccttctaggtaaaccaagcagaggtcaagcagctcccaaggtggcaatgactcagcagctccggcagcaatagactccatgcctgaccctgggatggcctctgaagccactgaagctattctttcctcttgagaagaggctaactttggaatcagattagacagggaagccttcactagccagaaactttgatatgaaagagtccctcgggaatggaaaaggcactttaatacatccaattctgagccttactagaattttttttctttccattcacctctcttctttaattccggtgcctatttcctggctttttctagtacagtggcttcattccctggcagccgtggggactcaggagcagactgggtgctgctgtttctcttgccccgcttggcctcaaagtttctgtagttctaaagtacaacagaaacagttctgtttttgttttaattaacaggctcacacacatggctcgtgtgtttttcaaacgcatgaaatgaaaaccagtgacagttctcgcaggagcaggaagccgcatgtatacagttcgtgcaaagcagcttttctttaagatcctcccgggttttgagcatcacaatgggtatgtgaggtcatcttaacctgtgaagattttggcatcaaggaagggaaaacagtgattgtaagtctctgaaggtttacccagtttttgttcataaaatgacaccttttaggttaaagcatgcctctcttaacaccacactaataccgcctgttaagaatgtttgcttttagagtaggtggaaggctcccaacggggttttttccttgcaaattaactgctgaaggcacttagacccttctacagggaaagcccagtggctgctcctctgagtgtgtccccttcgtttcatcagcactgccttgtctttca

SEQ ID NO: 24977 - DNA, 1017 bp, Homo sapiens
cacgtggccccgccgtttggggagacccgttctgcattagaggattttatttcctcccgttgaaggggtgggcaggaggcgtgttagaatttaacagattatagggaattcggactttattctagatgttttgaggaatgatcgaaagattttttttttttttgagatggagtttcgctcttgttgcccatgctggagtgcagtggcgcaatcttggctcactgcaacctccgtctcccgggttcaagcgattctcctgccttggcctcccgagtagctgggattacaggcctccatccaccaccacgcctggctagttgtttttgtttgtttgtttgcttttagtagagacggggtttcaccatgttggccaggctggtcttgaactcctgacctcaagcgatccacctgcctcggcctcccaaagtgctgggattacaggcgtgagccaccgtgctcggccaatcgaaaggatttaagcagaggaatgacctgctaatttgtcttaatacggttactctgctgtgtggagattagactcgaggagataagaacggcagcaagaatacttttgcattcatttggacaagatgaaattgcctggtatggagagaaacaaatatcgatagaaattgtgaaggtagaacaggaaggactggctaatagattgaatgtggggttttggtttaaataagatgttaagaaagtttcttggggaaggactaaagatttccggtttgggctgtgcgaagcttgcgttgtctattagacctgataatgcagttgtgtagatcgggcagttcagtatttcagatttgaagcttaggggaaaacatctgggctggtgatgtcagtttgaggtttggttgttttcgtggggaaagtttgacaagttcgtcagcactgaaatggttgaatggtaagacattcgtatcgcaagatgctgttgagatgttaggaagaatgagtgagattgagtgccttttcttgtgcggtgcaactcttctgaggtctgtg

SEQ ID NO: 24978 - DNA, 1219 bp, Homo sapiens
gtgcagtggtgcacacctgtaatcccagctactcaggaggccgaggcactagaatctcataaacccaggaggtgaaggttgcagtgagccaggattgctccactgcactccaggctgggctacagagcgagactccatctcaaaaaaataaaaagaaaggttccctgccctaccccctaggaccccatagctccagctacggcccaaggctggggcaggaatatctcttgaggccaggtagattctagactgaatagccactgtactacagctgactggactagatctgaattccatttagctgttaaatgggcaattcgaactagtaatttgaccaaaattacatgcagggtaagaaaactagttcattatcttagtgaaagaaatagcttctacaccttcattttacatgtaaaattgtatttgaagaatgcagctgtatatgcctcacctgtaccatttaaataaaactatttaaacattttattacaggttctaaatgagaagaaacttcaagaggttgatagtttatggaaagaatttgaaactccagagaaagcaaacaaaatgtaagtactcttgaaatcaataatttagcagttaacatttagggcttgttttattttttacatttttccctgatttatataatgttacattcgtagttttctgttttgaaatctgtttcaggaataattttggtatgaacctaattattacaaatgttttacttggaatataggccatctcaattaatttgaaggcagtagtctcccccttacccacagggattatgttccagaagaccctgtggatactttaaacctcggatagtaccaaatgtgattgctgtcagtaggaacacatttgtcttcgtgtcttccacacacaaatgtaataccttttttatcttaactaagcacttaccgcacacaggggttgtaacctgctttttgagttttgcaacatcaaaactagcatgaactactttttctttcatcacaatttcatggaagattcattcttagtgtagatgttaaatctttggtttttttgtttgttttttgagacagagtcttgttctgtcacctaggctggagtacaatggcgcaatctctgctcactgcaacctccgcctcctgggttcaagctattcttctgcctcagtcccccaagtagttgggattacaggtgcccaccaccatgcccagctaatttt

SEQ ID NO: 24979 - DNA, 1035 bp, Homo sapiens
ttcgtatttgtatgtatatttaagggaccacactagtatgttcccttaccagataagaaaaccttgcttaagatgacactgttgcctggtgtggtggctcatgtctgtaatcctagtactttgggataccaaggtgggtggatcatttgaggtcaggagctcgagaccagcctggccaacatggtgaaaccccctctctcctaaaaacacaaaattagccgggcgtggtggcacatgcctgtaatcccagctactgggaggaagctgaggcaggaaaatcccttgagcctgggaggcggaagttgcagtgagccgagattgcgccactgcactccagtctgggtgtcagagtgagaccctgtctccaaaaaaaaaaaaaaagatgacactgttttaggcaactagaagactagttttccttcttaaagggttatatgctttgttgggttaatctgattcgttgttgtcaatgatgtattcttcttggaactgaatctaagtgatctgactcaatattcgtcactaccactgagacaacgatgaatcaactatatgtttctttctggataaaatactaccctgaggctgggcgtgatggctcacacctgtaatcccagcattttgggaggccaaggcaggcggatcagttgagcccaggagttcaagaccagcctgggcaatataggaaaaccccatctctaccaaaaacaaaaattagctgggtgtggtggtgcacacctatagtcctagctgcttgggagactgaggctggaagatcctttgagctcgggaagtcagggctgcagtgagctgtgattgcaccactgcattccagcctgggtgacagagtgaagtgagaccctgtctcaaaaacataaagggggccgggcacggtggctcacgcttgtaatcccagcactttgggaggtcgaggtgggtggatcacaaggtcaggagtttgagaccagcctggccaatatggtgaaacctcttctctactaaaaaatacaaaaaaattagccagccatgggggct

SEQ ID NO: 24980 - DNA, 1050 bp, Homo sapiens
gtataataaagtcatctctgtacagctttatgcaacaggggtttgtattaaagcttcaacatctttactcttggccaaaatttcctccaaagcctacaactttcttttaataatccaagcattactagcctaacatttagaaaaactagtaattgtatgaagaatatctaacttcacaccctgatacacaatggtaggcatgttttattggtgtgtgctttggaaacagtcaagcacttctttccaagttatgtggcttttgaatcaacgcactgcccccaataacatgtttatctcttttttttttaattctagagtaaagctaaaacattttgagaaatttcaggatacagcagaagcattagcaggtaaagtaaaaaattagaagcttgcttttttgaaaaaattaagtcttagccgtttgtttttcttgtttaaaaggttgtttgcttcagttgcctgtgttaaccttattcaatgttgtcaatgatgcattcttattggaactgaatttaagtgatctgactcattcgtcactaccactgagacaacattgagttagcttttttcaccatagggctggttttccccatgtgtgaggagaggtgagaagtggttaagttgatctccctgtggaaaccagcaacataatgctgaagcacaattcagtaaaaggtgttctacaagggaccaaggtaatgtggtcaagtatacagctctctcctcattttaatccaagggtagagttgtaatcctgagaacagccaggattcacagttgaaaaataatttaaaaagctcttctgggggtatagatttttagttcaaaaaaacatatcaatattcagagttatacagaaactgacagaggtgttatttttaaaagattcagaagaatggatgactcatactcttcaactagatttcatcacgggacaacagagtgatcgggtttatttactgtaattgactgcagtaggtcttacagttttgtttttttaagtgttagggaaaacaggaagagcagatataaagcccaaatcattaaatt

SEQ ID NO: 24981 - DNA, 1066 bp, Homo sapiens
gatctcaagtagcctcttctgaattcctttttgcatacgatctttaatctgcttgggatatatctggccagtccttattaaactgtattaaatggacaagccaagcttttgctcaaacaagcaggtttttactattaatacctaatatattgagcacatactgattgtcagatttatgcttatgatttcataattgttatttaattcttgaatcctgtgaggcagataaccatcatctctatgttacagatgataaaacttgaaatttaagcagtatttccagattcatttacctagcttctttgtattatttaaaataatgtacaataaggctgggtgcggtggctcatgccaggaatcccagcactttgggaggccaagacaggcggatcacctgaggtcagttcaagatcagcctggccaacatggtgaaacctcgtctctactgaaattacaaaaattagccgggtgtggtggcacacaccttagtcccagctactcgggaggctgaggcaggagaaacacttgaacctggtaggcagagatagcactgagccaagattgcaccactgcactccagcctgggcaacagagcgagactccttctggaaaataacataaaattaagtagtgtacagtaaatggacaaaatgccatagtagttgagaatttaaagtcaattccccccagtctaagctccatgagggcagagactgttctgtactgtcaaattcctagacgctagcaaagtatacagctatagaaggtttataataaatattttggggaaaatgaatgaaaatagtgaattttatcaggaatgctgtcatagaaacatttacaatgccttttcctatctgttttcaccagaaagttaaatgaacatcagctaattaagaaagcagaatccttcccctgggaattcagttctcactgcctattataaggcagttttgacatgacagaaccacaactaaatggctgtaaatgtcacagtgtacattttaaacctcatagccttagagtttgatgagaccaggcacagtgactaacacctgtaatccca

SEQ ID NO: 24982 - DNA, 1080 bp, Homo sapiens
tttagtagagacagggtttcgccgtgttggccaggctggtggtacacaccaccatgcctgggtaacccaagcatacttttacctcagtcaaatgtcagataaatttcagaagaggtattagttcgtgtgggtccagaaaaagggaatataggtctaaggaagggtgagaaatataaagcagctgatttagaacttgccagaaataccagcggtctcaaaatagaataggcagcctttgctactaagttttacattgctggaggtgtacaagtggagatacaagcaaagctaaggccttcactcaaacatgtttatattatggcagaactttgaaaatgattacactcatttttactagttttgatgtgattttaggatatttcaggacagtctatttgaaatgacaaaggaaagtgagtctgttttgtcttcccaaaaagattgtttctaagatttcatgattctcccttgagttcatgagaagattcttgtgagaaggaaagaaaccctggacctgattttacccctggctctgtagcaaaaatgagggtgggaagatcaaatgaaattgtgaaacatgtaacttataaaacatatatcatttcatttcagaagtaacattaaattcaagccctttgaaaggcctattttatttttttaagtgtcaactagggcaaggtctcaaagttaaaaatttgagagttaatgcttttgtttttctttttcttgaaaagcattcacagctctgatggagggcaaaatcaataagcagctgaaaaaagttctgaagaaaatagtaaaagaagcccatgaaccgctggcagtagctgatgctaaactaggaggggtcataaaggtaaagtcacgatatttttggtcatgcctgctagtcagatctcacagcataccaactacaaagcctagcctttgcaataagttgcttatcataaattctcaatacatttttttcttttctctaagctacatgataatggatttcccctaacatcagctgaactgagcaaataagtaatacctatttgttctagaagatatagaagaacaaaaaatgataaaaat

SEQ ID NO: 24983 - DNA, 1028 bp, Homo sapiens
taatttttgtatttttagtagagacgggctttcaccatgttggcctggctgatcttgaactcctgacctcaaatgatccatccgccttggccttccaaagtgctgggattataggcatgagccaccacacccggcatttttttttttttttttttttttttgagtcagggtctcactctgttgctcaggctggggtgcagtggtgcgatcttggctcactgcaacctggacatcctggactcaaacaatgccacctcagcctcccaagtagctgggactgcaagtgtgcgccaccatccctggctgattttttaactttttgtagagacggggttttgccatgctgcccaggctggaactcccaggctcaagtgatccacttgccttagcctcccaaagtgccgcgactgcaggggtgagccaccatgcccagtcttctccctatttttaattgcatgttaaccctatcatatttcattagaagtcccttagaataggcattattgctatgttgtgatacatctgttcatgaaaagcttaatactttggaattgcactacagttaacagggttgtgaagaaaataatggtaggtagttgctcaaaacctgtgcaactttgtaatcagtactgtcaaatagtaatcctaataaaattattaccacagttcaaaagacattttaagctaatattaaaagaaacactacaggctgggcacggtggctcacgcctgtaatcccaacactttgggaggccaaggcaggcagatcacaaggtcaggagatcgagaccacggtgaaacctcgtctctactaaaaatacaaaaaattagccgggcacagtggcgggcgcctgtagtcccagctacttgggaggctgaggcaggagaatggcgtgaacccgggaggcagagcttgcagtgagtggagatcgctccactgcagtccagcctgggtgacagagtgagactccatctcaaaaaaaaaaaaaaaaaagggagaaagaaacactataggccaggcgcagtgg

SEQ ID NO: 24984 - DNA, 1116 bp, Homo sapiens
tctcctgcctcagcctccagagtagctgagattcaggcgtgccccaccatgcctggctaatttttatatttttagtagagacagggtttcgccatgttggccaggttggtctcgaactcctaacaggtgatctgcccacctcggcctcccaaagtgctaggattacaagcgtgagccaccacgcccagtccaatatgacttttgtattacacagcttatcctatttgtcattcatacataaactcattcatgttacagaaataaaggtcgtagcagcacatatagtttttttttttaatgtgtattttctgttctcgtatggtgcatttctacttagctgatttttcttcttagaaaaaccaattacagctctgactacaggctgatttgagtaaaaacaaaaacaaaaaaaaactttaaggtgttaatttaaatgcttttcctagatgctatcttgctaatttattttcccctttcttcccagcctgtctcgatatagattgaagtttagcgctgataaagtagacacaatgattgttcaggcaatttgtaagtatagtacatgcaaagtccgatttgttgctctgtccttcatgcgttttcatactgttgaaactatcttttatgattctgtctgttgagaaagagaaaggaggccaggtgtggtggctcaagcctttaatcccagcacttgggaggctgaggcaggcggatcacctgaggtcaggagttcaagaccagcttggccaacatgacaaaactctgtctttactaaaaatacaaaaaaaattaaatgtgcatggtggcgtgtacctataatcccagctactcaggaggctgaggcaggataattgcttgaacccaggaggcggaggttgactatttggagattatatgaatcacagaattaacattacgttaattaattcatttgtatttttccatgaaaatgttaaaaacataagtgcaatctttgtagttgtgtattctgctgtgtcattaaatggtttttagaaagctcaaaagctgccaggcacagtggctcatgcctgtaatcccagcactttgagaggctgaggcgggaggatcacctgaggtcgggaatttgagaccagc

SEQ ID NO: 24985 - DNA, 1026 bp, Homo sapiens
tcctctttttactctgattattttttggaagaaggtggtggggagacatttaatgtctaaacttaaacccttaaatgaggaaaactgttatactaggtcaaacttcttcattttttttgttttgtttaggcatccttttcattggctttctactttttcttttgactatttgctggattttatataatttgttgaagagtgattctccctcatcctctgcaaacattccataggcgataggaagaactatgcctctgccaagctttctgagttgctgccagaagaagttgaagcagaagtgaaagcagctgcagagatatcaatgggaacagaggtttcagaagaagatatttgcaatattctgcatctttgcacccaggtaaattttactcctggagaatctagttgtggtgttaccagctctatagtactaatttttctgatggcaatgatgatttttacacttattgttgttcacctgataacataaatatgagggtgttcagtcactacctcatctgatgccatcatgatttgtatacttaaaagggggaaatacatattaaaaggaagtaatttacaatcatcgtctgaataatgaattaaccaaaaatcaattaagatggcagagaaggccaggcgcgttggctcacgcctgtaatccccgcactttggaaggccgagtcagggattgacctgaggtcaggagttcgagaccagcctgaccaatatgatgaaacccccatctctactaaaaatgcaaaaattagctgcgcgtggtggcgtacacctgtaatcccagctactcgggaggctgagacaggagaatcgcttgaaccagggagggggaggttgcagtgagccgagatggcaccattgcatccagcctgggcaacaagagcaaaactccatctcaaaaaaaaaaaaaaaaaaaaaaaggatggcagacaattatggattgagccttttaattctgagtcttatgtctatatcttgtgatttttttttctttcagatttgaaggta

SEQ ID NO: 24986 - DNA, 1051 bp, Homo sapiens
gctgagattgcgccactgcgctccagcctgggaaaaaaaaaaaagaaaactgatgttaggcataggtgatgtacccagtacccagggttgtgtagctgctctttcataattgagggctccagtgttttagacaggaatttttactgtttttactcatatgatatttgtgacttaactttattccttatactaggtgattgaaatctctgaatatcgaacccagctctatgaatatctacaaaatcgaatgatggccattgcacccaatgttacagtcatggttggggaattagttggagcacggcttattgctcatgcaggtgatggttttaatgtaatttgtaaatatgagtgtttgaagtattttctggttaggattttgtttacatctttaaactacagctgttaaagaaattttagctgataacacaaaagtagatgatatgtgggagatcactaagggccaagtgttcaatgatgatttctatttgtttgcctgatttccttttggataatgaaggcatctttagtcactacctcttctgagacacttgtggtccattgttagaagtttgttagggttaattagaacaatcggatgaatgcaggaggataaaacagttaacattttcataataaaaactcactagacctagatttgaatacagttttaagaaatcactgtagagaaagaaaaaaaaaagaaatcactgtagaggatttgtgcccttgattgattaccttagtttcactattgagtgtgaggatgtaatatatttgactttcaaaaatattttcaacaactgatttataataaaactttgtatatgtgtatggcagtattataaggatgatatgctataattaaaatgctatgtaattgaatacctacaaatacaatgaagtactgattcatcatttttatgttacttggagacattgttataattcatcaaaaaagattatatcatctgcatcagagtgtttaaaatggcataactcctttttttttgtttgagacagagtttcactctgttgcactggctggagt

SEQ ID NO: 24987 - DNA, 1030 bp, Homo sapiens
caaatgtgtttctgtgggcattcacattttcttttttgtgaattttccaagctttctacaatagccatacattctgcaatatttatagtctataacttattatctctagttgacaaacatggttctttgtttcttaaattataaatgtctttaacctaaaaaaattaaatagtcattcagcttacaggtctgcttaaaaaacagaacattttttagcttgttttgaaccaatttttttaatgttcctgtgcaattagtactttttactttaaacatatgcacttaaagcatccattcacattttaggcactcatttcagtattttctttctgcttacattagaacaaaagcaaatgttgggttctatggaatcttttccatgtgcatgtatttgtatcctttcttgttcttgtgatcttgtgatgaagacttctatactaagcttggtttagattttttgttctgcttttttttttttttttttcccccattgagcagtgttctgaaagttggatggttcagttttcactttctagttaggtgtgaagacgttttctcctttcatttcccccatgctgattgagtgttttcctgtaccatagtaactacattgattactaaatcagaattcatttagctcaccacatctcttgaatgtgattgacctacttgaaaaatattaatacctttaacttttggaaactattagtcttcataaactaccccaaagccactaaaatgaaacaacattgtgtgcttatgtaagtattatctaatggcattttctttatctcttgagaattatttcaattccagatacttgttagagattttctaaaactttttgggtctttcagtgaagtgaagacttacgatccttctggtgactccacacttccaacctgttctaaaaaacgcaaaatagaacaggtagataaagaggatgaaattactgaaaagaaagccaaaaaagccaagattaaagttaaaggttagtttgaattttttttttaacacaacttatactcac

SEQ ID NO: 24988 - DNA, 1086 bp, Homo sapiens
tattgttaaatttatcagactgcacagaggaaatgtgagaagtttagtcaaattaggtattttactaagagttccaaaacttcatttctcctacatgaactatttggagaattaagagaaaaaaggaacgtgttttctaaattggttgttgaaaattttttgttttatagttaagaatgaatacagaattgatggaacagtgattttcttcattgtttctcttacacggagcggactggaaggaatacatactggtagcctgccgtcatagttacaatatctaacaggtgctcaccagttaactaggctgtcttgtgaagttgataagcaggcgccccattattagttacacctgggtttattgaacacctactagcaagtctagcagaagagtaaagcattaacacaatgattgctttaacttggtttctaagtagcttagtggtcaaaagtatatgatctacaaatgtggatagtatacttgatagagaaaacaaacaatttatttaacttttatgcttctttttattgaaaagtaaggagatccctaaacccactagtagcatttgaggcaccaaactctgtcctttgtatcctcaattgtgtatccaataagcttttccaatttatttgtcaatttttcatcccacaatttcccccctctttttttacccccaagacagaatcttgctctgtcacccatgctggagtgcagtggcatgatcttggctcactgcaacctccacctcccaggttcaagcaattttcctgcctcagcctcttgagtagctgtgattacaggcacgcaccaccacgcccagctaatttttttatttttagtagagacagggtttcaccatgttggccagcctggtctcaaactcctgaccttgtgatccacccactccggcctcccaaactgctgggattacaggcatgagccaccacgcccagtcctctcccattttctatatgtgacaattccagttgctttggccatcaaccttgacttttttctcataactcaatctagtctgacagcaaatcctctcagttccacttgaaagtatgtagtagccacagtgg

SEQ ID NO: 24989 - DNA, 1029 bp, Homo sapiens
ctctcccaactggtttgtagaaaatgaaatgacataaactttcagagatgttactaggcttcaaatttaatttgcttgaagtaaatgttgataaaatacatgcagccatccctagataaaattacataataaagctggttatcttgttcccaggagaacactgtcattttcgcatcacccactggtaccgcagatacattcctaatttaggacaaaacagacttagtttatgaccgacttttgatgaaaaaggcctaaccacctacccagctgcatagtcaaaaggtttacatgcaaaacaaggtaggtttttgagaaacctaaataataaacttccagttatttgaatagtcttctgcaggcccagagaaagcatagttaaatcatacagcaaccacctctcataagggctgaaggtttaactatttaaaaaactaaccaaaaggtaggttcttgttctacttggtactattgaaacacttctaatgaagagccttgtgaacttagtttgaaatcggaaactcgggtgaattttatatgcctagtttttattagtaaatttgaagaatttctgtggctgcaccacaaaactctgctgaaaacctactgattctccatttcccttcaaaaatgtaaatttctatcttccagtttaaactgctgtatctgtccattgccttctggctcctcagcacaattacaaggcccttgagtgagctgtcctctctcctccaactttggcgctctgttccagggctcttttagaaaagatttatttgctgcccgtgaagggttctctgatccatctgttgcttctcaatggccattttcagacttggctcaggctcatcctttatcccagctgtatttgtaccctttaggataacatggagtagggccaaatgtctcaaaccctagctagtgtgcataggaattatctagagaccttgcttgataaaatgcaaatctgatgctctattagtgccaccagagcaaaaaaaaaatgcaggtctgggttggagcccaaga

SEQ ID NO: 24990 - DNA, 1442 bp, Homo sapiens
gggtggcgagggagggagcccgcagaggccgaggcctgtgcttgcccttcgccatgcgtccccccgatcgcggtgcagcggagctgcgacccggtgcctgcgcgcctgccccatgccttccagggaaatcgcctttaatattcttgtgtattttcctatccccacttccatattcccaccccacccccctttacggggtgaaaaagacatattgggtgtggtatcttgacatttttagctgtgaggtaatgcaacgattaaaaataatattttaatcaccagtgaacagtgcttattatgagatctctggaaacagacctgtagatttttaaaattattattataaagaagcggttttggcttatagtaaaaagaacatcaactagagaacacacacttgaaccttattttgaaatttagatcactctgggaatccatgttcctttcattattcagaaatgttaccgaatgaatagaataaatgttgaggaagccagaactgtgagattcttgatatattgtattatacggtttgataactttactgttagtcatctggcatctatctattggctttgctgtcgagacaactttgacctgacattagacttctaggagatttgactccgaaagttctttgacatttcactaaagtctaaagggtggtagtcatcctttcctttggatattttcatttcagttctcagaaaccttaggaaaaagaccttatcttctatttgcaactattttttcaagcagccttttggtgatttgcttttagaaattttcaggagtgaattctacatataactcgtacacttggtttatgatgggcaaatggattgtgcttttaaaacgagtaaaggaccaaatgaccctttcgaattactttttttcttttgataagtgtgtttcacattaaacaaatttctcattgctatgttagatacagaggttacttgcttattttcattttgaaagtctgatctaggaaaatgccgaagaaaatttgaagtttccttttatgcttttgctattgttgaataatgtctactgttgattaatgtctgttaaattgatgataaatctatatggttctgttaaaataatttgaacttctgagtttactttaaaactgatattttaatatttttaataattgtagttgctttcagagtaaaaatgatttttctctaaatttctttatattgtgttagctatttaaattctctagccataagccatgtggttcctgtaaaatatggagtaaaaggccttaaacgttccatgagcagaaatctcagaacataggcttttcaatgttatttgttattcttaacctttttagaatatagattctcatttatgatgacgtgctcataatattgtgatcagaactgataaaagtaagagaaaaagcatttatttaaaaataaacttaa

SEQ ID NO: 24991 - DNA, 1053 bp, Homo sapiens
caaactcctaggcacaagcgatcctcctgactcagcctcccaaagtgttggggctacagctgagagctactgtgcccagtctagacagtagttttaatgttagaaagccttgagggtactacttgaagcaaagaattatatttgaaaacagaattctaaacagtgaaataaatgacagtaccagaagaaagttaacagataggaatattaaaattactaagagaatatactctgtgggttgcatttatcacctgtaagttaggtgagctgattcttgaaatcttttcaagcccattttacttatttaggtcactaattatagagtttgttgtttagaagatggcatctaattaaggtaatgagagagcgagagagagagagagagagagagagagagagagagagagagagagagagagattcctgtgagattcagctgagtcatatcatcagtaattatcttgagaactgtgttggaggagcagtgaatttctgttgctaatgaatatttcattattgtttgaaggaaccggttgtataaaagattactcctggccgggcgtggtggctcatgcctgtaatcccagcactttgggaggatgaggcaggtggatcacctgagatcaggagttcaagaccagcctggccaacatggtgaaaccctttctctactgaaaatacaaaaaagttagatgggcatggcggcaggaacctgtaatcccagctacttggaggctgaggcaggagaattgcttgaacccggaaggcggaggttgcagtgagccaagatcgtgccattgcactccagcctaggcaacaagagtgaaacaacgtctcaaaaaaaaaaaagtaataataataataataatatttcccccaaaataactgacattcataaaatatacagagaaccatattagatgcttactagaagtaacagattaagtaaaatagctactgtttaacaaaagtaacttctccctttatgagtgcctgctatgtgtcaagtgaaatgcagtgtttttacatacattttccttagatcctcagagt

SEQ ID NO: 24992 - DNA, 1095 bp, Homo sapiens
gtcttacattagcaattaaatgctgtggccagaagtaacactttacttaggccctgagtgattaggatgatcagagcttgcctggtgacccataggaaatagaacacgagcaagaaataaacttctgttatttaaagccactgagattttgggattgttattgcatataatttagtttatggccgggtacggtggctcacgcctgtaatcccagcactttgggaggtcatagtgggctgatcacctgaggtcaggagtttgaaaccagcctggccaacatggtgaaaccccatttctactaaaaatacaaaaattaggcaggcgtggtggcgggtgcttgtaatcccaggtactcaggaggaatcgcttgaacctgggaggtggaggttgcagtgagccaagattgtatcactgcactccagcctgggcgacagagcaagtctccgtctcaaaaaaaaaaaaaaaaaaaaaagtaaattttggctgggtgtggtggctcatgtctgtaactccagcactttgggaggctgaggtaggaggatcactcgaggtcaggaatttgagacccacctgggcaacatagtaagatcccgtctcttcaaatatttaaaaactagctgggcgtgggtggcatgcacttgcagtcctagctactcaggagggtgaggcagaaggagtgactgagcgtgggagtttgaggcttcagtgagctatgacagtgccactgcacactagcctgggtaccaagttagaccctgtctctttaaaagtaaaataaaataaattgctctggttaccatgtagagattggattataagaggatgttgagaaaccactaaggaagtcattaaagttattcaggcgagatatgatgatactcaagactaggatggtgcattggataggacgtggtatatttagatggaatctagtgataatattgaaggcgggcttggcgaggtgtttcacacctataatgccaaaactttaggaggccgaggcgggaggatcacttgagccctagagttcgagacaaacctgccaacatagtgagacccccgtctctacagaaaatacaaaaattagccaggtgt

SEQ ID NO: 24993 - DNA, 1084 bp, Homo sapiens
aattcttatttatttgtttatgggtttatgacttatatttacaccattagaatataacaccttaagggtaggtgggcactgtcttattcccagcatttttcctggtttagaatactgccgggcacataacccacacctaataataagtatttgacttttttttttgagacagagtgttggccaggcgcggtggctcaagcctctaatcccagcactttgggaggccgaggcgggcggatcatgaggtcaggatatcaagaccatcctggctaacatggtgaaaccccgtctcttctacaaatacaaaaaaaattagccgggcatggtggctggcgtagtcccagctactcgggaggctgaggcaggagaatggcgtgaacccgggaggcggagcttgcagtgagccgagattgtgccactgcactccagcctgggcgacagaaggagactccgtctcaaaaaaaaaataaaaataaaaaataaaaaaaaaaaagtgttgctctgtcgcccaggctggagtgcaatgacttggtcttggctcactgcagcctcctcctcccgggttcaagcagttctcctgcatcagcttcccgagtagctggaactacaggcacgtgccaccatgcctggctaattttttgtatttttattagagacggggtttcgacatgttagccaggatggtctcgatctcctgaccccatgatccgcctgcctcggcctcccaaagtgctgagattacaggcatgagccaccgcgcccggcctctttaatgactgatttttgtgtagactccaggatatataagcctcttagaggtttaagcgtggcttatgtgcttttctgtggtttagctgttggctctgaattaggagagaacaatatatcttattgctgtttgggaaagcttggattattttgtcagtttagaattggtgtgtgtgtgtgtgtgtgtgtgtgtgtgtgtgtgtgtattttttgttttaatcagcttttgcttgtctttctctttaggtgtacagaaaagagttaaaatagcaggcctggggtgggggtggcagctcacacctgtaatcccagcact

SEQ ID NO: 24994 - DNA, 1021 bp, Homo sapiens
ttgtgggagctcaaaattaaaacaattgaactcatggagatacagagtagaaagatggttatcagaggctgagaagaatagtggcagagggggtaaggacagggcagaagtggggatggttaatgggtacaaaagtataattagatggaatgaataagatctaatatttgatagcacaaggtgactacagtcaacaataatttattgtacattaaaaataactaatagagtataattggattgtttgtaatacaaagaataaatgcttaaggggatgcatatgccatttaccctgatgtgattgttaactcattgcatgtctgtatcagaatatttcatttacctcatatatacctactatgtacccacaaaaataaaaaaattttttgtaagagatgctatcaagaaggtgagtaaaatattgcagtaagactaggaccactccccattttattattttatttctgaataagtaaaaaaatttatttttaatttttgtttttgagacagggtctcactgtcacccaagctggagtgcagtggcgtgaacttgggttactgcaatcaccacctcccgggctcaagtgatcctcccaccccagcctcccaagtagctgggactacaggcacacaccaccacacctggctaattttttgtatttttggtagagatagggttttgccacgttgcccaggctggtctcaaactcttgagctcaagcgatccgcccaccttggcctcccaaagtgctgagattactggggtgagccactgcacccagccctgaatatgtagaatttaaatatgcagatgctactggaatactaaagttttaaattcccatttatgtaagagaaggctacttgctggaagtaaatcggggataaagccaagaggcctggtatttgattttcggtaacagtctataaccaagtaacttacctactaacttatctagttacttgttacttgttatctagtaacttgttacgttattgagcactcatttatagtacttgc

SEQ ID NO: 24995 - DNA, 1056 bp, Homo sapiens
tgcttaattctcttatagtctatctttgttagtgtgctcagttagaatttggcctctgctgtattctgtcaaattgtcctctttatcctttctatagctctgagtttaacagatctttagaatagatgataaccagtggtgattgtttctttaatgtgcacatttttctttattcaaaaagatggctttctttttatttgacgtgtattttttgcattctctaacccaattttcttatacatttgggacttcaatttgtatctgcctataagcaaacttacttataattacaatttttatccctgccaaatcttccctgtgtataaattggttatcattaggttctaaaaagtttttatagagttagtttgaaaagctgttcttcataattgtgtacagtttctagagttttacatttatggacctaccttgcatgcaatatcttgaagacagaaaaagtgtaggctgttctcaaaacgttggagtgagaaagtaagatgtcctgctgccaaatataaagttgtttttatactgtctctctgctgaaaatcctttttatttttctcctttaagccttcctctttgattgagtgcactctcttcttttctaaggttttcgttttttggatacttgtttaacaaactttttgtcagctaccatttggcagctcactttcacaaccctcacactcctctttttacctacttttagttgtttggcaaacatctatatttttgtacaactttggcaaaaatgatttatcaatgtagctccatacctgttgaataaaaatagtagaaattatacatcacaagaaatagaaccttattaagaattttctttacatttaacttttaagttcaggggtacatgtgcaggtttgttatatatgtaaacttgtgtcatgggggtttgttgtacagattgtttcatcacccaggtattaagcttagtatttcattagttatttttcctgatcctctccctcctcccaccctccaccctttgctggccccagtgtgtggggttcccctctatgtgtccatgtgttttca

SEQ ID NO: 24996 - DNA, 1033 bp, Homo sapiens
ataactaatatagtactatattccagtcaagaatgcataacctgaatttaatcatgaggtaatatcacacaaaccccaaattaggaatgttctgttacaaaaagggggatcgcatttttcaaaaatgcgaatgtcatataaaacagactgtgggaaaggtctaggtcaaaggaagcaaaaaagactggacgactaggcagtgcctgtcttttactggatgagaagaatgtgataaaggacatgatgattagagaaaaatgttgtttcaatgttaaatgtgctgaagctgataatactgtggttttataagagaataaccatattcttaggaaataatctaagaagtgtttaagaataaaggaccatgattctactgtgtattggttcaaaaaaagattgtgtgtgtgtgtgtgtgtgtgtgtgtagaaagaggtaataaaagcaaacagtaaaatggtatcagtaggtgaataggtaaatctgggtaaaagtatatggtgtattctttgtactattcttgtgactgttgtgtaaggtttaaattatttccaaataaaaattttaaacaatttttaaagtttaaaaagttaaaatatagcacatctcaagaattttcttagtcaaccaattataacagaccatactctaggatcatcagttttggattatttcctttgatttgttgatgaagcactaaactgaaagcaataggaaattttctttatagctgtagtttctacctattgaaggccattagcttctattaggagattgtattgaattggatacatttatttttcacaaacaaaacaaagtctctaattttcacttgtacttctagctagatgaaagagagaaagtggccatgtgcggtggctcacacctgtaatcccagcactttgggaggccaaggtgggtggatcacctgaggtccggagttccatgccagcctggctaccaaggtgaaaccccatctctactaaaaatacaaaaattagccgggcatggtggcgcatgcctgtaatcccagcta

SEQ ID NO: 24997 - DNA, 1030 bp, Homo sapiens
aaaatccaaatgcaggcattatccagaaaaatttaacaggtttatttataattgttatggccaggcatggtggtttatgcttgtaattccagcactttgggaggccaggacaggcagattgcttgagcccgggagtttgagaccatcctgagcaacatggcaaaaccctgtctctacaaaaaataaaaattagccagacatggtggcatgagaccagatgcttgggaggctgaggtgataggatcgcttgagcctgggaggctgaggctgtagtgagccatggtcataccattgcactccagcctgagcgacaaagtgagaccctgtctcaaaaacaaaaacaaaaaaaaatcaaaagaacaaattaaataattgttatgaagttgaacttctaaaacttgttcactgaaatgttttgacccgcattaatgctttatgtcccacatttatattgaaaatccacatgcaaataaaaatggaaaaaccaccaatacctcatttctgttccttattttttcacttacaatcttatacttaggtgccttttgaccctatggggaaaaaataatgttcagaactactgagaggtgacagcgtgctggcagtccttaccgccctcgctcgctctcagcgcctcctctgcctgggctcccactttggcagcacttgaggagcccttcagcccaccactgcactgtgggagccactttctgggctggccgaggccggagcccactccttcagcttgcagggaggtgtggagggagaggcgcgagcaggaaccagggctgcgtgccacgcttgcgggccagctggagttccgggtgggcatgggcttggcgggccccgcactcggagcagccggccagccctgccggccccaggcaatgaggggcttagcacccgggccagcggctgcggggggtgcactgggtcccccagcagtgccagccaaccggcactgctcttgatttctcaccgggtcttagctgccttcccgcggggcagggctcgggcctgcagcccgcca

SEQ ID NO: 24998 - DNA, 1033 bp, Homo sapiens
aaccctgaagtctgggcattggaaggacaatttggaagggcaaaaaatgcccgcccagtccaaatcaggttaaaagatcccaccagttttccttatcaaaggcaatatcccttaaggcctgaagctcatacaggattacagaatattgttaaacatttgaaagctcaaggcttagtaaggaaatgcaggagtccctgaaacaccccaattctgggagtacaaaaaccaaacggtcagtggagtctagtgcaagatcttagactcattaatgaggcagtaattccactatatccagttgtacccaacccctataccctgctctctcaaataccagaggaagcagaatggttcacggttctggacctcaaggatgccttcttctgtattcccctgcactctgactcccagtttctctttgcttttgaggatcccacagaccacacgtcccaacttacatggatggtcttgccccaggggtttagggatagccttcatctgtttggtcaggcactggcccaagatctaagccacttctcaagtccaggcactctggttcttcaatatgtggatgatttacttttggctaccagttcggaagcctcgtgccagcaggctactctagatctcttgaactttctagctaatcaagggtacaaggtgtctaggtcgaaggcccagctttgcctacagcaggttaaatatctaggcctaatcttagccaaagggaccagggccctcagcaaggaacgaatacagcctatactggcttatcctcgccctaagacattaaaacatttgagggggttccttggaattaccggcttttgccgactatggatccctggatacagcgagatagccaggctcctctatactctaatcaaggaaacccagaaggcaaatactcatctagtcgaatgggaaccagaagcagaaacagcctttaaaaccttaaagcaggctctagtacaagctccagctttaaggcttcccacaggacagaacttctctttatatgtcacagagagagctg

SEQ ID NO: 24999 - DNA, 1049 bp, Homo sapiens
ggcttagcacccaggccagcagctgcggagggtgtactgggtcccccagcagtgccagcccaccggcgctgctctcagtttctcactgggtcttagctgccttcccacagggcagggctcgggacctgcagcccgccatgcctgagcctcccaccccctccatgggcccctgtgcggcccgagcctccctgatgagtgccgccccctgctccacggcgcccagtcccatcaaccacccaagggctgaggagtgtgagcgcacggtgtgggactggcaggcagctccacctgcagcccaggtgtgggatccactgggtgaagccagctgggctcctgagtctggtggggacatggagaacctttatgtctagctcagggattgtaaatacaccaataggcactctgtatctagctcaaggtttgtaaatacaccaatcagcaccctgtgtctagctcagggtttgtgaatgcaccagtagacactctgtatctagctactctggtggggccttatagaacctttgtgtcgacactctgtatctagctaatctggtggggacgtggagaacctttgtgtctagctcagggattgtaaacgcaccaatcagcgccctgtcaaaacagaccactcggctctaccaatcagcaggacgtgggtggggccagataagagaataaaagcgggctgcccgagctagcagtggtaacccgcttgggtccccttccacactgtggaagctttgttctttagctctttgcaataaatcttgctactgctcactctttgggtccatactgtttttatgagctgtaacactccccgcaaaggtctgcagcttcactcctgaagccagcgagaccaggagcccaccaggaggaatgaacaactccagacacgccgcctcaagagctgtaacactcaccgcgaaggtctgcagcttcactcctgagccagcgagaccacaaacccaccagaaggaagaaactctgaacacatccgaacatcagaaggaacaaactccagacgcaccacctgaagagctgtaaca

SEQ ID NO: 25000 - DNA, 1006 bp, Homo sapiens
gattgcttccaaaactacagtccctgctatgggaactgggacagatttttgagaggtccctgatagcaagtgagaggctgaatactttactaggattaattagaggtgccagcctcacaatagagtatccctaaaagaaaaatctgtgaaattttattctagtaaaatacaacttcatcttccttaaattgttttatttcaccagcgcaaatgggatctattattttgaaatatctctcggcaaccctattattatgagatatgcatcatatgcatatttacctgaaaactttttacttccagtatagagtaggttgccaagtaaggaattcataatacttggttcacttccagggaatccatttaaatctaatgtgctacagtcaataaactgcttctctgcagtgacaatccaatactagagttaggtagcaagtacatagtttataaaaagagagaaatgcagctatgtctaaagaagccatttttgctttcatagttgcattgagattaagaaacattcctttagtagtaaaactcagaatctttcaaatattaatgaatataaaaactagctttaattttataaattgccagggactcaagcatagtttagtcaataaaggggggaagaatagtttcctgataaaaatgaaagcatagaaaatagtctaaaggaaatacatgaaaatgttaaaccatagttatctctgaatattgagttcataaatgactttttcttcctatatgtttcagaatttacagtaaaaatgaactactttaacaatcacatacacatggttttgtttttgtttttgtttttgtttttttgagacagagtctcgctctgtcactcaggctggagtgcagtggcgcaatctcagctcactgtggcgtctgcctcctgggttcaagcgatttttctggctctgcctcccgagtagctgggactacagtcacgtgccaccatgcctgactagtttttgtgtttttcgtagagatgggg

SEQ ID NO: 25001 - DNA, 1051 bp, Homo sapiens
gcttggtttagatattgggggaaagttggctttataaaatgagttgagaagtgttcccttccttatctgtttttagaagaggttatgtagcattgatagtatctcttccttgactgccaaaatttccccagtgaaatcatcttggcctggagtgggtgcgggaagagagtgagagagagagagagagagagagagagagagagagagagagagagagagagagagtgtgtgtgtgtgtgtgtgtgtgttgaagactagtttagtgtggtaatgagaaggggagaaagagtagaacagggagtttgatctgtaagacagtgaacaatcaattgggagaactcactacctttggaatgtttttgttagaaaaattttaactataaattcagcttatttaatagatacaggactattaggttatctcttttttgaggaatgagctttggtagattgtgtctttcaaggaattggtttatttgtggacatgcagttgtggtatttcattattcatctgtggagtttgtagtggtggcatcctttcggtcattcctgatttgaatatttgtatattttctctttgtttggtcagaatggctagagaggtttattatttttataggtcttgtcaaagaaccagcttttagtttcatttactttctttgttattttttcatttcattcatctctgctctcgtctttattttcttcctcctacttgcttttggtttagtttgctcattttctggtttctcagatggaagcttacattactgatttgaaatcttctttttctaatagaaacatttaatgccatacatttttctctaagcagttgtttagctgcatgtcacaaagtttgatatgtattttcattttaattcagttccaggtattttctagttttccttgaggcttgttctttgacccacagattacttagaagggttttattcagtttttaaatattttgggatttttccagatagctttcttgtattgatttttaaatttgatttcatatcagagagcataccttattttatttcttttc

SEQ ID NO: 25002 - DNA, 1104 bp, Homo sapiens
atttagcatttgttttagaacaggtctgctgctgatgaattatctcagttttccttcacctaagaatatcttttttaaaaaaattgagacagaatctcactctgtcttccaggctggagtgcaggggcgtgatcttggctcactgcagcctctgcctcctgggttcaggtgatcctcttgcctcagcctcccaagtcctgggactacaggcatgagccaccacacctggctaattttatatttttaatagagacagggtttcaccttgttgaccaggctggtctcgaactcctgacctcaagtgatccacccgttttgacctcccaaggtgttgggattacaggtatgagccactgtgcccagcctaagaatatctttactgcaggaaattttcactagatgtagaatcctgggtttattgttttactcttttagctcttcaaaaatgtagtttgttgtcttctgtgctttctgatgagacatctataatcactggaatcattgtttctttgtatgtaatgtgttgtttttcactggctcctttaggagtttttttctttaatctttgatttttttagtagtttgattatttatgggcatacatttatcctgttcgtgttcacttaattatttatgtttctcatgaaatttggaaggttttgttttgtcaaatattttttttctgctccagtttttttcttttgttcttctgggacttcactgacataactttttgatattctcagatctctgaggctctttcctgtcttttttatttttatttttttgagatggaatatctctctgtctcccaggctggagtgcagtggcatgttctggctcactgcaacctctgcctcccgggttcaagcgattctcctacctcaacctcccaagtagctgggattacaggcacgcaccaccacacccagctaatttttgtattttaagtagagacggggtttcactatgttgcccaggctggtcttgaactcctgatctcaggtgatccacctgtctcggcctcccaaactgctgggattacaggcgtgagccaccacgcctggcctttttggttttttgtttcttttgagacagaatctc

SEQ ID NO: 25003 - DNA, 1028 bp, Homo sapiens
cttactgtttctttcttctgtcacattctgttattcagtccattcagtaatttttattttagtttttttaatctaaaattttcatttagttcttttttatagtttcaatttctgtatgaaaatgtttatcttttcattaatttcatgtgtatttgcccttacttcagaaagcatgattataatagctgcttaatttttgacaattccaaaatctgagccatcttagggttggtgtctcctgcttgtttgtacattttgaatattttacttgagactctgagtcctatttaaggcacctggaaatgttgagttttttcttttagcaggcaatcagactggttggattcatactccaagtgtcatcttaccttcagtgggctgtggttctaatgtcaatttacttttcacagtctttgcagtactatttgggtctgtcttttgtgtatgtacctcccaggagtcagtttgggacctgagtggtggtcggtatctatatcttaatttaggtctgaagatctgtgttatactattttgggtcagttcatacatgcacagcctttaggtgtgcctggaacttcatacatggatttaggagtgttcctttttcagctccctgttctccatgatttattttcacactctgtttcccaggagatcttgtcctcattctctgatgacaaagccaggatttttaacctctccacactatcatgaacttcctacaactggatatgcctctagaccaagatggtgacagagaggaagaaataacctggtttctctctgcactgttccagttacagagcctcagttcctctggtcagagggaaggattctctcagttttaggtgcctttgtggtcactgccgaagccataggagtgcagttttgtgaccagtacttgacttgggctagggccagaagagtaaaaaagagagaaaaagagctgggattccacccatagccttcatcctgcagggccctcctacctagtccattggccacaaagaaagtgtttctcctggact

SEQ ID NO: 25004 - DNA, 1079 bp, Homo sapiens
cctgaaatagtcaattaatggtaagataaaaggactctttggacattatttgatttatttatgagttaattgcctaaagcaaaatgataatgtattgtgtatatatagacattatacaatgtctacatgaaatgaatgacaatagtagcacaaagacaggaagcagcaatggaaatattaggcctaagagtcttatatgtaaaatgatgtatttttatttgaagatacagtgtgataagttaaagatgcatattataaaaccctagatagagcaactaaacaaaaagtaaaagaaatatagctaatgtgtcagtagattaccaaccaaaccaagattatgaaggaagagaaggggaaaaaagaacaaagaacaggtagagaaaatggaaaataagcaagatgataggttggtatgaccatataatattaaatactttaaccatttaaattaaaatacagagattatcagactggatttaacaaaaagtaagatctaattatatgacatctaccaagacattaaatatgaagaaacaggtttaaagtataaagatggaataagatgcactgtacaaaactgagcgtaggaaagctaatatagtgattactgtttaagggagacttcagagtaaggcatattaccaagaaaaaagagggacatttcaaaatgacaagggggttaatttatcaattgtaagagtgtttgcatcgaataggaaaaattcaaaattcataaagcagtgttcaacatttgtttcccagtaattaatagtataagtggagagaaaatcagaatttagaacacttaataacattgtcaacaaatataacctaagttgcattgtagaacactcagcgacagtgatagggacaggaggcagggaaattctgggcagaagagggtgagtccctggcgagggccccgccctcaaactgaaaaagcctggtactatatggcccagtgtgagaactgacatccctgtttgtccggtcagatgttgccttttccaaaaccactcatggcctgccccgcccctcattctgtgcccataaaaaccccaggccttgctggcagaggg

SEQ ID NO: 25005 - DNA, 1054 bp, Homo sapiens
gccaccttggccttcagcagccatcaccctgatcagtcagcagccgttaacatcaagtcaagaccctccactgtcaaaaagattgtgacttattgaaggctcagatgatcattagcatttttttttgagacggaatcttgctctgtcgcccaggctggagtgcagtggcacagtctcagctcaatgcaaactccgcctcccaggttcacgccattctcctgcctcagcctcctgggtagctgggactacaggcgcccgccaccacacccagctaattttttgtatttttagtagagacggggtttcactgtgttagccaggatggtctcgatctcctgacctcgtgatccatctgcctcggcctcccaaagtgctgggattacaggtgtgagccactgcgcccagccacattttttaaatcaatattttaaaattaagataggtatgtttgttaagacataatgttattgcacacttaatacactatagtatagtgcaaacataacttctatatgcactgggaaaccaaagaaattcatgtgacttgctttattgtgttactccctttattgcagtggtctggaactgaactcccaatatctcttgagttataactgtatataatttagtggcattaattacattcacaatgttgtgcaaccattgctaactatttccaaaactttttcatcactccaaaaagaaaccctgtaactccccatcctccttttttcctcactattaataccactggcagttaatacttaaccactatctcactttctgtttccatgaatttgcccatttcatgtaagtggaatcatacagtttgttttcctgcatctgactcatttcacttagcataatgtttttgaggttcattcatgttgtatcatgtattgaacttaattccatccttacttcctcctacctccttccctgtgttgcctaggctggagtatagtgggatgatcacaggtcattacagcctcgacctcctgggttcaagggatgcctcccctgcccagcctcctgattagctaggactatgggc

SEQ ID NO: 25006 - DNA, 1309 bp, Homo sapiens
taccattgagatgaacaatgaaaaatgtgtcatgtccaaattgtttttcagattaaaagacagcaaatttaaaattaagtatttaggttgggcatggtggctcacacctgtaatctcagcactttgggaggctgaggtgggtggatcacttgaggtcaggagtttgagaccatcctggctaacatggtgaaaccctgtctctactaaaaatataaaaaattagccaggcgtggtggcgggcgcctgtagtcccagctacttcggaggctgaggcaggagaatggcgtgcacccaggaggtggagcttgcagtgagccaagattgcatcactgcactccagcctggaggacagagcgagacttcatcccccaaaaaaaaaaaaaaaaaaaaaaaaaaaatccccaaattagccgagtgtggtggcaaacacctttaatcccagctactcgggagggtgaggcatgagaatcacttgaacctgtgagtcggaggttgcagtgaaccaagatcacactacagcacttcaggctgggcaacagaacgagactctgcctcaaaaaaaaaaaaaaaaaaaaagtatttaatttttatcatgactaacacttcagtaataaaagatctaatatggcactttttaatatatagttattgaattctagaatatagtggttgctttgcattattactgtatatagtgtatttgtgcttattttatagtttatggagcaaaatttagtatattaagccatttttgcatcttaaccagctgctgcctaattattacaggaaaatagtgtggaagttcagctattctaaatctaaaataattggttttggtacatattctctaacctttagatggtctgtagctattgagccatatatgacattcttttaccttgcagtgaatttcatagcttgttcatattggggaagttgtacatggaagtcatattgcttgaaggtagataatttaatggctatggaggtcatttgactgtacctgctttaaaatttctctagttacaaaaagaatcatatgaatatctacattgatacaaaaaaaaagcccttgggaaatgtccatgtatgtagaaatactcaagaacattaaaataaggaaaactttcttaatatgatcacacacatacacacacttctgtttaccttaagatcccatgctatttaatggggaaacatgagagatacttccactaggatgaggaacaaggcaaggattcttaccatccctacttctgtttacattgtactagtggtattaactaatacagttagaaaagagaagtca

SEQ ID NO: 25007 - DNA, 1053 bp, Homo sapiens
aatcaaagacaaagctacccaagcaacgcaacagataaatctataggaaaaaggctttccctatgaaagccaattcaaaaaattggaggaagtgactgttatactaaatgtacaagtattaatataaggatacaagaaaagtagaaaagcaaggaaccatggcatctccagaggagcccaataattcttcagtaacagatcccaaagaaaaggagattggtgaaattcctgaaaaacagttcaaaacagtgatatcaaagaaactcaatgacatacaaaagaacacaaacaatacaaagaatcaggaaaataatttatttgaatgagtaattgaataaaagagatagatagattaaaaagaaccaaacaaatcatggagctgaagaaatcaaagaatgaaataaaaattcagttgagagctttagcaatagactagatcaagcaaaagaaagaatttctcaacttgaagacaggtcttttgaaacaatccagtcaaaaaagaataaaaagggatgacaaagcctctgtgacatataggaagcaacaagcaaccaagtatttgagttttgagacttccagaagaagagatggtcaaaggcatcgaaaacctattgagtgaagtaatagctgaaaactccctcagtcttacaagagatatggatatacagatacaggaagttcaaagatccccaaatagatttaacccaaaaaggtcttctccaagtcatattatagtcaaactgtcaaaagtcaaagacagaattccaaaaacaagagagaagtgtcaagtcacatgtaagagaatccccgtctgtcttagttcgtttgtgtttctgtaaaagaatacccaaggctggtttatttataaaggtaagggttttatttggcttgtggttctgtagactgtccagaacctcagactgcatccactcatggcggaaggtgaaggggagccagtgtgtgcagagataacatatcaagtgaggaagcaagagagatagaggcatggtgccagactctttttaacctccagctattgcaggaactaacgga

SEQ ID NO: 25008 - DNA, 1057 bp, Homo sapiens
gatccttgacaaacctgacaaaaacaagcaatgaggaaaggatctcctattcagtaaatggtgctaggaaaactggctagccatatgcagaaaactgaaactggacctcttccttataccttatacaaaaattaagatggattaaagacttaaatgtaaaacccaaaagcataaaaaccctagaagaaaacctaggcaataccattcaggacacaggcatgggcaaagacttcatgacaaaaacaccaaaagcaattgcaacaaaagccaaaattgacaaatgggatctaattaagctaaagagcttctgctcagcaaaagaaactatcatcagagtgaacaggcaacctacagaatgggagaaaacttttgcaatctacccatctgacagaggtttaatatccagaatttacaaggaacttaaacaaatttacaagaaaaaagcaaccccatcaaaaaatggacaaaggatatgaacagactcttcttaaaagaagacatttacacggccaacaaacatgtaaaaaaaaaaaaacatgaaaaactcaacatcactgatcatcagagaaatgcaaatgaaaaccacaatgtgataccatctcacgccagtcagaatggcaattattaaaataagtcagaaaacaatagatgctggtgaggctgtggagaaataggaatgcttttacactgttggtgggagtgtaaattagttcaacgattatggaagacagtatggcaattcctcaaggatctagaaccagaaataccatttgacccagcaatcccattactgaatatatacccaaagggttataaatcattctactataaagacacatgcacatatgtgtttattgcagcactgtttacaatagcaaagacatggaaccaactgaaatgccatcaatgatagaccagataaagaaaatgtggtacatatacttcatggaatactatgcagccataaaaaggaatgagatcatgtcctttgcaaggacatggatgaagctggaagccatcatccttagcaaactaacacaagaacagaaaactgaac

SEQ ID NO: 25009 - DNA, 1029 bp, Homo sapiens
gtgagccaagatctcaccactgcactcctgcctgcgcgacacagtgagactccatctcaaaaaaaaaaaaaaaaaaaatcaacaaccattcctaataaaaattcttaagaaagtaagtatggatggatgcttccttaacatcatgaaattatctgtgtccaaagccagcatcttagttcagaaatattataggcatttccactgaagtcaggaaacgttcactactagttaacattgttctgaaggtagtagccaatgtaattaaacaagagaaatctatgagttggtaagaagaaaaaaacaagattatctctattttcagatgacataactcaaataataaaagaattcagctatataccaggatataaaactaacatgcgaaagtgaatagcattcatatatacaaaatgaccaatgaaaatatataatggaaaagaaaacctcatttacaatagcaaccagaaagataaaatacatagaaataaacaacgggaagtgttcaaaacctgtatgaaaaaaaaagtctgaaagatatacaagtaaactttaacaaatggaaggatggcccttgtttttcatgaggatgtctcaacatgatcaacctgtcagttttcacatttaatgtgattacaataaagtatcgagctttttaataaagccccacaattttatattcaaattgaaaaagtaaacatgcaaaaatagctaagaaaataataaaaaaaaaaggaggggggattctagccttaccagatactaaaactacaagaaagtttccttttctttttttttttttttttttttgattctcctgcctcagcctcccgagtagctgggactacaggcatgcgccaccatgcccagttaattttgtatatttagtagagacagggtttcaccatgttagccaggctgatctcgaactcccgacctcaggtgatctgcccaccttggcctcccaaagtgctgggattacaggcgtgagccaccgcgcccggccctaaaactacaagaaagtttctataa

SEQ ID NO: 25010 - DNA, 1050 bp, Homo sapiens
aagtagaattaaaataaattaccagtttcagtttttagcagatggagtcccaatatttgaaagaatttgagtataaaacttggcaatttatttgattttatttttaattgataataattttatctgataattttaattgataaataattttaattgataataattttaattgataataatttatggggtacaatgtaatgttttgatacattgtggaatcatcaaatcaggctaattaacatatctgtcacctcacatacttaccatttctttgtgatgtgcaatttggtttcttaccaaacttttcaggtctaacttcactttctccttctaggaataggctttaattaaattgttagaaacatgtgtcttcttcctaaaaggttactttgtaaaccttatgttgttattgtataatacaagcaggatgatttctaatcacccaacagtcctgctttctaaagattctttcaccagtgtataagactattaattcaagttgtatagtctgaacctaggcgcagtggcttatgtctgtaaggctcactggaaggctgaggtggatggatcatttgagatcaggagtttgaaaccagcttggccagcatggtgagaccccgtctctactaaaaatacaaaaattagccgggcatggtggcatgcacctgtaatcccagctactcaggaggctgaggcaggagaatcgcttgaacttaggaaacagaggttgcagtgagccgagattacgccattgccttccagcctgggtgacagagtgagactctgtctcaaaaaaaaaaaaaaaaagaaaaaccccaaattatatagtctgaactcttcttgccttcaaatggttgtccccacccagggtcaaggatttgattaacagcacatttcttatagctcttataagttaaacattaatttgaacaggtttaatcttgtatctggattttagttcagtagttaactacttcttgtctgagtgtatttttcttaagtatagaagtattttaatactagtacttaagtatacagttttttgtttgt

SEQ ID NO: 25011 - DNA, 1035 bp, Homo sapiens
gatgggacggctgggcagaggcgctccccacctcccagacaaagggcagccgggcagaggcgctcctcacttaccaggcggggcggccgggcagaggcactcctcacctcccagacggggcggccgggcagagacgcccctcacctcccagaaggggcggccgggcagaggcacccacttcccagacagggcagccgggcagaggcgctcctcacttcccaggcggggcggccaaaattttatccttttaaaattaatttttctaccacatgattgaattttttatttgaaactccagtgaattttgtactgttacaaagacatgaaaatctttgataatggtcttaattaaataggaagatctattaatgttctaacatgttttgtttgaaattaaaataaatacagctggtataatcactgttctgccttccacacactggaaataggcatagatttagaaagcagtgcagtagcaaatgaggtctaatatgatttctaatgaatttggatagtagatctggatcttagaactctctattttgctgtcactgagtccagctatgcttatcctatgtggtttgttctatgatcaattgacatttcttcttaggtttgaaataattataaggaaagtaatttcaatagctcaattatggtcattaagaagaaagcatcttagaccagcgctttatcagtacatcatatttagacgtacagaatttctatgtggctgtcctttaaatattttctatttttgttggctttatctagtaattttaaatgctttttttagggaatgaaaaaatatctgtgattttaaaaaattcaccatctactagttggaagtatcatcataacactactctttattctccaatctccacaccactatgcccatctaagagattcattttgtatcaaattgaaatgttcttgttaaaagcacatgcaatttgtattggctttaccaaagcctgtagaaaacataacatccatcagaattactggaattgtcattaaaagcaaaaataa

SEQ ID NO: 25012 - DNA, 1066 bp, Homo sapiens
aaaaaaaaaaaaaaaaaaaaaaaaaaagaatctgctttatagggtcatctctaggatacaatgtaattcctactaaaatttgttagcattggtttttcttcagtatatgaaactcagatataacaaatttctgatatgaatatctttttaaaaaatacaaagctgtttgtcatagctatcatgatggtgagctaatatttgttctttataggccaaagtttattaaaatttacatccggaatcatgacctttaaaagttaattctttgataccacctatcacattttgttttgaaacaaaaatgctggagaagaaatctctttgaagagggaaaactagctgggcatggtggtggctcatgcctgtaatcccagcattctgggaggccaaggcgggttgatcacttgaggtcaggagtttgagaccagcctggccaacgtggcgaaaccccgtctctactaaaaatacaaaaattagctgggcatggtggcacacctctgtaatcctagctactagagaggctgaagaatcgtttgaacttagagggtgaaggttgcagtgagccatcacaccactgcactccagcctgggtgacagagcaggactctgtctcaaaaaaacaaaaacaataaaaaaaacagggaaaaccaagctttgggacctgggccttccctgctggccgtaatagtcttccttatttctggaattttttttttgtcagaattactttagatttatcactattcattgaagccattaagtcttcacaacaaagaggaatctttgaaataagcttctaaacttcttcattatacaaataaggaaaaatgtcctaaggcattaaatgattagcccaaggtcaacactaataattgatggaggtaggatttctaacccaggttttctgaccctaagtccattgtaatatataattttctaattgtattactggaacttaaggtcacagtttagtcagtagggaaaaatgttttctgtatattaaatataggagaatcaaaggttttattgatataaaaacattttatggacatagttgatatgattc

SEQ ID NO: 25013 - DNA, 1052 bp, Homo sapiens
caatttattgttatgttaagccttacatatactcttccataacatataataccatacctctatgcagtttattttatattgcatatttcagcatgtaactcgaccttttgttttctcatttctgaaataatagaacttcctaagaaccttgttccttagcatgctcttaataaattcctttataaatctgtctctccctttgagtatcatttgaatttttttcaaattgtgggcaagttgaaggccttttgggatgctgacttttatatactgaaactaaaatacttgatttctttattttactcagaagagggtaatgcccatgtatgctagagataatctcaattttcctttacagaatacaaatgaatataaatgaagctcaattcttgatgactttggagaatacttttaaactaatgttttaacaaaatgtgtggtcagataaattttggaaatgctgcaccgtgacctcccttgtcaaagtatccattagcatatttgagactctgaggaagtacttctagaaagaaccatttttaaagttagtttgatagcacttcacaaacttccttaactatagaaccatactgggtgttacgtactacggtatctttggtttgtgtcagtaacagctttccttcttttttgtgtgtattagtccattttcatgctgctcataaagacataccggagactggacaatttacaaaagtttaatgaactcacggtttcttgtggctgaggaggcctcacaatcatggtggaaggtgaatgacacgtctcacatggcgtcagacaagagaagagagattgtgcagggaaacttccctttataaaaccatcagatctaatgagacttattcacttaccatgagaactcccaccgagtttctcccacaacacatgggaatttggggagctacaattcaagatgagatttgggtggggacacagagccaaaccatatcaactgtgagacattctctgctgattctttaagaatttaggaatattaactagtcctaattattgccattgtttcttatttt

SEQ ID NO: 25014 - DNA, 1038 bp, Homo sapiens
ctgtaagaagcttacaatctaaagcaaaataaattttttaaaaaataagttcaacataactttatgagcatttatttttctttttagctaccatttatggggtgttaacaatatgttaagcactatgctaagtatttcacgtgtattgtttcacttaatcttcacaaaagccctgagaggtatatggtattattggttatcttttctaagctttagttttctgaagctcagtaagataagtaacttgcttagactcataattccattgaatcctggagttagaacccagcctgtttaatttatatccttaactaatatacaatatttctttgttggaataatgtacggaataatgtacaaattaatagtgagggtacaaatgaggagtggtttgttgttccaggaagctagaaaatcataaagaagatggtatcatttgtgttttaaaagacaaggttgagcagggatgcatggtaaatatcacctaaaaaggcatagactgtaaaactgggttctacatgtgtttgggtataggacactgagcaagaggagatgagactagagagcaaggtcacattagagcaaacctcctatgtcagagtagataataggcaatggatagaatttttagcagaagagtaatattatcggattcgcattttagaaatggtcttaagctgcagtgtgaaagttggattggaggaatggattctagagagtgtcataccattaggagattattctgttaaaacaggtcatagatacacagtttttagttacagactaaagtagtaactagagaaagacgtgtctgtctcggagacggataacgtttaagtatttgtttgattaaagcaatttttctcaattgtttaagaggaaagcagtaactacatcatgtgcgctaaaatttgtaggtttactttcttttggaatggggattagattagattcaaggatgctgcattacctgaaaattcggattgaatatgaagttaacatgcctttacgaatggaggttagcaaataacactgttt

SEQ ID NO: 25015 - DNA, 1025 bp, Homo sapiens
tttgagagcaaagctaatgtcttactcatcttatgtctctagggcctagtaaagttccaggttcattaaggactttaaaaatatgttaaatgattacaatgagtatatgtaatggttcttatgatgtgctttgaacaactacaccctctagttatttaaaattactttatattttccatagagatgtgaggaggagcttcttcaattactgacacatattttgaattatgtaatgtgtaagggactagaaaagtctgatgatgatacttggattgaacgaggacaagtgttttcagcactaagtaaaccaggaatatccagtgaactacttcgaccatcagatgaaataaaactaacgtaagcatttagttagtgattttccatcctccttttggtgacagcaggagtctaaaataacgttagttattgaacatttattcagtattctgtggatataacaagggagaaaaagagaaactttgtgctcagttccttttcctatcttttgccgtattagtaggatctaaagaggaatcccaaactcattccagtatgaggaggtttaagtcttaagtaaatttgggtcataagtgattacagattttttgtttaaactgttttcttgcagtatttgaggacttgatacattgttttctacaggcttgtccaaatttgagtgtttccgtgctaagagaacggagttgggttttcatgataattatttctctgaaggatttagggttccttgtagatcaagtttgtccaacccacaggttgcaggccacacatgcagcccaggatggctttgaatgtggcccaacacaaattcataaactttcttaaaaaattatgagatttttttgtgatttttttaagctcatcagctattgttaaaacatatcgttaaaatatcattagtgtattttatgtgtggcccaagacagtccttcttccagtgtggctcaggtaagccaaaagattggacacccctgctgtagataataggactctgtaatggtagtaca

SEQ ID NO: 25016 - DNA, 1048 bp, Homo sapiens
tggcaatagtagctctttgcattatctctagttcccttgttaggggaatgctatgatggtaatgctctctagttttagttactcttgaaagtctcattttatagtttaagattcatatttagtacttctaattattatttacaaacaccactacaatgcagtcttagtcacagattcctgtattttgtgggtcaattcatgtctcccagaatataactaaaatgacatgaccaatattgccttatttttcagctgtcctctgctaattgttttacaggttcactgtgttttattataatgggtcatataaaatcaggatgtaaagcttatttttaatgaaactgaatcattgagtaataaaaatatttggatactgtttaagtaatttaatatgcagaatacttcttgagggtaattcagatattctttcctggacattaatttgacagataagtgatttatatttgaggccaggcacagtggctcatgcatattatcccagcagtttgggagaccgaggtgggtggatcccttgagctcaggagatcaaaaccagcctgggcaacatggcaaaaccccacctctataaaaaatataaaaattagctgggcatggtggcatgcacctgtattcccagctacttgggaggctgaggtgggaggattgcttgagcccaggaggcagaggttgcagtgattgagccgacattgtgccactgcactccagcctgggtgacagcaagaccttgtctcaaaaaaaagaaaaaaaagagattatatttaaatgtggcattcttttctatttaagaaaaataaatggttgaatttttctgtttattggcttcttgtttttacagtgatgagaaagaagaacaggatcaaaaagaaaaattggtattgatggaagactgtgaactcattacaataattgatgtaattcctggcagattagaaatcactactcaacacatttacttctatgatggcagcattgaaaaagaagatggtgaggagttctggaaaaaataatttttgctgttcaataatta

SEQ ID NO: 25017 - DNA, 1064 bp, Homo sapiens
ctttccaataagtaaaaatcctctgttttattaaggaaaaaatagctatgttttaggtaaataactctgaaataaactggtacaacaattgtaaaatagaacatatttaaatgtcaaggtgtcttttcttaagacttcaggaatttgtattgaacaaagtctcaagttaagtagcaataattatgatgcataaatgagactggcatctattcatttattttattcttttttggggtgatgggaggtttcaatccagtgcttcacccgtggtgccaccgtggctatctttttttttatcttacagttttttaggagatttcaagtcggcagaactaacatgattgatttttagtttttaaaatactgatttttttagaaactttttctaaatcaaaacctactaagttttattttgttatttatccagagattttgatgtaaaaatgccttcatttttaagattacttaatactggatttgaaaattattttggatgcttataagttttctaaaacttagataattagaaaaaatgcctaagtttatgatgttttactatgctgctttttagatggaagaaataagcagtttttactttatagtacaaataagttttgttcacaataaaatagatatcctacctggactaatactagatgtacaaggtagtggaattatttcttatattgctttttccaaaaagtaaaaaccaaaaatgtgggccgggtgtggtggctcatgcctgtaatcccagcactttgggaggctgaggcaggcgaatcacaaggtcaggagttcaagaccagcctggccaacacagtgaaaccctttctctactaaaaatacaaaaattagccgggcatggtggcacatgcctatagtcccagctacttgagaggctgagcagcgcaggagaatcacttaaacccgggaggtggaggttgcagtgacctgagatcacgctactgcactccagcttgggcaacagagtgagactttgtctcaaagaaaagaaaaaaaatatggaatttagagaaaaatctttgagaatactagcaacagtc

SEQ ID NO: 25018 - DNA, 1076 bp, Homo sapiens
gagcaaaaccctgcctttaaaaaaacaaaaaacaaaaaaggccgggctcggtggctcatgcctataatactttgggaggccgaggcaggtggatcaattgaggtcaggtgttcgagaccagccaggccaacttggtgaaaccccgtctctactaaaaatacaaaaaaaaaaaaaaaaaattagccagatgtggtggtgcacatttgtaatcccagctactcaggaggctgaggcaggataatcgcttgaacctgggaggcagaggttgcagtgagccaagatcgcaccactgcactccagcctgggtgtcgagtgaaactcattctcaaaaaaaaaaaaaaaaggaggtggggagagctatttcaagaatattttaagtaggctgggcacggtagctcatgcctgttatcctaacactttgggaagccgacatgggcagatcacgaggtcaagagatttgagaccatcctggccaacatggtgaaaccccatctctactaaaaatacaaaaaattatctggacatgctggcgtgcgcctgtagtctcagctacttgggaggctgaggcaggagaatcgcttgaacctgggaggcggaggttgcagtgagctgatgttgtgctagtgcactccagcctgggcgacagggctgagaccttgtctcaaaaaaaaaaggagtatcttaagtgtctttcaaaattacactttagcacttataaattttatatataatactttactgatagcattgtatattagtccaacttttttggctacactatttgtgaaggattcctttttttctttaagacagccactgtaggaaatatgccaagtacagatagtgaggaaagaaaggaagaaaaatgataattgtctgcaagtgggcttatttttaacactgctgaatttcatttgtaattttactttcaagaatatactctggtagactgaggcgggaggatcacttgagcccaggagttggaggcttcagtgagctgtgatcacaccactgccctcagccaaacctgagtgataaagtgagaccctatctcttaaaaaaaaaaatccctttgt

SEQ ID NO: 25019 - DNA, 1041 bp, Homo sapiens
tgtatttttagtagagacggggtttcaccgtattggccaggctggtctcgagatcctgaccttaggtgatccgcccgcctcggcctcccaaagtgctgggattacagcgtaagccaccgtgcctggcctagttgtagacttttgatagcttatggttgaatttttatgggattggttaatagattggattcatgaggtagcatgtagggcaacacattctattttggatttttcatttactttgtgtttccttccagatacgaagctcctagaagatggagtcatttcttaaaaatttctatattttcccattagccgtaggatgttctccatatactagccactcattaaatagttgctgaatgtaagaaatacagacttgaatatgcaagagcctatgcactgaattatttttattttattactttattttattttattttttgagacagggtctcactctgtcactcaggctggagtgtagtagcacgattatgggtcactgcagcttgcactcccaagctcaaacagtcttcacacttcagctcccaaagtagctgggactacaggcttgtgccaccatgcccagctaattttttttgttgttgttgttagaaatgggatctcactatgttgctccggctggtcttggaacacctgggctcaagcaattctcctgccttggcttcccaaagtgctgggattacacctgtcagccgccatgcctggccttgaattattttataagtaggatataattacatgtaaatttaccttgcaagttttttcctatttgattttttggtgacatttatgttctgtaaagttttgcagtacttttcatatttgcataattcatgcaaggaacatagttttgcttttttcttcttaagtaatatactttgtagaaaatttggatgaggtaacagctttgttttgaatcatttacaacatgaattttttctcatttgatttttaaagtcaggtttattgagttttaatacatatatggtacaagtcaccctttttaggtgtaaaggt

SEQ ID NO: 25020 - DNA, 1647 bp, Homo sapiens
tttcaaactcctgacctcaagtgatccactggcctcggcctcccagagtgctggggttacaggcgtgaggcactgtgcccagcaatattttcttttttaatcagatgagttttgcttttgacaaaaatttgcttctggccgggcacggtggctcacgcctgtaatcccagcactttaggaggccgaggcgggcaaatcacctgagatcaggagtttaagactagccaggacaacatggtgaaaccctgtctctactaaaaatacacacgcgcacacacacacacaaactgaggcaggagaatcgcttgaactggggaggtggtggttgcagtgaatggagatcatgccattcactccagtctgggtgacaagagtgaaactccatctcaaaaaaaaaaaaattgcttgtaattctatgttgattccaaataagatttcagaatagtaagctatttcccaactatttaaatctttgaggagtttattgttgcagatgtgcaaaccagatagatctaccggatgctactttggtatttggtatctttttcaggtttttgctaacaaccacaaaagactatgtttgtttgtttgtttgtatattagaggaaaatatttctgcagcttgggaatatatgggactaataggcatgtgtatcaccagtgtgtatgataccatattactgcctgaatgaacacatcagctgtaagaaggaaggtgagaatttgagaaatactggtctgtgttttgggtttatccattactggagttgcacgttttcccttgtcataattcctgtagcttttagctcttcctcattgtctgttgagttgaattaactctttctcccccaccacatttaactctagggagtgtaaacttgtgctgttctctttctcattccatgtttctgttgtcttttagttaacatcttgtctttgaggggaatgaattaacttctttaagggaagtgaattaactactttgagagaaataggagaaagagcagggacaaaataataacctgtggccaaaaggaggggatgtgatgtatgatgaaatgtcattcctttatcttatcttatattcttgcagtgctagctgttaaaatggatccagtagaccttaaacctaggcccttgtttgtgctgcccgacttcatgtgctatagtgcattttaaaatttattcagccattcatttcttatcttataaacttgaatttgttttaattttgtatagtttttcttatttaggaaggactttgtgttcttacatgagtttcatataatagagtttgaaactaagctattaaattatgatgattgccctaacatgtgcatcaggtacttttttgttttgtagttggttttattggagccattgcatgtcctaacagggtaaggagtgatcatatagaaagcaaggaagtgatgggtttggtctctggtcaaaccatagaagtgagttgagtaattcatttttgctctatttttccatctgaaaatgggaaggatgatatcctgactcccagtttatgcaagttttgttcatagataaaggtgcactggttttcactcatcttttgtgtgaaatttctggtggcataggaatttagaaagaaatcaataaacttgtgattcttgttct

SEQ ID NO: 25021 - DNA, 1056 bp, Homo sapiens
aaattcagactatagcaatgaatatttagaaattaagcagttttggccaggtatggtggttcatgcctgtaatcccagcagtttgggaggctgaggcgggtggatcatgaggtcaagagattgagaccatcctggccaacatggtaaaaccccgtgcctgctaaaagtacagaaattagctgggcgtggtggtgcatgcctgtagtcccagctactcaggaggctgaggcaggagaatcgcctgaacctgggaggtggaggttgcagggagctaagattgcaccactgcactctagtctgggtgacagaacgagactccatctcaaaaaaaaaaaaaaaaaaaaaaagaagcagttgtaccctaaaggccttttaagttagttaatgtggtctattttattttaggatttaaaaaaacactttaaaataatttaaaaacaatttgtgttgtcatgtgaggtcggttatcaatgataaaggttcttattggtaagaggatgaggaatgctttaaacaaaaggcgaagtgttgggtggagcagattatttggcttagatttttgagaagctggaaaggagaaatgggatatgatgaagggaaacaaatttggtggtttgggatagaacagttgaggcactgtaaacatgaggtaagaagaattaaagcagtgtaagtagtggaggacagagatggtaagaatagagagagatgaacaggctaaagaagcagtttagcaaaatggagaatttagataccaggaatgacctgattcaggctagtaagtgacgtttgcctagagatcagtctaactggggctcaagatatggcctagctgtgaaacaacagatgatgagtgagaagcccagcatgcagaaaagaagtttgcttggcaaaccagagattctaccaatatttagggacatggctttccaagatcaggaaacttctgagtttagaacattgactcaacacaaggttaaatgggactcttgtttagtctcctttgactcttatgctgttgctaatatcatttatgaaatcagcaaggaccaaaat

SEQ ID NO: 25022 - DNA, 1034 bp, Homo sapiens
tagaaatacacggaaagtttaattgaagaaaaaatacagaaacacacagattctttacccttaaagtttagactagcttgcccaagctactatctcatgcttgttttctctaagccccagtatgattccttcttgatgttcctgcgtcaggatctgtttccattgtgagagacaggccaaacagagtctcctagaaagatctaatgaagaatcacacttagataagatccctgagctttttggagacctgtggattctagcaagtgtcttagaagtctcctgatgagcaatagcattatggattccttatcctcattttaatcagggtagctgattaaatgttcaaaatttaaaacctatttaagacctagtcgtttttctttctacttctctttttctctttctcagcactttttgagctctgtctttgctgctcccattgctgtcatactttttatacttttcagacagtctccagagaaagtcatcatactttaggaccagacatgtgggatttgactcagaagagacctccttgtttaaaagtttaacttttactattttatacagcatgtttgatgcttaattgttcttgacatctgaaatttggattaactgtttttcttcagtcaagttacaaatttaagagttcataagatttttaaaaacactatggtaatagttttatagcaaaggacgtacaaggtcagtggatagaatgccatattggaggtgttttcatatatacctaaggccatataaaagtggaatgtaccttgaactggttcctgttccatactcttgtttttgtttttgttttttttttttttttttttttttttttttttttgagacagggtctcactctgtcacccaggctggagtgcactggtgtgatcatgactcactgcagctttgactgccctgactcaagtggttctcctgcctcagcttcctgagtagttggtactacatgtgtgcaccaccatgcctggctattttttaacaaattttttgtagagatggggtctcac

SEQ ID NO: 25023 - DNA, 1017 bp, Homo sapiens
gttttggttggtgtttagaaagtcaccatgtttgagtgctacaggatttgggaacagatagctattcactggcttggttctgtctttctaggaatattactgtctttcacatcctgttttgttttcttccctcctagttgtggcaatttatgactatacaaaagacaaggaagatgagctgtcctttcaggaaggagccattatttatgtcatcaagaagaatgacgatggttggtatgagggagttatgaatggagtgactgggctttttcctgggaattacgttgagtctatcatgcattattctgagtaaagctcagcagggctgtgcttgcctcacaggaatagtcaggtcttcccagattatctgaaggccctggggattccactccagtaaagtagaatgaaggatacaaatgataaaaattacacttttttttttggtttattccccagtattaaaaacaaagcaagctgagtctgaacaaatggatctttctgccatcatttgtacaatgctgagctgtctggattgaaataaaatgaccatttttatgtatgtcaaaggtataacagcataactgtgtagccaaaacaaaatcagattaagactgattcagaaaaatctgggatctttctcaggaatactgtatacccttgggatttctcctcctgcagaatctgtggcattggatgttcttcattgcctgtgctaaggggttaacctcatggcccagtgggtaccctagccccttcttttcttccacttgtatgaagaggagggaaccaacatttaaataccacacttaaccatttttacaattatttcagatggcttttttcctctgtgacactgtaaattctgcattctctcagcacttgagtgcaccaaacgagtgaatgctgaactcacttgcatcccttcatgtttctgtttgtggattataaggatgatgaaatgtgaaagtctcccaacactctgagggtggtgaacgattgccacccgtttgattttaa

SEQ ID NO: 25024 - DNA, 1048 bp, Homo sapiens
cccctcctttttcctactgctggtgtttattatccagctagacaatattttatgcatatttaccgtgatgtctggaccgtacctgtgctccttggcagtttatgttgaagataactaaagatttttctctttgggaggcatcaaaatgatggtagtttgcttttatctttttatgttcattttcttttagtaggtgacctttctgcattaagaactgtttttatcttttactaccttttcttttctcctttgtggagacagcatgacatgtcctgaaggtcacctttgcctttgaaaaaggtttgatggaggaattcacaggtgactgacaagtctttgaaaagaatgggatctgctcacttctggtctttttggccgggaactcctgattggtgttaaggtggtaatttcccccatataagatttagaatcactgagtttgagctagatgaaatttttaaaatttctggttgtctcattagactgatgaggtgagttttcttcttcatatgaacagctagttaataacagcagagttctcactcagtgctcagtacttaattttccactgcaccacaactgtcttaactaaatgtgctgtatttttctttaaaagttaagagttctatttggtgttttcaggaatatacgtgaaaagacatgccatgttttggtaaataccatcagagttgtgtaaaggcgtgtactaagtgcaatcttaatttgtggaaataatcttcatttacccctcctaaaactacactcagtataaacactttcccataaggtgtgtgcagtaaaaatgttatattactccaacactggcaggagcacagcacagcagccttattggagagagccttataaaagtgattaaatggaggcattgagctcattacctttaagtttactttgtgctgacctttgttcctgttttgagaatctcatataattattaaaaaaaaaaaacaattaaaacgaaacggcggggcctagctgtgtataaatgatccttgctgaatatcttaaggttttttgtaagaaaaaa

SEQ ID NO: 25025 - DNA, 1053 bp, Homo sapiens
agagtacttacctttgctgtgaatgatgccctcagatttctaaattctattttgtttcactgaaaaagtagttggggtgtgctaaattgatttcactaatgggttagggcccatagtaaaaaaaccactggagcttcctgatgtttatggacacaggatggaccatcagatcaagtgactcagaaatcctcacagcgctaagatctgattgcttatagatttatccaaagtgtgaggctgaagttaagcttctaaaatgaacttaaactcctaaaatcaaatgacattgtaggtgttaataggtgaatttttctgtggattataatgccacgtaccttatatgtgtaatagagataatttttggatcttgagacttgtgtatggctagtgtgtgagctaagagtcatcctggcccagaagtcgctgtggctttataaaatcttcgagaaactgaaagagttttacttgtcatcttgtttttcttttgtcatgacatggtgatagtattggtaactttaaatattaggtctggattacttccttttgtagcaaagagatgaggaagtgtaagatggataaataatccttgcctctgtatttatagacacatttatagagattcagtgggcttgagttttgacagcagtgtttgatcagaaacattttcccagaaccttaaaaaaaaactgcagttcaaatatttctaataaaaaaaatttttttttttcgttgctgtaactagatttgcatttccgatttttctctctcttgtttcacttttgtctgtggctgaggaagggccacttgggaaatgcagctgtgggtcgtaaggagtccctcactctatcgctctgtgtttcctggggctgccatgacaatgtaccacaaactgggtggtttaaaacaagagaaatttattttctcacagttctaaagtctgtagattcaaatttaaggtgttggcagggccacgcttccttcaaaacctctagagaaggattctttcttgcttcttccagcttctggcagcccagggcatttctgagctatggc

SEQ ID NO: 25026 - DNA, 1050 bp, Homo sapiens
gtcagtggtacaaagttttcttagtgtctcagttactgtgtgtttttctccagctaatgcagtatgataccctataaggtctttcagtggctttttctcttctctcttgaaaaactacaacaacgtttgtcttataaagttctcatcatgtctgcattaaaaaaaatcaattccttttcctttaaatccttagtgattattttcaaaatgatgttgcaactgaactatttgaaaatattctgttgcgtaagacatagtataaattactaaatatctataaagacaaggtaaagacaactttgttaatgtttttgtttatttataattttcctcagggttgttttgattttttttcttaagtagttgcttcccttccatggatcagaggcctctaatgtgtcagtttcatcttttttagtatctttaggcataaaaagtatgtatacctgtgggtaggaaagcaggctttctaaacctctttttttttttttttgagacggagtctcgctctgtttcccaggctagagtgtagtggtgcgatcttggctcactgcaacctccgcctcccaggttcaagtgactctcctgcctcagcttcccaagcagctgggattacaggtgcccaccaccacgcccagctaatttttgtatgtttagtagagacggggtttcatcatgttggccatgctggtcttgaactcccagcctcaggtgatctgcaaccccttagcctcccaaagtgctgggattacaggcttgagccactgtgcccaggctctaatcctcctcttttatgttggatttttttttcgttaaaacgtacataacataaaatgttccattttaagtgtatagttcagtagcattaagtatattcatattgttgtgcaactgtcgccaccacccacctacaaaacttgttcatcttcccaaactgaaactccatacccattaaataataactccctattccccactcccccaggctctgacaaccaccatttactttctgtctatgaatttgactactctagatacctcagaagtgga

SEQ ID NO: 25027 - DNA, 1030 bp, Homo sapiens
tttttagagtgttttgcatgatgcctttttctctaagaggaatcaatactttagtgtacagttctgcaagatatttttttaggctgaagagtaacaaggaagcagggtagagctgatactaaacttacatagggagcgtcttggctttgagactcttcatccatgactggattagttattttaaaaactctgcttgcgtggactcacaggatcacaaattccaaacttaaggacctttcatcttctggaatatagctgggcttgaggtattatatggagtgtgtgtctatgggcatcggtgtggtgaatacttctttgtatatatatattttttgtgtgtgttgtacaagagtgacttcataaaaggtggctcttgccagaattcagaacacagcaggtaatgtacttactgaagaggtaagagcatgagtaattcttgtctcatgagaaagatgtaaactagtttattataatgatgtaatatttgggtgcctgatttatcatccccatctccaatgatgcaaaaccttaagaactacacaggtgataaaaattcaaatggtgtctttgaagtccggcctattcccctgagcagttaaaagtgtcacctttgtcctgatacgttgctgtttgtggatgtttccggagatcacggttaaaatcttgaactatgcactctactatgggaagttttgggatgtttattccgtgagagaggtcataatctgggaagatgagagtcattcagctaatagggcaggaaaatatcacagtcaagctgtagacttgggatgatgggagtatggaagagatgattcctcctgtgtactgaggggaaccaggagagggagagttgtcaggaagcgtgtggtctttgaactggatctcgttttaggagaaacttgagttgtcccggttgagaaccagcttaggcaaaagtgtggccactttagggcaggctgggggcggggatatgaaaggaaatcatcatcatcatcatcatcatcatcatcatcacaacaacagtaat

SEQ ID NO: 25028 - DNA, 1351 bp, Homo sapiens
tatttcccatctactttaattactttcagcgggattttattcattgtaggcaatgaattgtccacggataaatggaattgttggtagtcactttcactttggagctcttctataatcgaaatatgaagatatttgcattgctttatgaggacatttaaatacaagaagtaggtttttatatttcagattgaaagcaaagaaagctacctcactgattctaaattcactttgtaaaatctcgaattactgaaattaagttcattcagctcaaataagccaattgttttccctttgctccaagggagaagagcaggctctgtaccatcttgattggttttttatttgctcatcccctgatatgatttggctgtgtccccacccaaatctcatcctgaactatagttcccataatccccacatgtcatgggagggacccagtgggaggtaattgaatcatggcggtagttacctctatgctgtttttgtgatagtgaatgggttcttatgagatctgatggtttaataaggggttttcctcccactttgctctggacttcttgttgccaccatgtgaagaaggcctccccagccgtgctgaactgtgagtcaattaaacctctttcatttataaatgacccagtcttgggtgtgtctttattagcagcatgagaatgggctaatacatcccccttttgtaataccgtgagggagggcgtgcattagaattgtggtattccagtaggaaaatgaatacaccataacaagtcatggtatctgactttagaacacaaaccatttgtttctgatgttgatgtgcagactggcttccgtgacttggacttgcattctcttggtcatgtcagatttaagattcttttatgcagaacaagctaaacaatatcatggagttataggaacctatttattgtacatgtaatgagataaaggtggcctgtaataaaacagtgctttttaatattgaagatgctgaaactcctggagaagcaggtaacctgcgtatttaattcaaggactgaatcataagagctcatctttgggaaggagcttaccatcatttaatgctggatttttaccttgcttcctacagaaactattccccccactttgatatgcaaatatttccattgggcttttggtttcttttacagttttccaaggcactacatcattgtatttggtaatttcactttctttgtgtaattgttcctaatctttattctaaaatcttatcctacaatagttcaatgaaaggtgcttttctttttcttttaatgtttggaatactgcacttaatggagattcccatgtttactttaaaaatattcaaatt

SEQ ID NO: 25029 - DNA, 1045 bp, Homo sapiens
ttttttcttcccagttcccatccctcattctctcttcctatgcatcctgcttcattaattaaaaatgttggtgagatcagtattcagtttttgtattagtatgatgataaaatattgttgaaagctgagtcacacaggatacttgtacatgtattttttttctctttccctggttttataatggtttcattttgtttgtttagtgatatttctttaaatatatttcagacatgtctggtcaatttctgggaaaggattctcaggagatatattttttttgacatttatgtctgaaaatgtctattctttactcatgctttattacaaaggtttgaaattctaggttgaagtcattctctttcagaattttgaaggcagtatgctattattttcagttttcagtattattgttgagaaggccaccttttacctgccttgtacctccaagcctctgcattttccgcctccagttctttgaaatttcatgatgtctgtgggtttttaaaccatttattgtcctgtgcactttgagcatttattagagcctttcaatctgtagattttcagttttgggaaacattatttctttatccttcgcctattctcaagacacacagtttttcagttgttctctttctggttctgttattgcgttttggaccttctggagcactcttctaattttcttttttttggccacctattttccctttctttgtctttttgttgtattctctgtaacattttctaaggtttatcttaactttctattgactttaaattttgccatcaaaagttttatttttaagagctctttgttgctttatgaactttgttttattccttttaagcatagctattgtatgggtgcaatatttgttcatttctctgagggtataaaagtctttttgaagttttcttctgctgtttgccttattgatctttccttagggttatttattttttctttttatttatgttagtctcctctggcttttatggtacaggattcccacaaatgctgggtgaaccttacattgttcat

SEQ ID NO: 25030 - DNA, 1007 bp, Homo sapiens
aggtattgacaaagcctaaaatggatagacctacatgtaccatgcacaactgtaaaactcttaggacataggagaaaacctagatgaccttgagtatggcaatgactttttaggtacaacaccaaaggcacagtacattaaagaaataattgattacctggattttcataaaactaagaatttctgttttgtgaaacacacggtggagagaatgagatgataagccaaagactggaagaacatatttgcaaaaggcacctgataaaaacgtgttatctaaaatatgcaaagaatatttttaactttccaataagaaaatgaaaaacccaattaagaaatgggccaaagacctgaacagacacctcaacaaagaggtacagatggtaaataagcacatgaaaagatgatccacatcatatgtcatcagggaaatgcaaattaaaacaacagtgagttactactgcacatctattagagtggccaagacccaggacactgacaacaccaaatgctattgagaacgtggagcaacaggaactcgttcattactggtgggaacgcaaaatgaaacagccactttggaagacagtttggcagtttttaaagaagctaaacataccctgactgtatgatccagcaattgtgctccctgatatttactcaaaggagttgaaaacttatgttcacacaaaaatctgcacatgtatatttatagcagctttactcataatggccaaaacttggaagcaaccaaggtgttcctcagtaggtgagagactgaataaatgatggtacatccagacaatggaatattattcagtgaatgggaagtcctgcgtgtagtggtgtgtgtctctttggactgagttgtgagggctgaactgaaagtggcaggaacatgccattttagcataatgctaacattacattagatttggccaatatgtcagtgtgcagtatgtgttaagttctttcgtcccttaaacttcattatctctgtccaaact

SEQ ID NO: 25031 - DNA, 1048 bp, Homo sapiens
tgtgttgcaggggtttggtgtacagacaattttgtcacccaagtaaccagtgtaacactcaagaggtaactcccactctccaccctcaaggaggccctgatgtctgctgttcccttctttgtgtccatgtgtactcaatgttcagcttccacttataagtgacagtatgcagtatttggttttctgttcctgtgttaagttgcttaggataatggcctccagctccattcacgttgttgcaaaggacatgatctcattctttttctggctgcacagtattctgtgatgtatatgtaccacatttcctttagccagtccactgttgataggcatctaggttgattccatgtctttgtgattgtgaatagtgctatgatgaacatacacgtgcatgagtctttatggcagagcaatttctatttccaacatttttaaccatgtaattgtgctttctccaaagttatttcttccaatgcccatggacagtggagagaacgttttcttgtttattgtctctttttgcaaaaacatttcttatctgaactgctgctcttcttactgggccatgtttatgtcctagaattttcacccgggatcacaaactagcatatagagggaacagtgtgccctgaatagtgctgtggcatggagtgtgtgcagtggaaagggcacagacccttggatcacaaagacctggattggaaacccatatctgccatgtaccactggagggacctctgactagtaatttcagtctcagcttctacatgtataaaattatattttattgggttatagtgatgatttaggtcaatgagttaatatggataaagtgctattcagagtggttggaacactgtgatcacactcttagtggacatgtccacaactgcaacagtgacagtgtcacctgaaagtttgggttgggaactcttaactcctagaaacatttctttgcattatgaagtcatttataagcaacttcttttacaataataatgcttaggagtaaaatattaagcttctaatttcctaatgtgacttattt

SEQ ID NO: 25032 - DNA, 1024 bp, Homo sapiens
aatatccttgaattaattttgactgtgcttaacatagcttgggaatggagaagttgagtaaaatattctaatatatcagtctgacttttctccattttaaatctataatattgatttgttttggaaatttcttataaataaagcggtatatttaactttgtagctttattctgaacttgacaaaacatttctagaaaccttttatctagtttttcctaaatagctttctgtggtctctgcccattatcttaaacaaagtctgtctttgagtcagggagaaaagagaaaattattcaacagtctatctaaattagccattatttaatttatctgggtctatacaacttgtaaacagtgataaggaagatcttgtggtgttaaggtgtgtctcatattcacctggtggctatcaattactttcctgtttgaaagtatcagtttgtacaatcattgttctaatctcacttagttcatctcttgctactttatcagggagaactggttatttcaactctgacataggtctagtatttctttcaagggggtgaggggcagagggtaaagagtacactatggcttcacatgtacagtgacagtttgtaagagaaatggaaatagtgacagcccagactcggactctgagcaggaacccttcagtttaggttctacctttctaattagatagacaggacaacttgagcatgcctctcattgtgctgtctttccaggatgatgtgcgtgatactcactaactcaaaacacgcaaccagcatttctgttggtggaaatcctgtacctccttggagggagactcaagacctgcttcttccacaaagcccaacatcattctgttgtgcaaaagtgagccctcttctcccaactcccacgataccctcattgtccgtgtatggcatttgctgttgaggatatatagctcattcagtatacaattacatacaactcatttcctcgatgaatcagaaactctttgagattaaaaagagctcacgtgtttgagcctttg

SEQ ID NO: 25033 - DNA, 1620 bp, Homo sapiens
tcctagtacagcttccacggggaccaagtctccactgtgttacactacttctagcctatatgtgtcaaaatattattggaacagctttggaatattgcatcttatgataactatttgtataaaatgttgtgctgaaacttaataattatctggttgtgacagttattctcaagattcttcagtttgtctatcagtctgatgattcgagttctttgggataaatatctaagaattgtaattttacactcatgtctcctctctggttgctaaaggctaccaacttagttcacccaatagtaacaacctaatcattgatgactagcaatggcccagaatgtctttggcccttatttattctacgttattttaaagcaatcctgaagacaagagctagtgttatccctatttttaatttccagaataatcacagaaattgtaagtaacttgcccaagatcacacaggtagtaaatggcacaatcagactctggaacctagaatttaaatttctgtaatcttatttcttttcttctctgatgtgtcaagcagtttggcgcttgtatctataatttctattacgaaaattcatcagtcataaattaacatgaattttgcttttacgtagtcaccaccattgctaagaaaaggttggtaatagaccaaactgttgagtataacaaaacagttgagtatacaatttatttataaattaattcagaattaatatgccatacatatttaatatatttcaaccctgtttgcctatagcctgcatctagtttattgtaaaggcttgtcagctctacctctgttgctttcttttgcatcctcttttctctaggacccagattatttgatttagatacagtttaatttcagttggacgctttagactgcacttgaagtctaaccaccatatgcaattacaaagaaaaacaagtttgtattacagtaactacttttttgcaccaactatagactgtgctgttttcagtaggcagagtaatggcgcctcaaaaatgtctactccctaatctctacaacctgtgaatatgaatgttacatgacacagcgtctttgcagatgtgcttaaggatcttaaaatggagagattattctggattatttggatggacccaatgtagtcacaagcatccttataaatgaaagaagaaggcaggagagtattagagagataaatgtgagaaagacacacccagccaatgccagctgtgaagatggagaaggtgccaccagcgaagaatgtagctggcctctgacattggaatcagtaagggaatggattctcccctaaagcctccagagagaacacagtcctgctgataccttgattttagcccagtgagacttgtttcagatttcttaactgtcagataataaatttgtgatgttttaagccattgcatttgtggtgacttgctacagcagcaataggacactaatacatacactgcctcttttcccattttaacttttaaagtgatgttagtcttctcaaatttcatattgactgggcattgagatcctgcaggatgagataaatgctttgtacttcagatgggttccttgttctttgccttcctcccaaagtccatcacaaa

SEQ ID NO: 25034 - DNA, 1024 bp, Homo sapiens
aattcatattttatggtagtaaattagatgccacaatgtagggcacatttctataatttttttttaaagttttcttggcaccttaaaaattcaaggaagttaatgagtgccaaatatcaaaaaggttaattagaacctgttacatagtgttgaagtatacatttaggaaatgatttgtcaaatttttccagatatggcataaatgtttcagaataaaatataagaaaatgagtgctcaggtatgaaggaaaatttgtattgtgctaaagtacacctaaaatgtaccatcttcatcatttctaagtatgcagttctgtggcattaagtgcattcacattgttgtataaccagcaccactattcatctccagaacttttcatcataacagtattttttattttgaataaaatcatgcagatattattgagaatatgtttggattcatacagatgcttggaatctttaaaggttttaatgtatcagtatatgtaaagatgaacgttgaaactgtagctcttgttacttcaggtaagacacatgacatccattgatgcaactgaaatctttaccagcttttgaaatactgtcagagtcatgcatattttcttcaggatgaaaggatattgagaggaaaactatattcaaatataaacaatcttcataaagaaccatctgaggtgattaaagataccatgatcatcaaacagttaaaggtggaaaataaaatatggtatttatgagaattttgactggcatgaagattttaatgcatattatcttgctttgctaatcaaggtgattgagatgcacttgcctgttaaatagaacttgctcgtggcttttagttatcagagattttacatttatcttttcttcatttgaatgctacataaaccctcccctttgaatctgagggggccactaatttttttcctagagtgctactcttatatattgagaatattttttcccctaatgcttggagaatgataacaaaaaagaattttttattggttcatttcat

SEQ ID NO: 25035 - DNA, 1312 bp, Homo sapiens
aaacttttagatgctgttgagtatgtttttaacaaagtataagtagattggttttaagttgacttagccattgttaatgattcagttgattttttaaaattaagaatgcattaaaaatgaaattgatacatttatggagaattcataaacgattcaaatcaattactttatagacataatacatatattttgtatgtttttgtaatttttgggaaaaaattagcttaattatgtttctgagtaagctaaagacattcaactgtattctttcaaatttgccaaagaacaaaaagtaagattttgtcatttggtttattggatttttcattattcactatgataacagtccaaaaacaagaatcaatttcttaatgctttattatatgttttgaagggagttcctttgttctgtgtttaccttacagaacctcagagtttaaagccacattctgtttttaagggaaagcaagtcttgtcagtttttataattgcaaataggataggaaatcatgaatggatgaaaagtgtagtgtgataagtcattcactagaaggggagttgaggcagtgaggggcaggatgatggagtgataaagttcatagtaattataggagaaagtgagtataatggcaataaattgaaaattgaccaagtaagatatttgaggaaagccagcatattgtgatcaacatgctggtgtaacctaattacttatataacctgaaagtaaattccaaatttcttctggcaagaaatagtgattttttttcctatgcaagtaataaatttgctgatttgagttcttatacaccttctgggcataacacaagaacatgaaaaatgttattcttcaaattactgaccttatggctaatgcctttccttaatgctagtctcattatattctattcttggtcagaaattccatatgcacagctttcattggaatccttagcattacttttgatattccaaagcacttttcttaatattctcttgccattcaccttaaaaaagcagtagatatagttggttttgttaagaaaagtttcattggcaatcatttatatttctcaagtattgttgctaatcaaaatcctaatatttagcctctctttagcattttagtttgcctttttcttagaagatactagcaaataatatagtgtttcaaagtcacaatgtcttcaaatcttacggttgattcagactgaaatcttttatggattttatgccccacctggagcagtactcagtaatgtattcacagcaaggatgtactctaaaattaattatttgtgtcattcatcta

SEQ ID NO: 25036 - DNA, 1033 bp, Homo sapiens
atgtcatcgaatagtggggggcgggggtgggtagggggaagacaggatggctgtgggttagcatgagaggagaagaagtgatagagaactagaactgatccagtctatttgcagttgttagaatttgactgggccgctaggcagggcaagaagtggaaaatagggaagcggcttaatgtcatgaataaaaacagagtaagagactcactggtgtgatagaaatttctactttgaattatagtggagaacaagtttaaaaatagtagaggagattgaatttgaggaaagacaaatctagattttttttccaggagattttcctcttttgtttgaattatggttatttgaataatccatttcaaaataccacttaatcagacagtagagggaactatttatatgacgtaaaaggtagtttggcagacatgattaaggagaatgttagagaataagatatcaacatggaaagagatgtgatcttttttaatctggaaaaagcaagacaaattgctttgaacatgtaggtgaaaacgtaccttaatgtttccaatttaaccagaaaatatgattaatgtaaaaactatagcaaacacagtaattttactttgtaattctgctataatttgtttcatttgccatattttatttttcttgttgtcatttgaatttatacctgggaatgccataaaacttaataccttagaactataatcaagtcagaagagcttcttttccataatggtgtcatatggtttgacatccactcgtcatcttcaggatgttaaagtctaagatatctactttacatattttatgtattcaaacaataaggttttatgcatgagtgagtttgaggctttggaatatgtgcacccactatttagtaaactgttgccttccattgttagggtatccttgtgagacttaaaaaacaaacaaacaaaaaacaaccagaaaaccaaagcaatgcccctgaggccaactctgtaaacttatgggaggtaacagtaaatgtttcaaggacaattctgat

SEQ ID NO: 25037 - DNA, 1047 bp, Homo sapiens
gtttccagtacatctgtcttataacttgaaatctctgaataaaacttgctgagtaggtattttttaattggtagatgatgagttgaccaaaattcagcacttggccaaaattgctgaaaattgagagaaactgtcatggatgtagttgacaattcattggctttcttcatgttttaaggtagtattaagataacacaccagcaagcaaagtatcttaatcacattatccctgaagaaatgtaatcactgacttaaaatttaatatttcatattatagaggctcaacaggagaactctgtgttggaacattatttccataatacatcttgttcataagatctgtgatgtcaagggctatgtattcatcctgctgatcccaatgtcaaatatgtcttactagatatttgcttcacaagaaagagaagtgctgtgtttaaaaatgtaggctttggaacttaaaatatctgataagcataatcattacacaccagggttacttccttatatcatcctaaaacatttaggaaatgtgctcattttatatattgagaaagtaagattatctttaaaagtgtggattttggagctaggcccagtgcctttgactgtattgcttactttctgctatggggcaatctttatgtctttatgattccattttctcatttataaattgaggtatcttaaggttatgatgatgattaaatggtataataaatgtgggctacttggtaaagtgccacataagtaagccctctgaagtgtttacctattgctgcagctgtttagccattgattcagcatcatacaagcacacatctaatgaattcgtacttttagtgaatgaataaaaaatggtatctttataaactcgaatgttgccccttgttaattttctaacaaattagaactgtgaaacccaacttattttcatttttgccttagagatcagtaagcttagaacgaaattcattattccaatggtgtaacttgttcagttcaattctaggaacaactactactttattttcttcagttgatccctat

SEQ ID NO: 25038 - DNA, 1047 bp, Homo sapiens
aggccaaataagcttcaaaggaagatgtaaaatgtgcaatttaatctatggggctatgtgattagttcaaaatataatggctttattattgaggattaaagagagaatattgggaaacagcatctttccacaaatataattacattttgaaaaccgagttcctcagttttctcagttaagggacagcttctttgccaaactgttcatattatttgcatatctaaatatttaatttcagttattagtgttgtgttatttaattgccttgcacgcaaaaaatggactgatttctcaaaaatgattacatggcaaaaatagaattaaaatattaacatcagaactccagttcaggcactaaatttaaattgacataagttggtagaaaggactctgctagtgccataatttaggggaagctcctaactacggaaatgtgtgaataggaagtatggcagtgaacactagtgttcagatttgattggactgatgatctactgaccccctagtcacctgttaggaaactgtaaaaataagctacccaaatatgaaattgatgattcttttttcccgaaaggcagaagttaaaacccttcagatgtcatttagaatttcaatcctttgtgtgacacaagtcacattattactgagaagcttgtcaaccaacccaaactcttacgataaatgggtgtagaggggaagcagattaattattggcaaaacctctttgttaaatgacattttttgttcaatgacacatcacacattagtagccatcaatgtgtaagtacagtcactattttatgtactaatatttttctcccagtaaagcacaagaactggggtacagagactgaatcacagttcagaatatattaattacatgcattcattcatttatttgttcattcaacatacattttttcagggccaagagttattccaggcaatggaaatatggcagttaacaaaagaaataagctcttaccatcatagaacatataattctaatgacagagaaatgcttgatgacttttaccactatttatc

SEQ ID NO: 25039 - DNA, 1040 bp, Homo sapiens
ctgcttggtgcagagctgagtttcttgtattttcaaaataatgtggcaacgttctttgagagagtataccaggttaaattgctaagatgatcagtcaacaaatatttttggcagatctgcgatgcatgatgcgatattttgagaggtttgtgcaagatttttatttccctcctcctttgtaggaaaagatccactactcatacctactgacatcccctggcacttctagaaccagcttacaccccatcctctgctcacccttctcccaccttccacctgtattaacacctgacaggcacttatttccctatcaggagtctctgtagttgttttgccattgaccaagatatgtttagaacatttttaatctcttgtgcaattttggcaaacagcagcctgagctctgcttttcctaacaaataacttgcagattgtcatgtttctcttgggagaaggagaaaggttcaatcagagcagaattgaaatgatataaattaggcttattgtttagcaaatcgctggtgttaggtaagaattgtagataagaatagcctagaccctcttaaagatcagagcaggcatgtgtgcatgcatgaggaaaccaggcctttgttagtatcctttctgaaatggctattaaagtaattacagtaatttatagatttttttttcttcttccatttcaaaatgggttccattttttgccttttgtcttgagttcctcagttggagtgtgtatgtgtgtaagcatgtcttgggtagcactgccatagatagtatctatgaattatctgcacccaagctgatgaggtgtggtgaccacaggcactcacagatggatttgccagctttgctttcagggagccttggtcctttgagaataagagaattgtactgagaacactatgttttaatggttagttatagtttgtcatagcaccatttaaaattgctgtgttttatggacataaagatggcaacaatagacactaaggagtactagggcagggaaggaggggggcaagggttgaaaaactacc

SEQ ID NO: 25040 - DNA, 1049 bp, Homo sapiens
gataattttctttttaaaaagggcttattgagtattttgctttacttttaaatatatcagtgctggcttctatataaaatgcaccattttcctctctaccattcaatgaaatacagtttagagtctcttacggagtaaactggattagtcatctgcatactagaccttactttgcttagaattttacagtttacaaaacatttttgcaaaaacaatgcaaatatattgtttttgcaatatatatttgcaaatatttgcatatatatatattttttttcttagagatagctgtaacacatgttgttttatataaatcatacaaaatacaatcattttccatttgttgcatttcaatgggaatagtcataaatttaccattcacatcttttacaaaactcaacgttactgtaattttatggaggaactgaagtttctgtaacgtacatttaatttttctattatttatcctaaatcctatctgttactgcttccttgaaaatgtgcttgtcaactgttcccttacaaaaatgcaaaatataaattgcaatatatattcttataatctctactattgccttggacagtaattgaagccaacattatcgttttggaccagtgcagtagcctcctaacctctctgatctcctttcaccctgacttcctcttctcttccacgtaccccgctctcatcccagttagaatgaccctttagaatgtataaatcagattatgctacattttgctcagaaccatttaatgattttcgatctcacttagagtagaattcagagtgcttgtcatgggtgtcgaccctgcctgttcctggcctcatttttcattccttttctctaccttccttgactctggccatattagcttcagtgctgtgctttcaacttgtagtttccctaataggagtttttgtccctgtcttcctctgcatgccaatctctcactgatattccaagtctgcctggactcctcttgatttctgcttggatgccatgttgtcagagaagccttccctcaatgaccctgtctcaaatagc

SEQ ID NO: 25041 - DNA, 1050 bp, Homo sapiens
ttattttagacccttctgattgctcatgtattgtatgacactttttaaaatctgtatttatggataacattagggacaaacacctacctgtctctagtgtcttctctcccacttgtgctactagcctactttttgattgctcttctcatcagatatgattggaatcatcttttaggaaaatacactttgatttataactcagaacatagtaagaatacctttgcataagccctactatgaaaatgttatgattttattgtggtctgtatttctaagaagttacccatagccggaatttgctcagtatgctttctgtcttcttgggtgtatttcagtattactcttcagttattcacacttgggagtaagggcaaaaaagtgtgccgaatccttccagtaagaaattgtggcatttctcagtgctttcacagatcagcaactctttccgcttatgacagtattttgggaagaaatatttcactgaatgttctctatatgtctaaaaatgccaatgtacatcctcagaatgggtaatttcctttctaacacaaatagctattacccaaatgtctggatttccacaagcctgaggttctcaaatcttcctgattttgtttatggaggatgattttgttgggtaacttaaaaatccaggggttaaagtaactttgttcgtaaatacggataaaaaaagtgtcgtataatacgtgagcaatcaggaaattaagtgtactgcataaaagtatgttttagttatcagaaatttaatcactaatcttggacagttttataaaatttcctcttttcaatgaagtctgttatattaaatattgatcatggatctagctaataataatgatagtggtaataattgaatggtcaggtgacagaaaccatcctaagacttaacaaaatgttatctcttttaatccccaaaacattttataaagtgaatcctcttaatcctattttgagttgaggaaaatgagatttaagcttctttatgtaaatggagctggaggagccaggattggaatccaggaactccta

SEQ ID NO: 25042 - DNA, 1050 bp, Homo sapiens
tgtcaaaataaatttctgagactgcagtttttactatcactgaatagtctcatagagaggcatgtttgcaagtagtattacaaatcataactttttttctggcactttattatagggccttggagattaccttggatttgtgtaatctcaatatggatgtgttcaaagctaaaggaatttatttgatgcgaggggagattgaaataggctttactacagttacaggtagttagtagacttggataaaagaaatgagggtactttggggtttcataaatgttggtaatgttcaaagcaacattgctttacttttctgaaggtcagaacattcctatacaaaatttaagtcagttttgatagagatttagagagacttaaatctctataaatttcatgtaatgaaaatacgttgttacctcaaggaaaaatgaattatattattacaagattgtttttaagtttgatatttataatacattaatgaaagtaacgtgaacccttgatgtcatgatgcactagcgtatggtgctccattgttttgactgtgtctgcatgagtgggctggtagtggtttatcaaatggctttcagggccaggatgaggtggagtggaactggcttgtagtatttgctgattaccgtggtggaaacactttgacgtggacaattccagcctaccaatgtggtgcaccccagggcactattatatggtcttcccagtgtataattgtagatataaatgaccttgagcacagataacagtaacatgtagtcaaataatcaggtagtgatgagttctgagtctttattacatttgttttttaacaatttaattgtaatataaaatgtttaataatgaatatggtttaatgactggctcacaaaatacatgaaagtttaagtttcctctcctgagttggtacaagccagcttcagcacaccgctgaaaatatattgcgacactgagttctattatacatgtggtttctttccttgattatggcccttgcctttgaaaatgctgctgtttcctctctctagataatttatt

SEQ ID NO: 25043 - DNA, 1034 bp, Homo sapiens
gtttagaacgtatgtattataggtgtggattgaactattaaatggaagatcaaacacttttttcagatgttgccattttcatgggagagtatgttgaagtgcgttttggaacatgttaagtaagctagagtgagaaggtatagacaagcatatggggagactaagatgatccatgtggtggtggattagagctagagacatcagcatgaactcatgtttagcttaatatagatacagttggagatacacacacatacacatatatacatacatatctataagtatttacgtatacatacagaaattcttcattttattgtgccttgcattactgcacattgtagatattgtgtttttttgcaaattgaaggtttgcggcaaccctgtctcaagcaagcctgtcagtgccatttgtccaacagcatgtgcttgcttcacatgtcactctgtgtaacattttggttattcttgccatgtttcaaaccttttcattatcatatttgttacggtgatctgtgatcagttatctttggtgttactactgtaattcttttaggcattacaaacagtgcctttataaggcagcaaacttaataagtgcatgtgttctgactactccaccagtcaactgttctcctgtcttctctctccttaggcctctctcttccttgagacacaatgataatatacttaggccaattgatgactctacaagaatgtctatgtgttcaaatgaaaggaagagtcatacatctctcactttaaatcaaaagctaaaaatgattaagcttagtgaggaagacaggttgaaagctaagataggcccaaaagctaaacctgttgcaccaaacagccaagatatgcatagataaagttctcgaaggaaattaaaaagactcttacagtaaacacatgaatgaaaggcaagcaaaacagcctcattggtgatatggagaaggttgagtagtctagatagaaaataaaaccagtcacaacatactcttaagtcaaatccagagcaaggccctgactct

SEQ ID NO: 25044 - DNA, 1035 bp, Homo sapiens
ataatagggaaagaagctagtgacagaggtgaggatttgttcatgtattacatgaaaatattaatttaattggtttcctttaaaacttttgtataaatggcagtgatagttacagaactaggaaagatagttcatgcttaaagagatctggccttctcttttgttaatgaatgactttaaagttgaaatttgcattaagaatattaatgtgataattttcaaagtacccattagtctaacacttttaggataacaaaactaaattctaatgaagttgacatgtggaagaacagtggtaggtattaggaaaaagtaatctggtcacaataaaaatatgcttttgctcgaaaatctgtcaagataaattccaagcacttcaaaaaatgcatgttaaatgtgctttactacagttttgaaatagattaaaattatatgcaaattaatgcaaatcatgtggcttcaagattaagttttgaagtgctatcttcgttccctggagtaaatggctgctgaatgaatagatgcataaatatctgactggatgactggctgaatgaatgaatcagtttttcacttggaaagctgtttcattctcttctctgccagaagcccagttttatgatcttattcaaaatagaatctgggaggtgggcggttgtaactcaaagattagcctaatcaatccagttcaacccaggggacaccatctgccccggtccagtgtagagcgtaaaatgtagtgcatctgaactacaaaggaagaatgtcatttcctcagcactcatttgttgaataggtatctactgagcacgtattgggagccatgccttatttctgatgcatcacagttaacctctaagcagcaattgctattgtttttgatgttcattctttcttgaaatttcctcttctcttgaattctgccatatttcattttcttccctttccttctacttctgtaaaatttgcttcctttcaatctccttttctgaccttgttctgggagttccctgaggctcagtttttgccctgtgt

SEQ ID NO: 25045 - DNA, 1025 bp, Homo sapiens
aatctcttttgcatagtatgaccaaattaatactagcctcatcaaagagttagctactcttttgccccaaatccttttggctctccattgtctgcagggtcaaattgaaaatccttatcatggaatatgaaacttaaaattctagacccacagatcagcttccttacagaacatctctttgagacttttgtaaaatataagggcctgtgcattccagccttctgcatgaagtctttcctgacttcaaggtccatggtcacctgttccctccaagtcttatggatagtgctgtaaactgtgttatatcatgtaactgtttcattgaagtttggtaaccacctgtaagacaaaatcctgactgatcttgttctgaaacataactgtgaatatgtacttatattgagaagtgagctatatgttatagcagcaatgtaaggaatactaaaagtgcacatagcctattgtaaattctataagttcatagttaaccaacatttactgaatgactattatgtgctaggaacttgcttattcttactgtcttattttgtcttcatgtaaagtggcattatcccaattttaaatgagaagactgagtcctagcaactttaatcagctttcttcaatagaaagttatgactgggatcccagtttgatcttcagagttcaaatcttgtactttgtctccctaattcagtaagctcttaggagagagggcattttcttttcatcaaactcaatgacataggaggtagccattaatatgttagtaaataaagtgagagaaggatcctaggatgatacggtttggcttggtgtccccacccaaatctcatgttgaattgtaatccccagtgttggcagagggacctggtaggaggtgattagatcagaggggtggatttctcccttgctgttctagtgatagtgagtgagttctcgcaagatgtggttgtttaaaaatgtgtagcactggccgggcgcggtggctcacgcctgtaatcccagcactttgggaggccgag

SEQ ID NO: 25046 - DNA, 1025 bp, Homo sapiens
ctatattaagataccttcaggaattcatttgatgtgatcttacaattgtaggagaggagaattgaggaaaattagcataatgtttatatagtgaagaagattaatgtatggacacctggcatgtatattttctaagaaactattttaatgaactggaatttgaaccctgccattgttacttaaagattcagactaagaaatgctataagaccaagcagaccaagtttgtttccttcaaagggaaagaagattagggaactctctattctctcctatcactgtctctgacgtgggaatgagaccagttcctatgataacagctgtccagcttggaggaactttctgttccaatctttagggaatagaagaccatgggtactctgtagttagagagaagggaatttagcccaagggaggagaacacttattcagaagatcattgtcccattaggtctctgatatatgtgtaaagtacattttctgatttagatttggtaagcaaatgtgctttagaataaagaatttaatcccaactatcattgctggcatgtacctattatactataaaatgatatctccttttattatctaaataactgagtaaattgaatgcttatatttttattaattgaataaataataggcttcacctataaaagtaactaaattctgttgtctgaactcttctttattgctaaaatttagcttaatagctttgttttcttagatactatgttatttaaattttttgcttgaacttttctatgaatagaaaaattaggagtaggaagcagaacttcaaagggaaatgtaattttactcttttagctgcattgctgagatcaaaagcatttgagaagtgacctaggtggccattacacgtaattggaaaagaagtacaatttcttattactgcatctaaaaatgaggacaacattctttaaatatcacgcttatataaaaacttgcagaaactcaatccacatgtcttaattagaagccaccataaagaaagacatttcatt

SEQ ID NO: 25047 - DNA, 1033 bp, Homo sapiens
atttagcatgttgctagaagctgaggagtcatcagtgaatgcaataaatatgatccttgcccatataggcctcattctagcaggtgaagcacattttaataaataatacacattttaataagtaattgcacaaataagtgtataattacaagttgtggtaaatgctaggtagaaaaagtaaaggagttagagaggatagaggagttttatataaatagagttagggatcaagctaacatgtctgtgggaggaatgttatgctgagacataaaagaagagataaaaatagcaatggaagagcaaggagtagggcatttttggtagagagaggagcatttgcgaagatcctgagaaagaacagagcttggagagttcaaaacactgaaagaaacatcatgagaatgaaataaagcagatgagggaacaagtgatgtaagatgaagcttggaggggtaggtggaaaggaactcaggagagtcaagaaacagaagagtaaattggaataaagatgtgaggagccaactctttcaaggtctatatggaagtagtgctgttcagtaagaactcaggatttttccttcttggatgcagcaaggaagatggataggtgaggtagaagtgatgagggcattccatgctaaaagtataggttagaataaagacaaggattttcctgagaaaaatgaaggaatctagtttggaataagagggggtaagagaagcaaggcagtatggataatctgttgaaaggtaatgataacgaagcagaaagtatgaatcttttcaaagataatgataatgaagcagaaagtggtgaaatgttctagaggactcagtaatggggcatcgttttcacccaagggtgaattgatgaatattccatactgaacacaccatgctgagcacatagcagatactcaatagctttcagaatcgttgacctcctcgggacatgaggcaaaatgtctcctgaacagaggatagcccatagttctagtcaaaaagaacaaatattagcaaaatatgaatatta

SEQ ID NO: 25048 - DNA, 1024 bp, Homo sapiens
tgtaggctgtttgaggttgatgtattttttccttttaaaggtttttgttgctatcaattatctactttatacagatcagatgtgatttgtgaaagcaaggaggtattatatgtatgatttttatggggctttgtagccctattagggatgggtctttttggtcttcttggttcatttcacagtttctcaaacttatgtgtggaatccacttgaagaacatgttaaaagattcacatttagaaattctggagtggggcccaggactgttctttcgctcctccttgcctagcagcccaggggattttgatacgagtgattcataatcaaactttgacaagcatagagttacaagtaggattgtgcttctgatctttctaagatgcctctgatgatctttcatgtaaaaaagaaatatttagcttattagaccactgacaatttctgggttttgccaaatctaaaattagagcctgaagattgtatttgtttatctttaccgagattatatttaggaatacctaggaacctaaggaaacaaaatatttcaatgacttctttgatgcagtatgaggttttccttttaatgtagacagtttatttttgttggctgtgattctttttatgcagtcttgttacattgggctgagacatggaggtaatgaatatttttcttatctaggatcaaagaatactgaaaacaggaaaaaaaaatgtgggtattcagtctcatctctacccttaactttttgatattcctgccttgctctcctcaagtgttttggaattgttttaaagatatgtgtctggtgtttttaatgttttgtttataattaaatgtcagaatatccttgttttcacaatggctgcaggtgagtgatatccagtcaattaccagttttctgttacctcagccactggtcagcatagtgttttctgatagggctgtacctactgtgagaacaggttgcagaggacactgattcctcctttctaccctcttccagacctgcctatgcatactagt

SEQ ID NO: 25049 - DNA, 1021 bp, Homo sapiens
aaattttattggggatggcttcagtggccttcttcatagggttattaggatggaaggtctaacaaacacaagcacaaattataggtcataaaacccagtacaaatattgggaaaaatatccctgggcaagacattcaaggtcctttgctttctgtctctaacctttcagtttagccttaattcctgtatttcttttcctgttaacctccagagacctacactcaaaacacatcctgctagttggttggctttttgcaaatagtgaatttgcaatttcgtgctcccatgcgtttgtgtgtgttgtttcttctgccttgaaggacttctcaatcccattgtccagtgaaatcacactaattaggaccagcttaaatgtcatcttcccctctataccttgcttaacagcttccctgcaaatatagaatgcatctttcctcttgcttttctggcctggtattttgctccttcgactatttcatcacatgttacaatatttatattgacttgcatattcatctgcccttcctgttcctgaattgataggttcttgaaatgaggagttgtatgctcagttcttaacacagtgcttggcctgttacaagtactgaagacgtgtctcttggctgtaggaattgaagtacttcatctagtttctcatccagcattactaaacacattttaatccttcctcatttattgaggcacagtcaaggctgggatacatagttctatatctgcttttaattttgctctgtttccttttagctctgctttttctgttttaaatatatgaagtcttccctttctttccattttttctgttaaatcaactctagcctgcagattccatcattgaccatcttacaacctctatgtaattgtagggaacaccgaggagatttattttgcttctaggtcttggactttgttctaatgcttggatgttgccagttgcttgacctctgcgtaaagaggatgtactgtcagggttctccagagaaactgaaccactaggcttgtg

SEQ ID NO: 25050 - DNA, 1030 bp, Homo sapiens
aagaattagagaagacacggggaggggaacatcacacaccagggcctgtcatggggtgggatctaggagagggatagcattaggggaaatacctaatgtagatgatgggttggtgggtgcagcaaaccaccatggcatgtgtatacctatgtaacaaacatgcacattctgcacatgtatcccagaacttaaagtatatatatatatatatatatatatatatatatatatatatatatatgtgtgtgtgtgtgtgtatatatgtgtgtgtatatatgtatatatgtgtatatatatgtatatatgtgtatatatatgtgtgtgtatatatatgtgtatattatatatgtatatatatgtgtatataatatatgtatatatatgtgtatatatatatgtgtgtgtatatatatgtgtgtatatatatataaagaattagagaagaaatgaaaaactttttttttaggttaaggaagtttcttttaatttctaatcactaaaagtttttgatataaaggaatgttaaattctactaaacatttttccatatccactgaggtggttaaatgtttttcgcttttcatctattaatatgatatattgtattgattgagtaattatagtttcgcagtgttgccaggctagagtgcaatggcgcgatctcggctcactgcaacttctgacaccctggttcaagtgattctcctgcctcagcctcccgagtagctggggttacaggcatgcgccaacacgcccagctgatttttgtattttcagtagagacaaggtttcagtgtgctggacaggatggtcttgatctcctgacttcgtgatccaaagtgctgggattacaggcgtgaggcaccatgcctggctgattttttaaaatttaaattaaactggcacttctagagtaatctcaaactggcaataaagtgtaatcttttttatgcatcgctgggttcagtttgctaatgctttcttactttttttttttttgccaatattttcttcaggatgtctgtatctg

SEQ ID NO: 25051 - DNA, 1436 bp, Homo sapiens
tcagatcaggtctttcccctgcttcatatcatctagtggctccccctttcattcagaggaaaagccacatttcttacaatgggcggattatttttctgttgatgccataagaaattaccacaaactcagtgacttcgtatgaatttattgtcttacatttctggagtctcgccggggtaatgcactcctcccatgtgctgggtgggagaaaactccttgtagggcaaacaccacaaggctgcacaacacccagcacttgcactggtcgaaggttgttccaggctgatgtggagcttaacaaggacttaacaagactgagttccttgctagaagctctggcagagaatctggctttttccagtgtgtagagaccacctgcattccttggctcctggtccccttccatcttcaaagccggcaatggccgtccggtctttattgtgctgtgccatttcgacattgactgcctttcctccctcttcacttttataggggaccttgtgattacattggactgagccatttagataatccaggacagtcttcctctgctaaggtcagctgctaagcaaccttatttcttctacttgcgatcttaatttctccataataggttcacaggttccagcaattaggagatggacttttttggggggcattgggggtggttattctgcctagcagggtacaaggccttcatgatctagcctgttacttctctgacctcatgccctactactttttcttacaaagtagggcttccccctgatggtgtcaccacctcagagacccatggagctaattatctcgtgacctttaagcctttgctcaaaagtcgccttctcagtaagctctgttctgaccactttactgaattgtagcccacagtctgctttgtgtttttccatagcacgtatccacatctaacataggaaacagtttatttttatgtttgttgtctgtaacataagctcttgcagagctcagatttctgtctgtttttcctctgttgtatcaccagcaccttgaatagtgtctggcacatagtaggcaaacaataaatatttgtggaataatggacagattcttgagagaatggcaaactgttttttaataaacataatttttttgtgtgcatcagatcttccgcatgcctccaagaggggcatgatatggtttgttttggggtcttccaaggtatttagtttgggaattggtttgttgtagacactcagaatacaccaaaaagaattacaaagtggggtctggggcagggaggcatgaagactttttcattttatcagtttagactggattccagaaacaaagttaaggagagtttgaggcagtttcataatcagtgtaattcaggatccaggctaggttgacaaggcaatggaagagtgcctgtattcttattcagagttggggtatca

SEQ ID NO: 25052 - DNA, 1049 bp, Homo sapiens
ttattcagatttttaaaatcaatgtggtttttgtgaattaaaaacatgaaatctaattcgtttcagtacagatgcataatatgcctcagtttcatagggaagacagctaaacaggagagagaaggagaaggactggatgaaggctgataaagactgtgagaagagatgttcaaaccaaaattctaagctggtagagtcactgaggctgtgtgacattgggaaaagaacaggaagggggcaaggagaagatgttggtgcctaaatgataattagaagagcaagaagaattgttacccctctaattctgtgaggctgtggatttcagcatcctttatcactgttcattaatgcaaattaactggttagtctcggcctataactcctcgacagcattaatctttaaattctgcgagtcttggtcccaaatgagacagctaccacagcccaccagttcagggcaaagaggataatgaggtattgttttctgagccttcttgtattggtctggatgaaatcaaactggagggaatctatcccttccacggagcagagagggcagaagtggtttgttgccagggaccaaactaataaaatcagtcagttttacattttaccaaaattacctctgacacatgggttttacagttgggcttattctgtcaataaatttttcatggaaagttagattatttagatcagtgaggttcacatagcatactccagctgtaatatgccagctaaattgcaacccagtggcccgaaagaattaattcatctcccaaaatgtgaaattaaatcctagggagtaacattacatgactgatgatgtactgaattaaattaaaggaagacttgaatgcttgttaaaaaaatatcacttacataaacacgtttataaccacatgtgagcctcctaatgaatcaagttattgtgaatccaccctaacaaaaatccaaaatgtgaactcttaggatgctgtttaatttagggaaaaaacccataagttttatctattattttaatgtgtcaaatagtttcatttttaata

SEQ ID NO: 25053 - DNA, 1048 bp, Homo sapiens
agaaagaatttggaccaatacaagcaatcatgatatttttaaatgactaaactctaaatttttggagagaaaatgcacatctctagaatatccagaaacatggcgcttgatcctgaatctccatgtctcattgtcatgtgagacatttaacagcatccaaactacttaactccagtaggagctcccagcgtgactaatttccacccccatctctgccggtatctataaatcatgtgatagatctataattaatgaattcaaaggaagataaaagggacagctttttaaggaaaactaatgttaaatgatttcttcaactggccatttttcttaaaatttataatgttttctactggtgggagaaccttgaggatccttactggtagtcagtgacttctaagctgttacctctggcaaaaggaccagataatgtgagaatgtcaaaatgctattgaaactcctcaaatgtaagaagccaaacactaacattttatttctaaccacaaagatgtgatacattttaaggactttaaaagcaggaactttgcctggaaatatacataaattcataatcactatatatccaataagaatttgaccttaaaaaaggaagttattaatttaagcctaggaaaaatacattttagctaattttccgttttaaaaaaatctgaaaatgttagcatatgttaattcacatagtcaggcttatttatgaattttctaccataggaactattaaaatgtaatataacattacttttaaaatctcaaagtagctggcacagtaatgggcacctgtattttcaactaagcaggaggatcacttgagctcaggagttccagactgtaatgcagtataatcgtgcctgtgaatagtcactgtgctctaggcctgggcaacacagcgagaccccatctctttttttaaaaaatcccataattccagcatctatcattgttttttcttgctgatctttatcacttttgcatttttatttcatgaatggaaatgcaaacaggaaataaatttacatgtacactatac

SEQ ID NO: 25054 - DNA, 1030 bp, Homo sapiens
ggcatgtgaggtcatgtgcagagttttattcatattttgagaattgatatattattggaagcagaagtctagagtctaataattgtttgttaaatgaatgaatgaatgaatgaatattctttgtaaaagactgaattcaaataaaccattgggtttaatgcagatttaactctcctacatttcactttgactcccacatcctccaagataccaccattgtgtctttgcagaatgagtgaatgaatgaatgaatgattattctttataaaggactgaagtcaaataaaccattgtgtttaatgcagattagagcacacatgaagccagacatggttttatttcactggatctcttttgacaagacaatccaatataaaatgccccttagaaatatatggaaagccatgtgacataagaacaaagtgggaaatgatggtcataatatgctgagaaagtctgaaatggaaaattcctttcaataagaaaccacataataaaaagttctcgttatatttgtagttacaagctatggtttattactctgtctagagattcttgtaatgattcattgttattggaagaaataaaatagggttcacaaaggagcttttatcagattataatgtgccctatcataaagtggggaaaaagaggcttatctggctatttgtagtccttgcccatgtggccatggatcagatactaattagaattctttttgaacccctggaatgctctgcagagtgaattccatgtcatgaccacacttgaagagtagtgcatgagaaggctgtttgataagtcctttaggtactaaaacaaatcaaaaccagtcctatttattctaacaaaagcctctctcctcatatgttctctgctttgcaccaaatgatttttggcttttcatctttctaaagtctagatatcctgatactttcatggaatttttgtgtaacttaccagtcatgtaagactgttaccatagagtaagtggtgagtttggcaaagagaatggattgagaatttggat

SEQ ID NO: 25055 - DNA, 1899 bp, Homo sapiens
ggaatatatggaagcagcaaggaacataagaggaggtccaagcaaaagcagtggataacagtgcaaacaggaactatttactgaaagtccttactaaggagtttccctttatcatttaaatagcaaacagaatgaacattttaaagtaaaattctgtcatttcacttcttataaaccttcaatatggaacaattatatgaccacatgcaaaaagaaaagaaaaaataacctccgtctataccttacaccatataagaagctaatctgacatggttcacagatcttaaatgtgagcactaaaactataaaacttctagaaaacaaatgggagaaattttagttacagtgggttaagcagaactttttagagcactaaaaccaggaagtacaaaaaaatcaacaaattagatcttctgaaaattaaaaatgtttactcttcaaaagatactcttgagaaaatgaaaagacaagtcacagactaaaaatatttgaaaaacacatatccaacaaaggatctgtatacagaatatataaaagttccgaacccaaggaattgccaaaatttaaggataagcaaaggcacaagtagactatttactaggttattttagacaaagagtaatgagaagtggaagaagattgtcagagagaataggacacaaatgataaatgtattataaaatgtggcagagacaggtggataggacttgacacttttttatatttgtaaacaagagacaggaaggacccaaagctgacctgagactttgaggctagaagatcagaagaaaggtagtgcctttaatagaaagaatcatgaagaagggtcaagttatgagaatgaaagtatgagtctggagctccagagagatcaatcaaggttagcgatacagatttagaagtcatctgcattagaggtggtagttgaatattgaatttgtccacaagattgcacagattaaattaagtaataattctttgatgggggtaacagccattagttttttggttaactaaaagcctaagatgaaggcaaaggcagttactagagttaatgatcagtctcatttttgctattatcatgttcagtggtttgaaacaactagaatttttctctgaaaattagcagctgcatggaaatgcaaagtttctagcagttacaaattggatactaagttaaattgacttatatatttatatttacagaggatcttaaacagaaaaatgagatctttgttcaagtttttaaatattagtgagacatgagaacatagaagtcatacaatgaaatttgcactgattttgtgaacataatcttatgatttcttttaaaatgcaattatatgctttctttaaatcatattagttgtctgttttgatcaactgacaaaagtcagcttatccacatttttccatttagtaaaaataaattttgaataaatgatgatatggtcttcctaaagtgattagtaatacaaatatagggttttctctttttgttgttttcatcttcagagattagtagaaaatttttcttgttatttgaaaatacttttttttacacacatacatataaattacaggtttgcaaaaagtgacttcattttatctattgtaaactggtgattcctgtttatgtgatcataaatcttagtttgcctacttcttgcttgtgtttgttggcattaatgctgaagttttgacaaaaattactttaacttttgcttccctcggaacaaccagggaaaaatatcaacagcgaaaccggatagatgtggcaccaatagcttacttcaaataaattaatacttcattttttaggcaagaatggtaatcggttctgttctattagcctcagtggtgtgaacatagagtttcatcacattattgtgtgtaaga

SEQ ID NO: 25056 - DNA, 1075 bp, Homo sapiens
taattaagtgggtgaacttgcttagatgaatgaaaccagattatttgagcagggccaatgatgccagagaaaaagaaaaataccaatggagagtaaaataagtacacaaaatgaaagattctgaagttttggaacgaaagttttagctcaggaaatggaagaatacttgagagtttcatgagaaaaaaaataagtgatagtgatagattgtaattatgcagacttctctgaagtcaaacagagaagggagagtatgagatctgtagtggttattagaagaatgattaagagaaagactatggcttaatgtttctcttttgccaaagatgttagaaagtactcaataacattaaagcagaagaaacagcaataaaataagaaggcatagatacagtgatgtcattgaaaaagcacacagtcattgaatctttggctttggagggatctccataaccatttgtcaacatccccacgcctggctgaaccacagaatcacctggtgaactgttgaaagagattctgacattcctcacctcatatggtgaatctttcaaagatgagaaggacgtaaatttcacataagctgttcttagccctttttggtcccttaaaattaccccattcttaatttttgtctcctgagtttccataaattatctatgtattcatccagcaacttgaaattcactattttgctgttttcagaactgtatacgtgctttcttgtccaatcaccgctactcttttaaaaattgagaccttagcctggatcttctgcatctcttatgtcttctaggattactcaaagatccccacagaagttctgcagtcacatctgtgagttccttcagtgaactctgataagattcatttgggcctagagacacaaactcataaagcggctagatgctcccttttagttttatcacctctctcaggcttcggttgcttcttaatctgttgttttgtggcttagtgtgaagatcattctcattgatagggaagatggcagcaaacagaatgcttgagtttttgttctctcttactgtcatctgctaatactataatatctgcc

SEQ ID NO: 25057 - DNA, 1035 bp, Homo sapiens
atcactgtgccatttctagtaccatttctgctgtctggaatgctcttctgtctgagttggtccgaatgaatggaaattcaatgaaacctcgctttctccattataccttctcaaactacctaagttggaagagaattcttccattacctatcctgggtcaagttgcttgattgtggtaattttcagtttctttacctacaaaatgggtatataacatcataggaatgttgtgagaattaaataagactctgaagtgaagcattcagaatagtgccaggcacagagacagccaataaatggtgaacttactatttttcttcgtctttctttgaaagagaatgaacatgagtatcaaactgttgggtttgaagcctagctgttccctgtactagctgtgtgatggtgcatgttctgagaaaactttctgatcttgatcatttgaagaagaaaaaaaggataaaaatatctagccttcagagttcctataaaatttacataacatgaaatacttaaagtacctagaactgtgcttggcacataatagatacacattgtcattattattgttgttatttttctgcatggaatcgtagatgtttgtatttacaaacatgccttctctcccttactacctcaccatttccttggggtgaggatgatattgtaatcatttttctgtttctctcaggatctaatacattatgtttcacagaataggcactcaataagtagttgctgaataatggatgaatgaatgaacaactataaaaccgtactgattttaattttatttttcaagtgaataattgctgcaatggaactaagagcagaataggctaaatcaatggtagacaaagctatagcgtttagagatataagactttccctgggctatgaaatggtgtcaagaaatatgaggttatttgtaactggcagtaggacagtggaaatgaatcattgaagcatagtggccagtccatcaggactatcaacacttgtttccctgtggctgaaccagatcctgagagacacagc

SEQ ID NO: 25058 - DNA, 1028 bp, Homo sapiens
acaataaaggaaaatctgtatagaagagacagcttagcagttaaggccatagattctaaagccaaaccttcttgatttaaaacctggctctgccactcagtatagttgtgtggctttgcggaaattattaccatctctctggctcagtttccacatctgtaaaatgagcataatcgtagtacctacatcagagtgttattacaaggatttgcattaatctcttaggctaagccacataccttttcattatacaatctttgctgatgctaagaacagattccaaaggacagattacatatatgagttcatatatgtaaacagaaaaacagcagctggcagttaataagcaccatttaagtttaagctaatgtaatatatgctgatatgtgagcatttacaccattttgtcattaagattgcgattcattccctgttagtgaactttgaagttgggtagggaattacaaaatgttcttaattctcaactttagtagattttttttttccatttggatgacagttcttatcaaataacttcatatatttgtctttacattttctgtaaccatatagttataattattatatagtcatagttatatatagttatatagttatttttaactttttattttgaaatttttctagagtcagaagttgcagataaaatattgagaagttccttgtacccttcacccaattttctccagtggttacatcttacataatcgtagtacaatatcaaaaccaggaatttgacattggtacaatgcatgtgcatagttctgtgccattttgtcacacaggtagatccacgtaaccatttttgcagtcaagatatagaactattttcatcaccacaaagacatccctcatactactcctttacagtcacacatctttccccatccctaactcttggcaatccctcatctgttttctgtccataattctgtcatttctagaatgttacctaaatggaatcacataaatggggtagcatgtgaccttttgaagcatgtggcttt

SEQ ID NO: 25059 - DNA, 1068 bp, Homo sapiens
tgtgctgtgtccagtcttctattaaacccttctgttgagcacttaattttagttattgtaattttcagttttaggtgtctatttgtttgttttaccctgagatgctacttctctgatgaaattctccatcatattatcttttttcttgaataaattaattgcagttattttaagaaccatgtctaataatgtcactatctgaataatgtcactatctgaactgtgggtctgttcatattgtttgattttcttcttcactttagtcatttggtcttatctcctggtatgcatatttttgatcaaatgctagacacagtccttgaaaagctgtagaaatctcaggctgatgatacctttcttcagagaagatgtatttaataatatgtcccattaagggacacattgccttaatgcagtctttgattgagatcactagaagctggattttagttatgtgaggggtagtgtattagtttactcttactcctagagggtaacctttctgtgattctaactgagagtctgtgttgtttacgagtcccttcttccttagcaggttctcaactccaattcctatcttcccatccctgtgagaatgtcagaatctctgctcagcctccaagtctctttgccactgcactctgctcattttcttagcatttgattctgtgccacttgtgaattagcaaatgacttggagagaaaaaacgccacagaatattgggctcagttcagtgtgcttacctacctaccttttagaatcagtcttggcctcccaagtcctagctgtcttgggagttctccaatgccttcaagtagtttttaggtttccttttttttaagcttatccagcttttttgattattctcatgagagtaagaatgcaacaaattcttccaccatcgccaaaaatagaaacccttatcttttttttaatgttaagtgttgacaacaatatatggttaacagacttcgttgttagaaggataaaaagaaattaatatatatgaaagtaacatgaatagggcctggtacatgatagacacttttaaattactttcaatttga

SEQ ID NO: 25060 - DNA, 1088 bp, Homo sapiens
gtttgaagtcaggtagtgtgatgcctccagctttgttctttttgcttaggattgacttggcaatgcgggctcttttttggttccggcctttgtttctttatgctccaccactatggcttgattcattgggtcaaggtccagcccagggttaagatttccaagacaagtcttcgagctataggagtcaaaggatcagtttaccaagctagggatggaaatactaagacaaggatctcaaaggaggcagatgctgaaagcaggacacatattgagaaagacaaaaggtcagcctcaggttgccatggtgaggtcgggagcccagataagccaagccaagttgtcagattgttgcatccaggtcaaaatgccacaggcagcatcaggatggctggggggaggaccgcagttcaggattatagtctgagctgatgtattattgtgattttcaggtttcctctaccttatgaccctaacttgcatgttaacctctctggaccagtttctcaggttgcccacaggatcctgacataaggatgagtaattttgttgaacccttgaaaattcatgcaaagacacacttttcaaagttttatgttagtgtagagcatagtttttcatcagattctgctgccgttttatgtgacattaaatactctcttaagatgctgaagcattgtttcctcacctactaagaggtatcatgtcagagataatggacagaagaagcccttagaaataaaagcagattttacatttggaaggtttgtgttgtctgtttaatattattcaccctttccctaaattcattattcttaacatagaatattataggcaattatagtaaacaaagaccccttaatttagagtagagtaattgttttaatcaacaagataacttaaatctggtagaaattaaatgtccatataagctaagacatagtcttgttatttggggggaatcttttggcaaaaataatttgaaatgggggctaccttcattaatagtgacagtaaatttgggaagaaattagaaagaagtatccccaaagttgtccatggatagtcagctatcagtcctaaaatttcac

SEQ ID NO: 25061 - DNA, 1078 bp, Homo sapiens
cgattcttctgcctcagcctcccaagtagttgggattacagacatgtgccaccacacccagctaatttttgtatttttagtagagacagggtttgaccatgttggccaggatggtctcaatctcttgacctcgtgatcagcccacctcagcctcccaaagtgctgtgattacaggcgtgagccaccgtgcctggccaacacaatcttaaatactcaacaagctagcctaacgaggaatgccagcaaataggtcattgctaacatctcttttggtgtctttctttgacaatgttccaagtggctacctaacatgctggcaattatgcctatagggtgagtacctcatttaagtatttttgtagattaagtcaatctatgtttatgaattttgaaataatggatatggctatggtggcatgaccctacttgagcattaaaaaaaaaaattaacttccaacatattttaatgcaaatgttacctttgtaagtggatgacctgaaaagaaagtgtttccatagtaacctaagggaacacataactgtttatcagaacttctccaggaaaagagcttggcatggactggggatctgctttgatgtctgctgaaagaaaatagctgacagcattgtgtgagaaaatggttagaagatcccactttatttgtagttaatttagaaaataaactttcataatgaactgctgaaatacacacttgaaacaaccagatgatccatcaggatattttttaaaatgtaatttgtcgggtgtgacaaccaagtcatcagtttaagagaaacagattagggaagagatcttacagcaggtctttgccaccatttcactcattttttttctgtactctgtgttcttctgtaggaatcactaggcctttcagagctcttagatttttttttctttgcttactttttttcctttttaacttcagaaaacgttacgtaaaagctgccctttgggaattgagactctacattgtgaggctatcaccaaaaagaaacctattgattgattatacttcactttctttactgacacggctgtttgagttagtagcttttt

SEQ ID NO: 25062 - DNA, 1050 bp, Homo sapiens
aggaaggagagaagggaagaagttcccttctcttctttttaagggcacgtatcacttctgctcccatcccattggccagacctatgcggtggccacaccaaactgcacaggaggctgaggaacatgttctccagccggacggccagcttaggagctgctaacatgtgtctcttcttctctttccaggggaggacccgcagatcctgtagactatctgccagcagcacctcgggggctctacaaggaaagggagcttccctattatccaggggctcatcctatgcaccctcccaaagggagctatccccgccccacagagctcagggtggcagatctccggtatcctcagcactacccacccccgccagctccccagcacaaaggaccctttcgacaagacgttccgccttcccctccccagcaccaaagaatgccagcctatcaggaaacaggcagaccagggccccgtgggggcagcccagaccagtacccttaccgaacccaggattcccggcagaagaaccccatgactgcagccgtatagctgagtgccaccgaggccagcccggtccagaaaggaaggtgtctactctacctttgccctttctaaacctgaagacctccttggtgttaggaattctccatgttactgataagctttttctcactgacattgtaacgcatgactgctaatcagagagaaaaagaaggggaagggaattggggaggaaaaaaaatcagaaggaagacgaaagatggggctataaaaacaaaactacctgatagttgaaacgctttcagagttgttcaaatcagtgagagtggcaacggaacacacaaacaactaattatggaactctactctggggatcctctctggctagataacctgtgctgatgtgcagacacgtggacatccccctctgagactggcggtccagaggcagtctctgccaggcagcattacccgctccgaggtggagcctcagcccccttcttagagctgttaagtctaaggtgtggcagagcagacagagatagaggcatctg

SEQ ID NO: 25063 - DNA, 1765 bp, Homo sapiens
ccgccgggggaacccggcgaggacaagagcagggcggccgccttccactcgggctgtccggcggcggctgcctccgcccgtgtgtccgtcaagggtgccgcgggatgtgtgtcagtttacgcctctgagatcacacagctgcctgggggccgtgtgatgcccaaggcaagtcttggttttaattattattattatcattattgttacgcttggctttcgggaaatactcgtgatatttgtaggataaaggaaatgacactttgaggaactggagagaacatatatgcgttttgtttttaagaggaaaaccgtgttctcttcccggcttgttccctctttgctgatttcaggagctactctcctcctggtgaggtggaaattccagcaagaatagaggtgaagacaagccaccaggactcaggagggaaacgctgaccattagaaacctctgcataagacgttgtaaggaggaaaataaaagagagaaaaacacaaagatttaaacaagaaacctacgaacccagctctggaaagagccaccttctccaaaatggatatgtttcctctcacctgggttttcttagccctctacttttcaagacaccaagtgagaggccaaccaggtaagccactgaaagtttttctatttattgcaacatggtttcccctttaaaagtgaccgctaaagcaggaaggccacgcagaacggcacagaagaaggctccctcagtactcaataatttaaagagagatcccagccggcccttcctacaccaccacggctgctaaaacccaactttcctctcctgctaggagtgtgtgtgtgtgtgtgtgtgtgtgtgtgtgagtgtgttttgaaacagaatttggcggtgttcatatgtcacatatggactgaatcaaaggtttaaaaatactacaaagcctttgcattacagtttttgggaattttttttccctgtcttgaagcagaacacatctcccttgagtttctccaactagccagtgaaatataaatcatttgcattccctccacttagctacattgagcaatgttaactgaagggcttgggaaagacaagagtttagttttggttttcagatgctgtagattctttggagaatgactggttatgcttcagaatcataaggctcaggctggtggagcaagttggcttgtggctgagataggggcttggggttgggtgctgctggcaaccaagacggttggtctcttctctcttcatccatgtgttgtctgggaaagtaaatcgtacgttcttttagaaattattattagctaaaacaaattgcaggccctcgaaggtctctcactcttgtgaagtggttagaaacttttgagtggaatttgttctcaaccactgccaaaaagggtgtgtggacaggctgctgtggagataagcatttcgaggcccagaacagtctggggaccgcatttgtggggagcggcaaggggtatgctctggaaaggggaatccatggggaatgcagtggggtttgtgcttccttctcggaccactctctagagtgagcctccctacccctctgagaacagtgtctggaatctaacaacaaaactcttagcagctgctacaggtgattggagatggagaaaccatctatggaggaaatgggtgaaagaaaggcgaaaaagccttcctgaagtgccctcacccaaggcacttgcaaggcgatggcggcagtggtagagctaactctgcagcctccttggcatccccagaac

SEQ ID NO: 25064 - DNA, 1068 bp, Homo sapiens
tcctgccgatgtggaagacactacaggaagtggagctacagatagtaaagatgatgatgacattgacctctttggatctgatgatgaggaggtatggcgtcttctataaagaacatatcggccaggcgcagtggctcatgcctgtaatcccagcatgttgggaggctgaggcgggtggatcacgaggtcaggagttgaagaccagcctggccaagatggtgaaaccctgtctgtactaaaaatacaaaaaaatgtggcaggcatctgtaatcccagctactcaggcggctaaggcagagaattgcttgaacctaggaagcggaggttgcagtgagccaagatcgtgccactgcatccagcctgggcgacagagcgagactccgtcccaaaaaaaaaaaaaaagaatacatcgatcagcaattgtatcaatgtggttaagccaaattgcctggatttgaatcctggctttaatttatatgcctttttcaaattctgactggttgcatgatgaataaaatcaaatcaccatctttcggctgagttcgtgatggatttgcttttttctgattaagccagtcttttttgtgatgaccccactagctttaagcagaggaacaaccagctttctgaagtggattaattttttttctttacaggaaagtgaagaagcaaagaggctaagggaagaacgtcttgcacaatatgaatcaaagaaagccaaaagtaggtcatttgtttttaacttcatttcatgttaatgtaagtaatctttttcaaagcttgaccttgaagtaatttcctccacattccttgaataggtcaatattttaaaacctgtacaggttcttccacagctactggtctgcagctgttcttatggtagcagttgtggcattcctctgtgggaaagaaactgttaacacaaacacctctttcttagcaaaacagaaagtgggtatatatgtgtgacagacacaagatgtatctgtagttttgtttggctaaggagatagtctcaaaacaaattgagatggatttgtttgtgtcttggagtagggtgaaaaaaat

SEQ ID NO: 25065 - DNA, 1036 bp, Homo sapiens
gcccagggcatcaggtcgtagctgagattctacccctgaagggcagggcacagcactgacctgactccagggaaaaatagttgctctggaggtttgatcctggggagcagggtgtggctgcagttcagagctcagtggcaacttaggtctcaggggatgaggcattgtgtagtagtgactctagacactgggatggtgggactcagcagcagcagatacacagctgttgtttagacccagggtagggcagggaacagtacaacaatgactccattccccaggtaaatgaatgtctcagcagctcagactctaggggtctagtctggtctaggaaagcagagtactagagttgtttggctagtaggatgaggtgtctaagcgtagccactgctctgtttccctgggacatgaggtactcagccctggggtgcacagctgctcagcttggccaggacactatttccccagggggcaatgtgctgcttcagttcaggtttgggcggggttgggggacagtggcgtgagtgttcctggcggccatttctctgggatgcaaggtgccacttcagcttaggtattggggtgtgtgactactctgaatatgtaaggcagtttcctgcaattcaggatgctacttcaacctaggcactggggacgcatgacttctttgagccgctgaggtactatttttctgggaggcagggtaccacttcagctccagcctgatggggtgagaggagaggtgggtgaagtggcttcacttcttcttggttctatgaggaagggtttaaccactgtttgtagcttggcctggggatgtgaggccaccgggctgggatgattcagcagtggcttagcctcagggacaaaagggagccatggctacttgccaatggagcaaaacacgtttcagccatagttccacttgcaagatggtgtagccacatgggtcacaggggtcagggcacagtattggcttcttctctcaggggaacacagtggtgttgaccccagacggctccctcagctggtcttt

SEQ ID NO: 25066 - DNA, 1029 bp, Homo sapiens
ctacagattccagaataaattttgattctcatgaaccccttcagtccgtaactaataaaattccaggggcgaataaagaaataaatcttttgagggaggaacatgtttgtctggatgataagggctatgtgcccagtgattctgaaataatttatgtttcaaatatccctcttcagtcagtgataaaacaaccacacattttggaagaggagcatgccagtctggaagataagagcagtaattcttatagtcctgaagaaagttctgattccaatgactcttttcaggcagcagcagatgagcttcaaaaacctgtcaaagaaataaatctttggaaggaagaccatatttacctggaagataagagctataaattaggtgattttgatgtaagttatgcttctcatattcctgttcagtttgtgactgatcaatcttctgtacctgtcaaagaaataaacttgcaaaagaaggatcataatgatctagaaaataagaactgtgaagtctgtggttctgaaataaaatgtcattcttgtgttcatcttcagtcagaagttgaccaacctcaagtgtcttacaaagaggcagaccttcagaaggaagagcatgttgtcatggaagaaaagaccgatcaacctagtgattcagaaatgatgtatgattctgatgttccttttcaaatagtagttaaccaatttccaggatcagtcaaagaaacccaccttccaaaggtggtacttgtggatctggtgcccggtgatagtgattatgaagtaatttcagatgatattccccttcagttagtgactgacccacctcagttgactgtcaaagatatcagctgtataaatacagaatgtattgatatagaagataagagctgtgacttttttggttctgaagtcagatgtaattgtaaagcctctactccctcaatgacaaaccaatgcaaagagactttcaaaataataaaccggaagaaggactatattattctgggagagccaagttgtcaatcttgtggtt

SEQ ID NO: 25067 - DNA, 1031 bp, Homo sapiens
gaggaggctatgaactggggacaaatggaggtctctgaagggaaaactaactgcagtgagagagaggccatgagagctgcactcaagtgctatctcccttgatatggtttggctgtgtccctacccaaatcttactttgaattgtagctttcataatccccatgtgtcatgggagggccccagtgggaggtaactgaatcatgggggcgggtttttcccctgctgttcttgtgataatgaataagtctcacgagatctgatggttttatgaaggtcagttaccctgcacatgctctcttgcctgccgccatgtaagacatgcctttgctcctccttcaccttctgccataattataaggcatccccagccatatggaactatgagtccattaaagctttttttctttataaattacctagtctcaggtatgtctttatgagcagcatgagaatggactaatgtaatacatcccccatgctgtcctgagctttctgagtgcaacctgagtgtgcaaggctggcatgatgaactggaaatgagggaactgtgttagaacatgagatgtgttgctgggggtgggctctagtttagattacttctgtctgggattaaccaaaaagtttgatatgtgttagaataaaggtagagagtcaggagaatgtttaagtcagtaatagaggacccaaaagagcttctgaggaaagagggacctcatttccactataggatgatcattgctacattacagacagaggtgttaagttatcaaaggagggaaaggtgtctggtaagtatgtgggctcagggtgtggaggaatgagcacataaaggtgttaccataagttaatccaggtggtgaccatagaatcttcagagttggtgacctcaccaggcccagaagcccagcttgtgaggactaacctgacaggagttcctgagaggagagcctggtttgcatctggcttgtggaggcatctcatggcagtgctgtgtgttttattcatttgttcagcaaatgttgagtgagcat

SEQ ID NO: 25068 - DNA, 1091 bp, Homo sapiens
tcctaactagagaggagaactcaaaacctggcttcgacgctgcaaagaacaggctgactcttgtttggtgataatgcagcttgtgactttaggttgaagccagtgctcatttagcattctgaaaatcctagagcccttaagaattatgcgaaatctgttctgcctgtgctccataaatggaacaacaaagcctgggtgacagcacatctgtttacaatatggtttactgaatattttaagcacactgttgagacctatggcacaggacaaaaaaagattcctttttaaaatattactgctcattgacaatgcacctggccaccaaagagtgctgatggagatgtacgaggttaatgttgtttttatgcctgataacacaacatccattctgaagcccatgaatcaaggagtaatttcaactttcaagtcttattatttcagaaatacattttgtattacattttgtaaagtgatagttgccatagatcgtgattactctattgggtctgggcaaagtaaatagaaaaccttctggaaaggattaaccattctggattccattaagaacattcctaattaatggaaggaggtgaaaatataaacatttacaggagtttggaataagttgatttcaaccgtcatggatgactttgaggggttcaagagttcagtggaggaagtcactgcagacgtggtagaaagacagtaagagaggaacaactagaagtggagcccgaagatgtgactgaactgctgcaatctcatgataagacttgaatggatgaagagttacttaagtggtttcatgagatggaatctactgctggtgaagttgctgtgaacattgttgaaatgacagcaaaggatttagaatattacataaacttggttgggcagagtttgagaggattgactccaattttgaaagaagttctgctgcgggtaaaatgctgtcacacagcatcacatgctacagagaaatctttcatgaagagtcaatcaatgagacaaacttcattgttgtcttatttcaataaattggcacagccactctagccttcagcaaccactgatcactcagttcagcagcc

SEQ ID NO: 25069 - DNA, 1022 bp, Homo sapiens
gtcttattagcaatgcattttagctccattagcaaatatgaaaagtgatctattcctcttgacagcttgtctccatgaaaagtaactctaatgctagagttcatctgtggagcccacagccagagaatcccccaagagatattgccccatttcagatatatttttaagtactattaataagtgaacagtatttcccatacagtcatcatttataagatgccacaacaacagatcaaagaagaatatcacatgatagctgattatacggccattgtatgtggcccagttgatgtgctgattttctgtgataaattgaaacatttttcccttctgtccctaatctctttagctatttgagcccacggaatgtggaaatggatacgtggaagctggggaggagtgtgattgtggttttcatgtggtaggtataagaaaccttctatacttacagcacagatcttacttggtgcaaacaggtatagcatttgtgagaggccagcacattgattgtggtcttactgcctttctttctcatctctctgattagtgcttaattcaactcagacctgttggaatcagtcatgtccttatggccttgtctgagcaaacctaatagattcttctaattaaattccctacctcttaaaaatttgtagctcatattcatctcagataagttttaccaaatcgtaaaacattctttccgtgttgtatattatttttatctttataaaatagattgggtattagaatgtagtggagctaattggaggagaattgcctgctaaaaattaagctttctcggccgggcgcggtggctgacgcctgtaatcccagcactttgggaggccgaggcgggcagatcacgaggtcaggagatagagaccatcctggctaacacggtgaaaccccgtctttactaaaaatacaaaaaattagccgggcgcggtggcgggcgcctgtagtcccagctactcgggaggctgaggcaggagaatggcatgaacccgggaggcggaggt

SEQ ID NO: 25070 - DNA, 1053 bp, Homo sapiens
tttacacttagtcttttgttactttaaaactagaacaaaaaattcttggatccaccttctgaagttagatttagagaagatttaagctctaacaagagaagccaaggttcattctttccaaattttctctccacagtgtttctgtgattttttttttaagatctagatgctatttcctcaagtgatgtataaagatgcctcaacggatgagcagagctaaatttacttagactctgcctttttttctttaagtagagtagggggttattaattgtctggttctgtaatatctattccctgttccttcacccacccatgcctaaaaatctttggaggcattaagtaaagaaagtcacattctagagaaagagtactcacagctgccttttgttttgttttgctttactctctccatttaatgtggtagtatcccacactacctttaaaaaaaaataacttttttgatccttcaagtaatacatacttattgtagaaaaatttgaaaatacggaaaatattaaaactcagaggtgctcaagataagccttattgggcctggctcagtggttcgcgcctgtaatcccaagactttgggaggccgagggcaggtggatcatctgaggtcaggagttcgagaccagcctggccaacatggtgaaaccccatccctactaaaaatacaaaaattagccagacacgatggcacatgcctataatcccagctacttgggaggctgaggcacgagaattgcttgaacccaggagacagaggttgcagtgagccaagatcgtgccactgtactccagcctgggtgatagagtgagacactgagccccctactcatcccccaaaaaagaggccaggcacggtggcttacacctgttatcccagcactttgggaggcccaggcaggcggatcacctggggtcaggagtttgagaccagcctggccaacatggtgaaaacccatctctactaaaaatacaaaaattagccgggcatggtggtgcgtgcctgtagtaccagatactggggaggctgaggtaggagaa

SEQ ID NO: 25071 - DNA, 1038 bp, Homo sapiens
aaactaaaaaattttaaaactctgttgtagattttattattttgtttttgattgtcaggttaaaagaagattccaagtgagaaattatgtgcttttcgttttattcagttagcaaatatttattgactgtctactatttaaaagatagcgtatgcttggcacacagacactccataaatattacactcttctcttttgaaatatgcaaaggaaatgagatggtgcatgctagtgccacttttcagtttatccatattcatttgttttgttgccttgccgacgagtaataggtaatggactcaagttattaaaacaatcagtgttttacttactgtaggctcagcagtgtgtgagacactaagatttttctcaaaaaatgcatgttgtggccgggcacggtggctcacgcctgtaatcccagcactttgggaggccaaggcgggcggatcacaaggtcaggagatcgagaccatcctggctaacacagtgaagcctcgtctctactaaaaatacaaaaaaattagttgggcgtggtggcaggcacctgtagtcccagctactcgggaggctgaggcaggagaatggcgtgaacctgggaggcagagcttgcagtgagctgagatcgcgacactgcactccaacctgggcaacagagtgagacactgtctcaggaaaaaaaaccaaaaactgcatgttgtatcttttttctcatgatccaactggtttggttggcacctgcctgattgagcacagtgtttgggccctccccaaatgcttgccatttataatgggcaccacccacagtggccaatcatatccatagatgaaggttttctgtataggtgcagtaagagtattaaaaatacttagttttatttaatttcaatgtgcttccattatatagagaaaaaaattcaagaaacataatgaaaatatggcctttttaaaaatcatgaacatgggcataaaagataaattgtacccaactgccctttggatcaagaccaaattagtaaaaatgaaggcgaattctatgac

SEQ ID NO: 25072 - DNA, 1061 bp, Homo sapiens
aataaattacagaatagataaattagtgtagaagtagaatttttttcaatgagatgataaattctttgtagctatgaaaagcagctgcaacctttgttttcaaatatgtcccctataaaaatccacccacccgtgagctactcagttaatttatgtcaaggtgatgcacaagttcctacttgccaaaacaaagttcagcactctctaaaggaagagaacaaaagcaaagcagaatcgacaaaaagaaaatcttcacatctttaagagacaaccatgttcagtacaatgacaaagaatcaaatggcactttacatgtatttgcaggatactgtgtcactcaaagtaatgggagggagagagaacagggagggtagggatgcttttgaaaaagctttttttcccacttttaacttgctttagcgttaagagtacttaccagctaataatgtggaggaaattattctttctcattggagattacagaatatatctattcatcttgaatacccacttgaagcctctgtagaaatgtctcgtcctccggttgtatttctaaaacctacatgattttgtcttgtttctgcagtgagaaattacatccatagcaaagacaaaagtctttttaaattatttttatttatctttcatatagttcttacaatttctaaaaaattaacactcatttagtatcacaatttatgggagagggttttttgtatttttaagcatatgtggcttatataaaaattgcagaagtcataggactgtcatgtattgcagctctgagaaccaatgcctgaaacttaagccaaaaaaaaaaaaaaaaagttatgaccaggcacggtggcctcatgcctgtaatcccagcactttgggaggccgaggcaggcagaccacgaggtcaggagttcgagaccagcctggccaatatggtgaaaccctgtctctaactaaaaatacaaaaattagccgggtgtggtggtgcgcacctgtagtcccagctacttgggagggtgaggcagaagaattgcttgaacccgggaggcagaggttgcagtgag

SEQ ID NO: 25073 - DNA, 1044 bp, Homo sapiens
tcttgtagtgctgattaaatggccatgtgcctgatatcatcagagttttagcatggatccaaaggcttactgaaaatttaagcagtcagtggcacaaaataaaatctctgattaatgataaatatatgcctgattacgattcagttttattggattcattggaattttttgcttcttataaatcagaaaaaaccctaccttaggatcgcttagagattttttttttttagtatctcccttctgagttttaagagtggatggctagtaataacatccacactttggacctggtaccaaatttgtaatcaagcaacaaagaaagtagaaggaaatctggttatataaattgtattataaaaaacattctaaggaaggcatttcttcacagctcccatggaattggtcaccaaattatatcccttcttcatgaatgtcttcaatatgtctcctctccatcccattgccatgccttggtttggccttaacagacacatgtatctcacatatatcgactgcactgacacacagttactaatctcaccacattgatgaaagcattgcagggcttttcatttcctgtaagttaaggctcaaacttaataacacaacgtaaactcctgcccacctctcatgatctcaaacctgtttctttttgtagcctcattgactcatcctcttgtagtcaccttaaaggtcccctagaggaacctcttgtactcaaggcccaacaatcttatttaaatgttacgtccattacccataattcattcgtttccatgtcatttcatgtaataaatatagaaacactttaaaatagcatgaatattatacttaaaattagaaagcttattagagtatttgagtgttgtttatatttgactttaaatgaatgatttgtttttgtgtgtgttttcctttaagtcattctgttcttgaggatgacattgaaatgagttctactccatgcttccttagtaactggctgagaaaggtgacccagaaactccctagataatagagcagcaaacctagagttaaaatttg

SEQ ID NO: 25074 - DNA, 1057 bp, Homo sapiens
accatttattagtggtgtcactctgggcaagcgactgcccctgattttgatcttttctgtcttcatttgtgcttaaccacgttatactgtgtaccattagctgtgggtggtaggattaggcttgcagttcttttaacccatagtattgataactagataattttagttggttataaaactgtagtggtggtccaggcgttatagaaaatctagcataattatgaaaaggttctggagcctgacaccttatgttctaatactgcctttgctacttccttgtctgtgtgttcttagacaagttactcaatctctaagcctgtttacccatttttttaaatgaggagaataatagtaatacccatggagttttttagtgtgagttaaatgagttaaagtctataaaatgtttgtctcgtgcaagacatacagcaatagccaacatttattgaatgtatacacttattatgagataaccaactgtccagaatgatgtgtggatacttacttgcaaggctgattttcttatctcttttctttggaatcgttacagatattggccttctgtatatgttgggaaactgacttttctttgttccccagacagttcgtggaagttatggctagtgctctgactggttatcttcacactatttcttctgaaaacttattggatgcagtatattcattttgcttgatgaattactttcccctggctccttttaatcagcttctgcaaaaagacatcatcagtgagctgctgacatcaggtaggatgttagtgcagaattggtcaccaattgtgaccaattctgcactaccactagctaccatatgactctgaatggggtcttagttggagcagtgttagttgaaatttgcagagcaggtgttgctgtggaaagggctgataatggtgaagtcaaaggatagtgcttcaaagcagcaaacctacagacccttctttaatgacaagtcctacatgtagaaaaaaataaggaatgcatcattattccttttatttatactctatccttctatacaaaggctaactgttcag

SEQ ID NO: 25075 - DNA, 1049 bp, Homo sapiens
tagttcctgtgcagatatctgcctgaaagcttcagaaaatgttgcatggccttttcagaggctacctatgattctggaggctgttagtgttgctgctcttgcaataagagcttgtctttgagaacaaaaatacttctctgatgccgtttttgtttagtaaagaaaacaagaattgcagatattagaatgtccttaataccactgtgatgaaaaactcagcttaattgtgcaggtaggtttgtgataggtaaagaaggtggacaccttggaaaaacctcatattcctcttagaaggattcttgaaaacccaacccatactgcttgatgggcccagtaatttcgtgcttgtttctgtttttgtaagatcttatggatatctgtggacaaatgttttcctgctagcatcatcaagatactagttgagttattgatgacttgtctctttgaagagctctgtaaactagcttcattcattcatccagacatctatacatccattaatctgtatatctgttcaacaaatatttattaagcctgctagtatggactaggagcaaaagattttaagcaagtaatttcaatctttgcccttatgatagatttgcaaaaatgtctccaattatttgcctcttcatctttgcttcataactttatagcgctcttccatttctgactctggtctcaaccataagacttgctttggccaatgacttgtcaaaaagcaagtcattggtcaagcaaaggctttaaagtatttgcaaaatcaggcttgttatcactcttaccttcttcatcaacataagactatctgtgctagtctgttgggtgattagagacacttggaaaagagatgaattagcacagtcattccagccaagagtatcctatattggctgataatcagctgacctctatacatcaatacatcttcctaaacatgtgatattatccaaccgaggccagaagattcatccattcaacccagccaagatcagcagagctgcctaatcaaccatcccagaggcatgggtaaggactatttatcattg

SEQ ID NO: 25076 - DNA, 1032 bp, Homo sapiens
gtagttttctatgcagtattcactttccccttctttcttagaaagatgttatttgaggtgccagagtgctcagctaaaagactacattccacaatatttcttgcatgtatgggtggccaatgtgatgtaaactgaaggcagtaagtaaggcatcaagaagaatccccttactctatccctttttctcatctagaatgaaggtgagacatttgcagctttgagaatggaagtcacacgctaaagatgatggagctgcagcccccgatgactttgtgtgctgcagcaccagccctgaactgcccatctttggactttcctttctgtgagagagcaataagcttctcttttgtctaagcctctattagttctgttctctgatactagcagcttattgcagtttctaactgatgcccctagcaatattagtgagatcatcaagttcaatgggctggcattgtgtgtatcagaattgaaaatcagtgtaataaccatgcctgagcacaaccccctgggaatcttttgaacaaaatcccacaagattaactagataatattaggaatgctgttatcgataaagtttattgagcgttcacttagatgcctgggaacaatgcaggaaggggacctagtctagtcttgaaaaaccacagacgtcttcattaggaaggtgacgtgaatgctgaaaactgaagcaaagcagctaaaggaaaggtggaagggagtggagagggtgggggaagggtgttatgggcaaaagaaacagtgtttgcgaaggcagaggcaaagtgaacttgttctatttgagggaactgtaagtgctttataaataaacagaacatcgtgtcagaggtcaggacggggagtagatggaagtactacttcaggccagaaaactaggcaggggagcagatcatgcagacttttaaaaccacacttacacgttccagtctttcccaaaaggaatgagcttccattttcatatatatatatatatatatatatatatattttttttttttttaattatacttt

SEQ ID NO: 25077 - DNA, 1028 bp, Homo sapiens
tgaaccaatacaaccctgccaaaggccctcccaaagtaagcatatgtctctttatttccagcagaggaaattaacagcaccagactttcttcattattaacatgaacaaatggtggcttcggtctgtgatctatagctgtaagataagctgctatgctgtatcccaggaatacactggaacctggtttagggacgcaaggtggggactcaggatagctgaattgcttttggccactcttagattcctaatctctggtgtgacgtgacacttcagaaaagtgggccctagttttctccactgcaaattatgaagtgagattagatcaatgatttatatcagcagttgcacattttttttcttataaagagccagatcataaatacgtagggtttgtgggccatatggtctctgtaacaactactcagctctgccattgtagcttgaaagcagccatagacaatataaaaatgaattggcatggctgggttccaaaaaagctttatttgcacgtgctgaaatttgaatttagtacaattttcatatctcgtgaagtattgttctcattatttttttcaaccattgaaaatgtgtaaaataccttcttagtttgcacgttgtaaatagcagtggtgggctggattttggcctatgggctattattagccaatccctgttctctatggttacatcaaagtataaggtttctatatatgccctatttccttacaggaaacatagaatggtttttaaaagttcaacaatagtatattttctaatgtttgtacatttaataatttagttttaaacacagccaacctgtatggataagacttatgttggttataagggtgcttactttttggtaacaaagatttgtggaaaaactataggaccaaaattaattagcttccctgacactcctactatgactacagatactttaaggaattactttatcaattcttatgttgtcacacagacggataagaagttacagtattaatatttttaaaacttttttttttaa

SEQ ID NO: 25078 - DNA, 1046 bp, Homo sapiens
tcaatatatataaagctgagaaacttcacccaccccccttttttaggaaaatcctctgatgaactttacattaagatatttcacagtaaaagaaaaaaaaaacagcttgatattatgctctttggggagtttggtttttctctttggtattgtgtggtcttatgttagagtaatcctgcatagcactgtaatctagtcacagatcattgttattagtgtcagtgataattacaccatacattttgatggcatcacagtcttcaaagggtttttccatacattacttcagttaatgtgctccacaacctgagaggaatgcagaacaggtataattttttttctttttttacaacagaagacaagtgagatttgctgaaaattgcatggttgagaaatggaggaacatgattcagaacgcgaggcttctgaattctaactcattactctgcacccagcccatctaacgttgcactgagactctgacaaggaaggcagtgatctgtgatgaccttgctgaatatattaagcagaaatgagaagatgtaggacaacaacctggggcaaaatgcagataaggaaaggaaacctgtcctaattgggttgtctttcctttaagtacctgagcaatggatggaagcagagactcaggatgataaccctcttgatcaagtttttcaggatgatgattcagggtgatggtttggaagcattctctttgaaaactagttggtagttgatgcacaatgaaatactgtccagctgagaaagagatggaaaattatccggtggctaattcccaagctgatggccctaccctacctcagttctatccccacctcatgccctgcagattgctggggtttctggtggaaatccaactcctctttaaaacctcctccatttcctcaccctccatctctactcttagcacttgagagtgtacatttcgtctttgctcctcttccctccccagatgatccaaatagaaaatacatcagcacgtgggaaagagcaacgttgatcgtcttcacggaaaggctgaggac

SEQ ID NO: 25079 - DNA, 1046 bp, Homo sapiens
agtcattctgtacagttctacaaaattctgtttctctgttcagagctactgcttatagtttagtgtttaatcttgcacaccttttgcatgcataaacctttacaacaatttgttttacttttttaaaaaaataaatggggctctattttacaatgtgtcaatatattaattttttttcatggttacaattttgtaatggttctcttaatgatggataattgttttcaggggtttttttgctatgatttaaaaaattttacagtgaatactgttgagctacatctctggatattactatcgattatatggtcagtgcacttgtggctttatgaatattttaaataatgtagtcaagtctgttgatctttttccttgtcatctgtgttttgtggattttggtatttccaaactatattcatttctacagagttattttcatttccattttttgaactgtcacttgtaaaacactttctttttatagaaccttatgagtgatagcaagatgtattagtatgtaatacattgtgatggagtgtaatgatcacaaggatcagtgacagttttgatgaccaatttcagagttataaaataaatgaaatatattctggaaaagtcatgggctttttgtgttgtttgtggaatcactaaaggtagtccctcactattaacaaatttgttttgacacataatatgtgaggcactgaattataataggcactagaaacattgcctattttcctgaatcctttagacaggattgcttccccagttaccagagatttctctaaccttgatttacagtagctactgctggtaggaattgctctccactccacttttgctgccatccagtgttacattaccctacaaatatactaagtgcttagcaaagcagagtccaaatgtaagatcaatttttgtcttacccagaattttacaattaaaatatataaataaaagatttctctgtgtgtggatgtatgtgtacagtatagtgttgcatgctatacatggggtgaggtatcagaatgctttttcagtgt

SEQ ID NO: 25080 - DNA, 1044 bp, Homo sapiens
tccaaattttcataaaatcacttccctcgttcccatctctactactactaactgccctctttttggccttcatcatctttccttaactacttcatgggctttcttcgttggtctccccaccaccagttttccccctgaaatatatatctttcacactgccactaaagtgattttttttttttttttttgagatggagttttgttcttattgcccaggctggagtgcaatggcgcgatctcggctcactgcaacctctgccccctgggtttaagcagttctgcttcagcctcccaagtagctgggattacaggcacctgccaccatacctggctaattttttgtatttttagtagagatggggtttcaccatgttggccaggctggtctcgaactctagacctcagatgatccacccgcctcggcctcccaaagtgctgggattacaggcgtgagccacattgcccggcctaaagtgatctatctaaaagcaaacatcaccatggtattcaggagttcaaaagcccttcagtggcttctgcaataccctcaggataaaatgcagtttctctgaggtgacataatacaggctttttgtgactagcacatctagccccacctgcctctgttgttttctctctccctacttcatacatcatacagtaacacacttatgtgcaccattggtgctgagctgctggttatcccactctgccatgtgtgctgtttctctttgcttttgccactactccactctgtgcttgaaattctgtgactcttccctgtaagtaataataacaagtctaacttttttcttttgttttaaattcacattcttccctgatagcctccccttctcttaggttgggtagagtaattctcagtgtgtccatttttcttttagcaaacctcattactaaactgaattgtattgtgtctcttttccccattccttcgcatacatacccccaataatttatttgaggtcagagacccctatctttctcacttttgtagtttcagttctaacattattcctggaacat

SEQ ID NO: 25081 - DNA, 1022 bp, Homo sapiens
cacatctagttcagtttattttattcacagtataggaatatgctgcatctgtatagtcaccttatgtataggaacatatatacagaagaacaaacataaaagaaaatgactaatttcttaagctgcagaggaaaaagaattgattggggaaaataatgaagtacatgagataaagtggaagtgtttgggagaaactgtaggactgaagtacctcagtcgaggaaaattgagatgcaaaaatagtaactaattttctaaatctgcaattggagaaaaatatacccttgatcaaaaattaataaccttacctaagatattatttgaccttagagattacataaagcatttgtaaaatcagctgtgcttagggttttcagttacagtgtgtaactttgaaataatatattcagaggttacatcttaagggtcaggaattatactatgcatgttatctaattctttggagagatctttcctttgggtttgatccacaggtaataaaggcactgtagacctttgaaggtgactactctgtttaactgtagggaaccgagagcagtatagatcattgcaattgagcttattgaaaaaaaagacttgaacgttcattcaagtaggccataaccccagcctcccatttcatattttttgcttcacagtcttcctgtaaggacttaaaaagacttttctccggaacacaggtgagtcctaggtcctagatttggagagaactattattagaaaggaaggtgagaaattattctttatgtctttgtccttttcctctataaacatggaatttcaacacttgaacaaaaacctcagagatcttctgggtctaggccatacttgttacctccccagcccttagtctgttgcttaattctgtttaacatttctcccctcttcctaatggtagtccagcatttacttgaacactttcagagaaaggaagctcaatctcctgaggtaacctgtttacaattaggagtgattgctaaaatattcttctctgtgatgat

SEQ ID NO: 25082 - DNA, 1111 bp, Homo sapiens
attaatgtcctcagtagaatttgtcagccattttatactattgagtcatcgaacttctattaaccacctctacttcattctgtctttgtgcttttggttcactttgacacttaagtgggagcgtgggggaggagaagtaatgtttttgtgtgaaatcatcagttggatcaatttccataagacactgggaatggcatttgttaacaagtaaaagatagtgttgtgcatgtaaagatctaagaacttgatatttctatgaaatcacaatgactgagcaatagtcctttgccttagtttttattccattgagtgctaccttaccattgtccatactgtgccattactaattccctaaccatatgctcctcttagtaatagtgagaaaacttgatttgctagtgaggagacctagattccagacccagtttggacattaataagtcaaatggccttgggcacatctacctttctctttttcacttatagaagatctttctataaagaacacaaaaattacttaagttacagccacaaaatttgctaagattactgttttttattgtaatatgtgttattgttgattgtattcttgattttaatctttattctggggcaacataatttggacatgaagattttatggccattaagtatagaaatattctcttttttttatttgcttgtattcatctttaaggaacacatttgtccattaaggtccattaaggtgagctgtacttctaatttaagagtgtgtatttataaaagaaaagttggacttattgaaccctggattctacaaatagagatacaaatataatatttttttctttaaaaggcctaaactatagaatatctattttaatagttatcttagccagttaatggtgattagtgttaacaactaggaaatagtttttatcaaaagagatgatcaaacaaggagaggatcttctagatgggagacctcattaatattccagaataaagtttccaaaatatacaaggtacagttctcttgttgtgagaatagattattactttaaattatcattcattcctacaacaaatgtttattggtgacatgctatgtcactgttctgcttgctat

SEQ ID NO: 25083 - DNA, 1064 bp, Homo sapiens
ttgttattagggtaatgctgaccttataaatgaggtggaagtcttcccttcccttctctttttctggaagagattataatatttgtattatttaagccttatatggttggtagaatttgccagtgaacccacataggcctggagttttctattttgagaagttttttttttttttttttttttttaatagatacgggatcattcagactatttcttcttcagtgagttttggaagtttgtgtttttaagacattggtccatttcttcaaagttatcaaattcatgaccatagagttgtttgtagtgttagtttattattcttttactgtatgggatgtcagtagggatgtccccccgcttcattcctaatattgttaatttttgtctttcctctctctctgtattcgccacccctaccccagccaccctcctttttttttaagtctggctaaaggtttatcaattttgttgattgtttttaagcaaccaaaattcttagtttcattagttttctccttagaattgtattgatttgtactctgatctttgttattttctcctgcttgctttggtttttttagttgttctctttctagtttcttttttcattaactgtaaattttttcctattaatatatacctttgtcttatttcagtttctaagaaaacttctgcaggtatctagtttcttaagacaatagttggatcagtttggcaaatcttttgtaaagggccagatagtaaatatttcaggctttgcagaccaaatgatctgtcacaactactcaactctgccgttgtaataccaaagcagcgatggataatactgactgtgttccagtaaaactttatttacaaaaacaagcagggaagcaaagtttggcaacccttgatataaataattgatttaagccctttttttctaacataagtatttaaggctgtaaatttccattttagcattggtttagctgtgtcccacaaattttgggttgtcatttttatttgcattcagtttaaaaatttttttatttcctttgagacttcttttttgacctatagac

SEQ ID NO: 25084 - DNA, 1066 bp, Homo sapiens
agtaagtgttataaatgaaaaattgcctgatgtttagcagtttgtattctctaaagctttttttcaaaagttcaggctttctacttactgggaagttggtggtcctcttagtccctgataaatcaaggcaatcacattcatgtgagctggatgaatttataagttataaagaccttatccttcataccttgaggatgattgcactggttttgaagtcagttgcttaatgatgaggtgagaaatgtatcctgttgctaaatctgtcttagacccttggtgaaacttgaagatttcagtttataaagataaaatcaagcatcttttgtgcagttttctttttttaatgcaagaatggtggggaggtttgtttgtaagcatgaaactttgagaatctttattaagaaaatgacataatttttaaaaaccttgtagccaagaacatatgtggccacattaccagtaataaatgtttttctctttatattggccaaaagggaataaaaatgtcatcataggaatttgtacatatgctactgatttgcctagaaaatagcaagtttgatattgctcactttgcaaatatagggccatgtggcacttttatctataggacagattaataaaaatgaagtggggaggggtttatttttgatatattactcttatgagttttcaagctttgataatgtttaactgaaaagtggcttagaaagggctagatccaatgtgttcattattaaataattgctatcagatacaattttaagttcattctttttcaaactcaagtaccatattggcaaccataatattgtcataggtgctctcttcatttagatattcttggggggggtggcatttgtataatatatgtgtacatatatatatatatatatatatatacatacagtatataatctaaagctctgagagctcttaagtcaggaatgctgagtattatagtatattgaggtcagatgaaattttacatttttgtgtgttctgttgcattccttctggtagtttctatgactgcattactccagcactcatgattgattttatc

SEQ ID NO: 25085 - DNA, 1053 bp, Homo sapiens
gagacatccttttgtccatctgtgttccttgtggaggcactgaatacggggaatattttacagcctaaagacctgtcatgctgctctgcacagcagccactgggtggctctcttgaccagcagttcttcaagctagtgccacaaaagggttagttactgtgaaaaggagaaggtaaaaatgtgctcagtattacttgggttttacatatttgagcataatatagctacctgtaaaattactatctaccatgcaagtatgatacattgtacctggtaggcactcattatttattgaacaactctattatgggtgtggaggtgataagagtgcctctcttgatgatgctgtttgctgagatgtccagtcattcctgtgactgggtgggaaatgtatatgggcagaataggcagcagagatatctgacctacaactgtgatttagtgtcttgctttggctgagtaagcaaagtctctgtagaacataagaataaaaggcacttattttctggtcaaaaacaaaagaaatttgtcagtcatgaattcttatcaaagcatttcggggccgggcgcggtggcttacgcctgtaatcccaacattttgggaggatctggtggatcacctgagatcaggagttcgagaccaacctgaccaaaatggagaaaccccgtctctactgaaaatacaaaaattagctgggcatggtggcgcatgcctgtaatcccacctagtcgggaggccgaggcaggagaatcacttgaacctgggaggcggaggttctgtgagccgagatcgcaccattgcactacagcctgggcaacaagagtgaaactccgtctcaaaaaaaaaaaaaaagcttatcaaagcatttaaactgaactaaaatcaaagaccagtgctctattttacaggtttacttagaaaggcttttaacttatgctgaaatcgacatttgtcccaccaactggaaaaggattgttctgggagccattcttcttgcctccaaggtttgggacgatcaggctgtatggaatgtggactactgccagatcctc

SEQ ID NO: 25086 - DNA, 1041 bp, Homo sapiens
agctttattatttctgtcaagtataggggtcaggcttccatttttcctcatggatgtccagttggatatagtaccattgtttttgaaaagaccatctttcactgattgcattataaattccaccgtaagtccatatatgtgtgagggtgtgtcagggctctctttttctgttccatacctttatttttttctatccttgtaccagtaccctgtctaaaattattgtagcattaagaataagtcttgatggctggtaatattaagtccttcaatttgttcttcttcaagattgtcttggttattttgacctttcgtattcccatatgaatttttgaattagtttgttttctgcaaaagaaacctttgaggatttcatttgccattgcatattaataatcagtattttcaagaagccttcacacatttttattgttataggatagtgacctgaaacaatactggatgccagatagccaatgtaaagagtgctatgactgtagtgagaaatttacaacctttaggcgcagacaccattgccgactatgtgggcagattttctgcagtcgttgctgtaatcaagaaatccctggaaaatttatgggctatacaggtaaatgcattttattgccagtttacaatttttaaaggtcataactataagacacttataatacaggatagtgttaagccaattttcattttgggttttatgtgtaagacatggggacacaaaggtgagggagacagctttgcttttaagaactttcctattgaataatacagtagatgggacttatcataaataactagagtaaaagtgtatttattgtagatgctagcaaaaaactataggaacattaaaatttattagacaagatcgttagagtagattactaatttaaatcactatgagagttttcattttaaaaggacagatcttccttgacgtaattacatgacactgtgctttggcagtgaattgtgtcttactcagattcctccataaggaacatagtcaaatttcagcagtacagaaaattt

SEQ ID NO: 25087 - DNA, 1013 bp, Homo sapiens
aaatgtcagaggttctcaaaaagattttttaaaaagccagatgttctgaataagagattgtctttaattaacacttgagacttccaagttctctaagcactgttagcctcatttgtgctcttagacatcgctcatctctaggcaggagctagtctttttaaacagaaactcgtaccaggtaggactttgtcccatggcatgtggcacaacagataacctttcctgcccactcagactgcttctgcatgtgtatctttatggcagtttatatgaaagaacatggtcagttgacttcagttgcccaatcaattatataacagctttttcccccttttctctttcataatctcaggtaaaatgccaacagtggtgtctccggagttgtacaggactaggttttgtgaggcaatggacaagtatttcctaatggtaccagaccactggacaggcttgggtctgaattgctgaaatcaagcacatattttgaaatggactgtgaaggaaaaggggacaggaacaaaggaccaaaaataagctacatgttttatttcttcatcgtgttcaccactgtatgccaaggcttttcagttctgtggctgtttagactgtccgtaatggaatggtaaaactccatgaatttgcactttggtttttgatacctgtggagctgtctgtaggttgggaagtggcatgaaaattttcttaagctaaaatacagacatgtttcaaagggctaaagttggagatgagtagatagggtgaaaaatgggttaaatttgctagcttaattgttttaagaagaaaacagtgtctcataaattgactatcctggcatcacatttaacatgttatctacttagaaagcatttgtagagctgctgaatttgttttgtgtttttctgtaataatttaatgttacttattatcagaatttctgaaacctttacaaaaattctgatttattccattaatggccggttaaacacgtgggcatttattgttttattgaggaa

SEQ ID NO: 25088 - DNA, 1100 bp, Homo sapiens
agactgtctcaaaaaacaaaacgaaacaaaaaaagaaagttattcttagtaaggaacttcttgtttaatagcatttttgtttattttaaaaagtgatcagaagtagtaaactatctttgaggaaatactgtaaccccagaatatttcctcttgacttctttttgtaacaaggataatttagggatttataaagttgtaaggatttcactgtttttggactgcctataataatagcacattaaccttcacataataagaaatctggacaagttcagttacacagtatgatgaatacttgaattaggaacattgtggaaaatttgctttagagaatcaaggcagtagtttggtatttggtgcttattaaaaatgtggtttgttttgaactggaagcaagttgaccaaggacttatgactaatgtgatgctaagttccacttggccccttttaaaaacgtgtatgtgccttttgaagatacacaaaacactgaggattttagttttgaaatcaaagactattaaaggagctgtacagaggtaaaaaaataaatgtggaacattattaacttactttgtgtctaggaacaatggattttgtatctgatttaaaatgccaacactgttttgtctctgttcattttttctgtgaggatacttaaggttattattcctgtctgtttcctgtactcccctagtcatgagcacttgaagtacaaggtgtctccccctaggtgcaattaggttgtttctttgtttttagtttcaattctatgtgcatagcaggaatgctccacaggaatggcttctgacaataatctgtcctgttgattttgttttccttgcccatgacttgaacaactgtgttttaaagtactgtagtctagtaggtaactttgtggcaaaaattttcaatataatacattctgaaacaatagttgctgccttgcaaaggtaatctctcattttaaaattggacagtattaatgaaggggaaatatacaatttatttctattgagtggtagaactatatgtctggtcccttgctgctcttgtttaggccactatcatagatatatttcaaatattgtactactcagtgt

SEQ ID NO: 25089 - DNA, 1050 bp, Homo sapiens
cccttccttacaccttatacaaaaattaattcaaggtggattaaagacttacatgttagatctaaaaccctagaagaaaacctaggcattaccattgaggagataggcatgggcaaggacttcatgtctaaaacaccaaaagcaatggcaacaacagccaaaattgacaaatgggatctaattaaactaaagagcttctgcacagcaaaagaaactaccatcagagtgaacaggcaacctacaaaatgggagaaaattttcacaacctactcatctgacaaagggctaatatccagaatctacaatgaactcaaacacatttacaagaaaaagcaaacaaccccaacaaaaagtgggcaaaggatatgaacagacacttctcaaaagaagacatttatgcagccaaaaaacacatgaaaaaatgctcatcatcactggccatcagagaaatgcaaatcaaaaccacaatgagataccatctcacaccagttagaatggcaatcactaaaaagtcaggaaacaacatgtgctggagaggatgtggagaaataggaacactttgacactgttggtgggactgtaaactagttcaaccattgtggaagtcattgtggtgattcctcagggatctagaactagaaataccatttaacccagccatcccattactgggtatatacccaaaggattataaatcgtgctgctctaaagacacatgcacacttatgtttattgcagcactattcacaatagcaaagacttggaaccaacccaaatgtccaacaacgatagactggattaagaaaatgtggcacatatacaccatggaatactatgcagccataaaagatgagttcatgtcctttgtaggaacatggatgaaactggaaaacatcattctcagcaaactatcgcaaggacaaaaaaccaaacaccgcatgttctcactcataggtgggaattgaacaatgagaacagatggacacaggaaggggaacatcacacttcggggactgttgtggggtgggaggaggagtgaggggggagtgg

SEQ ID NO: 25090 - DNA, 1035 bp, Homo sapiens
ttaggaactcacaaccatctatttccaactcttgaattagtttggtaaaaatctctacatgtgattatttaaagtaatgtcaatgaagtaatttagatttattcaaattatactacttaatgaagaataaattattgcagtcaggcccatttttgtaacattattaggcaatgtttgctgtttggtgtgggagagtttgaggacgcttgaaggtgacattgtttctgttttcctgaaagaatgaagctggaaaacagtgatattactctacagatattaaactatacatgattgattgattccagtccagcattcattaattatactgtatttatcagtaacacattaataataaaattgcttaggttagaaaaaaatcaacttctactaaaggttacaaagaatggattttaaaaataactgtttatctagttataaggtcattaaagacaactaatatagttttgaaaatacaatgacattaattaaaattgcctgtgttcccccaaaactgaaatcatcttgtaacatctttcttaaaaaagtgttctttttattgttagtgtaattatactgctgtgtatgtgtacatgtatatatgtatactcacacatccagataattataattgtgtgtgtaaatatatactgttctgtatctatcccacccttctcatgtaatatcataagctttcttctcaatgctgcacgcatcatatcacaggaatagactatgaccattcccccagtgttgggcattttagtttttttccaaaggtcgtgaattaataaaatcttagagctggaaggagacttagggaagatttaatccagtcccttttcttttataattagatttttatggttaggactaaggtctaaaaaagttaattgactgagagattattttatttaggaaaataatataaatgacatagttccagaaatacttttgtctaaaaaaaagtgaaagaaaaataaactaaatcagtcaaggcacattcaaaatagaataaaaaatgtgcattagtaatct

SEQ ID NO: 25091 - DNA, 1023 bp, Homo sapiens
atgagaaaattaccactttgggtttgcaaagttgaggcttgttgagcctttttatctactgttcattcacaagccaaacaaagacacaggaactaatgaggttattttcagataactgagcagactatttaacaattactttctttgatgacttcgtccactattccttagaatttcttaaaaatttaaacaagaaaaaatttaatgtcaaaaaattataatatacaaatttgaaaaagttcattagctgttcattttcatgaatcaaaatgactgttgtactcataatgtttcttccagcgcccactgagagaccatttacaaatacgtaaaaatgggtccagtgactgaactcattaatgtctattccactaaaacgttctttccaaattcttcagcattatctattcaccccgggcttttcagtgtggttctactttctgtgccatgcgactcagcttgcgtaggaaaattggtctctccaacttttcttttagagttttgtggaattgtgcattttgacataaactgttatttcttcctaaatgtgtatttaaatatacatattgtttatattggatataaaaaattttaaagaaactattgttcaatgtaggcagggatgattaaaattctgattataatgtctgcatacattttaaccagagtgcaaagtttttaacagatgaatctttgaagaacatcatgtgtgccagagaactttcaatcttcgggaatatctgatgtagtcatagtttgttttactataggatacttgaggattttatagaggcgaaatagttttccttaaaatgaatattatgaaataaaaaatactttcgaaagagagagaaagtattttcataatgcaagaacaaaggaaggcttaattttatgccatcttgagaaatgagggaaacccaaaggagaaacttaatcccctgcaaggttaaagggaagtcagttgagtgccactgttcactcccccttctcaaaagcattctttctgatacaactcagatg

SEQ ID NO: 25092 - DNA, 1040 bp, Homo sapiens
aacctcagttcctcccctccccccacgtaacgtgtggtcttccatcacttaggacccggaagcgacctaaatctttaggacatttcttcactttcagctagagaaactgaggcccaaggggagaagcatgacttgcccaagctcatatagctagttagtggcaaagctggggaaacagacttctctaacgatttaagttggcacctgcggttaggttcccgagttctgccacttgctgggttaccttggacaagccactaacctcattgagcttcagtttcataatttgaaaaatggaactactaacagaacctaccgcttaggcatcttggaagatgaaatgagcgagtacatgagaagtttacagtgcctggcgtatattaagttctctataattgttaattacatcattattacaattctgattttcctgtctattttctcttcaggcaccctgctcttcagggaggtcagttttttgtaagtaatttttaagcaccgtagttacagcacataatattgtttggagtcaggatattagtttctgaagttggttacagaatgaggaaacaaccccagagaaagcagtaagactccctcaagattacagaagattgtgacagacttgcaacttggctcttcctaggtttgccaagtagttctctgagccccactgttaactgactataaaaatcataaataccattatcttgagtggggatggaaaaataaatttattttaaataggtaaaaaccctgtgttccctcattcagtttgcaaattggtgttattttctaaaggtgatgatttccttttctttttaatgttaatctggctttgaagagttttatcttccattgctctatgtggttaaatgtattgtttctctttggcattttacccagttaccttaggagtccacccaactgataatgacaaaactttgaccatagagtactaaaaataataggccaaatgtgtaaaaagtttagtaaatattacctctcacaaaggttggcttttaattggccattatatg

SEQ ID NO: 25093 - DNA, 1030 bp, Homo sapiens
aaataaacttaagttcatgaccagaatggccaacatggtgaaaccctgtctctactaaaaattcaaaaattaatcaggcgtggtggcaaacacctataatcccagctactcaggaggctgaggcatgagaatcacttgaacctgggaggtggagattgtagtgagctgaggtcattccactgcactccagcctgagtgacagtgtgacactccatgtcaaaaaaaaaaaattttttttaaattaaataacataaacttaaaaattcggtttcttattcacgttaatcacattgcaagtcttcagtagtcacatattgtacagtgcagctatgggacatttccaatatcacagaaaattctgttgaatatagtctccagcctctgtgtaggatctatctactttgagttcaccaaagaaaatgtacattattacctcatttatgtggcatgaggaaacaatgttccaccaatatattcaccattttgaaatttccatataatgggatatagtcctctgattatctaaactttcttttaagccatgattagcttatatagcagataccgtgacttttcctatgaattacggttgttctcatgaccatgagaggtagatgaaataaatagcattgttttctcccactgtacaaccaatggccagaatcctcgcttctggcttgcttgtgtgaatttttttaatgcttgctttttttccccttttcgctcccttttatttgggctcccattgtcacaccatactattgtctatatcccttcctgtcagtgcctttccttttagcaatcctgtgttgctgccaccacacacaatctgctttttcttcttgtttttaatttgttgataaacttgctaattaatctttctagaatttggtctaaaagataaatgaactccattcactttaatgtttgggttttgtgacccttgttttttggtttttcgctttttgttgttgttgttgttgttgctttaagagacagactccgtctattacccaggcaagagtacagt

SEQ ID NO: 25094 - DNA, 1050 bp, Homo sapiens
tcttatttccagtctaattttacgctgtagcagaaccagatggctgagaaaattctggaactatggatcttgaccccaaggatatattattttattccaagaaagatcaggtaggcgaaaagatgacaggatacagagtcaatccataaactaaatatttataactgttctgaattatacagagtctaaaaatatgtgtcagctacttcattcctgtaaatactcttgctgtgttataaatatggcaagaaataaacatgaccaatatcaatagacttcttgaggctactataagttttgagaaataaggttcaaaaaataagaatgctaacacttaagcacagactagagcttgcttgggtttcttcctgcattacaaggtaaaaatttgttaatgtttgtttttattcagcttgggaaagctttgtgccatgaatacgtcgcatttaataacaagcaacacacggcatatagaaataactttaattaaaaaacttacatagaagattataatatcagacgtgacaaagatttgagtttatttgcctggacaacttgggtttgtctggcttttgttttctttttctttaaaaataaatgtacagtaaaactacaagcaaaagtttgtcagtattgaattgaattttttaccccttaaaaggactagtataatttccaatctctaacaaaaacttagtgtcaaatctcacagataaggccaaatggccaatattttcagttatgtgggtagtacaacttgagtaaccttttttacatgacaaaaagtgagttatataaattgtcctcaactttcacataggaaaaaaatggtttaatagcttcaaaaggaattttctttcatgtatactcttcagtatccaatattgaagctttgttctttgaaaaattttaatttccaatctaggatgcaagcaagaatatatgtttatttgaatagagtaagctatggcaaagaatgaccaaattagctagaaatagaaatcagccagaattaactaatttcttgctaatctagaaatacaatcatct

SEQ ID NO: 25095 - DNA, 1014 bp, Homo sapiens
gacatagaaagattgttacttgacagaaaccaagtgtcttcaacagtgtcatcttctagagaccatcaccttggaattagtttggttatacagtatttttccctataatcttatcttgatataattttatccatacctattcacaaccccttacctgcaattccaaaatccaaaaatctgcaaaaacaaatttttcataattcatttggtgacatagcctgatctgaaatgatgtgaggctatttttagtgtttatccaactcaactatgaatatttcactacagaaacattaatgtctgattacttttacgcccgagactctacaggtattacgtgatatgtttaccacattacttttttaaagtccaaaattttctaaaccgaagagcaaattggtcctaagattctgaaaatggcatttaaacttaaataatgagtgagactaatctcatgcagaaaaatataattaatactgacaatgaatgtggatattcacgtaaattcagtatctcaaaaactcataaacaaatgctatattttcttttggcttttttttctttttgaaacggagtcttgctctgttgcccaggctggagtgcagtggtgcgatctcggctcattgcaagctccgcctcccgggttcacgctattctcctgcctcagcctcccaagtagctgggactacaggtgcccaccaccacgcccgactaatttttttgtatttttagtagagacggggtttcaccgtgttagctaggatggtctccatctcctgacctcgtgatccgcccgtcttggcctcccaaagtgctgggattacaggcattagccaccgcgcccggccttggctttttaaattattgtgtatttctatattatgctggtagtcaaatttgcacaaaacatttttcgaatattcttttaaaagaacttccttttcataagtgaaaagaaaaaaatcagtgtaagttaaagggcttatatattcctttagttccctgaatgtcaaagta

SEQ ID NO: 25096 - DNA, 1046 bp, Homo sapiens
ttattggtgcataatcttcaaagagtcttaaggtctccaaaccagagagctagcacaggcataggtcagaagtccacggcgtgctcatgacttattgtaaagtaaaggtttctatttgtcgatgataagacaagtagactaagatcagcccaattcataaatttggtctgggtcagatgcaattcacagatatcaaccaatagatgtgtgaattgcaattgttagtggccttgaactgccccaccttgaatcgagggaaatcaatgtggctttgttcagcagtgactgcctgaaaggaccataaatcaggagcctccacagaacccttttattgtcaaggtaatggcaaagaaaaatgatagcagttattccatttacagagtttagccttttttcttcttcctgattgttgtttcttccagttttctttttgtatctgaataatcacagcatgtagcttttgaatttttttcctagaggaatgtgtgatataaaacaccataaagttcgcagttagaaggatgtcttaaataattttgtcaaaactcttatggctatgctgtagtttgaactggccaaccaaacggtcatccaaaattagagttttatacctttggtaactgttagccaccgtttctaatttcatatcgtaattatatgtcagacccaggccattatacatgctatctatgtgactgaaatttgttcattttcccctataaaaactgattagtagcagtagattgctgttggtaatgctatgatagtttaagtgccatatagtttaagaaccatatatggttctctatagtcatgatgccctgacatttttgtatgttgtggtctgttgtgtctttccagagatttgtcactaatatttctcaaggtaccaactattgtgagtttctaattttataaattagactagatttgcagtgatctctatgatgatgctgttactgccacttaatttctttagtgggagagatagtattgctggggccatttgtcccaggtatattagccaaatgctaattattgctcaa

SEQ ID NO: 25097 - DNA, 1025 bp, Homo sapiens
catggtgactaaataccaggaaactaattcatgctatgaaactcacgagtgctactaaattccttccagagcaaatgcagatttgggaggaatgggagcctcagtctgtgtctaggttatgactagaaatacagaacctggcctggacttggatggtactgtgggctgtggcttcagggcagggagaaaaggggagccatggacactaccccaggcaagaacaatctagaaaacaaggcacagtattaagtgtcaagtcaaggccaagtgtgcagataggtaagaaccagatatgaggggaacagacagggcagaaaaaaattttggaactgaaattcaccagtgttcttcgaaggaatactaggcagttagagggaagggagttttgtgagggctcaaaggcagcttgacattaagaaactggatttaggccagaatgctagcttattatttcagtgaaagaataactttgcatgagaactgtgattagcttaattgtatggatgtttcctggagagtaggatcacctaagagattaaattacagatgagaaagttgctccgtgaaagtagaaccagagtgtacagagttttatcattcttgacgaattaaccttttctactctggcaagattgttatccaaaacaatgctttccaaagtttttcacatacagtactccatcacatcctacttcactctgccttttttaccgtcccaagggccaaggggattgatatctctacactgcactattctttttatgagaacccaagaatgtcatttctctcaggctttggaaccagatattcctggatatctgttgagaaactcatctgttttcattgggtcgatacagagatggtatctgattccatgtccctttttaccctggttactgggaagcttagagtcaaatctgggggttatttttgaccaatcttatgagacctatggtatctgctgcatcttaatcatatttctataatgctatttccttttctcctccaatttccacattcattaa

SEQ ID NO: 25098 - DNA, 1050 bp, Homo sapiens
caaaccggaacataagacactctgcctctttgtctagatttatgctcagataacagttttatcaatgacatcttcaccaccctaaatacgtagcaacccagcttcacataaatacttgtcctacacttggttctatctttagtcctctactttctccccaccccaaggtacttagtaccatctgtcatagtatatgttttttatttagttattcatattctgtctccatccacttgactaatagataggaggacagagatttgtttgctttcatctgctttatccccagtaattaaaatattaatggttcctggcatataacagtcaacaaacattgttgaaaaaaaatgaatggatgaatgaatgagtcgaaggcttatctatatcattaattaatgctttgatgttttcagaataaataaatgcacgtttaaatttcaggaacggaaaacagttcttccttcaaagcatgcagtacctgaagtaatagaagactttctctgcaatttcttgatcaaaatgggaatgaccagaactcttgattgctttcagtctgaatggtaaacaattatgtagataaatagttctcttaaaattctaacatttaacatatacacttttaagtgtcttaggagactttgaaatgactcagcctatgaaaaatgactagaaacttttcccatctccagccctgaaaccacaacacacacacacacacacacacacacacacacacacacacacacacacacacacaaatcagaatagcagttacaaagacatttttattaaacatctttcccaaatatttaagtttaagtaatttttaaaaaatcaagacacttgaatatctcctggagttataaaacacaaagatattttatgaaaacatttcctaatatttttgtataattattgagagtatttcctgtatttagacattatactaaacagtcctgctttacttccttgttttatttatagtgtaatggcttgtctttttctactcacatagctgattaattatatttctatgaatattcttcagtt

SEQ ID NO: 25099 - DNA, 1057 bp, Homo sapiens
tcccagtaaagaaaataacaggacctgatggcttcactgcttaatcgtgccaagcatttaaagaactaacaccagtgttactcaaacaattccgaaaaatacaggaagagggaatcttttccaaactcatttacaagacccatattaccctgatacccaaaccaaagacacatctaaaaataaaaccacaggccagtatctctgatgttgattcaaaaatcaacaaaaataccagccagcggaattcaacaatatattaaaaagataattcatcatgaccaagtgggaattattccagggatgcaaggatgattcaacatatgcaagttaatcagtgtgatacattacatcaaaagaatgaacaacaaaaaccatatgttcatttcaattcatgctgagaaaaatttaatacaattcaacatccctttatgataaaaactctcaaaaaatttggtatggaaggaacatacctgaacacaataaacactatatttgtcatgccaccgtgtcatactgaatagggaaaacttaaaatcctttcctctaagatctgaaacatgaaaaggatgcccattgtcaccactattattcaatgtagtagtggaagtccaagcaatcagacaagagaaggaaataaatggcatataattggaaaggaaaaagtcaaattatccttgtttgcagatgatatgatcttatatttggaaaaacctaaagtatccaccaaaaaaatgatgagaactgataaattcagcaaggtttcaaggtacaacatcaacatacaaaaatcagtagcatttctgtatactaacagtgaataatctgaaaaagaaattagaaagtaatccaacttacaatagccatggataaaattagataggaagtaacaagcaaataaatgaaatatctctacaatgaaaactataaaacactgatgaaagaaattgaagaggacacagcaacatggaaagacattacatgtttatgggttctaagaatcaatattgttaaaatgtccatactaccctaagcaacctacaaattcagtgtgacccct

SEQ ID NO: 25100 - DNA, 1033 bp, Homo sapiens
acctcaaagatcaaaggtagataaactcatgacgatgagaaagaatcaacacaaaaatcctgaaaactcaaaaagccagagtgcctcttctcctccaaatgattgcaacatgtctccagcaaaggcacagaactgggctgaggctgagatggatgaattgacagaagtaggcttcagaagatgggtaataatgaacttcactgagctaaagaattatgttctaactcattgcaaagaagctaagaaccatgataaaacattacaggagctgtttaccaacataactagtatagagaggaatataaattacctgatcaagctgagaaacacaacacgagaacttcacagtgcaataacaagcatcaatagccaaagagacgaagcagaagaaagggtatcagagcttgaagactatcttgctgaaataagacaggcagacaagaggagagaaaaaaagaatgaaaaggaatgaaaaaaacctctgagaactgtgtgattatgttaaaaaaccaaacctatgactgataggagtatctgaaagagacggagagaatggaaccaagttggaaaacacacttcaggatatcatccagaatttcctcaacctagcaagacaggccagtgttcaaattcaggaaacccagacaaccctagtaagatactacatgagaagatcaagcaaaagacacataatcatcagattctccagggctgaaataaaggaaaaaatgttaagggcagccagagagaaagtccaggtcacctataaagggaagcccatcagactaacagtggatctctgcagaaaccctacaagccagaagatagtgggggccaatattcgacactcttaaaagaatttccaacctagagtttcatatctggtcaaactcagcttcataagtgaaggagaaataaaatctttttcagacaagcaaatgctgagggaattcatcaccaccaggcctgccttgcaagcactcctgaaggaagcactaaatatggaagggaaaaaccattaccagccactaca

SEQ ID NO: 25101 - DNA, 1028 bp, Homo sapiens
agattctactcctgtctctcttttgttggatctggcaacctccttttataaaagtaagtgacatattggataatatatgtataaacactttatacattataaaagcattatgtaaatacaaagatattattgttgctgatattattcctattattatagaaatatatcccccaacatgatgctaagattgcagagtatttagtatcttgctgacccctcttgacttatcttctagctctacttgttcctgttcttctcataatgaagtgcaaaaataagctaaggttcttatgggttgtcttggatgtctaaataagttgttcatttgttttgaatgttctaggtcttaatcagtgtatattaagattatatgaatcctcttgaatgatgatatacactccaatagagtgtgtgccacttgagtgtataccatatggtggatacactcagaggcagcagtgggttcctattacaagtttgtaggaccttattctcctggcattccaaactgtgtcttctcttgagtacatctgtagatagtcaaaacatataagacatgaactactgtcctgtttgcaccaactagctccttttgcctataatcataacacacaaagcttattattagtaaacatcatgtttatccattctgattaacataatacaataaatagtgatgttctataatatttctagagagtacagttcccttcagactattttatgactagagtggaatgttaaccttggcaagaacataaacatgtactgttgtctgcccaactgaatgcacattgcttctaatctcactttatgagaagacacatttgccggatcaatgactacacacgatgtgcctgagtacatgttaatctgctgttgcaaagataccatatcaggtagaacagttgcaatttaggctgttacttggttgagtttgcagtagtctcctgtcatcctccaggatctttgtttattatagaaactagactagggaattatatggaaatatgatgagaacatccaca

SEQ ID NO: 25102 - DNA, 1032 bp, Homo sapiens
gaataaatgcagcaatctatctgggtgagagatgggcacaggttggctaagaaagtagcagtgtaggtattgggaagaatagacagatttggtacttatggggcaaatcttcatggttgattacgtttgtagtgtgtgtatgagaaacaggaatcttcagatgtttttggctgggttgacagtgttatcattcattggaattgaagaaaagatgaggggaaggttttggaggagaggatattattaattggtttatgacgtgagggaatttggatgtctttgggacatctgagtaaagctgcttggttaactgtcgtacacagaacactggagtttaggagaaacttgggaaaatgaaaagccccaggttgctgcaagggaatagggtctaaggggagggaacttggttgcaattaaggcaggaagctgcagttagttctttgtgaagatgttgaggatgtagaggagttggttaatcataaaataaggataatataaacatgtaatgagaaagattgaacacaaacatggaagattgtgaagatgagatgatgggaatcagtagaaggccagaagggacacacattgtgagtgataacctgatgagcaggatgtcacatacagtgagtttgctggcccatggctgtaagaaggaatcaatgccagaagctcttggctgaatgggggctgggaaagacttgacattctctcaggagtctgaatagatcatacttccaaagtcctagcctgtggtacatgcagaggctttaaatgcaaccaactctgccacacacatatgcattgtctgtgagctacaggctgctgtttacacaggcactcagaatgtatcagggaccagatctttgtatgatgagactcggggtagggtcccagcagtcataaacctacttttaggagccaaaactaggtcatagcctatattggttactggaaaattagatcagcttcgtgtgtaaacactatttcagggaatgtggtcctactcttggtggtgtgaatacagcatgctat

SEQ ID NO: 25103 - DNA, 1050 bp, Homo sapiens
ctgttcataaacttggaaacaaaatctttccaaaaaatacaaagcattccacaagttttgcttttattgttcacttaagtaacttgtaattatttcatgtaattacctaagtgaattattgtcacataattcttgggatcagtcactcagttggagattcaggtatatctattaaagatcaacagtcagtactgcccttagacttggacaaatcctgctcttgatcctcagaggtcctaccatttggagtgacttccttgacatttttgggtctttctttggtgccaggggatgtctggggctgggagtgccatctgccagatgctttgattggcaggttaccgtatctcaatttatcatttttggagtcctctctgatcctcttatgtgtgtgtggattcaacccaatgccctgtggagctcatgaacttgtgttgatggcatcttttcaggactttaatgtctgggttctggttccaggaaggtggcctggttggtggatgttttctgcttactggtatgataattcttttacacgatcatggaagattgagctactggaaccatgctgatttggggtgacttctcattcacattggacatatgacaattcaaagatccaggtgtgggctcttgccaatttttgcctaggttctcacctgttttcattctgacttgcagtgctgattctagtctgtagcacccaaggacaatcaccacaccttctcttcaggcttgtcagcatatttcaggaagacttccaggatgttagagcctatctcccctgagagcttttgctttttattctcttgctccacaatgccagtggaccctctggttcatgttttttcttgtgtccaatccatgtttgtatgtcgtgcacttctaggtcagtgttaagccatgcctgatgcaggacagatattcttgcatgaatggaactactgatgtgttcctaacctaatctccctgctggtgttggtctgcagaaggccaatgtcaatatcaaaaaaactcttattttagaaatgtactcattgtggtctgaag

SEQ ID NO: 25104 - DNA, 1052 bp, Homo sapiens
atataaaatattgaaataactgaataattgttttagactcttagccaatcccctttctccaactctccatttcaagcatcctccaactctccatttcaagaaacctaacacatacgttatgcatctcagatttgcaacattatattctttcttcctgaggagaggatagaattttgaggattttccaagtcttcagccatggattctctgcatcatcttttatttattcccttttcctaagtggttcaaaatcatcaattttagaattaattttgcctcattgatatgaaggttttggattccatatatttgcttaacaaatgttcactgagctcttctatgttcctagtattgtggtaggtgctgaatctgcctcacctggctaaatgaaagtatagtatagataaggtgttcttccaaagctttatatctttcagttaccaactttctccatccaatttatgctgtaattgtttgtgacaatgtgggaaataggaatgatgatgtattagtttgtagaagtgtgaattgtctggagagaaatttggccgtacttagtgacattaagcatgcatattccttggactccaattattgaatttttacccgagagaaattttagcagaagtttaaagacactctctgtccttttccttttctcgctatgtgttgtagaggcaaaggaaaaaacttttaccttcactctctgaaggttcacttaaaagttaattgataaaaggcaaattagtatgagaaatgacatacaaatttattagcgtgcagggaggaaaaatcacagagccattactccaccacacaatgaggtacagatttttatatatcctttgtcttaggggaaagtgagatggggaagtgtggatgattttaagcaaggagagtaaatgattgtagggaaatgcaatgggcttggagaacataaaatggcctgggacaaagtctgttgggcctgcagaagaggcaatggttttgaaaaaagtttgtccaggtatgttgacagatttcagtctttcttcctgtcatatgagttcagt

SEQ ID NO: 25105 - DNA, 1049 bp, Homo sapiens
ccctgctgaagttcactttgcccacctatgtggcagtccagaaatgatggggcattaaaactttccaggagcaaccctcagtcggtgactggcagtagacagtgtgtaaataaataccccatctctctcatccctagcattggctatctctcagggatgtgtcctgcactgcagaggttctccagcaggactgagatccagtcctccacagtgagctggattgattcctacccttcattaggtacctttcctttcttgccttagttggaagtactgtaggcaaggataactgaacaccaccattcctatccaaaatactcaaagcatattaatgtgtttagctagagaatacagttagagattattagttgccaaaccttgctttgaaaaaaaagtgaagaattttagcttctgaaagtcattgcaatcaaatattgagcaacatgaagataaatcgggagctcgccggtttctatcagaaatgtgcccacatacgcaccacactacactggtcttgaattggtatttggcatttgctttgaacatttcaagagctagaataacaaaaacagctgtgtcaaaagtaagtgtctacttggtttcattaatgtgatcacactcatatggattgttttaaaatatccaaaagactgaaggtcctgatgaatccgacaaaatagagtactttttagggaaattagcagccttaatgtcaaagacaaatgtcagattattttgttccaatttactcattttaggcttaaggattctcaaaagatagtgaacaatatataatacactagacattctactccgcaaatttaattttgagcatataataatagaattttatctttggaaagtttgtgaaaattcttatgcattcaatcttgatatgaatcattgtctttatagttgttttgataataatctaatattatcaaatcacgatccccaacttctcaagacataatgaatatacattgaaatttaaagtacatgtgtttaccagacaatgcctagaggaaataaataattcaatttcatat

SEQ ID NO: 25106 - DNA, 1036 bp, Homo sapiens
acagaagacagatgataaatggaatgctggcattggtccggctcatagtagtgggttcactgggttcaaaggctcacaaagttattgtttccttggtcccaagatatataattggaatagaaatgcttggtagttaatgatttattaaattgcagaataaaagttactctagtgggaagagcaagtggaaatttctaatatgccccttcctcacatgcaatattgcatcccaggggaaacagcagaggacctaaaagatgcaggggtcatggccccattatatctccatttaattcactattttagctcttagaaagcccagatggatctggaagatgaaagtagattgctgcaaactcaaccaaatgttgcattaattgcagttgctcttccagaagaagcatctttgttagagcagattaccacaacttcaggtacatggtatgaagtcattaatgtagcagttttatcctttctaaaaatctctattggaaaggaggatcaggaacagtttgtattcatatgtaataagcataattttgcctaagttaactgttacctaggttaactaggttaactgttttaccctctatcatgatattttctggagggatctagacagatcagctatgtacacaacatcccattggtccattatattgatggcatcatattggttggatcagatcatcaaaaagtggcaaggtaagtacattggaagactaggtaagagggtaggagataagcattctgagggttcaaggacctgattcaatcagttaaatgttagggattcattggtctggggcatcctagaacatccccttcaaagtaaaggataaattatcacatcctcacatctttcatcaagcaagaaaacatgatacctggtttcttctttgggatctgaggcagtttattgcatacttggggatactgctctgccagctgtgagtggaaccagagcagataaagtctgtgcagtaggtccagatgcagcaagccctgtggtacagaggcacttgtgttagggtag

SEQ ID NO: 25107 - DNA, 1827 bp, Homo sapiens
tcaagccctctgtcaacggcttcagcaaaatagatttttgcatgtttaagtttattagcaagtatagacagattgcttaatctatcttcactcttagttgatcagaggttactttttattttcagtttgatatatttctctgacacaaagcaacagttatacaaatagttagaaaagtctttaaggatagtttggcagagatttttataaaaatcttatttcacaataaatttcattgctctccatgtctttctttgggattgattctagcagctttcaaatgtccctacagtcaaaatattttaaacataaaaattccaagtggctacatagaatgacagaattgaagtaacaagttctgtttcttcatctttgcaatcacaatgctatcattgcttgtttaaaacctactagttagctggcatggtggctcacacctgtaatctgagcactttggaaggctgaggcaggaggatcgcttgaggccaggtatttgagacctgcctggacaacaaagtgagggcccatctttataaaaacataaaaataaaaatagcctggtgcagtggctcgagcttatgatcccagctactctggaggctaaggcaggaggatcactttgagtccaggaggttgaggctacagtgaactatgattgtgccactgcattccagcctgggagacagagcaagactaagaccctatctctacaaaacaaaacaaacaaaaccaaataaaaaaaacaaatctaccagttaaatgcagaaatatatagcttcagaggtgatggaggtagaaattgccccccaagctagctagaaagagattcctaactgtcttcaacttggaattctgtgatgagttagttccccagtttccaggtaaagtgtatacactttacctggaagttctcctagttttacctgggagttctcctagttttccttcatgaagaatacagtgtttatcaaagaataaataattttttaaaagctcaaatttgcaatttaccaatatgttattaaaatttagtagcaaccacatcacttctttagaatttaccctgatgaaagattttttttttgataggagtatttgatcactgtattagtccattttcacactgctgataaagacatacttgagactgggcaatttacaaatggaagagttttattggacttacagttccacgtggctggggaggcttcacaatcagggctgaaggtgaaaggcatgtctcaaatggtggcagacaagaagaacttgtgcagggaaactccactttttaaaactatcagatctcgtgagacttattcactattacgagaacagcacaggaaagacctgcccccatgattcaattacctcccaccaggtccttcccacaacacgtgagaattcaagatgagatttgggtggggacacaggcaaaccatatcaatcactgactttgtttagaagtgcctttgctggagcttggtgaaaataagttgatcctgttattatttttaaattctctacggacattgtacaccaattttgtctgcactgggtctgacagatccctttacccaccccccttgagataccacaggaaaggagttgcaaacagagggaaaaacacagattgaggaagactgtgttttgtaccatgcagtcacataacccatcccataaacctccctgccccaattgcatgagagatattagcaaattgtcttgtttgccctctgaatcagatttcctacatgtgcttaagtaaatcattgtttttatttgaggaagagaagattcactgaggatgcttgagtaaatgaactctgg

SEQ ID NO: 25108 - DNA, 1024 bp, Homo sapiens
tagaaaaaaattgtgggaaaataattaagattttttttttttttgaggcagaatcactctgtcacccaggcaggagtgcagtgatacaatcttggctcactgcagcctccacgacccaggttcaaactattctcgtgcctcagcctcccgagtaactgggactacagacgtgcgcccccatgcctagctaatttttctattttcagtagagacgtggtttcaccatgttggccaggctggtctcaaactcttgacctcaagtgatccacccacctcggcctcccaaagtgctaagattacaggtgtgagccactgtacctggccaataattaagattttaatttgtcacatagtatgccaatgaaaaggacagttagaaacaaaacacagtttcttacctctccagcaggtatcccaatgctgatgttgtttacagctataatctttttgtggataagttggtaggtctttgtgagacaataaagttggaccaagtcaaattcagctgcaccactctcaactcttaatctctcagcccgcacatcttcatcctcatctattgtctcccttacatgtgaagaattaaattttctgaagaaaagcctaaaaatggacccagtgattttacgtcaatgattttgaaatgacagcattcaattttgacatgttttgatgggttttcatgtcactaacagtgtactagtcatcattagacttcttttacatttgtaatgaattatgctactcagataacttaaatcagtatagaccctcctcactgtattcactatatttgtgaaacagcttttgttctccatgccttaaatgtttacagatccactgttaagatttataattctaatttcagtaataaggaatacagtaagtatatgtttgaaggttagttcctaacagaggaactaaggaactccagaatcattaggaaaactcatcatctacaaacctaagaccaatgatcaccttttaaaaaaatcctttcatccaggtgtagtggctcacacct

SEQ ID NO: 25109 - DNA, 1029 bp, Homo sapiens
cacgtgataagcccggaaacagctccgccccctcgcttcctgagccgccacatcccggcagccctcctacctgcgcacgtggtgccgccgctgctgcctcccgctcgccctgaacccagtgcctgcagccatggctcccggccagctcggtgaggccctagcggagcggcgcggtctgcgtcctcgcctgcggccccccacgctcccgccttggcggcggccggcgggacccggcactgcaggggcggcgctgcgggattgaaagccagcgtccccgctccccggccgggccgcagcctgcgtggggcccgccttagagcagctcgcgggtgtaagacctggggaggcccggaccaggcctgcgaacgcagggtccaggtgctggccttgcgattcgagaatctcctcccccagaccctcccaaggccttgcagaacacagtgcaatgtgctgcgaatcatgagaaaaaatgtcttctctttcagccttatttagtgtctctgacaaaaccggccttgtggaatttgcaagaaacctgaccgctcttggtttgaatctggtcgcttccggagggactgcaaaagctctcagggatgctggtctggcagtcaggtaaggcatagctagttccatcagaaaggagtgtgatcacattaaccaggaagtattgtattccaggcaccagcagcaaaacgccttatttactcctcccagtagcgctgtgaggttggtgtaatacttccccactttatggggaaaaaaagtgaggctcagagagatttagcaacttttaagaccctggacggctgggctaggtggctcacgcatgtaatcccagcactttgggaggccgaggtgggctgatcacttacggtcaagagttcgagaccagcctggccaacatggtgaaacccgtctctactaaaaatacaaaaattagccggtatggtggcacacgcctgtaatcccagctactgggaaggctgaggcaggagaatcgcttgaacctaggaggcggaggttgtggtg

SEQ ID NO: 25110 - DNA, 1045 bp, Homo sapiens
gcccagccaggatgtcagcttttgagagcagaagctgcatctgtttttgtttgtcgctgaatccccagggcttagaagactgcttggcacattccctaaatgtttactgaatgaataattagcaacctgacattttgcacaaatttttccttgtaggacttcttgaaactgatttgtctgctgttatatctgacctatttcctgcttatagtttatattctccattaagattctgagacaaaaaaatccccatgtactgtcagttcttatacttttcattttccaaagcattttcattggactatataaaagccttcattgttccttagactgtgtgtgcgtttcttttgaagtttaaagtattatttgtggtaaacatggcagaggcggccctggacacgtaaataagcgtttcttgtgcgagattcccaggatttctccccaacatgggcttatttccacaatagaaaaggcactttgccttttcatgtggtttgagtatttggcagtgatgttattacagagtgtatggttgcgattgtatctaaaacaaaattgaagcaagaacaaagatggggttgtgtgagtgtgtgtatgtgtctgagattttaatgactggtttgcttatgattggaaagaagaaaattcctatttatttcagctatttactagattaagcaactttcagcatttctctggcactttctatttcagttattaatgtctttgaaaatttgatatttgaaggggaaccggatactcttttttttttgaggcagagtcttgctctgtcgcccaggctggagtgcagtggcatgatctcggctcaccacaacctccgcctcccaggttcaagtgatctcctgcctcagcctcctgagtagttgggattacaggcatgtaccaccaggcccagctaatttttgtatttttagtaaagacagagtttcaccatattggccagaccagtctgaaactcccaacctcaggtgatccacccaccttggcctcccaaagtgttggggattacaggcatgagccaccg

SEQ ID NO: 25111 - DNA, 1023 bp, Homo sapiens
aaaaagttttctgagtgtcactctagagggtaaaattaaagaatactttcttactggttacttcagttaaatgacttattgatctgttaaaatcttatgtaaacagtaagattagctttagagtaatgaattttatatgacagtggagaattttattactttttctgtatcaggatactttgtgataaatacctcattttaattttatttacaggggctgataggatgtcttcatttggtgattttgttgcattgtccgatgtttgtgatgtaccaactgcaaaaattatttccagagaagttagtggacattcatgtatcttaatctgtgtgttgaataaagctttatttgttcataatgttaattgaaaccataacctataatatttatatttataatatcttttaattagctaagtttatcatttaatgttcatattttaaatagaacattaatcttaaattgttaattttgaaatgtagtgaattattgtttcagatggatatttggctgttatgatgttttttacttatatatttattttaaattctttgttgtcttcatgccaaagttactgtttctgaagagcagaagttgtaattttaggtggtgatgcgatataatccatcttactgcatagtgggtaaaaaacagaaactacattaataaacttaccccatcagttgaataccaaacaggtattccagacaggtgggggtactgttggtagtaggaagacaggaagaaaagagaaaaagattaaatagctcagaaaggggaaaaaaataagcagaggtgaaggctgaaggagcatgtggcttggcactattttgttgctttaggattctttccatggccactgccatccctgggttacaggttacaggagggctgtgacatttgtatctttcgtcatgtcaaatctctgatttaatctggtcttgctgttaaggaaaacgccttgccggaagaggtcatttaaccatgtactaggagagtcaggactagaatgtgctcttgct

SEQ ID NO: 25112 - DNA, 1034 bp, Homo sapiens
ccagggagagagtagtgttacacgtattgttccacacaccttaatgttctttcggctcaaaatttgggagaggaagatggcagtaaatgatacaaattccttccaaatagcaaagacacagattacaaatcctgttttctcacttttagctttcaattcctgggttagctgggtattttgtaacagatttttagaaaggaaaattagaatttaatttttgtgccattgcttatttaattagcacatctgttttatctgctgaccttccaaaagaaccatataggtagtaacttaaccaaaaatacactcactggaatcattgttttttaacatgttgtatataggttgtaaaatctataaaatactattgggtagtaaaatctataaaagactttggagaaaaatattagcgcctggctgttgtatcataccagaatgttgaattgtatcataccagaatgatttaacacatcatttgttgtgtgagaaaaattagaaaattagaaaactgtaaaaaattagaaacatgcatataactttacttacaatgaaatcttttgtatataaattaaatgaaaaatttgagggaagtggagagattaactttaacttttaaaatttgtattttagatggaccaatcttacaaaccagatgaaaatgaagttcgaactctctttggtcttcatttaagccagaagagaaataatggtgtcgtcgacaagtcattatttagcaatgttgttaccaaaaataaagatgtaagttgggaagtatctgaactgactgctagtaacttccattggtctgttttcaatacttaatgagctttacatttattaaggtctggatttggaactggtctgtatgcacacggctagctagcttatctttgagttgtcacataagctttggagtttaagaaatgaatcaaaggccatgttagaagcttctgtgcatatgtacacactagagataagtagctttaattgtgtataaatgggatcatgtcttccataatctgactcctgtaact

SEQ ID NO: 25113 - DNA, 1047 bp, Homo sapiens
ggattttctataccttggaagtggtaaagctgatttgcaatgtcagattcaaattgttataattgttttgttttgtttttttttgagatggagtctcactctatcacctaggctggggtgcagaggcatgatcttggctcactgcaacttctgcctcctgggtccaagtgattcttctgcctcagcctcctgagtagctgggattacaggcacgtgccaccgcgactggctaatttttgtatttttagtagagatggggtttcaccatgttggtcaggctggtctcgaactcctgacctcgtgatccgcctgcctcagcctcccaaaatgctgggattacaggcgtgagcccagccctataatggttcttacactcttcttttcccctctctattaagcatttatattacactctggtccagccatagcccttcaaatgccccaaacataaagctacatgaggcacacttcaatcaactttaccatccagttgtagaaaagacggtctaggaaaattttttgtagatttgctataggcaaataagatttcgctgaggccatttgagcaaaagaaattcaaagcacagcaactaactatggtggtttcacaacttctttctctgtaaattcctcgcttggcactgagaaggaaaaaagatgttcgtaaagggctcagctcaagacataaactaaccaacaagttcactttccctatgtgtaattgcaaaagacatgtcgtgggcattcagacacccaagaacaaaatttgactttgaaaatggaaaccaagcagtggttacgtactggttactgcagtctgaaccagaggctgactctctccgcttggattctgagcatagacactaaccacatactccactgtgggctgcaagccttcaatagtcatttctgtttgatctgcaaagggagtgaaaagcaaatgcaacatccacgtcatccactataaagtcctcaagtggcgtctagagtttggtagtaaacatatggtggcctagaatttttatttgcagaattgtaacaaaaata

SEQ ID NO: 25114 - DNA, 1096 bp, Homo sapiens
gtgtatggacgtgggctttaccatgagtaactccattcctggtatagaatccccatttgaacaagcaaagaaggtgataaccatgtttgtacagcgacaggtaagtttcagattgacactgagcttgtaacccatgtttgaactgcttgttgcctctacctactaatgcaagataccagcctccttatagtgtccagcccctctgtttggggggattctggggagtttccttacatgtactcacatacaacttcacctaccactagagtctgatattttttcttccctcgttttggccccttcactagatattacagtttttatcggaaacaagaggcagtaaaaagtaatgtttaaaagcacaatctctagagacagatggcttgggtttgtatccttgctctgccatgtcatttactaaccttctgatgttgaacaagtccctcaacttgtttgtgactagttcagttatcttttgctgtgtaataaactaccccaaaatgtagtgtctcaagtaacattttaaaaattcatcattcatggttctgtgggatgactgggttgctcagttgggtgattctctattgaggcctcttacgcagttgcaatcagatggcagctggggctggagtcacccaaaggctcaactggaccagatgtccaaaatggctcactcacatggctggaagacgatgctttctagtggctgtgagctcagttggggctgtccgttagaatctctacatgtggtttctgtatagtttcaattttcacatgaagcagctggttctaaggagtatcccaagaatgggttttctatgagaccctgcctatgtggcttcttaagacctatttttagaagccccagaaagtcatttctgttttctgttagtcaagcaagacactaaggttaggtcacatttaagggaggagaattagactccctctcttgataaaaagagtagcctgcaaatacaaggagagaaagaacggatggtggctatcttggaggttagctactacagtgcctcagtgtcccatgtgtaaaatgagaataatgatacctgtcacatagggtagttttgaagaataaaag

SEQ ID NO: 25115 - DNA, 1028 bp, Homo sapiens
ccagcccagccagcgtggcgaaaccccgtctctactaaaaataaaaaaattagctgggcatggtggtgcatgcctgtagtcctagctacttgagaggctgaggcaagtgaatcacttgaacctaggaggcggaggttgcaatgagccaagatcatgccactgcactccagcctgggtgacagagcgagactccgtctcaaaaagaaaagaaaaattagaggccaatatagattactctttaaaaagtgtttttgtttgttttttaaatttttctgtagcatatcagatagggaaattactgactatgcattgttttagcatttcgacgctactttgattttaggtctgccatgaaggtgtagaccagaactttgccatccagtacagtagccattagctacatgtggctatttaaattcaagttagttaaaattaaatacattttaaaattgagtcccttagtcatattatctgtgtttgaagtgtctattgggctagcatggttagaaatagaacattaccatcattgcagaaagttgtactggacagcactggactagattatctccatatagatcttaggaagagaacttgacatctacctgaggagattgagctctactgcagaactgagtcagttgttcttagattttttttgagacagggtctagctctgtcatccaggctggaatgcagtgacgtgatctcagctcactgcaacctctgcctcccaggttctagcaattctcatgcctcagcctcccaagtagctgggattacaggcatgcgacaccatgcccagctactcagatcttatatattggatgcccgtctttagaattttccctgaaatagaatctaaatctcatggtgattttaggccatgaggtttatattctgtttgactagtaatgttgtatgagacacgttagacctggttcagacccattcattcctcagcaaatccaaagccattgtgcaccataggctttggaagctgggtgtcaggtaagatatctactattcgt

SEQ ID NO: 25116 - DNA, 1105 bp, Homo sapiens
aggtgatgggtgacttcagaggataatttcattaaggaagtgggggcagtagctggactagactgaagaataataatgcactaagcagtggaaacagcatgcctattattttaagaaattcagaggtaaagacaggaaagatactgatagcaatttgtggagagggaaggacaaacaaaagatttgtttaggagggctgacatgagtttatttttagggtaaagataaaaatttagagaaggaaggttgaagcagtaagacggatttagttaatgaggttaagtcccagaagagctacagtaaatgtaatcaaaagcaaatgtgtgcacttcgtccttcaagtcagggggcaccctaaaaaatgtaaaatagaaagaaagtgataacagtcttaaagtattgagttctgttgtgaaaactctcacatgttgaatatgtgttaatacatccatctttcttaccaggcagctgcagttgcactttcctccctgattcatgctttggatgacttagacatggtggccatagttcgatatgcttatgacaaaagagctaatcctcaagtcggcgtggcttttcctcatatcaagcataactatgaggtaaaacccaaagtcttaatgttattttttttcttcagttcctttattctaagcagtgtttctcagctgttaatgttcatgacaattacttggggatcttgttaaaatgcagatcctcattgtgtagttctggggcagggcccagattctctgtttctctcgagaaatgctgatactggtctgtgaaccacactttcggttggaggaaaaagtatacgttataaaaataatataagaatcttttaattataaagtatcataagaatctttttattaagtattatgaaaatcgttttagattaaaagaataatcaataaaggttcaccatggccttttcttggttctcatccttcttgacttattggaaccaaatagagaaattacctccatttttacaaatgagaactatgaataaaggctgaggatatgattttgttgtgatctttgtgaaacggtttatttagggctctcttgtgtaaaatacagttctaaattccttatc

SEQ ID NO: 25117 - DNA, 1058 bp, Homo sapiens
ttgatgtgaaagctcctgattgagcatctggctgcaaatgtcagggtcctatatagaattattcttagagccacaggtccagtcttccagagagcctgtcatttaaaacaattgtaataaaatataatagggggcagaagtagaaaacataccaaaaagaacaacaaatgatgagtagatgttttaggttacaagtttatatataatgtctgtgtctgtgttaagattagggaattgtgaggtgagtctcggaactcaattctttctgttattttggctagaccctttggaagtagtgtgctatagaaaggccaagaatcagatgggtccctagggcctgtatctttatcttccttctagaaatgagtctgtctgcatcacggtggaggcaggcatggacctgattatatggaagttgccactgtattacagtattactctgtctctatttcctgataattccaaaatttaaatgagtagaatatttaattatttatttatttgagacagggtctcactctgtcacctggctggagtgcagcggcgtgatcatagcttactggagcctcaaactccctgtgtattagttcattttcatactgctgataaagacatacccgagactgggaagaaaaagaggtttaattggacttacagttccacatggctggggaagcctcagaatcttggtgggaggcgaaaggcacttacatggtggcagcaagagaaaatgaggaagaagcaaaagtagaaacccctgataaacccatcagatctggagtgaataaatctatagacttattcactatcatgagaatagcacaagaaagaccagcccctctgattcatttacctccccctgggtctctcccacaacatgtgggaattctgggagatacaattcaagttgagatttgggtggggacacagccaattctggctcaagcaatcctcttgcctcggcctcctaagtagttgggactacaggtacgcgccaccgtggctggctcatttttaaaattgtttgtagagatggaatctcactatgttgttgtggc

SEQ ID NO: 25118 - DNA, 1011 bp, Homo sapiens
cgtgtatctgaaaccttgtacctactgataggacttttgatgaatagattgttcttttatattgaatttgactttgagacccagcatgttgctagtatttcgacaaaagatgtccctctgacctccgtctaagacttggtgaatcagagccctctagtgatgtcacaaaaccagactctccacagagctgtcggaaaatggattgcttattagcaactagttctcgtgattttaacttggcttccgttttatcccttctgccgttcttggtgccagctccagaattgatgtcctgttctttgttttgggcatcttgtttgtttgtttttccgctagggcatctttttactaacgccctttataagccaagactcacttctcttgcaggcccaaagagttctccctccctagtagtggtcttcttttagagagatttctgtccagagtcgggagacaggaatcccttccccttttctccagtaaatttattttttaaaattcagttgtcaaaagggcgatcagcgatagatagttggtaagattgtttgacccttaggtagaactcggctgttttacctatcattataaattaaaatatgggtgtagttactttttctcaggcctgatagtagcataatcaaactgagagtcttgtgattctgtccccgacatcagcagtctatatatagtaggcagctacacattttcttaacttctggttttcagtgtgagggatgtatcttgttctaagcttactggcagagaggagataaccaatgccctgaaccccaggaagcatgttctttctggctgcccttttcccagtccctttcctccattctccctacccatcaccattctatcaccacagagttagaatagaaaacaattttttttctcttttccttttttgtgaaggggtctcagtctgtcgcccagactggagtgcagtagcatgatcacagctcactgcagcctctacctcctgggctcaagtgattctaccacctc

SEQ ID NO: 25119 - DNA, 1069 bp, Homo sapiens
aataaatctggtcagttttaaaatttcttattgaatcagttttagtaatatgtctttataagaatttgttccttttgtctaattttttagtataacattgattattattcccttataataatatttttgagatctgttctttatttctgatttggggattttgtatcttccctttttcttggtcagtctaggtaaaggcttatggattttatctttttaagatcccagcttttagttagttttattgattttctccattattctcatttaattaatttctgctctgatctttattattccattccttcttcttactttggctgtaattcacttttcattttcttgtttcttaaggtggaagcttagatgattgatttgaaacctcttttctaatataggcatttaaagctatacatttcctgctaagcagttttttagcttcacaccataaattgcgatgtgttatgattttgttttcatttagtttaaatatattctaatgtctttcatgattgtttctttgactcttgggttatttaaatgtgttcttaaattccaaatattgaagatttcccaatttcttcctgttgttgatttttaattctgttatgattggagatcatactttgagtggcttcagtccgtctgaatttattcagacttgttcttatgtggtctcacatatagtctgttctgccagttgttctctatggccttaaaaagtacatgtattcacctgttactaggacaagtgtgctggaaatgtcagggcaatttggttgatagtttgttcaaatctgtcttttgactttctatctagttgttttccgtgacgttttgagtattgaaagttattcaccttgagaccttgtgtgctagtgagacctttatgattttggtctcacctagctaaaccagcttgggtcatgagatcctagtgaatttttacagggtgacactaaagaaaacactgtcaattcaggtaatagagtatatgttaaataaaagtcttcaggtattggcattttaggaaaaataaacttagctatgtgtgctgcaagactgtatg

SEQ ID NO: 25120 - DNA, 1051 bp, Homo sapiens
tattaattactcccattcagtcccccattcaaggcttgccacaatctggtcccattctgccactcccgacccattcttatacagattccctctgtgaaccttgtattcaaaccatgttcctgctaatgcccttgcagcatcggctttctaaagctgattaactcttttaaaaaaatggccattcttatctttacccccaaatcctactctaaagagatgcttgtgatttgagaaccggtatatctttggatcccaatgccgcccgtagttttattgtagtatgactcattagatactgctgctgctttaccatcagtgagacaaaatgacctccatctggcttttttggttttcattgcgactttaataaaacagtgcttgggagtaataagaatttgaatttttgaattgtagcagatttacttctctggttctttggatcaattcctaagtcttagccccatcaaagaagaagtgcagaatctaacgtgtctgtattttgacctctagaatactgtaaaactttcttcataaaattagaaaggatagaggggggaaaatgaaaagaaaaagaagaatctgagaggtccctaaggaaaaataccgtataaaccaaggcattatttatcagtttttagaaggagttatcacatagaatgtggtctttctaaaatttctggtacctaatatttcctttcaaaaaagactcaaattcttgaggcatcctagaagacttgtgtgctgcctcccccttgtccaccctccccaaaagcacattcaacaatggctgcctgtttctctccttggtgaggagtctgactcatcattcactctgtcttttcaactgatacctgcgtttcagttccattcaattaccaacttttaattggatcccattgccagattgattttgtgttcctgttccctcttggctgcactgttactatgactacttggtatcttctacttacttcctatattagtttgatgacatctagtcaggtatgaagctagatagatactataaaattgctacagtaccaatcactat

SEQ ID NO: 25121 - DNA, 1048 bp, Homo sapiens
tatagttttaaaaatctccagctcaggctgggcacagtggcgcatgcttgtaatcccagcactttgggaggccgagacgggaggatcacttgagcccaggagtctgagaccagcctgggcaacatagtgggaccctgtctctatttaaaaaaaagaaatcttcagctcaaaggtgggaggaggtgtgatggaaacgaaaatgggattggggttgattctttgtgttttgattttactctctgaattactttttagatggaattactctgatcaccaaagaggaagcctctggaagttctgtcacagctgaggaagccaaaaaggtattgaggggtaaacctttgtctttagttgaattattatagtggactttattttcttgataccctcgaagaagttaaattttatgggtaactaaattagtgtactcattttgtattcaatatgtaaattgcttcaaccacagcatccccatgggagaaattataatcttactcagtttcctgtaggctgtggttatatttctggaactcacctgtaatcccagcttcagtacccctagagcatgctgttgaaccccatagtgcgcaaacttagcctcggccctggtaaaggctatgaaatccacagtgattcccaccctggccacacattagttacttggtgagcttgtttttcttttttttcttttcttttcttttcttttcttttcttttcttttcttttctctttcttttctctctctctctgtttctttctttcttttttttttttgttaatactgattaaaaatcagaattaccctagagattctgttagtctgagatgggtcctgggcacagttggtttgtttgcattttaaaacccctcaggtgattgtattgtatagtgaatagagaaacactagtattctagcataagggacatccaagtattttcagtaaaagaccccatgcagtccccatgagcttcttattcacacacattgttaggcctaggcctccttgtttggtgtgtattgaatctgattcagccatgagtcagatac

SEQ ID NO: 25122 - DNA, 1032 bp, Homo sapiens
actaggctgcaggatttccctcttgcaccatgttagtgtttatagcatccattaagctacaagtggcattaatgaaacccaaatatatgtcattttaggcaaagtacatgcaaactgacttttattctttttgatgcttttttacacatctagattgtcagtaatcctttggaatcacctgatggtgttggaaacaacccagtggaagtcatgtgtttttactttgggggtcagtaagggtctgagcacaagatgatagtcttttagtcttatggtggtataggactggcagtttctatatagaggttattgatttcattactctgcttgtggccaggattatatttcagtgtacttgaaaagtagtaggttatccatttcataaagttctccaggtaaggaggcacttttatggtaaccccaggtaagtgatggtggtttgaggaagaaggaatatgtcactcacacacatgccctttctatctgttctctactttctcagcatattgcagagggaaagaacacatgagaaaagatgagaattgactcctacccctttctgcagaagagattcggagaatctcttgcttttattgagaaagcaggccagtcattgagttctctgctctatcttgcttccctgtcactgcatgggctagaattacttgcagttacaaacattaatgatgaggagtgatatgtggaagagatcagccttgcctggggcattgggaaggataatggatggcagcccagcttttaaacataatttgcttacacagaaatgtgaagcagatctgtcaggaaaatcagttgcagacgatacttagcacttaatgaaaatgtaggatttttgttgctgctcatttcttcctaggaatttggcctagtctcagagatgtgccatttgtgcttaagtatatataccatggtcatactgtgccaacaataagtccttatctaaggggtcatacaagatgtagtggactacagaaccattaagcctatggagtttttcagatgtttggaaga

SEQ ID NO: 25123 - DNA, 1023 bp, Homo sapiens
gaatcagccaccattgggtagaaagatgctcacctttcttagttgatattgtgtgtaatttatactacacgatgctgattagcagatgatgtaataatcccactaacaataattcataataactggctttggggtgctcattgttttccagtcatacttttataagcattttcctttaatttcatgtaaacagtaacctgtgaggtaggggttgtaatatctttatttttcagatgtggaaactgagggagaggtgttacagtgacttgcccaaggtgacatagctagcaagaggcagagccaaaattgaaactttggcagtttgaccactgaccacatgcaacttgtttcccatgtgtaaaatggagttaacaacagcccaccttacagacttgggaggggcagatgagagggtgccactgagtgttggcacagtgccgggctgaatgcgaatgctgcataggtgtgagctacagttaccatccctgtcactcagggcatttctgacctgctagaccctccccagccatgtatcctgtggcaccttttatcacaacccttacaacccagtgttgtcagcatctctgcctctttttcctcccagtatactggggaagcctccagggaaagtactctcctaatttctgtatccgcagtgctaggtacaggaccagctgccacattgtctaagctgaatggaagtttatgaaaccaaggaataaatgagtaagtgtgatcacgtagcagaagggcagggtgtcctatttgcttatttatttcttgtcattgcagatgtcaagaccaggaagtggagctttctcttggaagagcacagtaaactaagtgagaagccttccttacttgttttatatcatgctattgttaagctttaataattcaccttaaatttgatgtatttttgaagaatcttctcctccctttgctgtggtgggatgcttgagtacagggtaagtaaaggtgaggatgcagccttgtccacatccactgagatggtggctttat

SEQ ID NO: 25124 - DNA, 1098 bp, Homo sapiens
tatgtttattgcagcactattcacaatagcaaacacttggaaccaacccaaatgtccaacaatgatagactggattaagaaaatgtggcacatatacaccatggaatactatgcagctatgagaaatgatgagttcatgtcctttgtagggacatggatgaagctggaaaccaccattctcagcaaactatcgcaaggacaaaaaaccaaacactgcatgttctcactcataggtgggaattgaacaatgagaacacttggacacaggaaggggaacatcacacaccagggcctgttgtggggtggggggaggggggagggatagcattaggagatatacctaatgtaaatgatgagttaatgggtgcagcacaccaacatggcacatgtatacatatgtaacaaacctgcacgttgtgcacatgtaccctagaacttaaagtgtaataaaaaaatatatttaaaaaaagaatcatccttacatttgatatttgaatggacaaatgaactgtatgtaatatttttgggtcaactgggggaattttgaacatagtctcagtagtagatgagataaaatgtactgaaagagaaagttactaaaaaaacaaaaccagattaaggaatggtatgtacaataaaattttatattgatgtaaaactagaaagaggtgtgtgtgtgtgtgtgtgtgtgtgtgtgtgtgtgtatgtgtgtgtgtatgtgtataaagacctggaaaggtaaacattaaggtaatgagcattggtggacactgatggtaattaaattgatttaattaaattcaaaaatttcctatagtgcacatgtgctgcttctgtaactatactttttaaaagtacaaacaagataataaaaagttaaccaatttaaaaaaaaagaatcatcttttatacaaccataattttggcatatataatttgagtatttttctataattatgtgtgtatatgttgctttaagatatatttttatgtatctgcatataaatatatataaaatattatatatgcaataagcaatatgtgtattttaaaagcagaactgggatcatacaaacacgtcaagtgggaaggaaaaca

SEQ ID NO: 25125 - DNA, 1315 bp, Homo sapiens
cctgacttcaaggtattttataagccgtgtgctggtgggcagttggaattactcataccgttgattatgagttttaagataaaagtgttgatggtaacttcagattttgtgagacgtttttcatttaaagaaaaccgcttaaacgttaatgggtaaaataatcatttgacagagtgcccccagcctaagccaaacctgctttgtgggaaatgattccatcagttttgtctactgatgtttctgcaccaactcccaagatgtctgtgcatctaataccattctacttgttctgcgagggatttttgtttgataaaggtttgaacgtttatgtgcaaaatactgcattacagcaatccctgttttgtttttgagggagaaagggaggctttcacatccctgacaataaggtgaatccaaatttagacttctggatgcttgtaagagaaaatacttacttggttcatagtgaaaattggttctcttttatagaccaagatgaagagacgagctgtggggatctggcactgtggttcctgcatgaagacagtggctggcggtgcctggacgtacaagtgagtctagttccttgtggtatttggaagtgtgtggaccacataggcccaaattccaggttgctgctggatgggctagttttaacactttctcaggactgagagaataaggatgcctttgtattttcaggattcttccgtggtggtttattttcagttattgaaagagtaaacacaaaactaccaaaatagaagtcggaaatctaattcacagactactttagaatttgatggtcactgggcacattgttgtgaacattgtcatgatactgtgcaggtccattagtggggctgaatctactgaacgttgatttgcactgcaagttttgataaaaataggtgaaggggtcagttagttcaaaactgtatttggaacttgaggccatcaggaccaccacagtttcgtctttctgaacagtattagactgctgcaggtttgtgaatctgcaactcagtatcacctgacagggcgatactacaaacactatactacaaactagcatctagacctgtgttgtccaatacactaagcacatatatggctagtgtaattaaagaattggattttaaagtttcagtcaatttaaacttaaaccgaagcagtggaaaatgttgaaatatatatatattccttgtgggggtttttattagggcagaatggaaaatgggaactagagtgctttcttggttctgataggaaagtgaattatttatatacttacaatacaggatggtgattttca

SEQ ID NO: 25126 - DNA, 1051 bp, Homo sapiens
ggcgggggacagtttacagaccagtgaaagtgctgagataaatatttttatacctaaggaaatagtgattttcccaagatgatagggaggcaggtgatgtagatagggctgaagattagatttctggctcctatctgtgattttctgctgtaccagtctgccttctattttatgggctcagtattccttacctgcctcttcccatgctaaagatggcccaccttcgttttgttatttaagcaacttcatcccctggcttgttttcacagtggttttctgagcctttgactctaagtcatctaattgaacattgtgttgtgatataaaaagtaagttaggcttgtgtttttcaccaggccatttcattgtatcctaactaggcgggtggctgtgataaatgtacagattagccaatacagaatcacgtctaattccaagttttcttttgggtatgaagttgagacatggggaagcttgagctttgttttgtcagcaacaggtgaggtggagaactgggactgaaggggtttggggaggatctgtttaagattggaaaaaatacatcaacttgggaatgtaagcaactagaaccaagcaatctgtacaacgtttttactgttggctgtcttcctctgggaaactaaaagccattttgttgatagcacttcaggtcagaattcatcaacagggaatggaaacattgtttatatgctttggggtacatcaagataagttgagggtcaagttaatgtcatgccacaatcaaccctgtatgtcagggcccttgagagcagagtagtgtcgggagagtgggtggtatggttgacacaaagacccacaggtatttttatgggttcacttaatgaagcaggggcttagttgagggtagagactgttcattaaaccagcctttgttgaccactccctgcagtatggacaggacatgatcaccatccttaagtcccactatagcaggggggaaacagtatgcttaattaagcttaattataaactctttgagttagaaaactggtgaaagtgttatttcctc

SEQ ID NO: 25127 - DNA, 1048 bp, Homo sapiens
atcagccagcaccttcatcttgaacttcctggcatccagaactataaggaataaatttatgttgtttaagtcacccagtctttggtattttgttatggcagcctgagcttactagtacagtaagcatatctgaaggctaaaattgccagaaatagaaacatgtaatcactaggtcaagaggtgagtgcatttacaaatttgataggtgttgccgaattactgaatgaaagggatacccactttaattcccttcagcagtatacagtagtgcatgtttacccacagcttcaccatcaagttgttttcaaacttagttttttcccctaaactgaaaggtgaaagtgattattttatattcttaacctagtttatttaccaaggaaataactctattactattgtaaattgaatgctagcatattttcacatatagaatgtaactgtcagaataaaaacaaaaaatactattaaatttgtgctgaatgttgttgcctatagaaaggtctgagtctgagatgtgttctttcttgttaaaaagagaaatcaggaagtttaaagggatgttaatgacaggttgaaactgaggcttcttgttgatgtaatccaacagtggaaatcagtctgactgtggtcccacactctcttaccttctgccatcccgcccaatctgctgttgtgtagctgaggctatgttgtgttagataagccaagggagccatcagctaggtggttctacatgcataactgcaaaaccagcccaatctggttcaactttgtgttataaaatggttacatttcagttacctccatgttgcaggtaacctaagcaaacccaaatggaccaaatgcaacgctgatggaatctaagtgctcagaccaaggaacggggactgaaataacagtggacaccacatggcatgatccaatcagattgagccctggaaagatcatcccatggcaagatccagttagattacacttcctggcatcacctcattgcaagatccaagatcatgcctcattaccttctgcctgtaaaacctgcccc

SEQ ID NO: 25128 - DNA, 1027 bp, Homo sapiens
aaggggaccccttccctgcgtgaaattccccggcattgttctgaacccagagagagcctgtttggaattgggttggaaggagttttcaggaattcccaggactggaggagggaaggagatgcaggcccacatcgccaccagcattctcgttccccacccccatctcctttaaaaggagcagaagagaagactaaaagccgacccagtcttagagccggaaaaacgcgatctctggtttcccttccccgaacccttctgtgagagacactgggccattttgttacatatttttaaagcaaagccaattgtccctcgctccacaccccttccttatctctcctttgaggttctaatgctctctcctcacccactagcctttatctggttatcttgtaaattcttacatcaagaccctaggtctgtgatttcttctgtggtagccctggcccagttacacacttcaaagactccagaatctataaagttcttagataacctgtctttacgattggactttttaaaagatgggcttagggcatctttccaaggcagcctctctgccaaacacaagaatcagtagaagacaatctgctcctccaaagctgctttgcttttctagtataatatttaaaacatgagctaaggattttgggttctaatttttggtggcctgtggccagtccctttgcctcatttccctatgtatgagcatggggcttcacatctgggtttcacagttaataagtgcagaccgtttctggtgaactgggaactagtaataggaaagtgcttgcagatccacagatgggagaagattggtagaggggaatttttaagtggtcataatgtacttgtggcttggaggcattagaaagtattaactgccatttaaattgaatatatagtatgtcctgtctcctttataaggccacagattttatctgtaaaacaaagcactactttccttgaagtaatacgtgtagtgagcagtactgtttcctgccaggggctgcagttggttatattt

SEQ ID NO: 25129 - DNA, 1039 bp, Homo sapiens
aacttcagttctttctttttcttttagaaaattattcttaaaaagagaagctaaccatttcggagggattaaataggccctcaagtctggaagacataagttagaacttccaggacttttttttttttttccgagacagagtctctcactggctggaatgcagtggcgcgatctctgctcactgcaacctcgccctcccaggctcaagtgagtctcatgtctcggcttcccaagtagctgggattacaagcacgtgctaccacacctggctaatatttgtatttttagtagagatggggtttcaccatgttggccaggctggtctcaaactcctggcctcaagtgacccgcccgcctcggcctcccaaagtgctgggattacagcactgctcctttcctcaggacattttttacaaagatatgcattgtagggaagctgtatagggggtgcactggtgtgtatgcttgtgcacatgtgcgggtgtatgtgtgtataaatctaggcttttattctggcccatctccccctttgagatgtggttttcaataagcaggctcaaaacattctgctgaaaatttgaaactttgaaaatctttaaaaaaaaagagaccatgatattgtgcctggtaggcagggctctcctgggattacagatgtatcacccagtagaagcccgaatgaagcaaatgtaaattatcagacattccagtaaggtaaggcaaggtgcatgcctattccagaacttacagcagagtttgcctagtgtggttatcataaacatgtatgggattctaccagtgctcagcccaggcagcaacagaaaaaaaggggcctctctgagagcctattagccaagttagggaggtgctaaggggtgaaaggtgttggggtggagatcagagaaagacattaaagggagtagtttggaggagaaaccctggagatttgaaaggctttgctggtgtgggaacctgctaggagaggtcagctccaccctactttttgcacttctcagaataaaccgatgggggaaattac

SEQ ID NO: 25130 - DNA, 1051 bp, Homo sapiens
atgaacccaggaggcggagcttgcagtgagcagacatcgcgccactgcactccagcctgggcgacagtgagactccatctcaaaaaaaaaaaaaaaaaaaaaaagctttgacattttggatactgtccctcatcaggtctttttgagctctttataatagatgaccatttcatgtatttaatccactgatgactgacaatataaagttacctgctgataaattagaagtttggatttaattttgtggtaaaactgaggtttttttgttgtgttttttttttaatttggaaatattacattatcttcaagtagctgtcagtcttagtttgcctagcactagagtagtagggaaacatgaacagctagagatgtgttcatcaagtcagagagagatgttgctgctttctgttccctataaagaattaggtgttggtactatttacttgttaggtgaatgaactcagaggaatacaaccaccctttctacaacaagagtcctcgacaagatgatcttggaagacttttgcagctctgaagtgctgttacctggaggccaggcaccatccctttaccctcctactaactggcattgccagatatcccttcgtgattcccatgacagctccataaagtgatggcactcagcacctaattctagtttcaggaacctattcctagtttcaggaattacacaggctgagtcagtcctgtgtactgcagaaagatagaaccgaaaaagaggggagtcctatagattagaagcaactcaaaagataaccaaatgcaatgtgtggatattgtttgcatcttaattcaaataagacaacaatgcttaaaattttttgagacagtagagaatatttaaatacttgactgaatatttgttttgtttttttgagactgagtctcactctgtcacccaggctggagtgcagtggcgttgataatctgctcactgccgcctccacctccccgagttcaagcgattctcctgcctccgcctctcaagtagctgggactacagatctccaccaccacacccggctaattt

SEQ ID NO: 25131 - DNA, 1033 bp, Homo sapiens
ctcctgtaatcccagtactttgggaggccaaggtagaaggatcacttgagcctagaagttcaaggctgcagtgagctattgtatcaatgcactgtagcctggactacagagtaagaccctgcttccaaaacaataataataatcgtaaattttggctgggtgtggaaaaattagccaggcatggtggtgcatgcctgtagtcctagctactcaggaggctgaggcaggagaatcgcttgaacccaggagatggaggttgcagtgagctgagattgcaccactgcattccagcctggacaacagagtaagactccgtctcaaaaaaaaaaaatcataatttttaacatgagttttcgaaaggacattcaaaccatagcagaaggtataaaaggggttcttggttttttgggttttttttgttgttgttttcatttaattcaaaaacctggaaagtagccagcagtaggttctggtttggggggaaagacatggagagtatacaaccttctggacaccagtattaatagctagctaagatttcattattgactgtcctttgccttaagagctggctatgcactgagtaattttaaagcatacaagatcagcagacaaacagatcagttcccgagagtcctggttttttctctttattcacctgggttagtggctcagtctgtacttaggttgataactaacaatctgttctctcacttggaatttggcatccttttgctctcttgaaaacaaaacatgattaagtacaatgtaggatctggaggagaacagagaacatattaagggtgtagtcaagtcctaaaaaaggatgagctttgattaaagattctcggccaggcatagtggctcatgcctataatcccagcactttgggaggacgaggcgggtggatcatccaaggtcagtagttcaagatcagcctgaccaacatggagaaaccccatctcaactaaaaatacaaaaaaaaattagccgggcatggtggcgcatgcctataatcccagctacttgggag

SEQ ID NO: 25132 - DNA, 1039 bp, Homo sapiens
aacataatattttttactcaactattacaactttggtaccttgattagaaaagtcttctaagaaggaagttctctgtcactcttaacagcagttacttgtgctagcttatttcatcacctcacctattttttcagacagtctcattctgttgcccaggctggaatgcagtggtacagtcatagctcactgcagcctcctccaaatcttgggctcaagcaatcctcccgctttagcctctccggtagctgggaactacaggcacatgccaccatacccaattaatttttttaatattttgtagaaacagagtctcactgtctgctgcccatactgccaaaacagagtaaggaggtctcaaactcctagccttgagcaatctacccacctcagcctccgcctcccagagagttgggatcacaggcatgagccaccatacccagcaccttttttttttttaatctccaaattggcgggatgaatgtgtcacagaaataaaagccaagataacactgtaggcttttggcaaaatcaaggtattaaaagaaagaaacaaacagatctagaacagaaaaatcatgtccaaagtcttgggcatgcttgtcacagccaacatcctgacatggaaagtttatgtttctgtccctgggcctccttctacctcccactaaatcatagacattgccagattgcagaccctgtcttcatagaagtgtgaaatgtaaaagtgtgtgaaagtagtgtctcaaccaggtgcagtggctcacacctgtaatcccagcactttggggaggccaaggtgagtgaattgcttgagctcagaagttcaggaccagcctgggcagcataatgagatacctgtctctataaaaaatacagaaattagccaggcatggtggcagccacctgtaataccaggtactcaggtggctgaagcacgagaatcgcttgaacccaggaggcagaggttgcagtgagctgagattgcgccactgccctctagcctaggcgacagagcaagattcagtctcgagaaaaaaa

SEQ ID NO: 25133 - DNA, 1002 bp, Homo sapiens
actaaaccagctagggtagaagcacttgctttctctcagcaaggcatgtgctgcatagcctctttgaaagacagaagaataaattacaaagataaattaagcaggatctttgatttgaactcataacctggtaggggagccagatacattaatgaatggtaaaatatcatagtagaggtttgtagaaaagacatggcagctccagcaagagagcagtacctgcctgggtttgttggagatggtattaggaggcagtatttgagcagcagtagaagggcacgcaggccacatggctgtgtaaccatgccttcagaactcctaaaacaagagaccttggagagtccttggcagcatcctcctgctgtctatcatcttggaaggcccacttgatgaatttggattatccagttttactggcattgctagaaaatctacttctgttcttgcagatctggctgagagagagaagccttgtattacttgtctatttacataggaatgtatggactgtagaagcttcaggtttggagattggaacatagaaggaagggcttcctttatgagcaccaagacaactcagcttctttcattccattgtcttctgtccgcaagaagagcttaagtttgctctaaagattttattgatgaattctaaatagcaacaggatcctcagtgaaaaaagactcatgcaaagtcccagagcccagagaaagtatggtagtttatcacctatgttagtgcaaaggaaaaggattatcactacttttcatcacattttgaagatctgacttattaagtactttgcagtctctcccgtttgaatctgaagtgtagtggtagcagctagcacttgtcatatttcaggtttggtgtagtttatttttaacctcctgctggtctggagggctacaaaggtcacaccacatagaacaaaccctatagcttgagttgccactcatcttacacccacttctcttctggttgcttttgctttgtcttgg

SEQ ID NO: 25134 - DNA, 1030 bp, Homo sapiens
ggggactggcagtttcgccttgctagagagggctgacccttgtccgtctgcccgtgggatgtgtcccatatgctccatgttcacacgtgcacatgcgcacacatagcctggggaaggggggtacagggcatggctgggcagaaggggagagcaggagtgggggatgcagagccagagggctgggggtgttggcccaggactctgggtctagtgagtttccaggctggctttcactcccattggcccccttcagaccccctttctttctgtcacctctgtctgtcagtatctgggtctctctgtctttccctcccattccttatctctctgtgtctgcctctctctatgtacaagtgtccctctgcctccatgtgccccgtgcttcacattcctggatctctcccctccagctccatccctttcctctgcttcatctctccatgctctcctctcctctccaccagcgcccacactcctggctcttgctgcttcaagtgcctcttgcatcctgctccccagtctccaaacctcctctctctcgcaggcttccattgaaaaggaaggggtcaccttggtcgccattctgtgtactcacaagcactggtaaggggctcccgtcttccctggcccacccttgtcccagctgggcttgccaggactgggcccattgaggacggccggggccagagatcaagaagtcagtacgggccggcacccgccttcctcgtgaagtcacctggacaccagcagggagggaggagaggggacagtctcccaccactccattgatcaagcttctgaagccccagagggcagggcagtcatttctctttcatttcatgggcatgtattagatacctactgcacactgggcatggacaaaagttatgactcttccatcaaggaaattctaagaccaataggggaggtagccctgtatcaaagtatataacagcggaggcaagagggttgggagttcaagcccaacctgggcaacatagtgagaccttgtcttcaaaaaagaagtatg

SEQ ID NO: 25135 - DNA, 1050 bp, Homo sapiens
cttaggtacagttgcccctcgaagccccctgcctgtctctgctgtcctgcagggaccacagtggagggaaccgtgacctcagccggcggcaccgggactgtcgggtgtacgggagccctcaggacggcatcccctacctcacccagtaagtccctgacctaggcaagggatggcccttccatgggccctttcccccacccccagccttcagtgaagtgtttcaggggtatcagcaggtggatctttgccagtgcccttcctggcccaatcccagcctatctgaagactggcactgcccatcccccaactgatccagccatagtccccaaaagaggaaagggggagggttcggacctgagacccgaggcactggggtgacttcttttgtatggaagcccactctcttgtgaatcacccagccccttgggcctgggatggggacagggatcagcatggcacagatccaataccttctgtcccctgctcccttgttccccagtcccctgtgtcatcaagatgtggtcagcgtgggacggcttcagatccgggccctggctacacctggccacacacaaggccatctggtctacctactggatggggagccctacaagggtccctcctgcctcttctcaggggacctgctcttcctctctggctgtggtgagtttccccgaaagagagaggagctgggagaggagggagagacagaagccagggcagccacagtcccatggagagcactgaagccttagttttagcacagatgttgccgtggcagttacttccatctgtgttactcagattggttttaatccttgagacttcccttggggcaccttgggaggctgaggcaggaggatcacttgaggctaggagttggagaccagactgggcaaaatagcaagactgtctctacaaaaaaattttaaaataggccaggcgtggtggctcatgcctgtaatcccagcactttgggaggctgaggtgggaggatcacctgaggtcaggagttcaagaccagcctggtcaacatggtgaaaccccgtc

SEQ ID NO: 25136 - DNA, 1112 bp, Homo sapiens
gatgaggggaattccatggtcaatctgacgcggcccctgctcttagaactcaccacgtcgcagcgggaaggaaatggcttctagttcaaaccacttgctttatttatggaaaacctgaggcccggaaaagtgcataatttttgcatctgacttaggttctctgcatttaaaacttttcctcgacacatctcgttttacccgcgtgatcttttaacaaaaaagaaagatagtgtaattcagctatccgaagtaatcctacttctcttggcatttaaataaaatctagactccttgccatagcctgcacggccctgtatgatgtggtacttaacccacgtttataatctcgttttatgtctcttgctcctaaagcttcagctactctggccacctaaccctctgcaacgcgcttatttttctccaagatgcactttgtggtctctatgcctggagtgaatgttcttcttatccctcctcctttacatacacagcatgagtgtaattggtacctcttccttgaactctccttcctctccttaaactgtttatccaaatccatctttcttcaggtctctgcctaaatcggtctcagagtggccttccctgactatcctcttcaaattagttccgcagcctctaactttagtagagtaccctttacagccctgatccccgtgtaattattgtattcgtttatttgttgtctgtctccttgagggcagggacagggatcatgtgagccctgttgacgtggtttccccggtgccaggacagttcctagtacaagattaaagactcagatactttgctgcatgaaagaatattgaagggaaggtgaccactgaaagaacattgccatgatggggaaaggagatcatttgatttgagcatacctgcctgaagaccaattctgctttttctgtttaaccaaagggaaatgatttaaggaaagtaatgtactgaaattgtattatcaggcaaaatgacgtaattactaaataaagcaccaaaaattgccatacgtttaagtacaaaaagtgaaaaattgagccaagtatgactaagctatagaaaactgctttttgagatttgatctccattgtcagttccag

SEQ ID NO: 25137 - DNA, 1039 bp, Homo sapiens
tgtttagtgtagtaggcttttgtgattcttttttttttttttgagatagagttttgctcttgttgcccaggctggtgtgcaatagcgagatctcagctcacagcaatctccgcctcctgggttcaagcaattctcctgcctcaacctcccaagtagctgggattacaggcattagccacgacgcctggctaattttttttttttttttttgtatttttagtagagatggggtttcttcatgttggtcagcctggtctcgaactcctgacctcaggtgatctgcccgcctcagcccccaaagtgctgggattacaggcatgagccactgcgcccgaccttgctgttgtcattcttgatggaatacatcctaacatcttcatatattcattaccgctaccattgagcataatttcttttttctctcctctaataaataaggacagaagtaccacacaggattattctaaagattaagtaagaataacaaaatgcggccgggtactgtggctcatgcctgtaatcccagcactttgggaggccaaggcggatagatcacctgaggtcaagagttccagaccagcctggccaacgtggtgaaacctcatctctactaaaaatacaaaaattagctgggcatggtggcaggcgcctgtaatcccagctactcaggaggctgaggcgggagaatcacttgaacccaggatgtggaggttgcagtgagccaaaatcgtgccattgcacttcagcctgggagacaagagcaagactccatctttaaaaaaaaatgaaagaaagaataacaaaatgctcagtggttggctagattcactcactgatatgtgacttgttcccagacttcagctttgggaatttaattcccaaattaaaggctcacacacctataatcccagcactttgggaggccaaggcaggaggatcacttgaggccgggagttcaagaccagccttggcaacacagtaggaacctatctctacaaaaaatgtttaaaaattttccaggctgcagtgagccatgatc

SEQ ID NO: 25138 - DNA, 1052 bp, Homo sapiens
aagagttgtagcatctgaactaggaatcattagaggtgatcgttacagagtggcatgaggagtaaatctgcctgttgtctgcccatggtttcatcgattgttaaatgaggttaataaccaccatgttgtgatcattaaatgaaaccatgtttttaaaaaaaggtggtacaacagaactaactcttccctcacctgccgtaccccttcttctactgcccgcctccttttaaaaagatgtcaattacagattctttttgtgaaagatgggcctaaataactcttgggatatggaaggagagtaagatacattttgagttttggtgttttatttaggaatgtccaaaatattttatcaatcatctggttatataaattaatatataactcaaaatataagaatatttcctttttattctccaaaacaatgaaattcctatatgtgtgttacaaaattgcttgttatatgtccatgtgtgtgttggtggttctcactaagtaaattatgccccatctgatccataatgtgacacagggaactatgtgaaactattgtactgacttctctctgaaaacaatacctattaagtgctttgtaatctcaataagtagagaatttctcctaacatcaatgctactgttcatagtactgagtgttctttcagattttgttgaactaccaccaataacattttactttttgtctgagatttttatgtattaactatattgtctaggtcaaagaatataatttattaggaagtcatttttaggctgagcacagtcgcttatacctgcaattccagcactttgggaagctaaggcaggcagatcacttcaggtcaggagtttgagatcagcctggccaacgtgggaaggtcccatctctgctaaaaatacaaaaattagctgggcatgtggcatatgcctgtagtcccagctaccggggaggctgaggcagaagaaccgcttgaacctgggaggcggaggttgcagtaagctgagatcacaccactgcactccagcctgggagacagagtgaggctccatctcaa

SEQ ID NO: 25139 - DNA, 1049 bp, Homo sapiens
gagactgggcaggaaacctaacactaaaattttatcctgtgtttctgctgagcgtctaaggtgatgtaatattctaaataaacacataccctatcttcaggtaggaattacatttccaaaaatagtttttaagttgagggcctgtttgtggctgcctagaaagggcaagtgcctgaacaacactgcttttgctgttgggaaaggaggaaaaaagctaccatattccttctatcatattgttgctttaagagcctatgattgattccttgaggaccatccctgaagggagttacaaaacagcttttagcagattactgtaaggcacttaaagcttaagctgcattgtatttcagtctatttagcagaacaacttgtggttctttctgtcaggctagtgaaatagtaaaaataaagctaaaaacttacaatgaagcttccatttttaaaaggccattattcagattgggtagagtaaatttgaatccacttcaaagtctattttatgcttctgatcttcaacaaaggcagttctttgtgttctttgtctttacatctgtacaatgggtaggtcatcattctgtcaagctaagatcttttgggaacttataagtactgtgagaaactgtaatatagttcaaaaaagtacgggaatatgcaacttcataccttcatacctggttaaattgagtgagttaattcctctgaacattagtgatctcatctgcaagtgtagatagccttcccccccgcctcccgctccttcttttatttctcatggttgggggcaattacctgagaacatattgggcatagagatggaaatcaccaggaatttgttagcagtttagagcttaggggtagcaattatcatttttctagtctcccatcttgttttccagataagaataattaaggaacttaaccaaggtcacaaacatatttgatgactatagagaattataaaatattcaaatttggggggaatattgtgattctttagcataataatgaaagcatgccctattaagtatgtatttcctacatgagta

SEQ ID NO: 25140 - DNA, 1035 bp, Homo sapiens
gaggcatagtgcatggcatataagaggagtttagtaattatttttccagcacttttcccacactgaacccagatttgacttcagaatccttcttaacatagcattctgggcggcctctataatagacgagaattggcatgtaagttaaaatatttttgccacctgtcatatctaaaaaattaagaaaagggaaatcctgttcaggaatctactttgtgggcttttatggccccaaaggcacttaatagtcatcttattaaagcctttcctctttgtcaagtttccttatgaaatatgtatgctaggttggcactgaccttacacagctttagagaaattactaagaaaattacttttaagcacttaacaaaaacacaagagtactttgagtgttaaaaatcttgggcgttggctcttctacaaggtgtaactataaataatataaaataatagactgatttccttattagttgcctgactaaactgttttcagaatggtttgtgtatctgaaatgccctaacaaaaaaagaagaatgtgcttattaaagtatagcaggtaagcctgataatggctgctttgttttgttgtattggtttgtaaggtttattcgactgcacctgtgaatactattattcagtcataggtgagggagataatctaggacaatctcttggacacttaatagcattttgtggtctattttttaaaatccacaattggatattttaagttaatcagtttgtaaggtactttttgctgattacagggaaaatcatgtgttttcttaaccactgtgatctggactagggttttcagctttggcaccattaccatttggggctggatgaatctttgtgatggaaaggagagggcaggagaggactgtcctgtgcattgtaggatgtttaatggcatctctggcctcttcccactggatgccaatagtgcttcataatcctgagttgtgacaatcaaagatgtctccagacattgccacatgtcctccagggggcaaaatttaccccatttgaga

SEQ ID NO: 25141 - DNA, 1097 bp, Homo sapiens
ggtgagttctttcatctatcccctttacaactacttctcatcacaaagcttaatctctttataactggcattgaacaacttcagtcctctgactagaactaacaattttggaaccttttatgattcttggactatctgatctctgatgtcaattagaatttgtttgtgttttgtgtgttttttccaacccctccccttattttgggggaaacagggtaagatggtcctgcagctatccaaagagccttctgcccgtctgctgaagcatgtagtgagatgttaccttcgactttcagataaccccaggtaaacatttataggatgtataggactttagggaaatactctgctgaacagtttcctaatctcatggcatagctcctgtgtctttaggacagggaagtggggatataactgcatttagtttgtctgagacagaacttagattcttttaaaaatctgaaatgctgaattttagtagccatcagtttcatcttctcactgtaactctccatcctactgtgaaattccagagagtctaggcgattccaaaggaaaccttatgatgcattactcctgttgtttgaattttctgttgctactctacgtggtcagagagagaagtatattttcaaagatctcttaaaaaggaacacagcccagagggctcttgaattctatttccaattctgtccttgattcctataagtttcttgagctaattattttatctgcttatgttcataatctttctgccagaaatcatacactgtagatataatgcattttagaaatgtttgaccttttgctttgtaaatccataattcatgctgaaagcaacctgctcatattctgctaaaccacgtaatggagcaatttctgtgttcctgggaagagagctagcttgatttgatttaatgtgaactcagtctcctgccactgagtttattcaagccctacctgtttgttgaccattttatcctgttcttcagtggttcttgtttcactaaagtttaaaaatgtgtttatttaaaattctacttgtacaaagaaaactagtctgagtgcaaaaactataactttgtttaaaatagctc

SEQ ID NO: 25142 - DNA, 1658 bp, Homo sapiens
tctatggtcggccgcggctggaacggcccccggggcccgctttgtgcgaccgcctccggctcagccgcctctaggatattggggatgtggaagccactctctcttcctcttgccggctgccggggtactctatgttttgtctctgtggtttttcccgccctccacccccactccagccctgaagccggagaagcaccatcgagagctctggggtagagtggcgtgggcttctctgtgggtgtggcgggaagtagatgaaaggacccggggcggggccgaacgcagcttccccaaggtgcaggcgcggtgaaaccatcgagacggagggccagagagtcacggcggtgagagggctgagtgacgggttaccccaaaccatgtggctggaggcgcgagctggggtgtgggcgaggttcaggagggggttcctgggtgtcgcggaggggccggggacgggagagctttgtctgtggccttccatgcataggtgttttggaattctggatcccagttctgaggctcagccgaggtcactgctgtcagctcacctccctgcatgccaggcgcagggcaaagtggccggggttcggggttggaggagaggtgtactagaaacaactttgctcttgtccctcaggatcttattgtctacgatgtgacgatccgtggagaaagtagcagatgggcagattttcatttggggagaatgagggagaaaagaacgggcattccgagccaagagcactgcatgagcaaggagttgggaggttgcttacttgttgaacatatttgttgcgtatttgcatatttgctaaacaggtagtgttaggagctaatccatgaaaggtaggtgggcgccgtattgtagagagccttgagtaccaggctgagtttatacccaattcaggggtctgctgggagccagccattgaaggtgctggagcagagagagatatggtattggagctgatccctatgatgaaagatctggacccttgtgtagatgttccgtgaagcaggaggtgaagacctattaaaatgccatttcaagaactacgattttaaagacagtttaggtgggaggtaataaaggtctaaacaagacgttaaatattggggacgtaagggggaggatatttgaaggacattactcataacaagacatagggttactgacaagtcaacggacgcttctcccttgctgactgcagccaatggacccctttttatcatagctggtcccagggaccacaaaaatcctgtccatccattaccctgatgtgaagcctgtttatatagctctttttggtttaaggcatctccagacatggtcctctggtaggaaacaggtatgagtagactaatgaaggacaaaatgggatgagggacctggagcctccacccttgcattccaataccacccttaccccacaaaaggagggtattgacccacacagtaatgctgacctgtggccagggctggggaggtccaatttctaatctgtgctttgtcccatctccactgttccccacccctaggttttcgtaacaccccagggcctgtaaggtttggtgtttccctttcaagatgccactttcagactttattctggctctgaaggacaatccctactttggggctggatttgggctggtgg

SEQ ID NO: 25143 - DNA, 1058 bp, Homo sapiens
agctagaagagagccacagagtcagcaacggggagggagaaagaagaaggcaggaaagaagttactgacagattgagctataaagcaagaaagatgagatcaggtttaggctggaaacctaagtagtggctgagactgtagaaggggagttgggcaaaggaattggaggagggagggaggaatgataaaggttaagtgaacaagaccaagtctcttcgacattcctctccttaggcctcatgggtctgagtttctccctgtcgtggtgctctctgtctgccagctcctttgcttcccctttgcgctggacatggatgctgacctccttataggtgtcttggccgacctcagggactcagaagttgcagcccatctgctgcaggtacttgggcagctagcatgaaggtgggagaggaagatagccaaccttgtatcctctaatttacttcccagcagctccagggctcttctaggcccctgtaagcatggaacagctggcttgactcaaaagttggcgtggagacagtactcagacctgcgcatgtggtggaggcatgtggtgggagctgggttggtgcctcctcctctccatcagtccatcacctggttctgttggtgctcattggggagaacatcctagtctaggcactgaagactcacctccttggccaggaatcatgtttctggcaattcttggcattgcacagtgggtctttgttcttttgttgtttctttttgttttttcacagtgggtctttgaaggcagagactgagcccttgcaaagtaaggaatgatcttggaaagaacctgctctctcaggctccacgttgtgtctcatgtggagtgctgtggggcaggacttccagctctctgtggcatttctcaccatagcttggcttttctctctcccaggttttgggcttctttatagctgcatatactctctctctccctgaatccttttacctcctgttctctcaggtctgctgctaccatcttccgttgatgcaagtggagctgcccatcagccttctcacacgcctggccctcatggatc

SEQ ID NO: 25144 - DNA, 1048 bp, Homo sapiens
caggaacggtctcctcttcatacttgagttctgggattttactggtgataatcttggtgctgtgtatttgtgtttggttttctgtgaggaagagtgaagccagcttgcttctacactgccattttggaaccagaagtccctattcttagatactttattctttttggtgctgttgtgaatggaattgtgtatttcatttttacatgttgtttgtttgttgctagtatgtagaactaaaactaactttcgtgtattgattgtgtattctgtgaccttactaaacttggttattagttctagtaggattttttatttgataaatgttttaggattttcttttctctctctttttaaaaaaaaaaaaaacaaaaaaaaaaaaaacaggatcttattctgtcacccaggctgaagttcagtggtgtgatcatggcacattgcagcttcgacctcccaggctcaagtgatcctcccacttcagcctcctcagtagctgggactacaggcttgtgctaatttttaaaattttttgtagagataatgtctccctatattgctcaggctgttctcaaactcatggtcttaagtgatccttctatttcatcttcctaaagtattgggattacaggcgtgagccaatgtgcccagccaggattttctatgtacaagatcatatgtcctacaaataatgacagttttacttcttcctttccaatctgtgtatctttgatttctttttcttgccatgtcaaactgcttagaatttctagtatagggtctaatagaaatggaggttaggcatggtggctcatgcctgtaatcccagtactttgggaggccgaggtgggcagatcacgaggtcaggagtttgagaccagcctggccaatatggtgaaaccccatctttactaaaaatccaaaaaaaaaaaaaaaaaaaaaaaaaaaaaaaaaaaaaagaaaaaaaattagctgggtgtggtggcgcgtgcctgtagccccagctactcgggaggctgaggcagaacaaccacttgaacctgggagggggagg

SEQ ID NO: 25145 - DNA, 1033 bp, Homo sapiens
gaatagttgcctccaggattccctgggtacctttctttcaaggatcaaaaagtgctttgtaggcctcaacttcttgtttgattcagaagagaactgagacttttacccacctgggcccatgcctgaggggtagggaaggggagaaccccatgatccatttagaggtagagctggagggtaccaagaccccaaacactcctgccttgcctccgccaagccttttggtctcattgcttcctttgctcttagtggtctctcccgacatcacttctgactatctcaaaggatgacgtgatactcaatgccttcagcaaatcagagactagcaagctggggtgagtgctgcctgggcaagggaggggctgctggctgtgagtttgtagagttttcttccttcccctcttcccagactgtggcagtgagatcagcattctccagctgggggttggtgggagcgtcaggacatgcagccatagcatcctttttctggtagatcttggtatgcccagggaagctgagctggaggacagaagtgcttcctgaagcagccactgtcagccatacccactagctgtgggaaattgttagccctctacccgcacccccattcactcttgcactgcaggtctcaagccttcaagtaaatagaattttttttatggttattacatttccatgtaattttggcctacaacactgtaatgtcgtgaatgcctgctccagactgaaggcaaatcctaaggtaaagtctcagttaaacagtgtctcagtcatttctttcaccacctattccctccagaaaacaaagctcctgtgaggttagcctactactctctgaagacgggaccacgcccaaatccaagaagactcaagctggcctttccccttatccccagaaacccagttcctcaaaggacagtgaggacaccagcaaagagcccagcctttctacccagacgttacctgtgatcaagtgctctgggcagacttcaagactttctgcttcctccactttccagtcaatcagtgactc

SEQ ID NO: 25146 - DNA, 1049 bp, Homo sapiens
attacaggcttgcgccaccacgcctggataattttgtatttttagtagagacagggtttctccatgttggtcaggctggtcttgaactcctgacctcaggtgatctgcatgccttggcctcccaaagtgctgggattataggtgtgagccaccatgcccagcctaatttttctattttttaaatagagatgggggtttcaccgtgttggccaggctggtctcgaactcctgacctcaggtggtccacccgccttggccttccagagtgttgggattacaggcatacgccaccatgcctggacactgcactccagcgtgggcaacagagctagactccatctcaaaaaaaaaaaaaactttgtggtttctggtttcctgtcaaaaattatagtttggtctttgtaggtttgaacatagcaagcacagatgttttatgttggaaccaatgtttttcattgaaatcactgtgagtctgtttttgttatctattgtgcagagcatagtatttggaaaattatctgtagaaataatttaaagttttgatggattttcatttatgtctgcaggtgcctgaaagcactagcaatctaatataaccttaatccaatttcacagccatactgcagactgagcaagggttactacttatttatttatttatttatttatttatttatttatttatttatttttgagacagagtttcactcttgttgcccaggctggagtgcaatggcacgatctcagcttactgcaacctccacctcctgggttcaagtgattcttctgcctcagcctcccagagtagctgggattacaggcatgaaccaccatgcccagctaattttacttttttatctttatgcttggagtttgtttcttgttcccaggccaaaacacggagaagtttactagaattcttcctttcacaagccctggattctaacatctactcctctagctccacaggctgtctaaatcagtcttttcttggctttttccccccactgccgagagagggtcttgctctgtcacccaggctggagtgc

SEQ ID NO: 25147 - DNA, 1021 bp, Homo sapiens
aggtatgcagcaccatacctggttaattgttttaaaaaaatttgtagagacaaggtctcactttgttgcccaagctgatcttgaactcttgggctcaagcaatgtttctgcctcaacctcccaaagtgctgggattacaggcatgagccactgtgctgtcctgggacctttcttaatgctaccaaagcccccttcccttccgtccacccttccgtcccatcctctcctccctgtcatctcttactgggtgaataacacctgaagtttacagggtactgagagtccacaaagccctttcatctccatcatctcatgagctcttcccccttgaggcccagcctccttctcctcctagcctccttcctgggctgagctgtcctatttggtgggagaagttgggggctggggaggaggtgagattagccccagacttgtcctactttggcagaaagtccacagcactctgtgtctgtaaaaggagcgtggggcaggaggggcaggagtcggggctgtggggccctccttggagaaggagcaaggtcggggtgtgggggtgacgaggacgatgaaggaggggttgatgagaattggggtgggggtgccagtgaaggaaggggcccaggagagggtctgggggctggaggtggaaaaagttaggagagggaagatatggcccgaatgtcttaagccaaagagatgtggagcgtggccgatgggaggggggtggattgctggctgagcctggggaggaggcagcgcagcaggagagggatgagtttcagggagaatcctgacgccatcccggctgggcccccaactctccagcctccccccgggtgatatcagggagaaacagccgcctctggacattccttcccttttacagtcactccagctcctcagcagcctgtggaggtcaagcagctgctccagctgggggaaggtggatggaggggatggggatgcatgggagggggctgctggagggaggggctctggacagggaggccaggggacatta

SEQ ID NO: 25148 - DNA, 1033 bp, Homo sapiens
tcttggtacccatacagtactcagtatgccgggagtacagggtcactatttggtgaacggatgaaatcaaatctgatcttcgtaggcctctcagactgcctaccattcactcttttgaatctgacggcttcacacatttgacaattcacctcgtgttgctctgtgacaccgctgttattgcttaagtcttgggttgcttttagcttgttctttgtctgtttgaaagcttgtgcccctccaggtgccttgcatggggcctggtacgccatacatgatggctgacgtgttaaagacatacacagtgcagtcctgtctttctccagaagccaacgctctaattgtggatgaagttgaggaacggccacactaacatggagtcaaggctgccctgacctgtttcgagaatgctccttctgacttccttttttccctaaggacattcaggaggcagaccctcttctccccaagtccctgctttctagaagcccctctgtctgggtttggctttctaggatgcaggccaccaggactctctctcccgctgtcatccctgcagggatcatggccccttaccccgttattcctgtgtccggcagagtcttcggatgactcctacgtgtccgctggagaagagcccctagaggcccctgtgtttgagatccccctgcagaatgtggtggtggcaccaggggcagatgtgctgctcaagtgtatcatcactgccaaccccccgccccaaggtgagctccagcactgggccaaggtgcggtcgaggttgggagggggtgtgtgagaagggaaggggaggttcccccggactcctccaagggaggggtgggaaagaggggaattatcccctccacgggggctgccctgacttgggtgtgtgttcagggacatttctcaggacccccgagagaagggagggcaacctgagcttcccaaaatgagggcggactcttccagattccctggggtgctgagaggagaggtttggtctcctgtgtggtgtgtggggtaggagtagagattc

SEQ ID NO: 25149 - DNA, 1072 bp, Homo sapiens
agcaggatggctggaatggccttagtcatgaggcttttagaattgtttcaaggcaggattatgcgtcagaagcaatcaatggagcagctggtggtgtttatttgggtactaccaactcctgtgtggcagttatggaaggtaaacaagcaaaggtgctggagaatgccgaaggtgccagaactaccccttcagttgtggcctttacagcagatggtgagcgacttgttggcatgccagtcaagcaacaggctgtcaccaacccaaacaatgcattctatgctaccaaatgtctcattgtccagctatcctgaagtacagaaagacattaaaaatattccctttaaaattgtctgtgcctccaatggtgatgcctgggttgaggctcatgggaaactgtattctccaagtcagatcggagcatttgtgtcgatgaagatgaaagagactgcagaaaattacttggggcacacagcaaaaaatgctgtgatcgcagtcccagcttatttcaatgacttgcagaggcaggccactaaagatgctggccagatatctggactgaatgtgcttcgggtgattaatgaacccacagctgctgctcttgcctatggtctagacaaatcaaaagacaaagtcattgctgtatatgatttaggtggtggaacttttgatatttctatcctggaatttcagaaaggagtattcgaggtgaaatccacaaatggggacactttcttaggtggggaagactttgaccaggccttgctacagcacattgtgaaggagttcaagagagagacgggggttgatttgaccaaagacaacgtggcatttcagagggtgtgggaagctgctgaaaaggctaaatgtgaactctcctcatctgtgcagactgacatcaatttgccctatcttacaatggattcttctggacccaagcatttgaatacaaagttgacccatgctcaatttgaagggattgtcactgatctaatcaggaggactatcgctccatgccaaaaagctatgcaagatgcagaagtcagcaagagtgatataggagaagtgattcttg

SEQ ID NO: 25150 - DNA, 1110 bp, Homo sapiens
caaaacattaaaaaattagtcaggtgtggtggcatgtgcctgtgggccctgctactcgggagactgaggtgggaggattacctgagctcaggaggttgaggctgcagtgagccatattcatgccactgtactccagcctggaaaacagagcaaggccctgtctcaaaaaaataaaaattaaaaaaaaatctatctgcaccgaagtccttttatattcaaattttctcctgcaaatgaaaaactgttagagaatatcctcaagatctcttggcttaaaaatgagaggaagaaaaatggccttgttgaattttacttgagctctctatgctgctagaaaacagaaaccatgaagataatcctcccactcttttttgtgttccaagaaaggatttactacaaggaacccccaccttctccctgtggctcagataagacccacagatgcctcccttgtttattagtgacaaggccagacacagactctccaaattcccattctttggctcataaatgattagctgaactctgtaccccctggtcagtctgtacaaaatacctgccaccttgacttgaccaaactctaattaagtttctctccatctatagacccctgaactttgacccacccttaccacacagaataggctgacgtcagggtacacatggttttagtatcctgacccaccttcaccttccatttcacttccccacatccagttctcctgagccttgttcattcttccctaagtaatagaaatgcccgttcctcctttacattcaagacacttgcagacctcttggtctccgtgtcacatagtgccccgactcccttcgtgcaagaatcctttcgaatggcatctctccttacctaaatccagatttgctttttatttgacaaagataataaataaataaagcacagagttccaccctacagtacttgtgcctgcctgtggagatgtctgttaacacacgacaacatgaaacacagatgtaaaacagttcccgtccatgaggtcttcacttctcagtttgagacgctttccaaagtagtaagcagagtcttattctccagggagccagggttgttgcatttattcatttaataaa

SEQ ID NO: 25151 - DNA, 1033 bp, Homo sapiens
ttctagattcgaatcccagttctgccacttgctgactgtgtgcctgtggatgagtgtgcaatggtttactcatctgtaaaattggtctgcattctccaggtgttactagattgagtaaaaatctgcaaagctcctagaacagtgtccaacacatatataagctacgtgtttgttaaatacaagattaaaataaataatatatgcattaatgtcatatcttagttgctcagtggtcctatggaatccagaaagtctgttttctttttaccaactaaaatatcctacaagactttgccaacaagtagctggtcagagagaaaggagccttcaatcaacaacctgagaaccccaaaatatatccatgacatttggaaatgcattcattttccttatttgattagacttacctcagtcctttggttttgcagttggtgatgtatattggccaagtggccaaggatgtcttgaagtggccccgtccctcctcccctccagttgtaaaactggaaaagagactgatcgctgaatatggaatgccatccacccacgccatggcggccactgccattgccttcaccctccttatctctactatggacagataccaggtaaggtggcctggttcttcttcctacccacctactgaggcagcaaatagaggctgcacttctgaattttctcttaaagctgctttgagggaccttaaggtttatgaaataaagattaagagaaactgaaacctattaaacagatgacaattgcatcataaataaagtgactatataatttagcatttaaatcaggttatgcctgtgtgtgaacatcagcaccatattaataatgacaccaggacaactagcataatatgggccatcccaggagaccagcatgtattatcaccctgggctgcctgatgagacagtgcttgaattagtgctctcatcctctgtttgcaagaggagtttatgtcctagtaaatgattctccagggctgagatgattccaccaaatccctctgccagactccccaggg

SEQ ID NO: 25152 - DNA, 1049 bp, Homo sapiens
ctcattttctgacacttgtattgactccttaatttcagctgctattaatttcaaagaactttttcttatttttattccttctgttaatatatagcattgcattcttgtttcatagatggcaatagcctctcttatgcctttgagaatattacatagacatattttaaaatttcccacatttcctacattgtctgtttccactgaggcactttttgtctgctgtttgtctctttctttgatagtgatggtttttcacaaatatctggtgattaagaactttatcttctgtctggattttgaatttttaaatggttttcctgtttctagtttctttttccacaaataaattctcaacatttggcaccaggtttaatattatgaaacagatccgagtatgtcatccccctgctaataaaagttagaagacttttaagagatctggataatgtttcaaccacttagggcagcaaacattcacagtggcagtgaggcatttgtcttctagggccactgcaacaaatcaccacagactgggaggcttagaacaacagaaatttattctattaatgttaatagagaccagaagttcaaatcagtgttactgggttgaaatcaaagtatcagcagagctttgaaggctccagggaagaacctgttccttgcctctttcagttctagtggctgctggcattccctattatcagtccaatctttcaggccagcatcttcaaatctctctgctccatcttcacgtcaccatctccttcatgtgtgtccaatctccttctgcctctctatttataaggacatttgtgagggcatttagggaccactgggtaatctagggtctttttccaaataaggtaacatttgtagatcctagggattagggcctgataaccttgaggtcctttattcagcttactacaactacttagagtcttctgaaatttctcttttcttgtacagttcccttcgcgtttacaaataattgttattattgcctgcagttattgtctgcttgaacaaaaatacatgcatcaactcag

SEQ ID NO: 25153 - DNA, 1026 bp, Homo sapiens
gaagtgactaggtaaacccattgtaacacagtactcctctacaaatttcttttagtagttaatgggttatgggaactccaaactttgaattcttagctaagaatgcatcaagagagtttagcagatttacaataaaattgaaattgcaaagataattatgacatattaaatgatagattttaaataggtagacatttatagaaatgactgtaattactgttgaggatcagctaggtttgtgtaggtgaagaagtggttttggagcttcagtgcatttatgtgtgctcagtagggtacttaggatatttgaggagggaaaaggccgtcagaaactgatgtgggagggtggtgcacaggaagaagtactatggtacagtgacaaagataactttgtcataattttgcctaaaaagagaaataagactcgtagtcatgttatataggttaactgtgcgatgaagtaaagggaatgtcatgaactacttgggaaacccagtgtcttgaatcccgaaacttagaactcaaccttttcacgtttgggaattgcttatgttcagaagtcccatgatttaagagataatgtaaaaatggaagttaattcacatttgtacgtgtcctttgtgtgattgtcggattgaaacattttaaacttcttaagaaatgtagcgaagcaaatttggatttgtatgtgaaagtgacctagatgagaagtatggaaggagacggagacagcagcaagtttgctcctcccttggtttcagaggaaaatggtttttaagagctgggccagatgtttctcatagctacttaaggtggattccttttttctgtgtcttctgtttttaagtgtaatctggtttttgagcacttgcagaaaagctgcagaggccagggaatgacacagcagagaatggaggtgagagggaagacaactggtgatcttagttgctttgattttgaaatatgttgttcaggaatagcttttcttagtggtaaaataattgggaatttgtaggaagaagaaaa

SEQ ID NO: 25154 - DNA, 1024 bp, Homo sapiens
cctcagcctcccaagtagctgggattacaggtgcgtaccaccacacctggctaatttttatattttttaatagagacggggtttctccatgttggccaggctgaccttgaactcctggcctcaagtgatctgcccacttcagcctcccaaagtgttgggattacaggcgtgagccattgtacctggccgaaaagaggtatatttaaaagtgaatttgttacttcaactaacacaaccttcacttaaaaattaggctgtctgttcactctccttagtacaggttcatgtaatgccaaatgtagtacgtagctggattgagttggaattatgaagatcctcaaatattcatgagccaggttgatgtcattaagtaatccaatagttcatgttctcctgaaatacttatatagctggctttctcattaatcattttgtaggaaatgattggaataaataaggagtagtactgaaaagagtaaagaatcctattcagtattgtcttaatcagttttgggaaccctaggcatcagtagaatatagtcttaaaatcgatctagttgaactgcatcaatattaatggtgaacaaattaagatttagtgacctgctcaagatctcttagtaattggcagcagagctcagtctagtctagtgtatgtgtttatgcacatatgcatgtgtgtatatgtatttaaaatccctgttgtgtatctaactgaaaaagatatatattcctttgcctgatttctgtttcctgttgatttttatctagaagagggataaaagctgttttttaaagaaatagtgggtcttgatcagttttggggaaattgaggggactgtatttatagtttagggagagtactcaagagtcctactgttatttccgctatcatactaataggactgaaacaattttaaaattacactggataactgaaacttaaaaagttggctttgttaaactgctttttcatgtagatatattcatgggaaagacttgctataataaatgttcctccctc

SEQ ID NO: 25155 - DNA, 1185 bp, Homo sapiens
acaggaaatgggtaaatttttggtcttcccccaaccctctttctgacttgctccctttttactactgggaaatgtttgtggatacttaaggttttggttggaacagccgcctgtttacagtatgatgtggaaacttttcttgtaattccgttgttaatagatattgtacaaatgagtctcttagaaatatcaagacattgtaggggaccagtgtggtagctgctgcctgatagaaaaaaaaaaatcttcatttgccgatgtaacttttctttaaattattttaaaatgattttgaactaacgcctttctttttcttcctcctagattctcgctgaagtctgttaattctactttttgagtacttatgaataaccacgtgtcttcaaaaccatctaccatgaagctaaaacataccatcaaccctattcttttatattttatacattttctaatatcactttatactattttaacatacattccgttttattttttctccgagtcaagacaagaaaaatcaaaccgaattaaagcaaagcctgtaaattcaaaacctgattctgcatacagatctgttaatagtttggatggtttggcttcagtattataccctggatgtgatactttagataaagtttttacatatgcaaaaaacaaatttaagaacaaaagactcttgggaacacgtgaagttttaaatgaggaagatgaagtacaaccaaatggaaaaatttttaaaaaggtaagatgatctttcattgcctttgaattctttcgaataaaatatcctgttagaaatgaagtaaagggcaagcacagcctgcctccattagaattcgctgttgaaggagaagcagtgtaggaagggggctagactaccttctaatttcttcctgtacttaccagcactgatatgttctgagttttcagaaggacatcgcaacccagtggtgtggagctcttccccagtgtctaccagggtttggaatgtctagggcagttttgagtatgaaaccatactccctgtctctagagcagctgggtgctggaaatggctccaggttttggggtgggacctgctgtgttaaatgtggcttagatgtgggttgcagtgagtgcttcatgtctttgtactttggctgtggcagttgcatggttcttaaaacatttcttttcagaaatatg

SEQ ID NO: 25156 - DNA, 1093 bp, Homo sapiens
ttacagacatgagccactggcccagcagtaactcattcttatatagggatttgttctattaattgcatgacttaatacttctgtcagtttatcaatatgatatttaagatgttgcagaatctttcaaataatttgtctcttgtatttataattttatacaacaaatggaagatgttgggttttagagtttaatttttttctcagaatagaagtttgaaaacataaatacttatggtttagcaactgagattttgtgcctactgttaaattgataaactttgttcattcatagtgtctgccttttttcctttgggaagttctaattggattaaaataagatgactgtttagaaactagtagtttcaaattttcatgtgttgtatttaactcaactattaactcaattattattttattaggtggatactttaatactgataagccacaccccaggggtgaaattcttattgggggccaaagtgtgacaatggggtactacaaaaatgaagcaaaaacaaaagctgatttctttgaagatgaaaatggacaaaggtggctctgtactggggatattggagagtttgaacccgatggatgcttaaagattattggtaagtcatctaatatttttttgaaaatgaatgtttctgaaatagtttacacaagaagcacaatatatttagaggaggcgctgaataatataaatctttatgtaatcttagtttgggttgttgcatcactcctggaatataaaatattacggactgtggaatttatgaggcctgacatgttatgagttctcaaagatggttcagcagcagtggtattttaaattactcttagataaccttcagtcattgtttcctgcctgtgtttctgacatctagagattagtggatggagctctcacagtctgaactgcacccttgccttgccctgcccaggagaatagaggaaagccaggcagctcaagtactatgactcatatgggttgaaaaataccttattctgcttctccttttaggttctttttttttaaaagttaatggcatttcagttagccgtgtgtggtgtctttgtcgggcacctgtaa

SEQ ID NO: 25157 - DNA, 1972 bp, Homo sapiens
agctgatgttcttctggcttttgccagtgttgttgcacctgacctctcacttttcccttaggactcggctcaagcagctgagcatagtgactcaggcctgtaatcccagctactcgggaggctgaggtgggagtatcacaggagcccaggaggccgtgattgtgccactgcactccagtatgagcaacagagtgagaccctgtctcaaaatctcaaaaccaaccaaccatccaaccctcagctcaggcctcacttgcaagaattttttccaaatccccaggttggagagtcttaacacttagcgctaccattgtagtaccaatgtattgaagtaatacgtttttgcattatgcatgtctccagataggttgtgaacttgcagatggcattgaatatcttcttcacctgcctggtactaatggataccagaaataaacctgttcagaagaacatacttgaagccctgctaatggagtccattaagtagaagttaattgtttttctttctttctttttttgagatgtagtcttgctctgtcgcccaggctggagtgcagtggcaccatctcagctcactgcaacctctgtctcctgggttcacgcaattctcctgcctcagcctcctgagtagctgggattacaggtgtgcaccaccacgcccagctagttttcgtatttttagtagagtcggggtttcaccatgttggccaggctggtctcgaactcctgacctcaagtgatgtgcccgcctcggcctcccgaagtgctgggattacagacatgagccactggacctggcctgtttttcttttaaaagcatgggccgggcgcggtggctcacgcctgtaatcccagcactttgggaggccgaggcgggtggatcatgaggtcaggagatcgagaccatcctggctaacaaggtgaaaccccgtctctactaaaaatacaaaaaattagccgggcgcggtggcgggcgcctgtagtcccagctactcgggaggctgaggcaggagaatggcgtgaacccgggaagcggagcttgcagtgagccgagattgcgccactgcagtccgcagtccagcctgggcgacagagcgagactccgtctcaaaaaaaaaaaaaaaaaaaaaaaagcatgtatttagcagtacaaaaattagggcctaattttaatatgtgcttttaatttcagcataaccattaatgcttaattttgcaaagttttaaataatttgatagcaaattacttagagaatggccagtatttatatatgtattaaatgttactaatattattactcattgttttcccctctccacctttctttgttttgcagatcgtaaaaaggaccttgtaaaactacaggcaggggaatatgtttctcttgggaaagtagaggcagctttgaagaatcttccactagtagataacatttgtgcatatgcaaacaggtaagaacgtggaattcatactacttttacttaaaatatttgatgtccatagacatttcctacctgtatggaccttctttgtaaaaatgttccgagaactcttcctatctgttacttgtgggaatggcctccttctcattgcagccattagctgactcttttccttgtaaggcttcccctgatctttctctctgtccctgttttctgctttacgtctcactgcagtgtcccatggagggaggtgaagaaaataaaaccttccttcctgctgccttggtacccctacctacctgtccctcagcaggggaagcttcacagaactactccagaggaatggggagtaaagaagtggcagtgaggagtgtgctgcttacttactcctgctctacacttgagcctgctcggcactccaggcaggtcttggggctcctatgtaagctgtgttaagctgcagcctaaacacacagcctccccacctcatgatgatgaagaggcagctggggacctgtctacgacagtt

SEQ ID NO: 25158 - DNA, 1026 bp, Homo sapiens
ttccattttgttaactattttctgtatatcttgtagcttttcctctcttgctgccttcttttgttttgttgattttttgtgtgtataattacattctttgattcccttgtcttttatctttgtgtatgttctatagacattttctttgtggttgtcaatacagttacataaaacatcttaaaattattaacagtatattttagtttgatagcagcttaatcttccgtctcatataaaaacttgactcctttgtaactctgctcctccctcaaaaaagacctttttattgtgtagtcattaatatagattcataattactttttatgtctttgttttttaaattctatacagatttaaatgtgacttatacacctatatcaaattactttcagaattctgtatttgcctatgtatttacctttaccaaggagtattgtagtttcttatggttttgtgttactgtttgttttcattttgctttaacttgaagtactcctatcattattttttgtaggactggtctagtggtgataaaccccctctactgttgtttatcaaggagtcttaatttttcccttattttcgaaggacaggtttaggttacagtattcttggttgacaattttttttctttcagtattttgaatactactattttctaacctgccagttttctgctgataaatgatagttcaatgagagcttctttgtatgtgatgagtcatttttctcttgctgctttcaagattttttgtgacttttgacagcttgattacgagtgtgttttggtgtagttctcttcctagtggagtgttttgagctgcttgaatttatactcccatttctcttctcagatacaggaaggttttggccatgatttcttcaaataggctttctgctcctttctgtcttctttttctgaactcctataatgagcatttttccacttgatggtgtcccattcattccttaggttctcttcatttttacatttttcctctcttagtaatttcagaagtcctgtct

SEQ ID NO: 25159 - DNA, 1094 bp, Homo sapiens
ttttctgaatcatattggggaagcagtgattttaaaacctcaagtttttaaacatgatttatatgttctgtataatgttcagtttgtaactttttaaaagtttggatgtatagagggataaataggaaatataagaattggttatttgggggcttttttacttactgtatttaaaaatacaagggtattgatatgaaattatgtaaatttcaaatgcttatgaatcaaatcattgttgaacaaaagatttgttgctgtgtaattattgtcttgtatgcatttgagagaaataaatatacccatacttatgttttaagaagttgagatcttgtgaatatatgcctgtcagtgtcttctttatatatttattttttattagaaaaaatgaagtttggttggtgatgcatgaaacaaaatagcaagagagggttatagtttaatagtaagggagataacacagcatgtgtagcaccagttgataattggtctctagtagcttactgtcaaaatgttcaatgaagtcttctgttcatctgttgaaactaggaaaatacccaaacttaaatggaagaattctgaaagagaggatagaatttaaagaacaagagtatataaagttattctttgaatatttcgttgactatatgtacattgagttatctatatttgtaaacaaattagtcatggaaaattattctatctcaaagtctccttttagtctagataatcattatttcattttaaaattagtgtttttcctagtttgcactgatgcgtgtatggatgtgtgtgagtcagtggtagcttatttaaaaagcaccttatcctttctcccataacctttgtacactaaaaaatgaaagaatttagaatgtatttgatgatagcattctcactaagacacatgagaatttaactttataaccgcgtgagttaagatttaattcataggttttgatgtcattgttgaagttatttgtaattcagaaaccttgcttgtgtgatacatagtctcttcatttattactgcttgtctgttgttatatctggattatcaaaagcaatagtgcaccaattaagatgtgctcaaatca

SEQ ID NO: 25160 - DNA, 1048 bp, Homo sapiens
aggagacagctgccatgtctgggtgagagatggtggtgaccaggcccaaagggaatgacagtggaagtgaagagaagtggtcagatttaggatatctttggagccagtagagttgatggtagattgaatgaaaatttgagaggcagagaggggtcacggatgactttgaggttatttccctgagcaattgggcagatggaatggcaattaactgagataatttggaagggcaggtttttgggggaaagatcaggaactcagtttgggatatgctgagtgcgggatgcctttcagatgtccaaatggagatgttcagatctatgaaactagaattcaggggcagggtccagtcagatataaatctgggagtagcaggtctgaagatgatatttaaaggcatagactggagtgacaatgggtagacaagagataaagcccaacactagtgcgctccaatgtttagagtttggggaggtgtggaggagccagcagaggtaactgaagagggtggaccagtgaggtcggagaaaactcatggccgaagaatgtggtgtcctggaagccaagtaggtaaaaggctgaggaggagggagaggtctacatgtcagcacggccaatgtttggggctggataatcctttgctgtcaaaggctgccctgtgcattataggatgtttagcagcatttttgtcttcttcccactggataccagtagcacttccctccctactgtgtcaactaaaagtgtctccagacgctgagtgccacagatccccaaaggacaaaatcttttctgattgagagcactgttctaactcaagaagtggagaactaaattctagcacaggaagctctctcttaacccagggcagaggaagctactggagaggctgacatgttttgagttgaacttggaaggttgggtagtgtattgacagagagtagctggggttgagtgcggaaggcagctcagcctgggaaaagttcctgatgcttgacaatgtccctgcacagagaaccagcatcactttttgaagccatggaaatag

SEQ ID NO: 25161 - DNA, 1010 bp, Homo sapiens
aaatcctgcattcacagctgttatttacatttaaatgtggcctctgtgtgatgtcagggacacggtgccctaggctactgaggggaaattagggtgacctggtgacaatttacagcagattgcaccatttctcatacactttataacaagagtttgaatgaggaaggaatgcatcaggctaaaagcctgggaatcattcctccagtttccagttttcatgacatgctatgtgaagagcctggtaatttcacaggagaggatcctgattccatttagtcccaatcccttttgccagacagaacatgctggaaacagcgtgacaaagaaggttataatacacattttcagagtttctagactgaacagtgggagcttcaggaggtggtccctgggataaaatgagttatggagagaggggacatttgttctggggttcaatccactgacctgctgggatatccgtgtgggataggcttcaaacaaagtctctgagtcaaaacaccagggttcatgacagcaagttaattaacctctcatcatgccagcatcagttttgtaatcagcaaactagggataataatatcatctatagaatttagggaggattaaatgagttaatgcttgcaaagcccgaatgcctggcacgtggaacatgactttatggtactcatctatattagggtttcccaactcagcatcattgacacctgggcctggataattccctgttgtgggagccatcctgtgcattgcaggatgtcaggcagcatccttaggcgccactgattaatccctacctcccgggtgtgacaaccaaacatgtctccaggccgggcatggtggctcacaccttgtcacctcatccctttgggaggctgaggtgggcagatcacctgaggtcaggagttcaagaccagcctggctaacatgatgaaaccttgtctctactaaaaatacacaaattagccaggcgaggtggcaggcacctgtaatcccagctgcttgggagg

SEQ ID NO: 25162 - DNA, 1079 bp, Homo sapiens
aattcaactcgtagcatgaatacatttatataaatgtggggactacaaactcacatgcccacagcagcaggtaatatagtaacaagacgtgataaattacagcaggtagataatataaaaacaatacctgatctgggagaaggctgggttggcctggaagcttgggcctaggcaattgctgtcaggaggaattgtagcttcattgacggcagacctgatctttcaagagaaccctcctaatccaggctttcaggggaaacttctcaaattaaaaatgccaaagaactcaaccatttttaactcaagttaatttaaaaacagttcaaagacccctcccaccccaacctacacatctacaagtagtatctggcctgtggacagccagcatgaaagcataagaatcattaaattaatgaagaacagagttcaggaacatattaatttttaccactgaggaagaatggggattagttaaatccccaagctttgagtgaccatgtaatgtagtgttcaaggtggaacattactgataatgaaaggaaatgctatgaataattacatgtagactagactcataccatgcaactgggatatataatcatgctatctacattgcatcttaatagagataaacttatttcaacctggatgatctcagtggttgaggaggggcaatggggtggtatggaggggcctcaagggctgtggggcagccactccataccaccacgctctaccaattactctctagtaaatggggtaccaactactctctagtaaatgcagtatcactgtgttgcccaggctggtcttgaactcctggtctcaagtgatctacccacctcggcctcccaaagagctgggattacatgtgttagctactacacctggccttgttcctttcaagtagggcctcttcactggtgttggtcccaaagtcaagtctttgttgatactggcctcattgcccttttctactcctctgcagaccacatctcactgatcacaggagtccttccctaacctatagcatctttggataattatctatcttgcctgtggcactgatgatcaatctc

SEQ ID NO: 25163 - DNA, 1083 bp, Homo sapiens
tggtgggactctgagtgtagactagcttgagaattaagaactcttttctgcagacaaaccagaccagaatttcattttaaggacagagccttgggagccgattattttgattaaaatccctgctcatctataaaatggttaataataatacctaatttataaagtttagaggattgaatagggtaatcatgtaaagtttgagagcagttctactacagattaactagtaatgtggttgtatgtcactttggctcgtggtttggctttttgtgttttagaataactatcaatcagtagcaaaatgggatttctttttcagtcattaaaaaatagctgtgatttattgagtgattactgtatgcctggcattattctaagaatctcaatgttttagatcatttagtttgtataagaactttaggatcagatttagctattattatgactccatcttacatggtgggaaactgagacttagattaagtgacgtgggcagggccacatagctcttaatgctaaagccagtcagtaggaccaatttaggttccagattgtatgctcttaaactccaaggtataaggaaaacacaccatttggaagagatgatgaagattccctggtgacatcctactggcaccggtggagcgagcatatgtgcaggaagcatttgggaggttagtgagcactggcatgggcagggagcttgtcaggagggagtcaggttgggagctggctttgaggattgggaaggaattgaatgggttggtggaggcaggtgtgtgtctcaggctaaggtgtgatggtagcattgccctcaggctccacctacatccccttgcccttagggggcattccagcaggcttctagcctccagaccctgcatttctttgatgaagtgctttctctggccccggatgtcctctttgccttctatgacaacacagcaacgacagagagtcaaggcagactcccttgccctgtgggcataacactgaatcatatctatgcctatatctatatctatataatctgtatctatatctatatatctatatcatctgtatctatatctatatatctat

SEQ ID NO: 25164 - DNA, 1046 bp, Homo sapiens
tactcttgaagatgtcgaacataaatatttctgttagaatgagaagtagcatttgcctcatgggagtttgtcttgaagcgagtatgtcttatatatgtactaattcttaattgatggtttttcacatgcattttgtgttttaggttcagccgtctgtatatctccccagatacctgaaactgaccacctgagtacgttttcccattgctgagctgtttccctgatatctggccatgcaacggagatcaagagggataaatactggacttattctactcctttctcaaatcttccatgttgggatcaacaatattccacctgtcaccctagcaactttggccctcaacatctggttcttcttgaaccctcagaagccactgtatagctcctgccttagtgtggagaagtgttaccagcaaaaagactggcagcgtttactgctctctccccttcaccatgctgatgattggcatttgtatttcaatatggcatccatgctctggaaaggaataaatctagaaagaagactgggaagtagatggtttgcctatgttatcaccgcattttctgtacttactggagtggtatacctgctcttgcaatttgctgttgccgaatttatggatgaacctgacttcaaaaggagctgtgctgtaggtttctcaggtaagggagacaaaattttgaggttgcatgcataaaggaagcaagggaggtgtggctgctgtcattttatgaagtgtgggtccctatcaaattctgagtggttaagggctgctgaggctttgcgtcttgaagaggaggctggagcatgcagggactagtttttgccattctacattatgctgcattattcactcttagtctgcactaggacctgctggaaggtggttttgtagaagacatagtattggaaatatgcaccagctccttatggtagggtcacagaaagacccacagatgtatttgtaatagggagttctcaaaaaagatgactgtgcttgtgaagtaggctcagtgtgctgtctctgattaccaacttgtct

SEQ ID NO: 25165 - DNA, 1042 bp, Homo sapiens
ccctctgaattaatatctcctttcctcattagcacataaggactcattcatgttcagccccatggtgggcactgaggatacagtaacaagacaatcaccatttggcatcttttcttattttgaggataattattatacctaaaataatgttatgccttactcgcttgtctttgcttatacaaaacaggaagtataaaacaacagtccatagctgtgttctagaaccttttccttgtgcctttaggcagctctggatatcaggattattatccgcatggcaggccagatcactatgaagaagcacccaggaactatgacacgtacacagcaggactgagtgaagaagaacagctcgagagagcattacaagccagcctctgggaccgaggtaggagtcttgcgcccttcagttattttaaagcatacctcatgtggtaaggtagtctgaaaaagagctatttgtagcaaattaaattttaaacagttcagaaaaaggatatgtagatgaaaactgtgtgcagattgtgattacaaagaatggggtgtgatgccatattcccagcaacctaagctaataaggtgccagactgtgtatgtattgttaaagtggttctttttatagtcctgctgtacttgatgctttggcattaaagtcaagaaacttaaaattcttagatgcatgataaaaaaaagagagattttctttggaattcatatttgtaaagaaggctcagtgtcactaagtatcaaaatattgcccataaacctccgacaaatctccctcagcatcacataggctaagaattcaagctcagatttgacttctgctgaaccaatctgtctgggggtagagcctagaaatttgtgttttgaacaggctttccaggagattcttttataaaccgatatctgaaaaaacactgtatatattttgccatgtttgttctaggtttggattatgagtttgggtattactgtttttattgtttgagtagcgactaaaaatcaactgttcatttaaagggcatttgttaaagtttta

SEQ ID NO: 25166 - DNA, 1020 bp, Homo sapiens
cccctattttaaattattttatattttttcttcttacccttaaaacatttcagttaagaaatgaataatttttactttaaaaaaaagatttttacacatcagatgctataagactcgcttggtgagaagagtatttctgggattattttgaagccaagggttttgtttctacctctgtctaactagttgcttggtttgaaaaaatctagcttctactttgtgagtatggagttacgttctaaaactcctcacagtagaagattgctaagactaaatgatccagagtttgtgctgaattacttttgctatctgaccttttattttaacaaaatcataggtttttttcttccctttttttccttcctcctacacatgtattttcagaatttaaaacagtctcttctttccattcatgaaaaatcacaaaagtatgtagaacttgtttgtctctcaaatggccacttggtacatcttaaacagagtggccttggttaggattttgaattacggtgaatgaaatataaaaataaataattttaaaaagaaaagaaatcataaaagttaatagttaattgatgatttttgaatataggactttctaaacagaaaagtaatgaaaaaattgtggaagatagaccattgaaaactttgacaaagaattaatataatcagcatgtaaactcatgcaatgaagtaattaatactaactcctattaggaaaatagaaaataattttaacatataatccaaagacttataagtgaccagtgtgcatctaaaaataatttgctgtatattagcaaagagttagtttgttcatctcactacatttattttttttaatttttaatttttgtggatacatagcaggtgtatatatttatggggtacatgagaattttaatacaggcatgcagtgtataatacatcagggtaaatggagtatccatcacctcaagcatttgtcctttctttgtgttacaaacaatccagttctactcttttagttatttttaaatg

SEQ ID NO: 25167 - DNA, 1038 bp, Homo sapiens
ataaatgaattcagtaaagtcttaggttataaaactaatgtatacaaatcagtagcactgctacacaccaacagccactaagctgagaatcaaatccaaaactcaaccccttttatgatagctgcaaacaaacaaaacaaaaaacaaaacaaaacaaaacaaactggggataaacttaacaaaggaggtctctacaaggaaaactataaaatactactcaaataaatcatagatgatacaaacaaacaaatgtatgtcccatgttcaggtattggaagaatcaatatcatgaaaatgaccataatgcctaaagcaatctgcatattcaatgcaattcctatcaagatactaacactgtttttcacagaaatgtaaaaaataacccaaaaattcatatggaaccaaaaaagagcctgaatgccaaagcagtccgaagcaaaaagaacaatccagaggcatcacattacctgacttcaaattacactacaaggatgtagtaactaaaacagcatggtactgctgtaaaagtcgatacaaagaccaatggaacagaatagagaacccagaaataaagccaaatacttaaaaccagctgatcttcaacaaaacttaaacattaattgaggaatggacaccctattcaataaatggtgctgggaaaacagccacatgcagaatatgaaactatccctatctctcaccatataaaaaattaaaatcaattagagacttaaatcttaagacctgaaaccataagaattctagaagaaaacctaggaaaaacttccctggacattggcctaggcaaagaatttatgactaagaccccaaaagcaaatgcaacaaaaacaaaaataaataaatgggagccagttaaattaagtttctgcatggcaaaagaaataattatcagagtaaaatacaacccacagaatgggaggaaatatttgcaaattatgtatctgacaaaggactaatatccagaatctacaatgaattcgaacaaatcaacaagaaaaaaaaataaacctgtcaaaa

SEQ ID NO: 25168 - DNA, 1033 bp, Homo sapiens
attgttgggattcgatcaggctggtgcaatacctcaggcagtaccattcaggacgtagttatgggcaaagatttcatgatgaagatgccaaaagcagttgcaacaaaagtgacgcttgaaaaaaggatctaaaagagcttctgcacaccaaaagaaactatctaattgtacgcatcaaacatgtctgtaacattttaaaaggctttgtcttaatatttatatcttcaattatgaattgtctcttttggtatttataaagagccacgttgttaaaaatattaggtgtataactgccatttaagtcttgggaagggatatattactaagatcatttgcttaatttatttgcttgtgtgtgtgtgtgtatctcatgacatgattatatgcccacaattatatatgattattataattcattaaaaattttaattaaaaagtaattcaaattgtttctaaagtagatagatgatggagagtgagataggcagtactgttttcaaatagaactgtaatatgctagcactgaaagcaaacttagaggtcatcatatctgacacgttggtttcagatcaggaaacagagaaaacaagaggcttaattctctgtcacagtatactggcccattaactgtgaccaggattactattgacagtgtcctgccctaggaatacagatgtgaagtaggttggttccctaggttggtctgtgggcagcctgggagtcagaacctctctggaaagtgctagattagactcacattttctttttccttttttttttttttgagatggaatctcgctctattgcccaggctggagtgcagtggcatgatctcggctcactgcaacctccacctctcaggttcaagcaatcctcctgcctcagcccgcctagtagctgggattacaggcatgcaccaccatgcccagcaaagcttttttgttgttgtttgtttgtttgtttgtttttagtagagatggggtttctgttggccaggctggtctcaaactcccgatctcaggtgatccacccg

SEQ ID NO: 25169 - DNA, 1061 bp, Homo sapiens
aacatcctttgttgtataaatcaatgtttaaagtctaagttttggacaatctgggtattgatgccaaatttgaattagtgagttcctggccatggtctattgatggatttttgtttccccttgaatgtgatgagaccttagtgaaggattttcatagaggagcgaggggagcaaagaaaatagataaaagcccaggaatagggagacagtctgttggaggaactaggttggttgtggttacaatgtatttttcatggggagatttgtggggaggattgcaatttatcagagggcagagataagtaggaatcaagttgtgaagggctcagtatgatgtgtttgaaggttttgtgtttaatcctgaggacagtggaaacaagatcaaatctgattattattattattattattattattattatactttaagttctgggatacatgtgcagaatgtgcaggtttgttacataggtatacatgtgccatggtgctttgctgcacccatcaacctgtcattctcattaggtatttctcctaatggtatccctcccctagcctcccacgccctgacaggcccgggtgtgtgatgttcccctccttatgtccatgtgttctcattgctcaactcccacttatgagtgagaacatatggtgtttggtttcctgttcctgtgttagtttgctgaaaatgatggtttccagcttcatccatgtccctgcaacagacatgaactcatccttttttatggctacatagtattccatggtttatatgtgccacattttctttatccagcctatcgttgatgggcctttgggttggttccaagtctttgctattgtgagtagtgccgcggtaaacatacgtctgcatgtgtctatagtagaatgatttataatcctttgggtatatacccagtactgggattgctgagtccaatggtatttctggttctagatccttgaggaatcaccacactgtcttccacaatggttgaactaatttacactcccaccaacagtgtaaaagtgttcctgtttctccacatcctctccagcat

SEQ ID NO: 25170 - DNA, 1032 bp, Homo sapiens
gacaccagcaatgtaggttcccagccccttcccagtggcagcttgtgtgtccaggagataggacatcatttaacgcatcagcaaagtagcagcagatgccacatacagagtagagcgaaggcatttggtggatcggtcactagagatctatcttgcagaaagtatgtttttcctcataaaagtgcctcttaattggccattgtaccagccacttgtcctagccaaatgtccaaaacacgcccttgggccccgccacgttacaatccacagattgtctgtctgagtcgtttaaggcatttcctggtgcttgtgttccatgaataaaaggacaaagtcagaagatcactgatgtcttactgtcaacagagatattttaaaagagagaagcaggaaaagatcttccttttttgatctacaacttatatagttttctgattatgcacataatagatatgccttccagatgcataaggcaaacatctggaaagaaatatacccaaatcttagcaggggttatctttgggagtggagtacatgggattttgctttcttcatttttataattttatattactgtcttggaagatgtgtttatgtgtgtgtgttacttttacaatcaggaaaacatatttaataacatatagtcaagaaaacagacttaaaaataaatactatgtgtccattgagaaaattcacaatataaacagaaatacaaataaatacatacacaattttaaagtcacctgtagccctacccttagaggtacccagggttaacattttggtggtattgtcttatcaatttttccgttgatacattcagcaaatttggagcacattgaccatggagttttgtgtccaaatccaatctgaatttacctggaagaggccttgacacctgcatggaaatgagctaagaaaaccactggagccttgggagctctttggcctcctggctggcccagtaatatctgagctcctttggttaatttataactgatataaaactacatcttctttataatataaatt

SEQ ID NO: 25171 - DNA, 1059 bp, Homo sapiens
taatttgacaagcattgtaattttctaagttatgtacaggaaaaattgaaaacacatcacaaaacggaaaataattggaaaaaggaatggggcaagggaaatatattgaaaaccaacacaccacaccttgcctttcattttaaactagaaatcaaattatcactagcatccagacaggtaagaggtttagtattacattggccaagtaaattccaaaaaggtctctctttttcttgtctgaaaatggtgacaacatatttatagcagacagaagtgctccatatagtgcctggtacagaatgcatatccagcgtttttagtctagtgattattattattattattattattttgagatggagtcttgctctgtcacccaggttggagtgcagtggcgcaatctcggctcactgcaagctccacctcccaggttcaagtgatcctcctgcctcagcctcccgagtagctgggattacaggcacctgccactatgcccgcctaatttttgtatttttagaagagacggggtctcaccatgttggtcaggctggtcttgaactcctgacccgaagtgatccgctcaccttggcctcccaaagtgttgggattataggcgtgagcccctgcacccggcctagcgactattattttattatcattactattcaaggccagacgctaagatagaagacataggcgctgggctaggtgctgggactcattggtaaacaaaatagtctgaatccccagccatgatggagttagaaggcagcagcccagtgaagagacaaatgtgtaacatcagattgtggtgctgcaggagaggatggggtgtggtgatggagaaggagactttttaacatttggtagaggtggtcagggaagcagactgaggctggacatggtgacaaccttgtgaagcactgagggatgtggtccaggacagggcctctcagaagtggagagaggccacacactaccaattttaccacttctgggttgtcaaagaataaaaccaggccaggcacagtggctcagccctgtaatcccagcactttg

SEQ ID NO: 25172 - DNA, 1036 bp, Homo sapiens
gaaggagtggagctgatacaaactgatacagaaatgctctttttctcttctcagcagttttaactatttgcaaaagctttattgtccgggatttttacagtgacttttggagtatgagcagggaccttgaaactcagaggaggtacagaaatagaaaacaatgtcatggtaatgaggttgcttgaaaatgacagttttcataacatatcatgagttgcataaggatacctacattacactttttctgtaaagttctaaactttcgtctctgactcattagagtgtttaccttttgagagaggaaaaagagttggatcagggatggtccacagggactcatcaagtataactgtagtgtgttctttttaacgaaaacaaaactaagaaaaaagagcaaaatttgataaactactgggcatgtgccctgccactgatcatatttttctctatatgatgttgtatattatactacttcataattttgaaaattaatcaaaataaagcagactgcagaactataagtatactataatttcactattaaaaaaatagatacagaaatggataaatattatatgtacctgaatatgcatggaaagatatacctcaaactgttaatagtagatatctcttacagttagaatggggcaaaaagatattttagagctctgacattaaggaagacctccttccccctgccaggcccctaagtaaaaaaaacaaaacaaacaaacaaacaaacaaaaaaacaggctcctttaataagccgatgagaggaaaactacaaagctctaattccagaagaattttaggatagttttttctgtttctgtgaaaaatggcattggtatcttgataggaattgcactgaatctgtagattgctttgggtagtatggtcattttaactagattagttcttctgatccatgagcatgggatgtctttccatttgtttgtgtgctcttcaatttctttcaccagtgttttatagtttttcttgcagggatctttcaccttgttggttaaatgtattc

SEQ ID NO: 25173 - DNA, 1064 bp, Homo sapiens
atacacaagaatcgtcaatagttaggaattaatctggaaagagcaaaatcagttggcatatataaaatctgacctgattttggaggagaagagtaaaggcattgagtggtttcagaaatggaactatctccaagccatgccagctttatacagaagccatcaaatggcatcctccacaggatgccaaattctacagcagttatatccaaagtgtacagccagagctggaggagtagaagaaatatctagctagatccacccttaacacagattatacttagaaagcagcagccttagaatctgaaggatgacacaaaagccatgaatgtctagcagaaggccctagacctgtaattctaccgtaaagaagtagcagatggttattggtgcccagttcaattgatatgacaacgctaaggatgtgaagcaaaaaaccatagctatatgacatatcctaaaacaaatgcagaagggctcccagggactcagtgaatatttaaaagggtcctgtggaagcttagaaaatcaagaacttcatgaatatgggtctgatcacactttggtgatggtttcttgagctctttttccttcctcatcacttctggaaagaggagctgggactgcaatgagcagaatggagcaaaagtctggagagaagaggaaaagctgaattgtatatatgtttacacattcatgcatggaaaattcagagatggacacttgcgttctttgtacagctacagttttatggccctcttagcacaagcatggtctcgtcactcctgacaaattgggctatgtgtccttcccaaaacccgcagtcactggcttaactgttctccccatgattcgtgattttaaattttggacaatgcacatgttggggagggaagatatttatcccaactgttcagtctacattgataatttgtacctttcccccttctgcataaaagtcccacagaaaatgggggtgagtatagaggaaaaacacgaaggctctgagtagattcctgaagaagaggtgggctttgaacagattgagagaatcagccatcaaaaaa

SEQ ID NO: 25174 - DNA, 1102 bp, Homo sapiens
ttattctttcagatgtaatacacattggatgacatttagcctgatgttagttttgccttgacgttgagaatgttgagccctcattccactgtcgtagtctgtatgtcagttaaatacctcacaatagataatcatactgtaatgttaaacagctccctgaaaatactgacacagatcttaagagtttaggttagaaccataagaattggttcattcagctttcagaaagcactggcaggggagtcaaatgaaattgtgaatctcagcccacacatgaaagaacgattaagattattgtcactaagaagcccagaaatggttatcagccattgataatttaagaagtgtccttgccttcttttgctgtattcacagatttgggaatatttttatgctttagtcatttaactagagaacatatgcttactataattaaacaatcaaaatgctttgttaccattttctaagactaattcatccttaaatcagtgtcatttattcgtcataaacttcaacttcattggctttacgaagtgtttgaaatggtgtttttatggaatcacacttttgattcatgtgtttaaactttgacatctgtatgtgagaattccctgtcctactcttctaatcatccataagtcgacagcagtgttgtttcttagaagttggtttattgaattggaatataaacacgaagtaaagaatgctgcttctccatgggaggggttgaacacattcattgctgtagttctcttccctctctacagttctttcatattcagtttatttattttgatgtttagggttacaaagttataagtgctgccttgtagctagtttttggaaacaattcaaaatatttattctttgactgttttcttgtggggagagtgaagggtgggaaaggggcaagaacactaagaaaattaagataaagactgctcagctgaagttttataaaaatctgacttgagtgtttttctcttcatttgctgtgcttgtgtaaacagtgtgacaccatcgccacaacaggctcgggtctgtcctccccatatgttacctgaagatggagctaatctttcctctgctcgtggcattttgt

SEQ ID NO: 25175 - DNA, 1075 bp, Homo sapiens
acttaggatctcagtgttgagcaagattttatcagaattttaagtgccaaatcagtttttatttcctttgtgagaagtatctggcatgacttttcagatataagaaataggaatgtgaaatttggataatgttctacttgcatgattataaaataatactgcttataaaattttaagtgcttctatgttccttgctctgtagatcattttttcttttctattttattactcttggctattatgctaatgcaataccttatctttggtcatatgccatcacattaggtgtagttaatttaaactagaactatttggcagaaaaagaaaaaagctttctgcttgctttatcactatgaagtaatgcagattcacaattccttgacataagaactgtgttcagtttacattttaaaggacgctgtcaaaaggtttgtgtaccatatatttttttcttacaagaatgtagatgatctaaaccaaactcaacgtgaaaaccaagttaaatcctaggtacatgttagaaaagtttatttacacaggtgagtgttacgcatttggagaactgatacactgaaaatttaccaaagcaccaggtgtgtcatttgctcaggtgcagcagaaattaaaatactattatgatttggtccttaactggttagaaaatgccggtctctccctgtatctgttagagctatgtatctcattttacaatgtaaaatattcgcatcttcaaaaagaaacttagttcctgtgtaagaaccttatttaaatattgatagatgagtcatgcttagctctcatttttacgaggggcttgattatttttatgcagtttttccttaacagattgtaccagctttgagtgcatagaataagaaaccaatgtatgaataatttatatttttggcaagtatccctataaatatacagcttggaagacctagaaatccagagttgcagtggatacagcgtttgttatttataatttttctctttaaaaaagtgtataattcctgatccccaattaaactttattttctgtagcagattacatttttatagcaaagaaacacat

SEQ ID NO: 25176 - DNA, 1034 bp, Homo sapiens
tttagattttgtccactacttttttttttttttttttttttgagacagagtctcgctgttgcccaggttggagtgcaggggcgcgatctctgctcactgcaagctctgcctcccgggttcacgccattttcctgcctcagcctcccacgtagctgggactacaggcgcccgccaccttgccccgctaattttttgtatttttagtaaagacggggtttcaccatgtcagccaggatggtctcgatctcctgacctcgtgatctgcccgcttcggcctcccaaagtgctgagattacaggcgtgagccaccgcacccagccttgtccactacttttaactagaatgccttaattaggtttaagtcataacttgaatattattttttagatgcttgctctaagtgttacaaggaccttatggtgtagtatttgtggctttcccagaaactcagaataacaatagggatttatatcatgcttattattatatatagaaagctaaatatattcagttttttaatgttggactctggatagacgaatattttggactagccaacatatacggtgtcttggcatcaatagtttgtagatttgataacctactaaaggcaccttccttccatctgttctagattttaaatgtataattttatgctatgaaacatatgtaatatttttagtaaataactaggatgggctagatctaaatgtcaactttattactttctgccagtattattggcaactacataaacttccacaggttattaaaaatatttttaccagcttctcccacagcaggagaaaaacaattaataaaactaactaaataagctttcctacttactcatccagcacagattgttatttgaattgaacaaatggttatttgcaagattgtttgaggcctagttaagagcagcacactgatggacatatggaatgagccacaccatctggttacagtcatacctgggtggtggtcattaaaactaaatctcctggggatctgcagatgtcttaattatacta

SEQ ID NO: 25177 - DNA, 1085 bp, Homo sapiens
atgtgggaaacatctgtgtatggtcttctgcatatataatttaattctgtcttaatacttgcattgtagttgaacatcctattgccaaagaaagtcatgctccaagcccagaatcagagtgagaggggctaccaagttacagggcaaagggcatggatacaatcacacaactgatggcaatacgaattgtattttagtcatcaataaagtatatctgtattggtagctgtggtaagcaaataatgttattactatttatagatatgcatagagaccatacttacagagtagatcattagtttctacagatgtggtttacaaatttcttgactattactttagtgtttatagacttctacagtgtgtttggtggaggagatatgtatatcattaagttacagcacataatatgccagatgctagtaaaatatttcgcattggagcactttgtatttatttgctgaagtaatttttgtcatttttttcagaaccagaatatttcacaaaaagtttccatgtatttcttttgtatcatacagttactttaaaaaaaaacctgtagtgatcttggcactgtagctcccctgtaatcccagcactttgggaggtggaggtgggaggatcccttgaggccaggaattcgagatcaacctaggcaacaaagcgagatcccatctctccaaaaatttaaaaattagccaggcgtggtggtacacatctgtagtcccggctacccaggaggctgaggtgggagcattgcttgagccctggagttcaaggctgcagtaagtcatgatcatgcaactgcacaccagcctcggtgaccaagcgagatactgtctcaaaaaaaaaaaaaaaaaaatctatagtgattttctgtatgtcctcatttgtgatgtcatgggcaaattatggttttctagttaaaggaagttggattaacttctgattataaagttaacggaaggtggactggtgaacactgctgtaagtagataattcaatggagaagaaaatttagaaataattttattttgaaatatgtatagtttatgttttctagttgtaagttaaccttcctaata

SEQ ID NO: 25178 - DNA, 1445 bp, Homo sapiens
gaccccaactctcttttttcacctcttgcgtttgagtgctggtaaaaagagttggtgggagagccaataaatagagtaaaacttgtgtaatttatgaatatattctggttttatctccattttaggattattgaaatgtaatgcaaaattactgataaccaccaaattcttttgtaaatttgcaacttatttcttgttccctttgtttttctctctttaaatgcagtttgtgagtcttcacaggtaatgttggacttttctttgtagccctattggccaaaaatggttagacaagtcactgcaactctacagactaatttgtaccatggttgcactaatactttcaacagctcccttaaaatgcactttgaaaacaatagccatcatttaattgtaggatatgcagtaaaggaaaagaatcttatattttgatcagattgatagaaagtggttaatcttaactgttttgttccttgtctgaagaaagaatgaaatagctacatgtaggctgtgagtcaggctgcctgagaggagttgttttttagtctgaagttcttaattacaaatgactgctcagattaccttttttttctttactttatttgacttttggtttcattacaggagaataaaatgtatatgcctgttacaagaagaaactactgaattactcatttatttttccttctactatggttgataccatcttttgacgttttgccttggagtagtttttagttaaatactaggtcatggtttaactgaaatgtctttttccagagcctttccaagcattcagaatccttagttttccatatatagttcagaaagtcattgattgccaatttcttctcatcctgatattcttgttaattttaaaaaaaattaggtgaaaattttatcctgaacagtttgatacgactgatggaaccattaatggcaaatgataattattcacatatgccagtctggttcattagcattgttttgtagggaaactttttcttttgtagataatttagtgtgacttaaaagccagaagcctttagtcttcatgtgagcattcaggctgaggtatagtatttgtggatgtgtgttgctgggtggggtcattattgggttcagaaaaagtcatcttctacagaaagacgcatgaagctagaaataaaattcacctactgaatttggttattttgcctgatgataaacatcatatcccaaaacctgtgcactgtaaactgtaattgatttttgtcacattctatactgtaggatctaaacccaactgccttgcaactcaggtaacacaaatgagtagtataatgttgtgtttaaagaactatggtgccctttttaaaggggatgttctaatctgttaccacatggaaataggggtttaggatactagatatattgattttttttttttaataagagaagctaga

SEQ ID NO: 25179 - DNA, 1060 bp, Homo sapiens
ttttacaaaattggaaaacgtcacttgtagtcaaaagccattgccagtcattgattttaatgttgtaagattgcttataggacatttaatttaggaagaaatgatcatacagtctatgagagggtactaggaaaagcttagaaatttcaagtgctctgtttattctgttacaggtggaagtgctgcatcagtaaatgctaattttgctcattttgataacttccccaaatcctccagtgctgattttggaaccttcaatacttcccagagtcatcaaacagcatcagctgttagtaaagtttcaacgaacaaagctggtttacagactgcagacaaatatgcagcacttgctaatttagacaatatcttcagtgccgggcaaggtatcaagctttaagcaaaacaaatacaaatttgtgttaaacagtgctcttaatttggttgtatttattaaaatctgaacatgctacacttttctcagttgttgtatagaaattttgtctgcactgtcattttgagtaaaatgttcacttgacacattttagacctgaaatatcaactacaaaactgaagacatagggactgatttgtaaactttcagtcttactagttgagaaaaattttattttgtcctagaaggcgtgctttacttttctttggctataaagagccaagaaaccccattggcagagctgaatggaggattatttggtggtttctgtaatatatttacttcgaacaattttccgttaacatcttggtgggttttttatatttaaaaaaaaaaattcatgaattttacagtatagtcttgtatccagttttatcttaaggctagtagcctctacaaatgcatgtggcactggtgaatagcaggtgtgtgttgctaaatggaattctccattctgatctctgggcctgttttcctcctctccaaaatgaggataattctaagcattaaactcatggagttgtgttctaagtattattgcatgttaaggcatatagaacagtgcctagcacatagtaagtcctcaataaatgtttcccgttattacca

SEQ ID NO: 25180 - DNA, 1938 bp, Homo sapiens
gcattgatacatgctacaacatggatgaaccttgaaaacattctgctgagcagaagaaactcgtcacaaaaggccacatatttgtggtggccatttgtatgaaatgtccagaattggaaagaaaaagtagatcaatgattgccagggggtagggttttagtagtggtggggcagcatgggaagtgacagctgataggtatcacatttcttttgagggggatgaaaatattctaaaattagattctgatggtggttgtacatccctgtgaatatatttaaagaatcattgaattctgtaagtgaatgaattgtgtgtagtatgtgaactatatttcagaaagctgtaaaaagtctaaaaaaagtttagagcagttcaggaccagagcttggggggcatctttgttgcagactgaggtatagtgattaatattggttaacagtcactgttggctaaaagtcagtttttgccagtgcgttttgtgaaacatgtctcctgtaatgttgttagcaaaattctgtggaaaagtgttctatgtctaaatacatatgagaaatgctggaataaacacagtttaatcaatgtcattaatgcaagactgctctgagcctgtaaagtgctttaagataaagtagataaggccgggtgcagtggctcacgcctgtaatcccagcactttgggaggccgaggcaggcggatcacgaggtcaggagatcgagaccatcctggctaacacggtgaaaccccgtctctactaaaaatacaaaaaattagctgggcatggtggtgggcacctgtagtcccagctacttgggaggctgaggcaggagaatggcgtgaacccgggaggtggagcttgcagtgagccgagatcacaccactgcactccatcctgggcgacagagcgagactccgtctcaaaaagaaaaaaaagaaagtagataaatataagggccacattaatttttcacaggcccttctccctcagttaacctttttttttttgtatttggaacacagtgacacttttttaagttagcaagaaagttacattcattgagtatttattgcaaagcactctaattcgttgttacatttattcttcacagcagctttgtgaagtatagatactattgtctctatccctccacctcatttgcaaatgaggaaactgaagcttataaaataaagtaacatcatgcagccagaaaatgacagaaccacaactcagaaccattcaattttttaatcattcttatgccaatttaaaaagtattctaattttaaatccatggaaatatattttagacacaatcttcagattgttaaaccgaacaaacaaaaggtactagtatttaacaatttaagtttactttctattaactttatatgtaacctgtctgtcctcaaacatgccaggtgagtaagatctgtacaagatgcctttttcttttttctctcttcttttcagccattgtattttaacctgtaaataccgcttacctttctcttgaactagaatatttaataatttttcccttgtaatacttaattagttcatttgagttatttgtgtatttctagttaatgtgctgatttgtaaataaaacaatctagcattgttcatgcactctctcccaagacttggttttgatcctaaatgtagatgctggataatctcatatgatcctatgaatagcgtatttagatgtagcttatgatgcctacaaagcattttttaatgactgtaaaaaagttgatgcctatttgtttaaaaaattgatttcatcactgtttcttaatttgttatttattattctaatctcccctttattttaaacagtataaatattacaggtcatgaagatggttgaaattaaaagtcttattttgtgaatgtgtttttgttatgtattatgctacccccttagcaacagta

SEQ ID NO: 25181 - DNA, 1038 bp, Homo sapiens
aagggtctccagactctttgagaaccactatactttaaatttgtgtatttctagaacagtatttacttgcagggcaaacataactattccctgggttttttttgtttgctagtgagaactgaaattgcagactttttaacactacttcaaggtaataatagcagtggtattatgggctgtgtatgagatagtcatttgtaaaacaattttcatatttcatctcttacaatccctgcagtggacctatacttttaggatgaaagaagcaaagcatagagaggttaagctagtggcagctttttgctctggggaacagatttggattaaatgctatcacatttatatatgaatgcattctttcttaatattttgaaattctgaacaagttaacgttcttgtcttgtatatctaaaaaaactttaatcacttgaattcctttcataatttgatgaaatcagtacagtttattcttggtttttttttttaactttagaagtaaattaatatggtaactagtggagcgtgctttagattgaagactcatctgaagtatcacagactcctattttgtaaagcattccacctttattgatacagtttgtggcctatacacttttaaaatttattttttaaaaggtgatattaaaatttgtatttaacctgttgtattcatcctcattagttaagtttttctttttatgttttaaaacttagtgacattaaacttttcacgtggttgtttgtgaacagatgaatatataaccacgatgtaatccagtgttgtgctgctgaatgtttaacaaccatctttcatgaaagaaaaaaggccctgttttgtagcatttactaatatttatggtataaatactgtcttcatggtgattttacctgccaatctgatgtcattaaatgcagtttgatgaaagagatagccaaccagtggctttcccaagccttggcaaaccagcttcagcacagcaaaggacatacaattccacaactcattaattaaatgtattggtcatttgatgattatat

SEQ ID NO: 25182 - DNA, 1058 bp, Homo sapiens
agaaaaagaggcactgatttaggctctgtctatgttacgtaaatcatttttgtatatagcttttaatttgttatactaaaatcactctggagaatcttaaaaaggagattgagaaaaaaattctgtgaaagtacatttgaattaagttccttgtggtgtgtgtgtagttttatacatgtgttgctaggagtcaggagttcgtgcagtgagtgatttatttatttaaaaagtagagaaatatgctggtatcagcgtcacacaggtaaagtcattaggcgatgccgtgcaatgaagataaatgcaaaggcagtagacttcctctggaagatattgtggaagaggaaaattggaagagcacaggttttgctatcaccatgaagtcagtcactggaagaggaaggaagctctgcagatgacaaaagcacctgaggacacccgaaatatctcttggtgctggtgcacatttgagcagtagctcagaggagtggcatcattgaggaggaggatacatgtgttaagcaccctgctggccaaggtatggcccggatgttggaaactggctgtagagccgcagtggttcctgatattaaagaaatgttgtttaaagctgtttttcttacaccctatttgcctttgaaattttaaaagcattcactttacacatctgttttgcctttttacaaaactttttttaaagagagccctctgccaccaaaatatgcttgacctcatcatcctgagatcactgctatcaaaatatttggtgtatattttttccctagctaatttgtgtgtgtatatacattctatataattgttttattgtgtacaatttgtgtaactattatctgctttaaaggtttaacagtacctttttctgtcattaaatagtgtgcaaaagcatgtgtagtaactgcactatatgactgtctctggtcagagcataaatttcttcactggtctcctgtacagcggtctgcaaacttttaagtggctagctaatacatatttttagactttgctggtgatatggtctctgtcctaactactggactctg

SEQ ID NO: 25183 - DNA, 1035 bp, Homo sapiens
tttcatgtttcttgaattactagtgaggttggtcatcttttcatgctttgtgaattaccttttcatgagatttactcttccctagtatactcatgtttaaaaaattgtttttagaccttgtaggaaaaccatgttatgtatttttcatgtttcaatttactgttttgatttttacataagttttatatttgtgtaaagtcacagctgtccatcttttctataattttttttcatttatttggtaccaaaggcaatcttttctgtaatttgcaagtttgatcatgcttaagaaaccctttactaaaccactgttatgaaaatagaaacctgtgtgttctcatagtatttctgtggtttagttttgtatcaatattggaggttgatacaattttttaacttttggggaaagttattaggagtaatactagagagaaagtccagtgtttataggataatacacatttctcatggaaatttagaagtcaaggatatgaagcttgtatcaaaagcctaaacgggctgggcatggtggcacatgactgtagtcccagctacttgggaggctgaggtgggagggtcgcttgagcccaggaggctgaggttgcggtgagccgaaatcacaccactgcactccagcctgggtgacagagtgagaccctgtcttcaaaaaaaaggtgggggtgctaaacaacagtggtatgatctcttgcagcataggatgatttcagcttcaaaatttcaaaaattcacaaaagacaaaggacaactagaaggaagttagatgggtatatgtattttaaaagggacaggggagctcttataatgaagaggtggtgatagaggggtagtaggatgggtggaagatagactgagtggggggcgggcggggtgggggaagggataggccaagagtagcctatttgtgggcagacaagacaccaaaaatgccagtattctagaatgcttatactgtccaaacagcctctcctggagaagcactttgttattgctaatctgaaatttagtcatctatgt

SEQ ID NO: 25184 - DNA, 1678 bp, Homo sapiens
tgcagggggcggggggtattgggctaaagaggtattttggggccagatccttgaatgctgtagaggagctatttgagcagcattctaagagaaacttagagctcatttctcagtgactcatgagcccggaaatgtaggctaggggatattaaaggcgctcttgtgaaaggagagaggaggaggcccagtcaggagttgacattctgtgccttgaatgtaatgcagtttcagatcgattttgacagcttcccagataatcaagtaaatccatgcccaggctaagcaaagtacctttgcagaaagcttcattagatatcaggctcttaagaggtaatggaaaggtgtctataaaataagctcatctgcacacagaaggtgtttctatttgtgcgttcgctacagtgcataaaaacttcttgcactttgtattaggcgtatgtactttggaattactaagctaaacctacattctttgaggtggcatttgtgtaaaataacataaattgatgatttttaaaaaatggttagtaatattctgctgtagaaagccagacgtagaccttttacagaaaggtaaaactttgtttttatattttattttattatgaaatctttatagtagagccagaagtgaaagtgtttagctttattttgtagtttgttcaaattgttaggaagtaattagcagctgtattcgaaatctagaatatacgatctgtgaaagcagcttagggcctaagttttgtaagcttgcacttgtttgcgtgtatgacaagtgaatgccacctttttgcagtttaaaaattttctgcttttcaaaataatacatgatctttgtcaaagcttccaaaattcagggagtgctagaaaatctttaaaacattttctataatcttaccacttagatttggttactgctaacatttttgcgtattttctttccagtctttttctgtgtattttttctttgcataatgaaatatattgtatgcatatgtatacacacacacatctcttattaagcttttcttgtcattaaatatcttcatataaaaaatttttactcaacaatggaagtcttctaagcatgttatgttttcctgacaaggttgtattatttacctcagatgaaatgcagtagttaggcttaataactactagtgtggacagaactttttctgaaagtttcttgtttgaagtatgtttctttctctgtaagacttggatcctcttgcttgttgaataaagtttttcttggcaggatgtgtgttgtcatgaggtgtggaagaggaagaaagcacacagatctctgctataggagtgaatggacttttaaagggatgttgtcaaaagattactgtcatggctggtataccatcccccacagacggcgatgcagtgtcccttcccactccccacttcgctcctgaaaaatagtctctacactagggccatccatataggttaactattttttgaacatgacatcacgaagactcaggctggatataagcatagaatatttcatgaaatggtttgctactataacaaatgggtggtatttgcctttttggttttgttttgttttttgagacaggttctcactcggtcgctcaggccggagtgcagtggtgcgaacatggctcactgcaacctcaacctcctgggctcaagccat

SEQ ID NO: 25185 - DNA, 1070 bp, Homo sapiens
agtggagacggtgtttcactgtgttagccaggatggtctcaatctcctgacctcgtgatccacccacctcggcctcccaaagtgctgggattactggcgtgagccaccgcgcccggccgaaattatctcttaacaggagaactcagtttcaggtttatcagtcagttttaagaccccttacttgggttttaggaaacatcttctacctcatctttgtttaaaactaatgtgtgcctacagacataatctgttattttcagttgtatcccaccttgtgaggagtacatgaagatggcccttgctgtctagggtcatgtatgtaaatgcatttattgttaattttcaaatataggggtgcatgaatcagggtaaaatcgctcaaagattcagtagggagaaaaaactcgtgtttagattcttgccgctgggggaatgagatcagttagatcagcctgttctgattattcagcaatgagagcaggatgggataaatgatgatgataatgaagtgtgtgcctgtaggagaaatggcaactagttgcccacctggcctgggtcagtgtggttagtgggaggttgaaaagttatttatttcatgacataggcataatccccaataaatcttgagaattgtagatatttactgatttgaagtattaaatactgccaagagagacttctttacgttatcactgacaattaaaaaaaattttaaatatggaatttttttcaaccaggactaacaaatatttatgtgcaggttaccctgttgcaccctactttaagtagagggtgctctgtctttgctagattgagaaatggacatgcacaggaaagttgactagtcataggggagtcaaaatagtcacagattagtaggggtggccaagtgtcctgacttcccagacagcacacatttatgcctgttgtcctgatgtatttattcatcgtgccccccttcattctccaatttgccctagtttggatgataaattgtcatctgaccattcagcagttgcaagactagctgttttttgaccccctcctctcatttttttggtgttaaagat

SEQ ID NO: 25186 - DNA, 1105 bp, Homo sapiens
aatcgtgaactgaatatacatggaagagttgagtaaagtttgctgtgacaaccaagtttagtgatggagtgaacaatggatccattcactgggaaggggaacattgaaaaagaagcaggacttagatgaaatttggattgcctggaggacatctatagggagcagcagttggaaaggtaggccattggtcgggctagaaatggatttcagattgttgaaaccatagatgagatcacccagagggaatatagggtgaggtgacagccaagagtggaaccttgaaggacatcaacattggagtagagtcattgaattaaatgcagaaaggaaaataaataaataaatagatgcaggaaaggaaagggcattgggagagagaagaaaacaactagcggagagcagtgcatgaatgcgaaagggggaagctaaatgtccatgcggattcagcttgcagtgttgtaactgttcattttatatgaaagtaatatgttaacagccccccacataccaccactttgggattcaagtatacaccaataattaccatcagaaggaagcctgtccccatagcaggtacggattgccacaacccactttagaatcctgtcactgtctggctttgtcccagtcacattaatacttttggcttagcccaaggaatcctgctgaggtttattataaaccattttttggccagacgtggtggctcacacctgtaatcccagcactttgggaggctgaggtgggtagatcacgaggtcaggagttcaagaccagcctggccaacatggtgaaaccccgtctctacaacaaaaattagccaggcatggtggtacgtgcctctagtcccagctactggggaggctgaggcagaattgcttgaacccaggaggtggaggttatagcaagctgagatcgcaccactgcactccatcctgagtgacagagcaagactccatctcaaaaaaaaaaaaaaaagaaaagaaaaaaccattttttaatggacaagggaattgtatttgaaagccaaatgaattattttattaaaatatctatttctgttcattttcttcgtgaacttcagttatgtccaaaacatagttaa

SEQ ID NO: 25187 - DNA, 1005 bp, Homo sapiens
gccagataattcaagtctgaatagtgtgtctgtctgtcttccaataacaaaagcagttagttgaacttatagctgaaataatcacacaagggcttttctttaagataaccattctataaggagccaaaggtactttatatgtacatgccatttgttaactccaagtgttaaaaatattgtatgtatattcaaaggtcaagatttaataaaattaaatttttactgcttcaggaacattcctaagttggacctttttttttccttttttgagacggagtctcgctctgtcgccaggctggagtgcagtggcgcagtcttggctcactgcagcctctgcctcctgggttcaagagattgtcctgcctcagcctcccaagtagctgggactacaggcgtgcaccaccatactcagctaattttttttgtatttttagtagagaacagggtttcaccatgttggccaggatggtctcgatctcctgacctcgtgatccacccgccttggcctcccaatggactgactttttttaactgagtgcacggtgatgaagactgcaataactgctattaaagtttggcgtcactgcctttgttcatgcttggttcatgatggtgtcagcaccatcagtataaatagcaatacagagggaggaagcacatgtcttatgaaaacagccttgaccttacagacgctttgaaagggtcttgaggacctcaagggtccgcactttgaaaggtactatgatagttaaaaggctgtgtatgagagtggctgcaggtagggagaatgtcctaatttaggtaggttatgtagggaaagtcttgttgagaaggtgacattgaaaatgagtcttgaatgatagaaggcaagtttagtctctgatgcaatccatatcatctgcttgactaaatgagtgattttcaaccaggggcaattttgccctgaaggggacacttgtaatgtcaggagacattacaggttgtaacactaggggaatactacta

SEQ ID NO: 25188 - DNA, 1710 bp, Homo sapiens
actcctgccctgagcaatgaggcccatgactttatgatcttgtctcctaatactcttcaccacattggtctcctttcctcatgcactccagtcatactcctgcctgttggagacctttgcatttggctttttcctttgcctggaaggttctttccctagtgctctatttggcttacctcctatatttttcaagtctttgctcaagtgccatttttcacccaatcctctatttaaaatgcaaccctaccgtgtggcattcctcttcccccttatcttgctctagtttcctgtgcactatacgtaatgatatatgcttgctattttccccttgttagaccatcagcctttcaaagatagagctcaacaaatagttgtatttattgaaaatggaatcaaaaacagagttactaataacatgaaacacagtcatcttgttctcttctgaattcttaatcttatctgaattagttaaaacagatattgctaagacttataagagtttatatattgaatttgtgactgaggagagagtaccatagctaggtatgttctctggattctgtgatggtggccaactactgtattatatttcttttcagtgctactgcccacagtagtagtaagataaatgtcctttctcaagagatatttactggtggtcctggtattgtccatacaggtttatgttcatcatcttccctgtagttaagggtgatcaggggacatttttccctattagataaataatcataactgatggatgtgatgattgagtcactgtgagcttgttggcagggttttggtgatctaggacagttctcaagtctaagctgacattcattgtgattaagttatatgaagagaattaaagggtttaattagccaagtttgtgaaagacaaaaattggaggagaatagcacattctatgggtgactaaattaggcaccaaaaacgggtcaattaggtggaggtggtgggtcagtggttagagggaatggttaatattaattgacaaaacacagtacaaataaaagtatgactctgtatgtaaaaaaacagaccatgtgtcaaaaagaaaccagaatcattaaaaacacttgattaatttaaaaaggcagaaaagggatgaagggaattaaataacagatgtggtatagaaaacaaatagtaagatgatagactcagatgtactgtatcagtaatcacattgaatataaatggtctgaataaccatttaaaaaacagagattgtcagattggatgaaagaatccctactatatggtgcctattaaaaaatgtactttacagttagcaacttaaaataggttaaaagtaagaagaatggaaaaagataaactttgttaacactcataaaaagaaagctggaggggctgtactaatagcagacaaaatagacttcagagcaaagaatattaccaagggtaaagaaagtcattttatgataaagtaggggtgaaatgttccaacagatataataattctaaacatttatgcacttagtaacagagtttcaaattaaagcaaaataaaacctgatagaactgcaagaagtagtcaaatacacaattaatagttggagatttcagtaccccactatcaataattgatagaacaagcaagcagaaaatcagcaaggattttctaggtagaccagaatggtactgtcaaccaacttgacctgattgac

SEQ ID NO: 25189 - DNA, 1018 bp, Homo sapiens
tacaggtacctggctgattttcatatttttaatagagatggggtttcaccatgttggccaggctggtcttgaactcctgacctcaagtgatcgccaccttgaccacctcccaaagtgctgggattacaggtgtgagccaccacccctggccctcaattatttttaaagcctgccgtggttcttccattttatgggtacgtaatgattaaactagttcagtgggataacttttacttctaattctttgctgttgtaagtaacactgcatgtacttacctttgtgtacttgtctgtttccatagggtaaattcctgaaagtataattcacaggaagttgcagaaatgagtcagaggccttgcaccttttaaaactcttcaataacattttgccaaattgccctccagtaaagttgtaccaatttattttcctaccagtggcgtatctaaaagcctttgcctctgataagaaggaagaatattttatccttttaagattgttactattactatgaaatagaatcttttgtaaggtttttaatgtctgacttagccatttgtatacttcagcatgttactatgtttgtctttaagtgtgctttctatattgaggttagaattgctactaactactaaaaattggggacagtgaagagggcagcccagtcttgtatctcaccaagtaaagtcctgtcccttcatgtggaagtagccttcttgtcaccttgtttcctaacgtaaggccggtttggatctactgagtgcttgagtccagaggaggagtgttggtaagggctgtgagtacttcaaggacattgcatagaagcactaatgggtatgtgagctgtcttctcgagtcttctgaaattgtacttttgtatcactactttttatcagcaattgcctctagtgacagtaaaatagtgcactgataggtaccgtgggaatattggatttaagtcaagagagttaatacgaaacctcctgaggttttggtgatctctgaaaaggccatttgtac

SEQ ID NO: 25190 - DNA, 1044 bp, Homo sapiens
atatcagattagacctatgtgtttgcacccatctttgttggcgatctgagtgcagtgtggcaagtgcacacctggcatccctgcgtcagatcgcgcaccttcaggtcgcgcaccttcgctgaaggaagatgacgcagagctttatctgaaatcagaggggagctatccaaaatgggagtttgggggcagctaaagttgacatgcgaataaattgatactgaaacttagcaacttcttaaaagtgtaaagaagcctcataagatcataaggaaaatgtatatatgcttttcacagctttctagaattttttgacatttgattttcttgagacttgtaaacctggatatgttgaagggtatttgttaattttacttttcaaagatactttaaaacagtagagctagcaatgacaccttgcatttcatttcaacactgcttcaaggtttcttttgtatataattcttagaatgctcatttcttttaaatggtttaatttgtacagcagaggaatgttattgtagtagtatgtaactattacctaatactgagtttttgcaaaaaacaatgaatgctcatatgtaattgaaatacttcagatcacatgaaaatgctgatttaacatttaagtatcacagcattaaaagaaaaagaaagtaaaccagtcctttgtattcagttacctaatggggtgccatcaataagctgcgatacagccctggagctcagtcagccacaccttcctgcatcctattggccttattcattttaaatgagttaatgaatctgccagatctgtgaatgatagagattatgctaaattaatgctgattctttgtgtgtgtgggaaatctctgtagagcaccttttctttcttagactaagtaacccagtacaatagttgtgaactgaataattaaaactttggcttctcttaggaaaagacgacttcctagtcataggtgtcctatggggaaatttattttttttaatgtcctgttccttaatgctgcaaattatcagtatttataaagtaactgattttgc

SEQ ID NO: 25191 - DNA, 1061 bp, Homo sapiens
gggcagcccttcaagccctccagccccttcctcttaagtagataatgaagaaagtggctgtattgtgtgtctcctggagtattggcgttggttggggggcggagggtcccagcaaggagacctgtcacctgtgatgctgccaatgtcacattcacctgccagcctggcctgcctgggcgagcgcgcctgccctaaccctcctcccttagggtgcaatccatttttttgttgaggctgtgattgttctgatttttgtttcaacccctttgctgaccaggcctccaatagaaagaagggaattcacacacattttctataccctaatgagtgcatgcattttttttttttttagatgaagtctctctttgttgcccaggctggagtgcaatgatgcgatctctgctcactgcaacctctgcctcccagtctcaagcaattcttctgcctcagcctcccaagtagctaggactacaggcgtctgccaccacacccagctaatttttgtttttttggtagagacggggtttcgccatattgaccaggctagtctcgaactcctgacctcaagtgatccacccactttggcctcccaaagtgctgggattacaggcatgaactaccacgccctgtccctcctaagctttttgtagacacattgctgttgcctgagcctgaagagccttttctcctccctcctcctcacctggccaatcccatttgtgcattcagaactggacttcctcctccgggaagcctcccttgaccttccctgctcccacttgcaagttcactggcgaaatcccagaaccctttatccctttgctctctgagctcttaccacatgatttcgttcccttgtgaacatgattttgttcccttgtgggtttaaacaccatctgcagtcccatttcctgataccctgcctggcatgcagacagagtgaatgaatcctcccttccttttaaataaacactaatacttttgagattttaacactttgcaagggaattgttctctatgttaagcgctttcctacttttataaaaacatactgaacaaaa

SEQ ID NO: 25192 - DNA, 1075 bp, Homo sapiens
caggactgtttttcaaaggatctgctacagttgctggaaaagtttttggaaatctttggaactgccttttaaacttgtggcacatttcaagtcatttccccattaccctacagagacaatttagacatagttcttactctcaggttgctaatagtttcattaatgcaaagaagtccgatatactactatgtgataattgctataataggccttttaaaatatcttcagtaatggcaaatgtttgttttttgaaagtgaagcagcagctatttgtagccagttcttttgaataagcagcttaatcgggtagagtaataaaattttgatcaaaatggagtaacaagatagaaactttaaaaataaattaaataagagacagggtcccattgtggtgctcaggctggcgttgaactcctgggctcatgtgatcctcctgcctcagcctgccgagtagctgggactgtgggtgagcactaccacacctggcagatagaaatgttttgaataatgtcaactggattggaattaatgtgtagttctccggtgtaaatattatgggagaacagtattcaaatgcataagttctagcatttcaaaatttgcttattgctttatagtcatcccataagtatatatgattataaatataggcattgccctttctgatagtttagcccaatttacaagataatcagttattttatttcctcaacagcaaaatgcattgatcactacaccaaacaatgtgtggaaaatgcagatttgcctgaaggagaaaaaaaaccaattgaccagagattggaaggcatcgtaaataaaatgttccagcgatgtctagatgatcacaagtataaacaggctattggcattgctctggagacacgaagactggacgtctttgaaaagaccatactggagtcggtaggtagatgatgttattttagaaattattgttgatagggaatcagcaaagcaagttattcaaactgaaactttcataggcagtgaaaagaaaatctagtttagaaatagcaggtgatcttttgccaaatattttattttcatatttatgtat

SEQ ID NO: 25193 - DNA, 1050 bp, Homo sapiens
aattagaataaaaacttgtatgttaagtacagtgtaccaaatcaatggaatctatgttttttccttagatcgttagacacggtggcagtctgggccttggtttggcagccatgggaactgcacgtcaagatgtttatgatttgctaaaaacaaacctttatcaggatgatgcagtaacaggtaagcatttctttctaaagctaacaagcttaagtattaattaatgtaaatgtaattacattagtttctacctatattttgtagcctcttaaaattccgatggatttctctagttgaagaggaagtgaattttgctccatttgtcaaagttatcttttaaaacaagttttgtgatatataggctttctaaaatggtatatcctgtgtgtccactttcataactgacttttgcaaacaggaatttattagggtgatctgcttactccatactgcttggcgataatatagaaaaaatgttatctaaatgtctcctttgaaatcactgtaggatttgatggtacattctgtcaaagtttaaaaggaaaacaaccctaaatatgaatgtgcgaaccctaaatgtatgaatgtgcttccacataaagtatcctttttaccaggtggtttaaaaaaatgctatcagaagctaatgatttttttgatagtttatgcaaaaagagtgctactttcagttggatgttttactgactttaaaaacataactctctgttaacattttactcgttacttgccaggggaagcagctggcctggccctaggtttggttatgttgggctctaaaaatgctcaggctattgaggacatggttggttatgcacaagaaactcaacatgagaagattctgcgtggtcttgcagttggcatagctttagtaatgtatgggaggatggaagaggctgatgctctcattgaatctctctgtcgtgacaaggtgagatcacatacgtccctcactgtccatttatctccagcatgtaaaaaacacttaacttcactggaaattaactctgttcccatcagaacatgtaggta

SEQ ID NO: 25194 - DNA, 1031 bp, Homo sapiens
cctgattgtttcttaagttacacttttcatagaagtgtccagtgttcttcgaggcctcttctgagatctggcaaaacctatgtgtattaagctattctgcattttgtcaaaagatctgccacagactccacactttgaacttcttgaaccctatctcttcttttctcttttaaaatattggaatacttcatcatttacattctttttgtactttgcagttttctgtttttcttccaaaatttggtttcataattacatacacaaatttgttctatttctaggaggtgattcatttagctttgtgactggaactcatctaaggcaactagactctttatctgttttgtgtttgatcagtctttctgtctaaaaattattctccttgagagaaaagatggaagcaaaataaaatttaattacttctatttccttcctgttatcttagcatatcatgtagccaagctgtgaccctaacctttccctattcttgctgtagagattagacacaattaaaaaatgagaaaatggtctgtcatggccatccagagtgggttctttgtgtgaattatcagagaactagataattttagtatggaaagtatattcttccaggtatacccttagtatctcttgggttgtgtaaagcatcctactcatgtttgactcttaagttgttttgtttcctgtcagttaatgttttgtattgtcagtgactttatattttataacaatataaatcagtggcttggtgtttatattctgccacataggaagttgacggtcatttaaaactgtttttcttccatttttaatctgatggtgctttgctctctagttaacaaaattcatgtctgcccttttatttcctgtagctaacacaggttaagttcccagtttcagcagcagatgtctcccgtgagctgcttaggttttgctgagttttccactacatagtatagtcaaataagttatttatgtgcttgctacttctaagggaccattcttggttctcttttcataaaacgaatctt

SEQ ID NO: 25195 - DNA, 1107 bp, Homo sapiens
ctcatagtgaaccagttaccactaacactaacactaacttcatgatcatctttacatctccattcacaattctatatcaatttgatacatattctctgtatactgttctctgtttttgccccagtatctttgtgtttctgtctgggtgcttgacttttccttactttttgtcattttcattttttttttctacatctttgttttcttctctccattaattggcagtaacatggaataaaaaggtttttttttttttttcaaaattattctaaatagttataatctgttccttttcttctaagataagactattaactggagttcttttgttacgtaagggtgtttaactgctgagatttgctttcaaattatacatctctttaaagtattcataaaatggaaataccagttctgcatcgaagtggtaagagtttgtggcttggttgtacttttcagaaatagtcaatagtggagttatgtttcactttctagaatattctggaaatagtagaaaggtctctcattaactatagaaagatctctgggttaattgtaagcaagagctagacatggtgactcacacctgtaatcccagcactttgggaggccaaggcaggcagatagcttggggccaggagtggagaccaggctgaccaacacagcgaaaccccatctgtactgaaaatacaaaagttagccaggtgtgggggcgggcacctgtaatgccagctactcaggaggctgaggcatgagaatcacttgaagtcaggaggcggaggttgcagtgagccaagattgcgccactgcactccagcctgggtaacagagtgagaatctgtctcaaaaaaagaaaaaaaaaattgtaagcaaggaaatttttcttaagggtttgacatgaaacagtttataggtgttgtggctaattctgtaggtgtgcgtatatttaagcacacaaatttggaggcagtacaaagcatgtgagaagatagttcttttgatctagattgttatctatgggtagagttttggcaatgtgattgcctgccaactctggtgtatagatttcctgaaacaattatgtatgccttcagatgcataaaatacaga

SEQ ID NO: 25196 - DNA, 2638 bp, Homo sapiens
attgtatccttataactttatgcttgttggtgcattataattcctgggacccacaatgcaggatttgtcgaagcattcatcagtgaagatttgacaaacagaacctaagtgagcaaatctgtttttaaacggagattggttagtaatttcagatttataatgaaagctcccctaaagctatagtatatccatgatacagtggagaatgtcttcatttattctacatttctcataatctatttttgttttttaagctatctcagattaaggaagagaaattcagaagagaacctgcttttttcttattatccagtgtagttgatctagaggcacttcagagtacatttattcaatatctttactcagttttgtctttgaggttacagtttcatttaacagtttttccttttgatatgtgtgaatgtcttttaatcctttccatctaacttcttagggaaaactaaagttcattaaaaagtgctacttaaaatttgagtgtgtgtgaatcatgatgttgaaagattatgagttcttaatctttcttcttctgtagaagcctgggcacagtggcgctcatgcctgtaattccagcactttgggaggccaagtgggggtggattacttgaggtcaggagtttgagacaagcctggccaacatggcgaaaccccatctctactaaaaatatgaaaattagccaggcatggtggcacgcgcctgtactcccagctactcaggaggctaaggtgggagaatcacttgaacccaggaggccgaggttgcagtgagccgagatcacaccactgccctccacgctcagcgacaaagtaagactctgtctcaaaaaaaaagttcttttatgacctgggaaagaaatatacctcatgttagttttctgatctttaaataccatgaagtatttaaatatgatgtttcttagtgaagtagcttattagaaagacaaataatacaggggttaacctgaatctttttcctttgaaacagcagatattttttaaatgtctgaattaattgatctttagaaacctctggaatccttgtgttgttttgtgaatccaagagcacccctcatctacacaccctttttatggtagctaaagagccattgacaagaatatgttcctcaaaccctttctaacagaggtcattactttctctacttttcctcatgtacaccaccagaaagaggattctgtatacttgttctacaccaggggtcattatactacagtttgaggaccattggcccacattctatttttgtaaaagttttattggcatactgccactcccatttgttagtaacatattgtctgtggctgcttttgttctactgcagcagaatggaggagctgtgacagaaaccatatacgccctgcaagcccaaaatatttgctgtcttaccctttatagaaaaagtttgctgacccctgctttaccctgttactttcagatcaccattccactgtttatttctcccccaaaacacttgccttttgaagtttattttatctacttaatactttcttctccatcttgcttttctgttaacctccatgacatttgttcatcttcatcaatggcttcagtacctgctatagtcttctctccactgttccagtgccagcattttctacttcatcccattcgtgacccttctaagaccttaattttatatttcttgaactctttgactctaattattattatttgcactaaagccatctacaagtctacttagaacaatccctaagattatgaactctaatacttcccttccttgtcctgctacccctcactcctagagaacttctgtttcctgttatttttatctctagttcattcattcatctcagttttcacattctattaactcattctattaatgagacttcattcatctcagtttttacattctgttaatatcaggactcacactactttcctatccagcttgttggtcaataactgtaaaagttttcactggtactttttatgcccttaccctgttatattattatactttctgttgccaggtattacctagaataactgtaaatccaaaagaagagagtgagctctcttcagcattttgtagaatttcagaactgagcttattgtcatctgcattttcattttttcaaagttattaatttgtgatcggttctacaagacaaagtgcaatgaagtgaaagagcgttgattttggccttggtgctgaaaagctgtaagagttcttaagccaactgattaaaacctctaggtttcttttttcttacctacaaaaggaagaagtggatttctaaatctatatatcatgagtcttccttttaatcttttttctcctgcatcactcatcactttgtgttagtgtaatttgtttatatgtccgcctttcttgaatgcaaagattctttttcttgatcatctgtgtattcttagtacctagcacattataaacactcaataaaaatgtggtcaatttataaattgatggtatccagccttaatctagatgccatttataccagcaggctgcttaccttattagcttgatcacatttcacagtttcaaatattttaattattcttaaggatccatttcttcaactttttttc

SEQ ID NO: 25197 - DNA, 1034 bp, Homo sapiens
ataattttcaaatatacatttatctcagaaattctaatgcttctgtctttatcttccagaaaagaaagacatagttcagttcaaattattgtttaaaagtttctgttttgttttttacttttttcactacatttgagcatatgagttatcctggggttcagtgtctaatatgatagtgttttaaatgttttaagcattttaatgcttacagaattttttcctggtttttaaaatttccactttacaaaaagaagtgcctttaattcattgcttttctcctccatttcagaattgggtaggctaacattttactgcataaatgaataactgccatttttctcttactgctatacatttgtttcatctctgattagacttgcatctcaactaaatcatatttaatttgcatgcagtactctaccagttactattagtgcttataagatgctgggccctgcttgacaaggtgattgagctctgaaataataagtgattgaactctgaaataataagtgacttgcctgatccaacacgggagaaccaggattcagaccctgggatgtcttgcttcaaacagccatctttcagccattttatatactctttcagctataccacggatactgtttgaacttatagatcatgaggcatcaattgaaacttaagttatagccaggtttggtggctcatgtctgtaatcccaacactttgggaggccgaggcaggtggatcacctgaggtcaggagttcaagaccagcctggccaaagtggcaaaaccccatctctactaaaaatacaaaacttagccaggtgtggtggcctgcgcctgtagtcccagctactcgggaggctgaggcaggagaatcgtttgaacctgtgggtggaggttgcagtgaactgagatcatgccactgccctgcagtctgggcaacagaacgagactccgtctcaaaaaaaaaaaaaaaaaaaaaacttataaataaaccaataacacccaatggatggccagatgccatatcttcccgtgttactt

SEQ ID NO: 25198 - DNA, 1024 bp, Homo sapiens
acaggtgacatgataattgccacctcctttctccagaattctttgaactagtgcatgctgaatcatgatgctgtcattgtcccaggtggactcacacagctctgtggtcaaacggcactgagccggtgctccttcctccatctccagccttctctgtcgctgcagctgcagctggcaggcgtggacagtcaccttatggtataatggggtctgtggtggcttccttcagctccatatcagcctggtgtgcttctagcaatggggcaagtggcagctctatctcctaggcccaggattgactgggtcagtgtgtgtgggctcccagccactccaggatgtggagccatgctgtcagcaaccttccatgcctgtgaggtttgttcctgggaggcctggctagacttggtctggatagcttttgtcagttgcacgctgtgggtcagcaggtccaaagggtgacttcagtatatttacgtgtccaagagttctctggccccaagtctttgttctgtgcctgattctttccatttcaaagaccttaaatgttttgtgtgttctttatagtgcccagattagatattgcaaaggtgtgggaaaccagggttggtgtgcaggaatcgcaggctcaggagcttgaatcctgtgggatctctatttttctatcctttaccactgaaaaggagtatatgggagatctgtggtgttgagtgggttgtgagaattttgggtgttgaaatttacaacgaggtatgtagtctgatgtcttctccacagaaggatcttgtcgctgcatttgacaacggagaccagaaggtgttcttcgatctgtgggaggagcacatttcaagttccatccgagatggggactcctttgcccagaagctggaattctatctccacatccattttgccatctatcttttgaagtactctgtggggagaccggtgggtttacctggtgatgcgggtgggtctgagtggtgtgttaaggaacagtgtttgctgtcattgtccacatgggcat

SEQ ID NO: 25199 - DNA, 1051 bp, Homo sapiens
agatttgatgtagcctggttcatggacgatgatgtctgaacaaggacagtagcagtggatatggaaaaagaggggttcctatcgaagaggcttgaagacagtattggagactgaacaacaacaacaacaaaatcaacgatgactccagagtttctagcctgagtgattaggaagttaaaggtaactttaattaagcaatgaaatgcgcaggagtaagctttgggagggagtgacgaatttggttttagactcagtggtagctgtcacctgggcatgcagatggagatgtctgtcacttggaaacatacatcctggagcacaggagagctgcgaggacgggaacacccactctccccatttgccagattgttctgaggtgtggtgtttgatatagagttgtgcagtatttgaaaacttgcaaataactggtttttttcctccccttaaagatacagccgtatgtgaatggagctctgtacagcatcctttctgttccatccattcgtgaggaagcaagagcaatggtaagaaagcgtgcctgagaaacatgtgagcttcctttagtgccacagttcagagcttttagagcaagacctccttgattgggctccatagaaaggctcagatccgttccaaactccttgaaattgtatgtaaaatgtatatttgccatttcctggggagagagtctgtagcttttatcagatcctcaaggggatccctaactcctaaatggttaaaaattaaagtgttagaaagttcccagcaggctgacttttgcaaagttatagacattctgatggcaaccaaatggaaaagattataaaactgtctaggacttggtttggttggtaaatagtaaactcagtgtttaatgtgtacgttaacgcttgtatgtgaagtaaaaagcaaacctcaggtgattagtatattattttgaaaggacaagtgtttctagatctaatcaggaaaacaactagagttttgtcttttttctttctaccatgtgaaaccagattaacagtgtattaaatgctgtggtgaaaggatt

SEQ ID NO: 25200 - DNA, 1016 bp, Homo sapiens
tatgataaaatgttaaatattaaaatattaaataacttaaaatggcaatagtaaatccattacattaatataaataagatattcttatgaaaaagaattatttttcaaaacaaaattttatgaaaaagtgtagcattgtgggtttgtttttttttttttttttttttttttgccaatctctttaatgtctggatcagaaaaacacagtttgatctgggctgtatctgttgtcatatgttgttttgattgaaggacataaagaaaatctagcctcacacacctgtgtacttggaaaggggtgaagtattttcaaagccttttcagatagatatttttgctcaatattactttaaaaccagacaggtaatagtttattaaaagttagttgcaatgtggaattagaaaccaattttaaatatcatttttattggctgggtgcagtggctcacgcctgtaatctcagcactttcggagccccaggtgggtggatcacctgaggtcaggagttttgagaccagcctggccaacatggtgaaaccctgtctctaccaaaaatacaaaaattagctgggcatcgtggtgtgcgcctgtaatctcagctactctggaggctgaggtgggagaatcgcctgaacccgggatgcggagattgcagtgagccaagatcacaccactgcactccagcctgggtgacggagcgagactccgtctcaaaaaaataaataaataagtaaatagtcatttttatcttgttaattaaaatctattgatctattttgcattttgttaatttgattttctgattgttccctaacaatcagatgtgctaatgtatagaaatacaattgattttagaatattgaacttgtatcctacaaccttactgaatttattagctcaaagagttttttgtttgttgtgggttttgggtttgtttgggttgttttgttttgttttgttttgttttgaattccttaggattttctgtataacaagattgtgtcatctgtgaatag

SEQ ID NO: 25201 - DNA, 1077 bp, Homo sapiens
cctgggttcaagcgattctcctgcctcagcttcctgagtggctgggattacaggcgcctgccaccatgcctggctgatttttatatttttagtcgaggcagggtttcaccatgctggccagactggtctcgaacacccgacctgaggcaatcctcctgccttggcctcccaaagtgctaggattacaggtgtgagccactgcacccggcctggaacttcttggatctataagttacagtgttttttttgtgtgtgtttgttttggggtttttttttttttaaaccaaatttgagtagtgtataaccattatttactcaagtgttattttctgcccctttcctctcctcctgaaaatccagttgcacacatgttagaatgctgatattgtctaacagatttctgaggatttcttcatttttatccaatgtttgttctcttctttgagctggatactttctgttgatcgtccttccagttaactgattcttttacccttttgtatctgctgttgagctcatctattgaattcttcatttcagttattgtacttttcagctctagaattcccatttggttcctttttatagtgtctatttttctgttgagatttcccgtttttcactgattttcagtattttttttaaaacttctgagcacattttcctttaattctttgagcatatttataatagctgctttgaagtgtttttctactaaatctaacatctgggcccactcaaagttagtttctcttgtctatttttcccccaaggacaggtcacgctttgtttctgctgtatctagtaatgcatttggttgacaaccagacgttatagataacgtgttgtcgtgattctagattacgttttgctctcctgagggctgttgctttcatttgtttggtaagcagttaacttgcctgctcttaaactgagaaatgtgtctcccctgtagaaggcagccatgagtgtgtctatcattttctccaatcccagggtctcccctccataatttaactgttgattgggatggaaattgtgctcagatgcctgaagccagtaaggtttccaccttct

SEQ ID NO: 25202 - DNA, 1043 bp, Homo sapiens
ggaagaggcagaaaatggaagagacgcccctgctaacgggaatgctgtgagtgtctgctttgctcctgagccctggcagctaccgccccacaaaatttttcctgttctactttaaacatacctatatatgtgtgtgtatgtgtatatgtatagctttgcacagtggcagtatcgtagccaatgagctttacccgaggcgcgattattgctagttaaatatttataaaaacctttcgagcagcgcctgaacaagaataggttcagaggagactccggtagtctgagtttgggcttggcccagggtggggaaaagcccttgtcctggggcagttaatgtgcaggtttcatgatggagcctggagggtgttgactggagaagggtctctggggtgggcttggcttggctgggctgtagatgcagccgccagcctctggtgggaggccgggcatcaggagcaacgctctgtccagcctggggccagctggtaatgacatggcctgttttctgtcgaggagaatgaggaaaatggggagcaggaggctgacaatgaggtagacgaagaagaggaagaaggtggggaggaagaggaggaggaagaagaaggtgatggtgagtagccttgtctatcttccccttttcaggtactttttcctggccttgtctggcagaaggggaaggaaggaattggggctcctgggagtgggacaatggtacttggggccagtggaccacatggccctgggcacccacctgtagagtcagggaaggtctccctgacatggagttgtgcccatgcccactcacactcactcgcacacctgaaagtttctttcgtgcagctctgaaagccactgatctattgggctggccttttggggtgcagctgcttgggcctctctcctctggagagtcccacctgtgtagtgggcgtgggtgccctgattgggcccagttgcaggcagtagaggcagggcagggaccttgcagtccactacatgttcctcgggatttccccaggagccacagtaggagggaagtgtgg

SEQ ID NO: 25203 - DNA, 1292 bp, Homo sapiens
ggtcctgaatcttaagaacaggaaggaaacagggctgggctcaacttcccagaggccttgggctgtggagctgggggtccctggttcttgctctgccagcaggagctgaggcagtgggctggatagggctcctggggttggaggggcctttgacagtctttctctgcttaggatgacgatgtcgataccaagaagcagaagaccgacgaggatgactagacagcaaaaaaggaaaagttaaactaaaaaaaaaaaggccgccgtgacctattcaccctccacttcccgtctcagaatctaaacgtggtcaccttcgagtagagaggcccgcccgcccaccgtgggcagtgccacccgcagatgacacgcgctctccaccacccaacccaaaccatgagaatttgcaacaggggaggaaaaaagaaccaaaacttccaaggccctgctttttttcttaaaagtactttaaaaaggaaatttgtttgtattttttatttacattttatatttttgtacatattgttagggtcagccatttttaatgatctcggatgaccaaaccagccttcggagcgttctctgtcctacttctgactttacttgtggtgtgaccatgttcattataatctcaaaggagaaaaaaaaccttgtaaaaaaagcaaaaatgacaacagaaaaacaatcttattccgagcattccagtaacttttttgtgtatgtacttagctgtactataagtagttggtttgtatgagatggttaaaaaggccaaagataaaaggtttctttttttttccttttttgtctatgaagttgctgtttattttttttggcctgtttgatgtatgtgtgaaacaatgttgtccaacaataaacaggaattttattttgctgagttgttctaacaaagctgtctcaagcctggtttttctgtttcagtttcttcagaccttccagggcacaaggataggagggggaggatcctggggacagtgggttgacattttgggaggcagttggatgtgtcctgtgatgggcagcagagtctggtgggtgggcagggactgagctgcagttggctgggggggctgctcactggggcagtcagtgattgccccaagaagccttaactggggaggaggacttcatcactgggtgccacatggggaccctggtgccctgggggtgggggtttgcagtcctagacactggaaacgggccacacgggactgccattatgtggagcgcagggtgctggtggtataggccaagagggaacttgccaagcctcc

SEQ ID NO: 25204 - DNA, 1057 bp, Homo sapiens
aaaaattagctcggcgtggtggtgggcgcctgtaatcccagccactccggaggctgaggcagcagaattgcttgaacctgggagatagagactgtagtaagctgagattgcaccgctgtactccagcctgggcaacagagcgagactctgtcaaacaaacaaataaataaataaatgtcactcatatgttgctcagacatttggatgctggacttttttgtgccccttatgtttgtgttttgtattacataggtacaactatgtatacagttttatgtcttgcttgtttcttcccacttacaaacatttatccatattttaagtctttttaatatttttaatatttcataatctacttagctcattttctgttgcagggcatttgggtcattttaaattataatctgaagtattaggttgaggtatttgtatgtccaaacactaacttaccttctacccaaagcatttttttctggctttcctacccttttttaatggtatgactgtagcctgatactcagggccttcgctgcgatatccctgacttcttctttctccctggtcacttctactttgtgctgctgtcagactggacagtttgccagttcctggtacaccacatttttttctgaccttccctttgttccagggaatgtgttctgtttttctgtccttgcttactaaagaggcagcattgcacagactctgttagcagactgcctgtagccagtctggctccacttctactagttgtgtgttcgttgacaaatgaagtaaccttatgcagctcaatttcctcgtctgtaaagtgggagtaacaatacaagcccattattccttacctacactcctcgaagttagatgtttcagaatttagaatttttgggactttaaaaaggtaatatgatgcgcatgcctttttatgtaacactcccagaggaatgtggaaacaagtgggataaaaagcctgtctccgtacaggttagaaattcccaccaggtgaatttcagcaccatgcttaagaaaaaatcagtttggatatagttttttggaatcc

SEQ ID NO: 25205 - DNA, 1049 bp, Homo sapiens
gctggaagtggatttctgcattggccgtgacatccgaaagaaggatatcaataatattgtcaagaccctgcatgaatggtgaggctaaaaggaggagggggatatctagcatgtcttttgtgcctctccttgcaaaaatgtgattccctggtgtcagctgagggtttggggtgggcctgtagctacctgggagctggggcttagtgagccggagagtggagctacatttgtgatcacagctgtgtgataacaggagtcatttcaggcctcctggtgccttggttgtaaaatagttctttccttaaatgcaactgggagctatttaaaagtgggctataaaatgcccagggttagcaggtggagcctatgtgtcctagctgtgtgaggctagtcctgccctttccaaactcacgctcaaagtttgaccaaactcaggaaggctagtgtttgtaagattctttctttgtttttattattttttctatccctgttgaagttaacatgtttataagattcttcggataaaagaacttacgttcaaaatcagtaacatattgggctaatgtttgtaaaacaccgtgagggacatggaagacaaggagtgggtcattttaacttggaatacagactcatacaaagaatatctgataactatactctggtatataaaaagcattgggacatttgtgttttctctgttttaatggaatttgatatttgtaagagctgtctcacattctacgaggattcactgtggagtgatttaaattatttggggcttataaagccagatggactgattggagaagttttagctcagttttgaaggaaggccagggttagagtatacctggaggtgaggagagtgtgttcccaggcaggcacgtggcatgttggaagccatgaagcagacccggtgagctttgtacacaggttcgggagggagagagaatctctgctcatccccgagagaagcatatccagagaggagcagtgccactttgactccttggggcctgatgtcccctgagtttccctcacttcagcta

SEQ ID NO: 25206 - DNA, 1047 bp, Homo sapiens
aataaagctggataaggccaggcgcagtggctcacacctgtaatcccagcactttgggaggctgaggcgggcagatcacaaggtcaccagatcaagactatcctggctaacatggtgaaaccccgtctctactaaaaatataaaaaattagctgggcgtggtggctggcgggcacctgtagtcccagctacttgggaggctgaggcaggagaatggtgtgaaccggggaggcggagcttgcagtgagccgagattgcgccactgcactccagcctgggcgacagagcaagactctatctcaaaaaaaaaaaaaaaaaaaaaaaaaagtaaagaaaagaaagtaaagctggataaggggctagagaaatgatagcaaggtggggctatttcagttactgtgatcagggaagtgtctctgacaggcagatatttgagcagagacttcaacaaaacaagagggcaggccctatgaatagccaggcagagagctttccagatagaaggatagcaagtgaaaaagccctaagatggaaggttgtagtattctaggaacagcaagaaagtctctggagttggagggtcatttgcaaaagaagaaactgtagaacatgaggatagaaaaatgtcttgataaggccttgtagcacggcaatggaaggaggttggaaagctgttgggagaatgacatgatctgatttgtgttttaaaagaaacgctctaactttattggtccaaaatggaaataaagagaccaattattgcattaattcagcgtggcaataaaggttgtttgggtttatgtagtaacagtggaaatggcaagaagatccatttaaaggaaaggccactgggctcttctgatggattgaatgtggggaatgagagggagagggtcaagggtagtgctgcggtttagggctggaggaactagatggaaggtgatgttatctgctgagagagtgtgctgggtgaggagcaggttctagtggggatcaagggttctcttgtttgagatgtcatctgggcaattgaatataagtctgaaga

SEQ ID NO: 25207 - DNA, 1096 bp, Homo sapiens
cgagagactttaacaccccactgacaatattagattattgagacagaaaattaacaaagatattcaggacctgaactcagctctggatcaagtggacctgatagatagatatctgcagaactctccaccccaaaacaacagaatatacattattcttattgccacatggcacttattctaaaattgatcacgtaatcggaagtaaaacactcctcagcaaatgcaaaagaactgaaatcataacaaatggtctgtcggaccacagtgcagtccaatagaactcaagattaagaaattcacttaaaattatgcaaccacatggaaattaaacaacctgctcctgaatgacttttgggtaaataatgaaattaaggcagaaatcaggaagttctttgaaactaatgagaacaaagatacaatgatccagtatctctgggatgcaactaacgcagtgttaagagggaaatttatagcaataaacgcccacatcaaaaagctagaaagatctcaggttaacaacctatcatcacgactaaaagaactacagaacgaagagcagacaaaccccaaagctagcagaagagaagaaataaccaagatcagagctgaactgaaggagacagaggcatgaaaaacccttcaaaaaattaagaagtccaggagctggttttttgaaaaaaattaataaaatagatagaccaccagctagactaatagaaggagagaagattcaaataaatacaatcagaaatgataaggggtaggctgggcgcagtggctcacgcctgtaatcccagccctttgggagcctgaggtgggtagatcacttgatgcaggagtttgagaccagcctggccaacatggtgaaaccccgtctctactaaaaatacaaaaattagctgggcatggtggtgcatgcctgtaatcccagctattcaggaggctgaatcaggagaatcacttaaatccaggaggtgtaggatacagtgagccgaggtctcgccactgcactccagcctgggcaggcgacagagcgagactccatctcaaaaagaaatgataaggggaatattatcaccacagaaatacaaataac

SEQ ID NO: 25208 - DNA, 1070 bp, Homo sapiens
ttttttttttttggagacagtctcactctgtcaccaggttggagtgcactggcatgatctcggctcaccgcaacctctgactctctggttcaagggattctcctgcttcagtctcctgagtagctgggattataggcacgcatcaccacgcccagctaatttttgtatttttgatagagacggggtttcaccatgttggccaggatggtctcgatctcctgaccttgtgatccgcctgcctcagcctcccaaagtgctaggattacaggcgtgagccactgcacctggtccaaaatattttctaattctttttttatttcttctttaacctatgggttgttggatttccacatatttggggattttccagattgctttctgttaatttttctctcatatttttgctgtctggctttttgatgtgttttatgggagagaccacccatttgtggagaaagtactcttctgagtccacatcatatgggaggagcccacaggtcagtctgcaggctgccgagatcataggctggtgggcgggtgcacaagtagactgggctggtctctcttgactagtgtgagaaatggggccagccctgctgccatcactgctgcattccagtggcaaggctgaagattggaatttgttaaaagtctgcttatgaggcaaccacctcccctattcctctttaccactgtgcacataagaactccagcagccaagcatctacccttatttaggaaacagaacctttttcatagaaatcgaatagcctgagagaatgtcctgatgccatagctaaatttcttgcagaaagtgctgagggcggactcttggagcaccctggtagataagtagacttgtacaacagaggagatggccatttttggtctccgcaataccctctacaaaggcagccaaggcccataacacatttcctgttggctgcctgtattcaacgcacaaatttagacttgtgatctgtatgtggcatgacaatgcttatgagaatagagagctgtcaatttggtaaggagtgagatctgccttctgaaaggtggaaccctgttca

SEQ ID NO: 25209 - DNA, 1025 bp, Homo sapiens
caagggagggtggcaggtgccagaagaatcccattatgaaagtgtcttgggaatattgattgatttttaggaagctacacctactgcctgctggggttctctctctagcctcttcctcatcagtcaggtggcagtacccagaagccactctgtttgagggcttccatgtaaaataagcatgaggtttgcaggaagctgtgcaccatcatgggtcccctgacaggtggttaggtgatgtgagcagttccttctgggtcactgactttgggaattcagaggaagttgaagtagtggtggagaaaacctgatgttaccatcttcccaggcaaattactctcaactccaggagcttcacaactgcatcttgtataaatcctacttggtgcaattttgaaacccaaactgcaggcagtttctttgagtggacttgattgtaaagatagccttgttaatggaaattatttttaaataccctgggacccaagctgcagtggaatgctgttatgtatgaccttgacctgttccagcctttaaggcagggattgacggatattttctgtaaaggaccagatagtaaatggtttaggctttgtgggctgtgcagtctctgtctctgctactcaactctgctgttgtagtgtgaaaacaccagcgttgctttaaatggataaatgtggctgtgtttcaacaaaactttaagaacactgagatttgaattttatatagttttcacacatcacaaaatattgttcttcctttgattatttttcagccatttaaaaatgcataaaccagtcttagctcatgggtcatacaaaagcaggtttggcctgtggtccatactttgctgacctctgcttaaacagccagctagcaattcagccctgctatccagtgagcttttagcagctcatcatcacttcacagggaagccaggctgggtaatggagaacagtcgtgctaagttaactctcaggatggcttcatgcaattaggtaaattattcctttgattagtaccatgct

SEQ ID NO: 25210 - DNA, 1051 bp, Homo sapiens
taggaagtctttgtccttttttacatagtcttcatggtacactgtataatcaagtgtgcatcctgctttatctcatctgtccaacctatttttcctgggttagtaaaaattctccctaagccatgtaacaactacctgctattccatgtgtgactatagcatagtttgtttaaccttttgccactgctggactttttagtctttccaataaataacactggggggaacagttttgcaaataaaacttttcttcctacatttctgatgatttttctaagctataaattcataacttaaatcactgagtcaaatcatatgaaaatttctaagcaatgcagactcaaaatggacagaatgaatatagacctgacctcagctgcaaagagagaggtaaagagaaaagggttgtaactaatagatgcttttaaaattatgttttacttcacaaaggagagggctgggaagattcaagtggtgctctgtagggcaaacatgcctttgacttgaagttctggcttcatgatggtcgagaagggcttgtttctgcttttgtgttttcatctgggtcagttagaggacaaaccattcctgtgagttcctttcccactaaggaagagaaaaatcgtccagtatctaatgatgcagatcattagctgtgttcgcagccttgtagttaaaaaaaaaattataataatgtatcctcctaatgtgcagttaattttagttaaaatctccctagtgctttaaaaacccagtgaatttataaacatagtagttggcttgcatttggaatgttaaagctgtcataaccaactggctctagcagggcatgctgcacctccttgagctctgttggaagttcagcactcacctgagcactgccctctggaatccagaaagaaaccaagactttcccagagttcctgttcctgatcttccataactgaagaaagctaatgagtgtctcaaagttaacatgtccaaagtcaaacctttgactccctatcagtccccaaattcagtctttctctcagcagtggatcagccacct

SEQ ID NO: 25211 - DNA, 1042 bp, Homo sapiens
tcctcaaggagacaccgtgggggagggagggagaggtagacaccaccaacctcattccatgaccagggcctggcgatgctcagaagccagtgagtgtgtccctgccctgaagggtcagtgctggccccctggacctagggggaagatggtgcaggcagtggcccagcctgaggaaggagctgaagctctcaagagtttgcagccaccctcctggggagagactgacgcctccccagttcctgttaggaaggacctcaggaaagaactggaattacacagcctggggtggcagcctcctggtccctgaggaggatgtcaggccgcagaagggaggaacgggcatgaagcttgggaagcgggcgccagaggaggcgaggcctctgcagaagcagcaccagaggccactgcagcggctccaccacccagcagcgccgccaggaggcaggaagtgggaggccaggcaggaggggctgtgattgcccaggtgccaggaggaagggctgagaggggacagtgcagatgtccagagaggcctgacagggacaggctgcgaaagtcacgggtggggatgggcttccgccagagttgtgtgtggcctgaggacagtgcagcaaggaggccccatggtgagcacatgcagccgaagtgacaggttgggctcctttgtgggacaagagcctctccaggccactgcagggtgttcagagaacaaggcctacaaggatctgctgtgcctgcagctgggcagtagaacactgagcatgcagggccggggtgggaagcaggaaagccacatggacgagagagccgggcctgcccagcagtgccttttgggagcgcaggcaggatgggatgtgcagctgtgacctgcccggcatagaactccgtctggctggggagaggaggtctcttctagccagaatggaccaggaggtcccgggaggacctgggaggaagtggattgagttgggccttagaaggagagccaggaacaggccaggtcaggggagctggagcctggctaggtatggagagagcaggg

SEQ ID NO: 25212 - DNA, 1025 bp, Homo sapiens
aactgaagttgaaaaaaatgtattcatgctaatagcacaggaatgatccacaattggattccaaggcttcttgtacattcagcatagggtgtatgaaagagtccactattctagcaacagataaaattcctactgacacgcaacctcaggttcccactcgtttagaaggctgcgtatggtcttctacttaaagcctcaagtagcagtcatggcagtgacaaatcctcattgcctccatagaacctctaggctcatgtgtgagcccaggctgggctggggcccctgggagcccagggtgaggggccagtccctgggcagctccgtgagccaggagcagctgtgccacctggggaagggctgcacggtcgatgggtcttttctgcagaagagtgtgccccagcccttgctgggcacagatcaaagaggtgttcatgggtcgaaatcacagatttcaagggctgataggagtcagagtgggggggctgggagggctgaggcaggttaaagatttgagaggggctgctgtgtccacagctgcatcacactgctctgctgtcccctccatgttccccggcactgccgcctaccctggggtcttctggaagtaactgaaggccccctcaacctggctcatcatcaaagcagactgttgactagctgcaggcaaatatgaagaggctatttcctgtcacaaaaaggccatgctgtatctttctgaagctatggagctgacgcaggctgagtaggctcacctttcactggaattgcaaaggcctagccacatgaaaccgcgcctcctcatccaggagacacggaaaagggcccagcagaacgcagacaaggatggggctgcccatcttcaggcctctcacagcccctctgctgaagatgcagaagcacagccctccacagaggaacgcctgcctgagactcggggcatatgtgacagggatccagacacacgactgtttttccttcagcaacagagccgtgtattggaagcaaagccccaaaacacgataaga

SEQ ID NO: 25213 - DNA, 1053 bp, Homo sapiens
cagagttttgaatcttacgttttctagagctgctcatgttttcccttcctttttgtcgttgtagtatttgacagttgtcttttccatcaaaaacatactggccctaggctggttagagcaaggggttatgcctgttaggcagcatcttacgcccagtgttctcccagatattctgcctaacaggtttaagtaggagattaaatagtcagtttatctaaaccctctatttttccaaactagcttgagaggtcttttcatctatttttactccatgggcctctgatatgctgagatgtggcacggttatgattatggtatcaccgttacagaggcaaagggataaaggtctaccagggccaacgtaaccagaatgtgaggagagtgaagagtcggtctccgctttgcacagtaccagaatgtgaggttgccactggagagtggagagtcggtctccactttgcacagttggagctgttctcctctaactcctttgctgggttttctgtttgaaattggcccctactcctctccagccctttactgggttttctgtttgaaattggcccctactcctctccagtgtctgctttttgaatccttctgttcgtgtgtgtgtgtgtgtgtgtgtgtgttccctatgatactggcagtggcaataattttccacccagagagaagcttgtggtccacaatgctcgaagaatgaatttccaagtatttgccagtggaaacggagcagaggctatgacaagagtgatttagtgttgcactttcagagcaattatctactgcagtaataaattgaaaatatcagcaagaaccaggtcgtggacttgtcaatacaagggaaccgggggtactgttactcattctaccctacagtgtataagtcccaatcttaactgcattccaaaacaaaatatgtggaatagtccaggcaatgtcaatctcaatgacacaaatttattgtgaaaatattctctaattgatattaatcattgccacaactcagtttacatttttattatcaaaatatagttggtaacgctcctt

SEQ ID NO: 25214 - DNA, 1052 bp, Homo sapiens
cactgcagtgagtgaataagccgagtgtttggggcacaaggagagctgggagtttatcggacaaaagtggctatgagtggtttgattggatgatgaaaactttgggtcaaagcttttgtatctctgagtcccctggccctttttcagagcctgcccaccctcagtctgcatgcagctagagcattgggagtgactgtttcccagcccgcagctggttgggcaggaaggaggagcaggtgatttgacagctggggaggacccacccaaccagagaaaactagaaactcagagaaccttgcaggcagggatgtagggagagggactacagtcctgtgaccttagggagtctccgaggctcatctagataggcacagctggggacacccatagggtaaccccaggagggcccctgggaagaccacctgccggtgggtgtagtctgtgctgcccttctctgccttgaacgtgcccaggggctgtggtgtggggggcttgtgaacatgcaggctctgattcagcaggtctaggggtctcggtagaacttgagactgcatttgtaacactcctgggtgaccgtgatgctctggtctggggacctcactttgtggggccagcgcctggctgttgaaaaaggcaatgcgtgatttctattccaagcctttctgtgtgaagagaagaaggtactcttgtgtcctggtgtccctgagatgcaggcaaccccctcccatcactaaggcgtgttctggggcactgctaccctcctgagaacaccctatctgagagatccctggggagtttccaacagctgaacctctggtggacaaaggctggccagcttctttttccatgaatggcaggataattcctgggagggaagttagaaaaccaagaaagcctggggctctctgcacagtggaagccaagagaataagtgactgactcatggacctgaaaccgggaggacgccggagaccagccattgtcccttgctgctgtcctcttgctagctggccctgggtggggttggggtcggagtcacctcgggccctttg

SEQ ID NO: 25215 - DNA, 1041 bp, Homo sapiens
caagtccctataatggggttttgaatgaaaaccccaaataatgacttccctgaaaccccatggtggtcttcatttgacagcttcataagaatcacttaggacttttgttaaaaaatatagttttcagtcccactgtagaactactgagactttctagatgttagggaacctagtttataaatacaccaggtgatctactcttttaaccaggtttggaagccattttctgcaaagtatatttatgatgaaagattgtacttttaaagtttcctaagaggttgctgggtgatttatattaatatttttattatttacagcgttaaaaggatctgaacaaagtctgctcaaatctcctgctgtgaaccagcagaatttttgaacaggtaagtgtggaagggaagcacaaagcctgagggcttttgcaaataggtaatttctgcttttaggttttagttatttttgccctattatttctcctgaggttttgggtagtgagaagaaacttcttccctggtgcctgtcagatcctttatgaacagtaagagtaacataccctttctgcattgaccctggtgtgaatttgtgtcttaaactgtcataataattttttgttggcaagaaacaaggaggaatgctttggaggcaggagtactgtaaagaaccaaagagcagttgacttcatgagggacatgaaccagaaactgggaagctttcaggagccatagtacttgtagatagcacttttttaccagctggccagtgtcctctcttgtctctttttgtcctgctttaattgtatttgtgcagtctggccttttctgctttaacaaacacaaactcatggtagcaaatggccacttaattcttggagccacatatgaacttaggctctagtgccagtagccaattgatgctagcacagtgttcacatttcatattcttgggagggggaaatttggctggttgaacttggttcggttctttgtcattgatcacattagttatggacatagggttggagtctagaagtgcaagcacagt

SEQ ID NO: 25216 - DNA, 1030 bp, Homo sapiens
actcctgacctcacgcgatccactcaccttagcctcccacagtgctgggattataggcatgagccaccgcacctgactagttcctttttttaaactgctgagtaatatttcattatatgagtatactgcagattggtttgcctgttgatgtacatttacattgatggacataatacccaaatgtcagtttttgacaattataaataaagctactatgaatctcttgtcttttggtagaaatataacttcagtttccttggatgtatgtgtagcagtttgttatgggatcacagggtaggcatacagtttagatttaatggatattgccaattctttttgaagtagttgaactaatttgcactaataaagttattaatcttgtgttatcttaatccagatctggctaaactaaaaattgctggctgctgtggtggggacagaactactgattcgtttagtatatgtggagagtgctagaggagttggtcttttttctgcttttggaaaaacgtaggtaggcagtgggaatgggggcagattcaggttccttggtattcattctgtgttagttttgtggcagactatacatagtactggctggactccatcccaaattttgccatattttttctgggtaagttttgcatagctaggaaatagagatttgtagtagcacttttttttttttttgagacggagtctcgctttgttgcccaggctggagcacagtggcgtgatctcggctcactgcaaactctgccttcgagcaattcttctgcctcagcctcccgagtagatgggattacaggtgagagccaccgtgccggccacataatttttataacaaagatccagggggttttcaaagatgtgtatgttttgagttcttagtggaatagtggtggtagctaatctgtcttcaagacttctggaaagcagtattcgggaacactgtcaaagttaagtatcagacactgtgctggaatctgactcagcacctactttggcttctccttgctgattttaccca

SEQ ID NO: 25217 - DNA, 1030 bp, Homo sapiens
ctttgatattggatgactaatacagtagtaaagtatttgacaggtgctaggtggtttataaatgtgcatgtttttgaaacttttgctttatgtgcctcgctgaaaacaatgtgttagttcaggaataaattatatttggtaaatgagtgtattctatacttaattaaaattttttttctttgtctggttatatatgtaatgatggcgggagtcccacccgccctagaaaattattttctttttatttgagtcgttgtctaggtgcacatacaattttatgtaagtataattataacatttttatgtctgtatgttttctgctacattgttttatcattgctgttcatagattgatttgagaaatagttttcattgaagtattatttgaaagatgggctaggcaggtagttcagtattatactggctgttaacagtagcctatctaggattcagttagcattggacataataacgattaattgacctttgagtctcttacagatgtgtttggaccccgaatatggaattctcatggaattttgagatccatcacattgtagtgtggcttccccccctcccctccttcctttttccccaaagttggtgattgaagatcctctcttcagtggcatcaataataataattactttttctattcaaacctcgggcaacccctttggtaatatcagaagtagtatctaaaatagataaattggatttgtgtcttaaactcttggttgttcaggtgggagtggttcaataaatgatgcagacttcctgtagtaactctatttgaggagtcttattaacttatcctattagaaatatttctttttattaatatatgtaatctcgaagttttcttaacctttatagccagcatttggagactgaggagaaatcactatttgaagttctaagaaccgatggaactcctgtattttgagagtttatttagaacatgttaacctaagtaatgctgtacttgttttagttattcctttatatttttaaaatgattttcttagt

SEQ ID NO: 25218 - DNA, 1045 bp, Homo sapiens
ggacatggctgtagccaaaggtcttcctggcagaggggtaaaaactgagccctaggaattagggtaaaaaagaatcctgcaattcaactaatattttaatcctttccatgccagctgctccctttcccagaggccgcaagtgttagcaatttcttatgtatttttccaagtaaatatggaaatatattttccgccttttaatacaagtgatacggttctgtacttccaacatcaagtatttttattgaaagacttccctgaagatttggaaaaattttttcccatcgtttttgtttgcatttctttgcctgtagcagtaaacagttgtttttcagatgtttattcatcatttatatttctgttaatttttttcttgcctttgccaatttttcttttgggatattcatcttttccttgttgatttatgctatttatatgagctctgtgtgtgtgtgtgtgtgtgtgtgtgtgtatgtttgtgtgtgtgtgtattttttgtttacttatttagattttctattttgagctaggttctcactctgtcatccaggctggagtatagtgagggtctcactctgtcacccaggctgtagtacagcggcatgatcatagctcactacaaccttgaacttctgggctcaagggattctcctgtctcagcctcctgcatagctgggagtacaggtgcatgccactgcatttggctagtttcgttttttgtagagacaggatctcgctctgttatctaggctggtgttgaactcctggcctcaagcgattctcctacctcagcctctcaaagtgctgggcttacaggcatgatccaccatgcctggtctggctcctcatattttaaagtcattgaccatagctgtgcccagtaagttttctaaatgttaaaattgcatttatgattttatttatttctttttctttgtctctttgagactgagtcttgctcagtcactcaggctgtagtgcagtgtcacagtctcggctcactgcaacatctgcctcctgggttcaagggattcttgtgtttcag

SEQ ID NO: 25219 - DNA, 1035 bp, Homo sapiens
acataaagtatgaagctaaaagtgcatacggtcttctgcctccagacctaacaattggatatatagccttcttgaccctaacggtgcagctatatcatttatataaatggaataatttttatatgcatcattcttcagtatgttcttgttattgaacagaataatgtccgtgcttaatctgctgtggcatcatagtgttctactgtattttatcagaatttatgtagctaatcctttattgattagatttctagtttttttttttaattacagtgaacatcttcatatatatttgcatttttgtacaactatttctattaggataaatcctaagtagaattgttgaatcaaatgtcaatagatctaaccaaattgccttcagtaaaggccagtttatgcttgaaccaccagagagagcctctcaatccctatgcccagacactctaccagctttgttggttcaagtttagtcctgatacatttctttttaacttcaagatttgggtgtagagtaaactgtacctttggttactctgtaatataccctgtatggcattcatgaggtttgatggttttagaattgatgctattaagttatcctttctctgggattagataaattattttaacttttatgcttgactttttaactttagcccctgtcttcttaaactctctaaaccaagatttcttccatttttatgaaaataaaacaataaaatatttaatctacggtagtgttttattgaacttcttagaatttcactattcaactgttcgttaaagaacttaaagttgatactttcttgttcaggactgggtctattgcattatattatgttagtttttttaacttgtttctttcagcctcttgtggtccagctacttcaatgccattgttggtctcataagtcaagatcatcaggcctcgttcagtatttaaatgtagatgtcctgccttgtatagagatagaactttagatattaatttatggtggtgaatgtgtgccacatgttgacatctgactatcattt

SEQ ID NO: 25220 - DNA, 1030 bp, Homo sapiens
ggagtggaacagttaggacatgggatcagaatcaaggtgaatcgagaccaaatctaatcaaatggggcattttaacagcagaaatgaaaagtcttacataaggaaattacagaatttaaggagtggctgcatgtaaaagcagccttctgtggaaaggatacaaccctctcagtgactctgggcttcatgttcatcagcggtgtgctgatgtcctctcagccatgggcagtatttactaaagtgtcctcagtgagtcaggtgataggcccattgtcttttatgttgtcacaggcaagcctaagcattgtgttcacttctgggaccaccccttgaaagggtccacacatttgagtaggagggctggggcatttgaagccttgcgatgggaactgtgtgaaggaaatggagctgtttagataggagacaagattgtggacagggcagagtggggaggagggcttatagggtcactctctatcaatacctgcctactaatcatgatcatgtgaggtgaggacttagacttgatctgtatgtttctaaagggcagaaaagggctaactgttggaaggttcaagggggcaggtattggacacaatcttaaaagatctaattattagaattgtctgaaaatggcttgggttgccttgggaaagtagtgagttgatagaacaatagcctggttttaactgttcacacatattcacactttggtggtttggaatagtcaagtttagtcgttgttatttgtggttttcatattttaactatattaatccaatgagggtaattttcttagccaccctctattaaaggtaaaggttcttttatttacatcccattggtatatctttgaaaaggcaggttccataaaactaaactaacatgaagtatctcagaatattaaggatactaacttctagttagtatctactattatataactgctagtatactaaaatatcatggtaatttccacatacatacatattctaatatgtcatagtcactttgattgaatgctttttga

SEQ ID NO: 25221 - DNA, 1393 bp, Homo sapiens
actataccctttccaaacacctgtagttttgttttgttttgtttttgtttttgttttttttaagaacaaagacaaaattacctgtgataaaagcctctagcatgaggcctaggagcatttgtatggcaagtaaggcgattgcacttggacagtcaccactggggaacatggtaccataaccaattgtgagttgtgtctccagggagaaggagaatgcagctgtgaaactggtgatatacttgacacagatagtgtggttttcaggtggggcatcatgatctagttccagatcaccattcatctcagccagaacataccagagcactgcaaagacaagccagtggacaacaaaagaagcagaaaagaccaacatcatccaacgccagcgcatgtccattaggattccccaagcatctcgaagatatgcaagacctctttgagcgccatccatttgaagtgtgctgtggccatccttggtgaccatcctccggtatctttgacttaggagaggagcaataactttgcaattactgctgtccatctcaggctgtatttctctaaaatcaagagtaaattagtaagctcttaactgttttatagttaatgtttgtgaatttggagagctcatggactttctgctttcttgggaatgcttctctaaccacaactttgccaactctctcgcttttctcttcacgttagatggcatttactaagtcattcatttgggagctaattgtgtgttaccttaaaatatctcttctattgtttctttgaatgacagttaaaacattgtttaacacttaaacattttctaagtatattttagaattcctgtaggtagagattatatacccctgtgtcttccttgcacaagtccgggtgtcaagcatttattgatttgaccaaatattgtgtataaagactagcatttcatagttaatttataattatgcattattcataattaaaaggggtatgtttaaatatgtaagtgttcttctgtgtaaataattagaagtcatttggaagcttattattaaactgtctgcaaatcctttgaagccagatttagtataggacaaggcttacatttgtggtaagcttttagaggtttgtagttctaatgtatgctttataattagcctattcagagtttgatttattgatttgtatttttagagacagggtcttgctctgtctcctaggctggagtgcagtggcacaatcatagctcactgcaacctcagcaaatttttagaattttaatttttgttggtactgggctcaatatattgcctaggctggtctcagactcctgttctcaagccatcttcccacttcagccttccaaagcgctgggattacaggggtgagccaccatacctggtct

SEQ ID NO: 25222 - DNA, 1035 bp, Homo sapiens
aagattttaaaagtaagtcaactgaaatacagtatttggttagtcaactttgtcatggtgctgacgttacagaaggaggaagcctttgattttgaatgctgagaagggccatgtaactgtctctcactcattttagtctccgttgctatgaattgttggaatttttagacgtgaagggaacttagatgtcatcttctaaactgcccatgaatgactttaatatttattatttatttatgtttattttattattattatttttggagacggagtcttgctgtgttgcccaggctggagtgcagtggcacaatctcggctcactgcaacctccacctcccgggttcaagtgattctcctgcctcagcctcctgagtagctgggactacaggcgcacactaccaggccaggctaatttttagtacttttagtagaaacggggttttgtcatgttggccaggctggtctcgaactcctgacctcaggtgatctgcccgcctcggcctctgaaagtgctgggattataggcatgagccaacatgcctgacctgttatttattttaaattatatcaggaatacacacacacacacacacacacacacacacacacaacttataaagataatggtctccttggcactcccacccacccacccatccaaatttacacaagtaaatctgtaatcaatttggttagaagggatttattttaatatttttggggattgcttagatgcagtataatttttagttatattagtagtaattggaaatgtgtatttttgtgactgaagtcaccttctaaataatttctagaataaaatttttatattgaagaagttggtcttaaccatttttttttcaggagcatgcattttgaaatcattctgtgggaagatgaaaacaaatttagttctatgtctcccctttttagagatgttgacactttccttaaatgtaccatgcatgatttgtctaccacccttttagcttgttatacttaaatcccagatctctgtcttcccatttcagtttc

SEQ ID NO: 25223 - DNA, 1039 bp, Homo sapiens
caggcgtgagccaccatgcctggccagtagtactatttctttgggaaaatatttagtagtagtcaacaaagttgagcatactgtgacctggcagttttgatgctaagtatatacccaacagaaatgcaaacatatacttaccaaaactcatgtccaagaatattcgtagaagcacaattcttatgatagcaaaaaggtagaaaacaacctaaatgtttctaagcagtagcataagagtaataccgtgtggtttgtttatacagtgagatcctgtacagccatgtaaaagaccaaaatattccctgtaacaatgagaatgaatctcctgtgcttgcttcggcagcacatacactaaaattggaacgatacagagattagcatggcccctgtgcaaggagaatgaatcttcgtaatgttcagcaaaagaagccagatataaatgaatattccattttataaaaaagtttaaaagcaggcaaagctaatatttggggctagaaattaggatagtgtttatcttgggaagggctgattgggaggacgcatgaagatttttgaggctccttaaaatctttttttaaaaatctaggtggtagttaaattatatgtatttgctttatgaaaactgtcagttgtacatttgtgattagtgtacttttaaaaaatgttttcttaaagaggtggggagatgagtgaagtccattttaaaagttcttgaggtcttttcacccttatgaaaatgagcacggcctctggaggcagaacttatatggcttgatgaaaaatgtggctgtactaacaaaagagagacaaatttaaaacaaccttgtgattctcaaactgttggaaaacctgtagctcataaagtttgaatgaccaattctgcatgctttgttccaaaaaggatttgaggcagaaaatttgaagataaagaggaaagcaacaccaaagaaagaatgatgagatttggagtcattagacctggtttcagattctggttccaattattttttgttttgtttattatttttcttatttt

SEQ ID NO: 25224 - DNA, 1035 bp, Homo sapiens
ctcaggtgatctacccaccttggcctcctaaaatgctggaattagaggcgtgaactgctgtgctcagcctgtatttttattttcattccgttgtgtgtattttaatttcccttgagactccctcttttacccatggattattttgaagtatatttttgggtttctaagtatttggaagatttctgttatttttcttttattgatttctagcttgattcttggtggtcaaagaaacatactatatgtgatttttttttatttccataggtttttggggaacaggtgatatttggttatatgagtaagttatttagtggtgatctgtgagattttggtacacccatcactcgagcagtatacactgaatatgattttaatttttaaaaatctttttatgtttgttttattgccccaaatgtggtctgttattgctgtatgttctgtgggtagttgaaaagaatatgtatttttctatatttggaatgttctgtaaagtcacttcacttctgttggttgatggttttgttgaattctgtaatcttgcagattttctgctagttggtctatcacgtggtggttacgtcttcaatttgtggatttgtctgtttctttttttcagttctgtcagatcctgttttgtatattttggagctttgttgtttggtgcatacatattacaattcctgcatcttctatgtgtattgacccttctttattacatctgtctgtctctgataattttctttgctctgaagtcaactttatcaaacatgaatataacttactttaagttaatatttgcatgatatatctttttctctcctcagtctgcctactttgttatattttgtgtgactttcttgtagatagcatactattaggtcatgtgttctggttgctggcttcttcatctccaaatctgtgatatatgcgataaaaagaaaaaacagggaattcacgatcatgtcatcactgagacccctagttagcctgcctttttctctccacctttcagtgttatttgttttatatatt

SEQ ID NO: 25225 - DNA, 1842 bp, Homo sapiens
tattcatggtatgaacatttgttataagtaacaagaatgtgagaaaatatccactacattgtttatgagactcctgatatgtggcatgagttctcccattgaatctttgtagtggtatttgtttatatttcttagtatcctcagacgtagcagccaaaaagcccgacattaacattagattgtgtgttccattcacattttttggaagagctaaatcttgaattttggttttagtacttgccagaaaagaatgtctacatcaatacctagtgtcattgtaatgatttctaggttctcaggcgtacaagagagtgttgttgctgttttatacttaatgcattcttatcccctgaggtcgtgacagtctccttagagttcccagaatgtggaaaggttcatacaacattgctgttaaaacgttatagccacactgttaaatgttcaatcagaaagttatttgtagggatgagtaaagaagtaccatccaagagcattctgatgttactctcatgggtggtataatggtaacgtggagtgtggaggcaagtacaggtgggaggaaagtgcattcaattgagacagtcataaaattcttctaattactgtgatatgtcacagcttagagctcttacagggtgttgatgttgtagcgtatgtcagaatttccttccttttaaaggttgaatagtattaatattccattgtatgtatataacatattttgtttatctattgatctgttggatcacctggttgcagtgcagtacggtacaagcagctgattgaatgaacgaatactactggtcagtgctttcggagtgttcctgtgcttggtttcaagtttctaagagtactcttgtgtaatcacagctagagcaagagagaagagaggcagaaatgagggcaaaacgggaagaggaagagcgaaagaggcaggaagaactccgaagacaacaggaggaaattcttcggcgacagcaggaagaagaaaggaaaaggcgagaggaagaagaacttgcccgaaggaaacaggtatgtatctgggaactctgaccataggattagtgcttgatgagggctttcaggctgctttctttcatcatttcacagatactcctgaagtccacaggattggggttagaaccttagaagactcactcacctttggaaagaatctctgtttttcaccaacacccactgtagggatattcttcagtcctagtaaaccactagaattgatattctttgcatatttcctagagttttataaaccagttagatttcagaagttctgtccttgcatctaaaaacaatgagaaagtaactttgatgtgcagcattaaatgtcaaattttaaaagttacatgggctttaaaaaaattgtgctaacatatacataacataaaatttaccattttaagtgtactttcagtggtgttaagtatattcattcatattgctgtgcaaccctcacaaacatgtctgtagaacttctccaactttgcaaactgaaactgcatatccattaaacaaggagccccactccctccatccatagctcctagtaaccaccattcttctttctgtgtctgtgaatttaaactaactcaatttcttatgtaagtagaattatacagtatttgtctttttgtgttgggcttatttcacttaaggtttattcatattgtagcatatatctgaatttcctttcttaaaaaggttgaataatattccattgtgtgtttatccattcctattttgtttatccattcctctgttgatggacatttagatgacttccacgttttagctattgtgaataatgctgctgtgaacacgggt

SEQ ID NO: 25226 - DNA, 1042 bp, Homo sapiens
aggatcgcttcagcctgggaggtggaagttgcagtgagccaagatcacaccactgcactccagcctgggcgacagagtgagaccttgtctttaaaaatacatatatatgtatatatatataaacactaaggctgtcactattttcaagggggaagaaaaagacttgtgggttattggaacacagttgatggggtcaaactcaggatggggtttggaatcctagcctctccctatatttggtcttgtaagcagttggtaccacagcttttttggttaataaataggcatgtttatttttttgaatcatgatatttttgagtcagttaattaaggtattttatgtaaggcatttttgtttattactgttacatttcaaatgtgtatttatttgaaaacttgaacatgaaaaaacaagaggctgcagaaaacccagctaatattaacagaactgcttttagaataaggacattgcctgtttactttttggtattcaaataactaaaacagtttgggattttattcaaggtagaagaactggaacatttttggggagtcactcagtttaaagaggcattgttcatcatttttatcaacctccaattatagaagttttggaaaaattacatacatgtgaccattgggcattcggcattaggttttctttttttctttttctttcttttttttttttttttttttttttgagacaaggtctcactctgttgcccaggctggagtgcagtgatgttatctcagctcactaaaatctctgcctcctgggttcaagcaattcttgtgcctcagcttcccgagtagctgggattacaggcgtgcagcgccacgcccagctaatgttttgtattttgagtagcgacaggtttttgccatgttggccagtctggtctctaactcctggcctcaagtaatccacccacctcggcctccagtgtgcccagccagcattaggttttcagctgtcagttgtgtttgtgagtactgcttattgccttcaatgggtatgctagtactgctttttctaagc

SEQ ID NO: 25227 - DNA, 1542 bp, Homo sapiens
tggtgcaatcatgaagagagttaatggttaacagacattggccaataacaaaacaccccatggactgtgactcgagtatccaacaggcagtcagagctctcccggtctgaaagttgcattgccactgctaactttgggattgcatcagagaggccctgagtggggttgagatgaggttggtttggtttgatgttacacactcctcacctgttctttctgagtgtcctttctctgaaaggatttatgtttttcttcgttagatagtgacttctgagcaagctgatctcccctggcatgctccaacctgattggacaaaggaagctctatggcctgggagagagactattcttaatttttctttcttacaaaaactgatttttcccataaatatttttacttcagaggactaggaccattttgttttgggcccttctgctgaaaatttgtctcgtttaagaggcagctagaatctttaccatatgtatgaatttgtataatttcatttttggatagggataaacttttgcttctgataaaagcctggaatttcatctggtcctcagagcattgcgtgtgtgtcttgctgtagcccggaaaaggttttgtgtaaagattctgggatggcaagttgtttgccttttctgaaaagagaacatacagaacctgtccatctttaagaccttcatccatggaatctactatacaggaggatgcagtgggctggaggggatgggcgaaaatgggagcaggaagcctggcctggcttctggtcatggcctcctaaaaccttaaacttcaagtagaaatgtactcaagccctatttataaacaaatacttttcctgcctccaccaaacccctacagaacatcacctggaattgccactcacactgggttggagtcattgggcagctgtgcctgtgcgagaggtgctgtggtctgggcagcccctggaaaagcacctttgctgcctgtcattgttgcctgaagaaggctggagttgctctgagagcagtttgggtttggagtattatatttggcttctatttttattattttggatcaccattctccctatcccttcttgcctccctcccttctaaacatgtgtaataactatacagagactgctacaaaattgtatatagtttttggatcaaatagcatgaggggagaggaaaccattaaaagttggggctcctactctcctttgctttgtaaattcaaaagttgggggtgggtaagagggatagttaaaatgtttacaaaactttaggctccctcggaacttttgccagtgtggaggaaaataaaaaagaacttaaataaaatctgattgtattctatctgagtgcacctcttgtactcacctttatggaggctgagttctgcactaaactgttcctcttggtaccatggaaaagctccaagcacccaagacatggaggcagccatggcttctttctctgccagaccacgtagcactggctggttctgtatttgagaatgtagaggtcaaggcagatgtcggtaagtttgac

SEQ ID NO: 25228 - DNA, 1064 bp, Homo sapiens
cctgtggtggaggtggtagggccaggatagctgagcgcatggcccttgggaaaagggaaatgagtttgtgagcaaaactgttgctgaccagggagaagcctggcagacaagataaatggggactctgaatcctgagaccttggagctggggtagcgtgtgcttgggtttccttaatatgtggaaaggggtctagaggcttggaaaggcagggcgcttgctcaggcttttgctcaggaaatgtcagagctggtgaaatatatacggtttccagcctccttttaaatcccctttaccaatctaagcatcgaaagtttctcttccttcacatcgtgtttttcctagtcattaataggatgaatttcaccttaggtgtttcctctcctaatggattatcctgtaaaccatggggatgggcctggctaaaagatgttgtaacagacacaaagtgttaagcactcagccaggtccgtctggctctggcacagggctctggcgaggtactattcgtcctctgatgtcatgcttccagaattgcagaatgtttgcagactatctctgacctggagacggagtgcctagacctgcgcactaagctttgtgaccttgaaagagccaaccagaccctgaaggatgaatatgatgccctgcagatcacttttactgccttggagggaaaactgaggaaaactacggaagagaaccaggagctggtcaccagatggatggctgagaaagcccaggaagccaatcggcttaatgcagagaatgaaaaagactccaggtgggctatcaatccacagttagtggtttccatccttagtagagtagaacctaggtctttgaaaagaaagagataaacctggcagttactacaggaggtttaccagggaattctttcagtgtttcaaggagaaaagctaattctgaacaatataaattaaaccagagttagaaaaaggaaatacaccacaattagaattcttccccataattttgtgaagctttttgtatccatataaaaattctgatcttgctaatgcacaagaagactataatccaacct

SEQ ID NO: 25229 - DNA, 1094 bp, Homo sapiens
gcagtcctcacaccttggcctcccagtgtgctgggattgcaggcgtgagtcactgtgcctgacctgtttctttttcctttgctgtcttatcgctttgagtgttcctggccggatctcagggtggtctgacactctgactctggaggtaaggatgctgtggatactttgccagcataggcagggcctggcgccctgaggctcaccctggctgtgttctctctcctagcacacactcacgggacacagtgggaaagtgctgtctgctaagttcctgctggacaatgcgcggattgtctcaggaagtcacgaccggactctcaaactctgggatctacgcagcaaagtctgtgaggaaattcagtctctctgtctgtgtatatgcttagatgttagcgtggaggtgtgtgtttgcacgtcagagcctgcatttatgtaatatagtttgaatttcagatctggcttcatgtttagaggggcactgaggatagtgatagtttttcttgtttaaagcttcatttaagtgagtaactctgacaagtcagtggttagagggtggcagcattatgtaaacagccacgttggtgcctctgcttgattaatgatgtttgcatttctttcaggcataaagacagtgtttgcaggatccagttgcaatgatattgtctgcacagagcaatgtgtaatgagtggacattttgacaagaaaattcgtttctgggacattcggtatgatacccaagctcctgactggaggcacataagagtctccacagtaatggttctgtacatgggttgtgcttttaagatctcaggacatggcagaaatgagtttcggtacacgtatagtgttagcttattaacacttggctgttctttcccatgaagtagactgtggagcttagcaatcatttattgagcatgcagtgagtgctaggcccttcaccagctggcaggtaagaaaaggcaaacaggatactctttctacctttaggtaatttaaactgtagtagggaaggcagaacgcaaaagtcagtgactagtgtgttgaagtggaggcagctacgtttgttccagtgtgttaaagaatgcctctc

SEQ ID NO: 25230 - DNA, 1123 bp, Homo sapiens
actcggggcagagacctgccctggggaggcaggagtggtttcctttaaggtgagatcttgagggataaagaattcaccaggctaagtgggtaagaaatggccttctacatatttgaaccttgcgtctagagctttaggcacaactgcgaaatgatcagaagttgggccagaggtggatcacgttgattagacttattagttggaagggttggttagggctgaatttcgaaggggtggtcctttgaggggtttgctttttggccttgggcaagaggtggccacagaggattgttcaaagtatgggggtgatggatcagatgtgcttttgggaagatctccacatagccctaaatgatactgataggagttgctttctcctgttgcccaggcaaggtactgaccagtgtggggtagatcatgtgatttacaaggttgattaagatcaagattgtgttgagagagatttgattcctgggagattccagtgtttagaattttgttggttaggaggtgtttttgctttccttcttttttctcctaaaacaatagctgctataccagctgttctggttgaggaggagtgatgggtagactgttaaaaatacaccccgaggacttagagtttctgaatacagtcacatctgctgtacagatagcttaaggctgatttttcttctgagttgttaagagattgtcagaatgtgggaatgcgaggttgactgtatgtaatagctccattttttttttttccagcagataagccattcacaaaattcctctggtatctatggtacataatagaaacatcaaaaatggtatggggtagcagtctgagtctaaaaagaaaaacagaactcaccttaagtatttggaacagaaggaatgtaatctaggggagtggtcacacaggtgatgtgagaactgagaatgcaggctgcaatgaggcaagccggagatgaggcaacaagcaggaaactgctgccacccctaagttggagggtgaaggaaggagatggcatttcagactccagggacagctgtcacccaccaaaaactggggtcacaaggggtccatctggcagtggctggagccttgcaagggcacagctgctgctgcggatgt

SEQ ID NO: 25231 - DNA, 1035 bp, Homo sapiens
ctgggctcaagtgatcctcctgcttcaggcttctgagtagctgggagcgtaggctcaagccactgtgcctggctaattaaagattttgagagtaaatcatcgtgaacttaggagaaactctaaatccagtgttggtttctttataagaggaaggggagggagatttggacagaaagacatgttgggaaaaaggttatgggaaaatagagccggagattagagttcgttgatgcaaaccaaggaatgcctggggccaccagaagctggaagagataacagatggaatctcccctagagcctttagagggagtgcggccttctgatcccttgatctccgacttccagcccccagagcagtgagacagtcaagttttttttttttttttttttttccaagttttgttttaagccttgaagttttatggcagccctagggcagccctggggaaagaacactgggccctgaacaaaacatgggagccaagaggctgagccctgtgagactgtctgagtgccttagcagggctgaggtgccaggttctgccaaagggcaacagtcctgggtgacaccctcccctcacaatttggattgggatccaaagaagccacttccaaggaatgcgcaggagccagaagtattggaaggactgcagccctgcttcaaatcacctcagtcctctgaaattaaagtaatcccagtgtactagtgtctctagattcccaacagaagcaaactttaatcctctctagagggagatatctccctctaatcctcccagttatcaatggaggcctctaatgactttcacgagtctgtttgtacgttcatgattgtgcatacagtaaaaaaatagacatcaagggaggcgaggcacttgagctaaaaccagtcgaaactacaggctgtagacagacccacagggcttccagactccagacccagactttataacaactgtgctcgttgtgttggaggagacacgagatcagatggagagttttggcagagaactagaaactatggaaaagaaccag

SEQ ID NO: 25232 - DNA, 1043 bp, Homo sapiens
gatgcaagaaaaaatactccagcatctgtcctttaaagataacttataacttttctgggttttgggttgttggttttgtcttttttttttttcccatttagggaagagatggaagtgattgctttccccacaaaggtaaggaagatgaatggggggccaggagagacgtcttcacagtgaggcctttgaggtcaacagagaaagggtctcgtggtatatgtttcaggcttccatggatggcattgttctgtgcagatgtatttgaaatgagtttcatccatgtgtacttggatgtgaaaaggatgtttggaaacaaataccatttcccagtccttcacactgaagactggtttatatcctcgctaccagaatcggggtgggactttctgtctgccttggatcacccttggtctgttttggacgggacctcagatgctaactgtatgctggggatccccgctgtctctaggggagggggtgggggtggggaggtcacttctggcaaacaagcgtcatcagaatgcttgatcgttggataatgttgggctcctctctttttccttcctggcactctttaattactggggagagggtgggtgccttcttcagaagtgtgaggtgaatgtataagccaagaatgagtcagtagattcttcagcagctctgccctgcgctgatcctctagagttggaaagggctgctgttgtgccactgggtcagtgccaaaagcagagttcaccatgattggcacatgctggtgagcaagaagctcttggaagtggtcgtgagtgcagccagttccccccaacccaggaagggcacagtgaggatggctggttgcgggataaggagaagagacccctaggcagtttgcattggcctgtgctgtccgggtgtggtcctggtgtccgtccacatgttgatggcgtgtcgggctgggggctttctgcagccttccctgttccactgtctctcctgttgtgaatgccggtggatggaacaggcagcgcagtgttctgcgcttgcattctggcataggtggg

SEQ ID NO: 25233 - DNA, 1032 bp, Homo sapiens
tgagaggactccagaggggaccagggtggctggggggggggccagagcgagaggacaccagaggggaccagggtggctgaggggggcagcagagtgagaggactccagaggggaccagggtggctggcagaggccagagtgagaggactccagaggggaccagggtggctggcagaggccagagtgagaggacaccagaggggagcagggtggctggcggggggccagagcgaggcgagaggacaccagaggggaccagggtggctggggggggggggcagagtgagaggacaccagaggggaccagagtggctggcagaggccagagtgagaggactccagaggggaccagggcagagcttgggacttactcctcaggacttgggctgctgttgaatagttttatttggtgaaattctcagatttgcaggtgtcagaaagttctactctggctgtagggtggagggtgaactggaaggggagggaggtttgtaggattgttaggagagagtggagtggagagtgcggaggtgtctagggggcagtgggcaggctagtgatcaggtcagaagggggtggagtagatgaaggtgtcagggcttctgctgagtacagcagcaggctggttaagtgagctcaggagtccagaagaggggctgtggggtggtgggggaggcttctttatcttccatgtctgtcacattctttagccttattttatttaatttgttggtttttttcctagttctagttatcaaagtttttatattgtttgttactacatttacttgcaacctcccctcccagctcccaccccccacccccgattttggcatactttgtatttatcctggcttattcttgtttgaaaggtaaaatttttttttttttgagatggagtctcgctctgttgcccaggctggagtgcagtggtgcgatcttggcttactgcaagctccgcctcccgggttcacgccattctcctgcctcagcctcctgagtggctgggagtacaggtgccgccaccacgcc

SEQ ID NO: 25234 - DNA, 1046 bp, Homo sapiens
gtcaggcagcctggggctccagggtgaccagaacaagggccagggcggaagccagactgtggcccagggccggggagtgccaagactgagggtgcagggtgatgcaggcagcccagagggcatgctgggaaggctggcaggggccacatgtggatggggcagggacagtgacgcagggtgggctcacatggttaggggccacggcaggctgtgcccgtgagcctggcaggggatgcagttttggcccaccactttgcctgtgatgtctgcagagcgtgcagtggctcaccaagctgagtggtcttgtcgctgggtggggcgtggctggtgggagcagttggctggaccccagtgctgctgtcgtccctttgacaaagtggaccctgagtggaggcggctggtgtcacgtggcagggcctgtgcgtgctctgcctctggtgcaggtcagccatgaggagcacaggtggcccctcagccccgtactgacaagcctgtcatttgtcctgtggaatggatgtcatttcacggcctttctcttttctctgcagcttacggttattccagaagtttgacacattccggattctggtttgtggcggggatggaagtgttggctgggtcctctccgaaatcgacagcctcaaccttcataaacaggtaccaggacaggagggagcccagccaggagcagagagggtgcggaggttagagggaaatcatgcagtctcagctcctgttcatctcggagcacctgttctcaggccagaaaccattggtggttttggggagtgtgcagtttggtggccagggcagagaggggagagcctgggccaccccctggcattgtggaggcccgggggctctggccatgatgtatgagggggacctgaagggagctacgaaaagaattgcccacaaaggacccacatggggagcagggctgggtggggctgttgctttactgggtaatttttgtcttgaggcctcttgcttgtgagaaggggacggcagtatacttgagtttctcaagtcagagtcatggttca

SEQ ID NO: 25235 - DNA, 1050 bp, Homo sapiens
cagcatcttatctcaagggcagtcatgtttctgtctcattgccaaggaaaatgccatctgtcccctccagtgggctctgcctgtaatgtgtaagctgcgtggttttaggtcacgtccccacattgctaacgtaaccctcacggtgggggacaaggagggctgcgggctgggaagtggcccctgcccccaggtgtttgcctgcgcatcgtcccccatgtttccttagtgtcagctgggagtgctgccgctcggcacagggaacgacttggcccgagtactgggctggggctcagcctgcgatgacgacacccagctcccccagatcttggagaagttggagagagccagcaccaagatgctggacaggtgagtggggatgtgctccggtgccgtatgaggagactttgagagacaggtccctttgaccaggtgttcttaacctggggtctgtggaaaacatgggccctctgaaattatttgtaaagatttgacctgagtatatattcggatagtctttgatatttggtcagattatgacaaggataaaaacaaaacaggttaagaaccagccatgccctaggatgatccagtcttcccagaaggccaagcctgagtgtgtcagggccgtggagaaggcagctgtgccatctttggctgcttcagcccgagatctaatacccatcggaagaatgctccttgtcgtttacttgaacagtttcattttctcatattctgttcccagaagaagttttgggaaattatcctctagtgcctaaagccactgtgacaccttccctgagtaaggtactgttgtcccgagtgacacacttggcactcactgaccacatgcctgtggcacatggggtgctgatgagatgcctcctagccttcctagttgctcccagaagcctggagttctgagcacagttgtggttttgcaatgcccccaccatttcaggcctcctctgtgtgccttggggcctgtgaaatgctcatctcactgggccagctggctgagccatttgcagctctcttgaggagggtaaatcc

SEQ ID NO: 25236 - DNA, 1050 bp, Homo sapiens
ctagcacaggccgtgctgggatcgcagactgaaggagattcatttgcagtttgcctgcagcttgacgaagcttttaaaatctctcacctagcactaggtgagtcccagattagcgttagaagtgagttgaggcttggctgggtcagacagtgtctgttaggagagactcatctttcccagcttgtgctggcaaggaagtggctgacagagtcactgggactgtcatggagcttgctgtcacagagaccaacagtcctggccatttggggtgattgcaggtacagcagattctcttctatgaagactcggttgcagcccacctttctaaaatcctcacctcggaccagcactcggtggtcatctcctcggccaagtgagtgcctggtggccctggggagggcatggtgccctggcccccagcctggagctgcctctctagaagggtctttctgtttttctccccacagagtgctctgtgagacggtgaaggacttcgtggcacgggtggggaaggcctatgagaagacgaccgagagctcggaggagtcagaggtcatggccaagaaggtctgttcccgtgccctgggtgggaggggcattgaggcagcgagaagcttgctctgtcaccagcagagggccgtgactgcaggttgtccaggttcttggtgatttgaacaaagaattagacaaaacgcacagtaaaggaagacaagaatgaagcaacaaagaacgaaggcagggatttattgaaaatgaaagtacactccacactgtgggagctgcccgagcagcggctcaagggtccagacacagaatcttcttgggtccaaataccccctagaagtatcccattggccacttcatgctcacctcatgtaaatgaagtggtagcttgcattcagtctgattggtggcagaaagcagccaaccagaggctgaagtggttacaaaggtcacactcctgtgcaaacatctgattggttgcaaaaagcaaccaatcagaggctaaggtgaagttacaaagttgcatttctatgcagactaagactc

SEQ ID NO: 25237 - DNA, 1026 bp, Homo sapiens
caaagagttgctgcacagaacctacaagaacctggagcaaaaggtcttgctggaggtgagtgggagggtccttgtcacctgcaggctggcctccatccatcagcagactgccaggcctattgcttctcctgttgaccatttcctccatgcacagggacttgcctggggatgccctggccacggctgtgctcctgagcccctggcggtgggaagctggtagagaaggaggggctgactcatacctttctcttttcttttgttctgtgtctctgctgctcagtgtgacgggcgacccatcccactccccagtcttcagggaattgctgtccttaacattcccagctatgccggaggaaccaacttctgggggggtaccaaggaagatgatgtatgtatggggtgtgagcgggtgggcctgagctcagtggggaagagctgtctgagagcaggggggtgttctgctgtggctggggtggatccagctcttctgttgtgccagcagtggggttgccgtggagaacaagatagacagggtcccccacccagctcatcgtctagagggctgagcagagcagttgtgtcagtgaaggtggtcagtgagggtctgtggtcagcagatgtggtcagcgggtgtgacgtggaaggagggtcagggaaggtgtctgggaggccaagacctgaaggatgagttggagttggctaagttaggtgggcagaggagagggggaggctgttccaggcagagagaattgcacagatgaaggctcagagtcaagacagggcaggcacatggaggatgggagagaggtgccccgactgcagtgggcagcaggggcgtggagagacaggagagggctgcagggcctgggtcacactgggctgtgtgagctggggaagaagtttggaatttgtgttaagaactgtgggaaggtgttgataggtttaaacctggtttaaaccttcctttgtacgtaatagcgaatagaagtattcagcgcttcctgcacacgtggtgtgtgctggccc

SEQ ID NO: 25238 - DNA, 1045 bp, Homo sapiens
ctgtcctgtaagctctaccacaccagcacaacaccggggttccagctggcttacaggggctgggctgacatttgcccaagggacaggtggacggacagcttgtgttctctgggattgtctagaaatcagctgatttgcataagaatgtttccccatagctgagagcttaatgttcatcactgacccattggtgagtttgttgaaatagagatggttccgggtagaatatacttgcctcctagcacctgaaggactattacttgggataaccaggcttcccagagtgctctctgggccctcctgctgcccagctcccctctgagctctgcaggtgccatccggcctgcagtgtgtgtctgtctgccgtgggcctccactctgcaaaggcagttgtcccctccacttccaaggaacaaaactcagaggctcgctccagtatggtgggatggttgaaaggaccaaagtgtcactgaatgagccagagataagaggatcttaaaggagagtttgggagaggggccgtggtgtggtgtgcctgggaccctggaggacggagctcctaggtcattgtgtctaagagtgctttggggattcagctccttccgttggcctccattatttcttggcttctctgttgtgtctcttctctctctccttggcctctttctgcatctgtgtctgctctttgctagccggcctgcctttggtggtaactgttctctggggtcttgcccttgactcttgcctccttcccatatccttgatctggatctctctatggatctctccccaaatgtctattccagatctaatcaagatttacctctcactgccagagccatgtgtttgctcctcacgtgggtaccctatgttggcatgtccaggagaaaaccctctaccttcctttttctccatgctgcccacattcagcctattttggagatcccagctaagagcgtctttgtggtttccgctcgccacctccatgtcacccccaggaccttcctcttgctcctgggaaagtgtgttagtctctcctctcctc

SEQ ID NO: 25239 - DNA, 1050 bp, Homo sapiens
ctcggccccggcgctcggagcgcggcggctgcctgggctttaatggctgctccgcggagcagcgcctagggctggaaggcggctgcggctcaggaagtcacccgagcaagcctccttcggggccggccgcacccgccgcggcgcgctccatgggggcgcgctccccccgggcggcccgctgacccgggacgccggggcccgctcgctcgccggccgcgcgtcccggccatgaactgagcccgcgggccagccccgcgcctgctccgcccgcgcctttcttctcgcgcctcctccgcccgccgccggcgggcccggctccccgggggctgcggcgccccgggctcggcggcccgcgggccccggggcgcggggcggcggcggcggggggcgcgcggctccgggcgcggcgcctgcaccatgaactaccagcagcagctggccaactcggctgccatccgggccgagatccagcgcttcgagtcggtccaccccaacatctactccatctacgagctgctggagcgcgtggaggagccggtgctgcagaaccagatccgggagcacgtcatcgccatcgaaggtgagggccgggccgccttggggcctcgggaaggcacggacgcccgcggcgcggcgggggtgtgcgctgtgtgcgtgcgggtgtccacacacgccggccggggcacgcggctgctccgccgagggagcactgcggcgctgcttgtcttgcaaggccgggcgagcgtcgcctgcgccccgccgcgccgcgagctccgccaggaagatagatcgtcagcgttaatttgatcgtggacaatagagtctctcctgcgggaaagtggctcggtgcctccgcgtcctgggctgccggagcgtcccggcccagcagacgcctgggggcagccggcggggtcggcgccacccgacccctgacaggttaccaggccaggcctgggcgtcttgctggacgttgaagacgtgttctgagaagtgctgccgctgggggcgaggcccgggccggcgtgtttgggcggtgcagggctgccctcc

SEQ ID NO: 25240 - DNA, 1472 bp, Homo sapiens
agactggagaggagacctagagccagcaaacaaaagacagagggtttattaggggaatttatttacagagtggtcccatggcggcctgggcaggagaagcgctgctgcttgctttcagaaagcgtgcagtttatatagcattttcgcttaacaccctcccccaaacaaccaccacccagcaaccttaacaccaatcaaagagcctcaataccctgtatggcctgctttccatgggacaggctgggggtttagatgttcctcatagataaggaatgaatctctgggttggccactcccggattccttagctcagaaccccgaacatacattcaggtgcacctgccatgtggggccattctcagttattgctgtcaggggcatctgtcagtgggctgcgtttctgcgacacggtggcatgtcggatggacattgccaagagaatctggttaggaggtagaggcagctgatgtccatttccttctagactcattctgtggttttgcggattttccttcttgtctttcggagattgttgctttttaatgtagtcttatgtatatttagattgggttcttcagtattcacttattatatgataatttggcagatgacacattttgttaccaatatttccaagctgaaagcgcgtttctgtaaaagacaggagctagatgttactagtagcttaaaagagctgttggaggagcctgaaggaagtgactcataagggagagaagcagtgggggcagctgcaggaaccttcaaaacaaaacctgcagccctgttgctaccacctcttgttttttgcctaaaccaggcgttttattttgttaagacgaaaatcccttattttgcatccgtttttccccctgtataccctgcaggtgtttatagtttgtgagtctcactctggcttgttttaaccactgatttcgtttcgtcttatgtttctctacactctagcaaacctgtgtccccctccccgcccccatcccaatcctccagccttcacgtccttagcttaagtgattgagtctggcaaagcggatgaggcttagctatttttaaaatccagggtttgaggttctgatctggtgcttagctacataattccttccctttgttaagtacctttctccgagaaacaaaatgcactctacagatgttaatctctaatctttgcagcatctgttatttttattcaggggtacaagtgctttgtgtgtgctgcggtgagccctggccttctggaagctctgtgcttctgaggggctgagggggatttgggggtcccttttcatagtgtgggctgtctttcccaagatgcagtgatgacccatcagaggcagggttggtattgtccgtggggtccagtccctctatcttccagggcttttctggtcacaagagaccatggccagaagtgggtatcgtgcttgtgtctggggcctggggagggaaggaaaacaaat

SEQ ID NO: 25241 - DNA, 1056 bp, Homo sapiens
accctctttatttactaatcgtaaaaataacaagttttggtttagtagactccgtttaaaattgactaattagttttagatcattgtgaactctctggattaaatgtacatggtgcattgcggtgaaagctgttatggatgctccagtgatcccatcttctgcgtgtggaagcatttcaggaagccttctgtgttctcttgacatgacattgaccacttcctggatttctgatgtcacaggaaagataaagatggacagatgccccaggctcatgtggtacattggtcatctctctagcagtcacggttctcagggacacgaacataattcctcatttgctttgggcttccccatacaattctcagaagacagctccagcagagcttccaacagtgtgaccaccagaatgagttcaacgtgctgcaaattgcttttcctctttagggtgtatctcactttcggtgataaactccagttattgtgttttaaatcacatggaattggtcttctctgtgactcttctatcctggtggaggtgtacttagatacatttctttattttcaatttttagggaaatagttatataactagttaacatatttgtgtggaaccaatgtcacatcatcaaaataaattctaagagtcctggctttgattcttaaagataaattcaaagactctctctttgtcactttttcaccttgtcgtcttctcttcacctataactattttttaataagtattgtttatacttgtctcttttaaatataagcaaatacatgcgaatgggtacttatataacctcctgcttggatacaggtagcttcccatgcactgtttttcgtttgcctttttaacttaggaacatgttctggaaaccactccatagtgtgggctccagaacaggcctcattgtgaaactgttcccaatttattaacaggtctcttattaatagacgttgggatcgatccagtttcttgtttttgtttgttatatatatgtgtgtgtgtgtgtgtgtgtgtgtgtgtgtgtgtgtgttgctattgaaaaata

SEQ ID NO: 25242 - DNA, 1029 bp, Homo sapiens
ccaagagaaaacctgatggcaggtaacacatcacccctctcttttagggacctcgtccctttcttttagggaactcattggcttgtcttggacccaaacataattagtgggggtaggggtgaggagagaaactcttcagtgaacagatgtcttcttgggccgattgttggatattgctcaccagctagttattaaattctagaaaaactaattctttgtgcagattctaggtaaaatgtctctgttgcaaaataggatttttcaattaagaaaagctttaaaatatatcatgtgttcctccttagtctgcagaatctgaatgtcaccttaaaatgtcagggttaaatttcttacggttagtacatgaggcaggcgtgaaatttacaacagaaaattgagattgattactttcatttactttctcttttttggggcagtaactgtttaatgttaaatttgtattgtatgtcggtgcctcttttgaaactggagatattgatatgatcttaagcaaatgtctccaatacgagaaaaagaggactgatttataaagtggaggactgacacataatgtggaggactgatacataatgtggaggactgatacataatgtggaggactgatacataatgtggaggactaatacataatgtggaggactgatacataatgtggaggactgatttataaagtagaggactgacacataatgtggaggactgatttataaagtagaggactgatacataatgtggaggactgatacataacgtggaggactgatacataacgtggaggactgatacataatgtggaggactgatacataatgtggaggactgatttataaagtagaggactgatttataaagtagaggactgatttataaagtagaggactgacacataatgtggaggactgatttataaagtagaggactgatttataaagtagaggactgacacataatgtggaggactgatttataaagtagaggactgatgcataatgtggaggactgatacat

SEQ ID NO: 25243 - DNA, 1071 bp, Homo sapiens
agcttggagctggggttgtacgagaattgggctgggcaaaggcagtgtccaccttgttgggtgatgaggatgggattcaacaactacctgtcctctggagattgaaaggttaaaataaggcttgttggagcctttgccatctgaagcttctgtatggttttggggtcaaagtaggtttggggaggcaaaaatgagcccccagacactaagaagagaaggcacaggacaggccaccatccatcccctgctgtcccaaaactgacaagtctcgtacctctgacagtaaaactccccgtaggactacaagacgtgggtcttggagctgcagttggcctcaaatgcaggttcacgaactgaccagagccagctgctgcagaggctgagctcattcgcagtcttggtgtatctgaactcatgattgaaagattttgatgtacagtcgacttgccatatgcctaatgtgatatcccgttagactgtgcttccgctttagataggtagtagttacaagggctttcacgggagcccttgtgccttagtccctgtgtccgtttcccattgcagctgtacaaggttaccccagatgcagtggcttcaaacaacacacatttattctgttatagttctggaggtcagatcctaatatcaaggtgttggcagggccgcgttccttctgcaggctctagggaagaatttgtttccttgctttttccagcttctagaggctgcccacactccttggctcatggccccttcctctgtcttcaaaaccagctgtgtagcatcttccgatctcttcttccattccactccatcctgacgtccccttctccggctcctctgctttcttttttcatttgataaggacccttgtgattacgttggacccatctggataatcttgaatgatttccctgtcttaaaatccttgacttaatcacagcgacagtgcctctttatcatgtaaagtcacagttgcaggttctggggattaggacttgggcatctttggggagggtggtgtctgcccacctcagtgtccttcctctgtgtttctcctgagggctgact

SEQ ID NO: 25244 - DNA, 1096 bp, Homo sapiens
cagtggactgcgtctcgtctcccttggactggtagtgacagggctgccctgcacgccacactgctctcctgttcctgtagtgtcgctcatgtaaaatgcactgcaggctggtgctgctgaatcggctcactttctcccatttccttctcctccactttcagatttctttcagcactctccaacttaccttcagaaatgcaacaatgggccaggcgcagtggctcacacctgtaatcccagcactctgggaggtgggtggatcacctgaggtcaggagttcgaggccagcctggccaacatggtgaaaccccgtctctactaaaaatacagaattagccaggcgtggtggcatgcacctgtaatcctagctcctcgggaggctgaggcaggagaatcacttgaacccaggaggtggaggttgcagtgagccaagattgcgccattgcactccagcctgggcaaaaagtgcgaaactccgtcttcaaaaaaaaaaaaaaaatgccacgatgtatgaagacctgcagccccttatctggaattcaaaaaccccaaagcactgatttttgcagcccactcatttggcagcagaacctgagttatctgctcatgtgagagtgcacctttcattacaaaagtacccatgcgtttgactaggggtgctctgggacgtgggttagccaactcaggccactgccccgtttttgaacataaagggttattggaacacagccatagcctttcgcttatattgcctttggctgtgtttgtacctggtccttacagaaaaagcatctgtacccctgctctggagcggacctgccctgctttgcttgcaaggtggtccgagcctgggtggaaagcactgcagggcagcttgtgcagaaactgggacctgctctccttgtagagacacaaccccagggtacttggagctcatgctaatgactaaatcattcaagccttcttcttcctggattttatacctcctagttctttgaggacagtttgccacgttcagcaggattttccagaccttttatttctaaggaatacaaactagaagggcctggtttctgtaggtgacaaagctgggggg

SEQ ID NO: 25245 - DNA, 1040 bp, Homo sapiens
tagaggcccattacataccttttgtggattagaactgtaattgacttagtgtttaaggcagaaactaaggcctttgatttaaaaactgttgacagatcggagcctaagccgcttctgtttgcagaggagagccatgacttccagtcaagttgaaacatagctttctttatacccttcccagttggacttctgtcatattttacaaaattcaaggcttttcatttaacttagatttatggcttttccatggactatcttgaggtttttctccaaagcaaaccagctcataccttgacattgtcaaaatagcaaaaacacacatcttaacaaatgatggcaaaatatttgagctgagagattggggtatgtgtagtgttacacctttgcatgtaaaagattatgtcaagcaatcttctaaaggaaatcagtttttagttaacttttaaggctattcaccatgatttaaagtgattccttgattcctctgttacattaagtgtgattgaaactgtacctttattttctcatgccttgataagcagtgtagtcaaatcataacatattatgactgcaatcaagtgattatagcacgtgattatactttttgtctctgtggcgtgaggagtggaaaggtgtctttttttgcaccacttggcactaacggtggggagagatggttccccgaagccccctccctcttgtgtgttttggggcagagcgccctgttcctgaatagcacggattgcacgtgtttctgagcatggtgtgtgagactgctttcccttcctgcagtcaactcgccaaggtgcctccccagccccagcagtccggcttctctcctttccgctgccccatgctttctggtggcctggcagactcaggactatctctgagtccttcacaaaaccctcctccacatgccttcttttgtgaaaaccctcagtcctctttaagagcagggcccctggagccagacagctctggttcagtcctggctccggtcctctgcagctgggtgaccctgggcaagtcaccatggc

SEQ ID NO: 25246 - DNA, 1057 bp, Homo sapiens
tgttagcaggagttggcacttgagtcccacgtcctagcctcccggcatcacagccttatgctgcatttcctaaagtgctttctagcactgaccgactccaggaggcagcactggcaaggattttggtgagcctttgatggagtgtgttccggaatcgggaggaagcttgtaaggctgctttccactcattttatgttgttgggatttggctcggaacctgccaaggacccctgtgtgttaaagttgaaatagttccctagtaaactggccactttcagaccagctgcattttctagaataaacttcatttgtccttgactcataaagggaaaagccagaagccaggggctctggggcacctccaagtgggccagggtcaggtgtgggtcctctgcctgggttttaatgtaaactcagggttttaatgtaagaacctgttttgtttgcttttgtttttagaccaagtctcactctgttacccaggccagagtgcagcagccataaacatgtcttactgcggccttgaaccttggtcttaaatgatcctcttactcagcctctcatgtaactctggggtaactccaagtgggccagggtcaggtgcgggtcccctgcctgcgttggtctcactgccatataaccccagccatggtgatcttaccagagaaactcatttgaacctatgcggctgcttcaggccggtggttgttggcctgataggaagagagcatactcagcctcatactcagcctctcgtgtaactgggaccacaagcatgcaccaccatacctggctaatttttttttttttttttttttggtaaagatagggtctcagaggtttggtgtggtggctcatgcctgtaatcccagcactttgggaggctgaggcaggtggatcagttgaggccaggagttcgagaccagtctggctaacatggtgaaaccccatctctactaaaaatacaaaaactagctgggtgtggtggtgtgcgcctgtagtcccagctactcgggaggctgaggcagaattgcctgaactcaggaggcagaggttg

SEQ ID NO: 25247 - DNA, 1734 bp, Homo sapiens
tgaaaacatagtagtggcacagcctcctggagagtgcagatgtagctcatggtacgcttggggtttctgcagagcatgacatcaggctgtcttccagccttgcctcactaagaacttgaagcatgaccctcaataaaccacttttttttttttttttgcatggaaatctgtgaagaaagaaggccttgggaaagcctgtgtcctggcctgtcattgaacgtaataattacattaacaagtgaatgatttaagttctgcactctttgttcttataggaacaaggttaagggacgactgtgttgtgggttgaaatgtgtcccccaaaatagtatgttcaagtcctaaccttggtagctgtgtgtgtggccatacttggagatggtctttggctgatgtaattagttaagatgaggtcatactagattggagtgggtcctgatccagtgatcggtgttcatctgagaagagggaggttgtgacagcaacacgcaggaagggccatgtcacgatggaggcaaaggtcggagcaagctgtgctaggaagaggcaaggagggatcccctcccccagccttcataaggagcacggccctgcagacaccttgatttttgaacttctggcttccagaactgcgagggaatacatttctgctgtttgagccacctggtttgtggtacttgattacagcagtgctaacctccccacagttacccacaacctctgagtacctgtttgccgctcactcctccctctcccattgccacgtggtctctgcttttattcgttttctcagcggaaacttggaggccattggctattgtgtatcgtgtatcgtggctaagtcattacctttttttttttttttttttttttaaagaaaacccaaaaccaaaaaactccttttaggcgtcacccccctacccacttaggtacagtgctgctgctgctgcccccggcttcttgaaaccttctttctgactctctgagagagactcttgtggatatcttgtagctctggcctttttctttagctctggtctttccctctcttggctgtggattcatttcttatcgctgttgtaacaaattaccacacactaagtggcttaaaacagcatagatttattacagttcggaagctcagaagctccaaatgggtcttacgggcctaaaatcaaaggctgtgctccttttggaggctgtggggtagactcgatttccttgctttttccagcctcaatggctgctgcattcctggccttagctctgtatccctctggcctctgccgtggtagctgcgtggcctgctctgaccctgacctcctggaaggaccctgtgattacattggacccacctgtgtaatccagaatccttgcaaaacccccatctcaaaatctttcacctcttcacatgcacacagtggctttgccccgtggagccacatgctctcaggttccaggaatgagtctgtgggcatctctgggggccactgttcagcctgaatgtgttctgaggcttagtattttgtctctttgagttctacattcattttgatccttacatcatcatctgcaggggataggtgattctcaatctaggtttgggaagaggaacttaaggctccacagaaatttgagtccatttttacttaaatgtactttttacctttagaaaaacttgtaggtaaaaaccaacaggtgcattcaaaccaatcacacgccaacttttaccac

SEQ ID NO: 25248 - DNA, 1028 bp, Homo sapiens
catggtcttgatgcctggaaacagctcctgggcttctcaccagtattgggagctgactcttagaaaggcagccttcctggggagcacaccctcgaggggccggaaaccgtgaaactgaccagaagcacataggtccagtgggcactgaaatacattctcaggaaggaagtgtagctgaagtccagaactcagcttactctcactcctgggcctgctgctgccttaatgtgcctgctcctgtgtttttgttctgataaacacgtatagcactttcaattatgctgttacttacagctaagtaaagcagtactaggtggatttgtcagtgccacttcctacaaagtgaaggctggatttttgggggactcatttccagcagccaccagcaggtggagggagtgagatgcgtaaacaaactgtccctcatgcttggtgtttgggcagatgcattgctaaagcgtgctcactaataaatcccctgctgatatggcacaaatatttatagccgatgattgatgtgaaattaacaaaaactagcagttgacagcgatatgaggtggcaaaggctatttgggaaagtttccgttgtctttgaaaattaagaaaaattatacgtttacttgccttgctaagaactgtttaagaataaatcaacataaactagggcagcttcttaaactatgatggagaagcacaaggtcaaagtgtttcgtctcagaatgaagcagtaatgtattactttgcgtactgtgtacaggggccggcagatgtttctgatgttatgaagctatgctcctggaagtggttgtgaaaatcgcagccctgtgaattgtgtgccctaagagccagctgtgctcctaacagtgatgccgtctttccatggaaatcacccataagcacagccttcagtctaacttcatgtcaagtctaagtggcacagctatccatgaacactgtaaacattcccagctccatctaaggtgattaaacggagtcagaacccggccatggatgtgtattcactgtta

SEQ ID NO: 25249 - DNA, 1050 bp, Homo sapiens
ggacctgagagtctgtgtttctggtgagccacaggtagcaccccggctgctggtccctggtctggggaaaggcaggcagagttggagagacccttcccgggttcctggttgcaggtgctgtgtcatcgtatggctgtatttgaggggattgtgtaagaagatgttgttaaatttatttttagaataatagacttttagatagaagagaaacctcggaggtcaatcagctttcactcttcctctcttgtgccccagtcctagtgatgagaaaagcaatgatgtttcccaaggccggggctgtcgactgaattgtgtccctgcaaccccgtgtgatggtattaggaggtgggtctgtgggaggtatcaggtcatgggagtggaccccttgtggtggcacgaatgcccctcaggagcgcttgctctgtaccctatgaggacatcatgaggagatatggcttctgcaggaagaggcctcaccaggaaccaaattgaccagtaccttgaacttggacttccagctgccagaactgtgagaggtaaacgtgtgttgttgaagtgcctctgccggtggtctttgtgatagcagccccagccgactcatcacagccagattaagggagatcaaaagagttaaggttccagactccagctcctgagttcttctatgtggaaagatgccccttcaaccaccaaggccagggatgccctgtggttcagcgttgtcacccttgttgcccgcctccagggcagagctgggggcactggaggtgctcaggacgtgtggagcagaattgggagtgaatgttgtgtgctcagggccacctccactctgcaagcacagctcccagagatgaggacggggcttgctttgtcctctgccacacacagcccttcatgcaaggccttggcccctccagggccacacaccttggccacccagcaagcaccccttgcttggccagtctttccgtcacttcctttcctttttccctgtctcctgagcttcagactagttgaccctaaggggtgtctccagctgtaaataactgt

SEQ ID NO: 25250 - DNA, 1044 bp, Homo sapiens
tgctttattttctacttgtaatcgtaatctgagtgcaatttcaggactttgttttccagatggcttattgtttcacacgttttcttttctcagtgaagcccaggtaacctgctgcttgggtgtacgctgggcgggttcgcagtgctggaagagagagtggacagattttacaccagcacctttcatctcaggggtgcttgtgaattgattgcacccctcctgtggcgtggaggcggtgcctggttaaagtggggctcagatgccccttggttgcatttaatgtgtgtgcataatcagagggcaaggacagcagtaaataatttatgtcagctggagcccttggccctggtaatgagatctcaggggcagcgcctagagtgctgggcccttccagatgatctatgaattggtctttgcctttgtacttattcaaactgacaaatacttacttaatagctgattgtattcaggtgctaagggaaaagaacgtgactgtgtgggggtctccctgactccttagaacctgcaaatgcatgaaactcatgttaagaacagttgtggttcacgtgtaccaaacttgggaaatcctgaccagcgcatccagggttgcttgggcacagtggtccttttgcatggggtggccggccaggtgtgctgagtgccacctgggcttgcatgccggacgcatacctggcacctgcttccaggttggcctgccagccgatgttgtgatcttgtggagggaatgaccccacgtctctggattctggcttctgcttccagtgagactccgcccaggttatgtttgtggccttttatctctccaatgtgaggcatctctgatgatgcctaaggatgtccttctaatttggagttaacctctctttcccaggtgaggttagcaaatacgtatagattgtaacaagagaattttgcatttcagttttgttttttttttttttttgagatggagctcacgctgtcgcccaggctggatagagtgcagtggtacgatctcggctcagtgtaacctctgcctcctga

SEQ ID NO: 25251 - DNA, 1518 bp, Homo sapiens
tggcgcgggcctccctgtagaatgaggctcctcctgcagttcgaggagaggctgtaattaacagtgaattagcatatagtggcgccgtgtggcccgcagggtggccttgtccatctgctgtgtaggggacttaggtgacacctggctagtggtagtctgcaagaaccctttgttaatgggaatattgtgcatgagtcagaattcagaatctttggtatggttttttttttttcccccttttgtgtgttttggccaaatactcaaaagcactaagttttcttgcgtggtatctgttcatatattgattcaccaaatattgattgtacatctgcgaatgtgctagataccctactggtgctggtgagcagaaacaggcaaggtctttggcctcagggggtccttggagtctagaagggatggtgacattggccagagtcaccccataatcatacagttagcagtgtggccagcgtcacttaaagcggggaggtggctggtgctggagcgtgtataacaaaagtgggatccggaaagggctgctggcgagtgggagttttctagggagccgctgctcttgcttcaggtctcagatggcataggagtgtgtgtcatcccagaggagcagcagcaaacggcctgtgatgggctggatgtatttggggagggaagaaggcagttgtagctcaagggagagaaaaggcaaggagaaacatggcgaggggtgggggctttgctctttagcccgtgagcagtggaaagtcattgaatgctgtctggtgtaaaatctgttagcagtttcacttccatctggagcacccaggcctgcaggagtgtgggttggctctctacccccgttgcagattggcttgtggtttggggtgtgccaggctcaggggcagggccctttttccacacgcttagggaagatacgagactggctaactcagtattcaccgtgaattcttttgtgggaaatagaacacagcgttgggtaccaagagggtgctgtcttttcctgttttcttggcctcctagggaatcagtttgattctgtggctattaaattaatggtttagctgagatgttttctctactcagggcccaatgccgtatgtgatattttacaacaaatttggttcactggggccgacttgaaaatagtcaaagtccaagtaaacttctgcctgtgtgtggtgcgctcaaataaaggaggctgttcaaggtgagtggttttcctggcggtgtggttttttaaaatttctaataaaatgcaaatgattacagccccttccatgaagagtgcaagtacgcctgactcctccgcgcagggaatgagcagcctctgctccttcatttgattgctatgacaacccacagaggtgggtgttgtcacttccactgccagccagcttgcacggtccagggacgtccccaccctcggttgggttgtccagggtcacatggttgggagtcagaaccagacttcaaagggcatgtgactacagcatccatcctccc

SEQ ID NO: 25252 - DNA, 1046 bp, Homo sapiens
gcattggtgcattgctagaggaaagcacccagttcactgtgtatctctgtgtacctgtgtatttcatcgacacatcctttggagtcttaaacacagcagcagcactgttgtggtgataattacgcaccctgcatatggtactgtttaagcaacaaagagctgagacttcggaaggttcccaagggcatccctgagatgggactcggtcctgtcacaagcagctgtgggagctggagcttagaagctgtccatcaaaaaaccaagtttttgtgtcaaaatggagtctctcaggctgtgaagcaagcccatctctaatcagttcagccacctgtattgcagactaattgtgaccaagacactgcgaatcatcagagaaagctgagccttgtagggaatctggggacagccgtaagttcttcctccacattccattttagagaggcttgtgttccacatttttgtggctttttcctcatcagatttctctgtgttcttgctttagtttgaaactgagaacactaattttttttattttgatcaaaataaaaccatcttttcaaaatgtcaaaatgtttaattttcagagagaattgagtttacgtaccacgaaggaggctctgttttgttccggcacacgctttggctggttattggtgttaggatgtgtttgttccatgtacgagtggatggagcagacagtgcctggtccacccccacctcctcaccctcagcctcccccccgctgtagacagtggccaaccgtgtgtcctcagatctgcatggaatttcctgtggcgctttctcaattctgggaccagttttccctctgaagcgtgaatgtttcctctccagttgggaatctcctgcctcaggacctggtggtctagaggtactgtggtataagtagaaagagcagctggacttagagacaggcgtcctgagtgttgatgccagccttaccctgaccctgtgtgtggcagcagtgggtcggtcaaacctttccaagcctccgtgtcctcatctgaaaatgggaatgaggatgccta

SEQ ID NO: 25253 - DNA, 1101 bp, Homo sapiens
tggctgctctggcttgccagtggagaacaggctgaggccggaggaggagggagcagccaggaagctggttacaacccaggcggagggctggcgtgggcctcaggggtcttcagcctcagcactattgacattttgtgccggataattatttgtcctgtgcatgtcaggatgttcaggagcatctctggcctctacctactagatgccagtaacatctcttccagttgcggtgaccaaaaatgtcttcaggcaatccagatcaaatgtccactggggggcagaatcacctgctgagacccactggttaaaatagtgtcagtaggggtggagagaaggggacaaaagagtcttagagccatttgagagggagcttctagaggacttgatggatggaatttggtcaaggcaggaatgagggtggatgtggggcatggggaattggacggatgatagtggcccacaggttgagagaggggatgggttcagctttggccatgctgttgtgagtctgtggttcccagggagcagctgagtaggctgttgggtgagtggttctcaagctcagagctgagctgggggcatccatttgaaggttatgggaagatggaaagcacgccctggaggtgggtgggtgagctcacccaggaccacggtgtggcctgagaagtcggcctgcgatagaacccggggaatcccagtgtttccagggtgggcagaggaagaggaggctgggaagggaatttgtttctctggccagagctgttgctcagcgactgttggctggtgaggatgaggctcatgaacagatgtggaaacatcgtgggatgatctcatggtgggtgggacttgtcgccgtcatgcactcagcactctctggcctttattggtcaagctgcctgctgtgtttctggtgcccaaatgttctgggcacactgttgtttggggaagaatcgcagggactctccttcactcttagatagtggcagcgcttgcctcgctgcatctcgtgttctcaaaatcagcacatgccatcccacattctagaccatccagttttgcttctcaggctctgaaaaacacttttaagagcaggttaaactg

SEQ ID NO: 25254 - DNA, 2022 bp, Homo sapiens
atagaggtttttagagttgagcaatcacatttcttttttcttttctgagacaatgtcttgctctgtcacccgggccggagtgcagtggtgcagtcatagctcactgcagcctcagactcccaggctcaagcgatcctctcacctcagcctcccgagtagctgggactacaggcgcacaccaccacagccagctaatttttatactttttgtagagatggactcttgcagtgttgcctgggttggtcttgaactcctgaactcaaatgatcctcctcccttgccctcccaaaatgctgagattatgggcatgagccaccatgcctggctgaggaatcacattttaatagcctcacaaagaaatcctagtgttgacaatataggtttttaggtctggaatgaacttccattctagtctaatttcatcctgattttactgtccaggctcttggctgaccagtgtgtggagaccctggtggcagcctagggatcccctccaggtctcttccttgtccttactgtagaccatcacaccgccactaatttcccccctctggccaggtgagagcagattgtcaccatttcagagaaatttgaaccaatcagaaagagagctcaggagtactggggtgactgagatgagcacatgtggcttcttgaggaccttccaacccccaagttattcttagaaagctgcacacaagccaggcagctgtaggctggcgttgaaaagtttttagctttagctaattacattgtgggagagactgactggggggtgtccatcccgtgtgtgccatgctgcctccatctctttctccctctcttctgagaccttctggttatccccagctacctgcccctccacctcctgtgccctcagggtgggcagtttgggtttctttcctttttcttttgtctgctgttgtttaggattgtgaaagtgcagcagtgcactctgtccctgcaacaggctctgcggtgggctagctccagtgttgcattctcccttcatcagtggagaaatgcactcttggaaccatgaagagtctgcacatgacagctctgcactcactaacattcaagcaccttgattcagagtttcacgagactaaggtgaggttacctttccctctctgttgttcttcccgtggaaagagggttttctattcacactgtacattcagccacagctggaaacctcatcttcctcttccagttaagacagtcatgtggccgggcgcggtggctcatgcctgtcatcccagcactttgggaagccgaggcaggcagatcactaggtcaggagattgagaccatcctggctaacatggtgaaaccccatctctacaaaaaaaaaaaaaaaaaaaaaaaaaaacattagctgggcatggtggcatgcgcctgtagccccagctactcgggaggctgaggcagtagaatcacttgaacctgggaggcggaggttgcagtgcgccgagatcgcaccactgcactccagtctaagtgacaaagcgagactgtctcaaaaaaaaaaaaaagtcatgtaattgtgacctcagttcgcaggacttcggaagcagggacccctcccctgtacccccgccaaagccaccatggtagctcctcctaattggatcttgggggactcggaacagggtttagcctgagaatgtgacttgtgagaaccccagatgagagtagttacacttttctggaaggcttatttaaaaccccagaacattcttgcattggaattgagttgcattgctctctgggacgggcagtgggctcttggaagaggtaagtgaagtcactgagtgggacgctcctcgggggaggattttgtggggcagtgggaacatcagtctttcctaggctcaggagtgagtctagaggccatgtttatgcacaggaagcatctggaagcttattaacacagattcctgggccctgcccaagagatttcaattccgtggggccaagcaggccttgagactatgcagttttaatttattgtttta

SEQ ID NO: 25255 - DNA, 1101 bp, Homo sapiens
acttgctggcttgttttaaaaccaagcttgcttctcactggcctgtttaagtggaaatgaagtctcagtgtggggtccgatgcttcctatggctgcatggaggaaaggagtctgggcctgaatctcccgtgttcctcatgcatgggtagaactaaagcctcttcttctgtaatgtggcagttcccattctcagaggataaagtacgtgtgagtgatgccacctcaacccttagccaggtgcaggcgtaacaagggagacccacctgtgcaatatagtgagacccccatctttaccataaatgaaaaaaacgttagccaagcatggtggctcacgcctgtaatcccagcactttaggaggccaagatgggagaatcatctgaggtgaggcgttcgagaccagcctgggcaacatggcaagaccctcctctctacaaaaaaatttaaaaattagccaggggtggtgacatgtgcctgtggtcccagctattcaggaggcaggaggatcacttgagcccaggagttcaaggctgtagtgagctatgatcttgccactgcactctagcctgtctgtgtggtggtgtgttcatacacaatagacatcgccagtgttctgttggcaggaattgctatcgttggtccttaaggaaaaacacaggaaggatgcaggtgctcagaggaccttctggggtcttttttcctgccagatcaatgttcctgccctacagacagaccatacttgtccttcctccactagcagataagggtcaagtcctcatctcttttacagttccacgtttaaccttcagcttttaaaacgagagaaatagggtccccagtgagttcagctggagtgtcccaggcaaagggatgcgtgcagaattttcagttcctagaagctgagcatcatggcaaatcttagcttagaaaccattctaccatgacattctcagatgagaatttgagtcttatgctaaaaatataaaagtattaataagacgttactgtcttggtaattgcttcttcttacatgtatctgtcagtcaactggctaccagaaaatagcctttgatgtacccacggaggggctcttggtgggctcc

SEQ ID NO: 25256 - DNA, 1069 bp, Homo sapiens
tcctacagtcattttctcaggttcttgttattgtagcagcttgatggttgcataattattcatcatacctatcacaatttttaaatttttattgctcttcccactttagatagaagctcagttactcagaggctcaacaataaattgaacatgtagtcagcatgtgaaaaccccagggtgggtttttagcaagctcctgaaggcaggtgtctggagattagagaggagaggagcacaggggagccccgtgcccatacctgtggctggttggtggtgtaggcaggagatggtggcctggaccaccacgggcatcagacatcccccccccccaccccacctaggctcgcacaggagggacggggaggcaggagggaaagaactggtcgggcaggacgtccctacatgccccctcccttcccctccagcttttctcctactttggtggggtgttactgctggggcatgggaacagcggatgagctgggtcagggggatgggggtctagggcttggggagacctcctgtagatacaggcagtgtctttggttgcgttgtcttgctacagagagcctgatgtatttgtaagaagactaagaaggttttggatgatggtgatcaggtgcttgttccctttagcaggggaaattggggctgactttataacattggagctcactatatactagaagttgaattgtacttttttcccctggagttctgtgactcctttgaattctcacgggttaaatgggatcctggatactccctccctctttgtaaaacccctggagcattttgtggctgaaatttacttcttagagccatgaaatgccctccaaaaagtgaagcaccacatccaaattgcattccatgcccaaagtggttaacatccctcagagatgcaaactcagaagcatttttggttttgagagccacagtgctttacccataggatgggcaggccattccttctgctgactgcgtcagcagtccgggctccaggagaaccagcattcgcagtgggggtgtctgcactctctaccaagctgtccaggttcaggaattaaag

SEQ ID NO: 25257 - DNA, 1035 bp, Homo sapiens
cgagaggtctttctcaggcctcttctacaagggcgctaatctgctcccacaactgccacacctcgtaatacaatcaccttggggattaggtttctttgtttaaaattttatttattattttgtttttattttttgagacagagtctcactctgtcgcccaggctggagtgcggtggtgcaatctcagctcactgcaacctctgcctcccgggttcaagtgattctcctgcctcagcctcctgagtagctgggattacaggcatgcaccaccacagctggctaatttttatatttttttagttgagacagggtttcaccatgttggccagtctggtcttgaactcctgacctcaggtgatccacctgcctcggcctcccaaagtgctgggattacaggcgtgagccaccatgcccagccaggggttaggtttcaacatatgagtttggctgggagtgtgggggtaggacggggaagcacaaacattcctaccatatagttgaaggcttgtcagaggaggtgacatctgaactgatagtaagagtaggtttcggggaatgattgatatggaaagctttagttgcctggagacagcaaggcctgttaggatggggcttggtagctgattgactagaaggccaagcagggagcgggcagatgagaggcgggagggttgtaactggggtgtaagaggacaggaccgagcataggttttagaaaggccactctggctgatgagtagagagtgggagcggccaggactgggtgacagagaacatttggatccatgagccatcactcagacagcagaccacggtggcctgtaaatcactgagaaccttttttccacactgtcatgccaaatttgttctcttatatgtttgtttgttttcttttttgttgttgtttttgttttgttttgagacagagtctcgctctgtcacccaggctggagtccagtggtgtatctcggctcactgcaacctccgcctcctgggttcaggcgattctcctgccttagcctcctgagtagctgg

SEQ ID NO: 25258 - DNA, 1030 bp, Homo sapiens
tgacttggcctcccaaagtgctggtattacaggtgtgagctaccatgccatttaccttttttatgcttaaaataaatgtataaaatattaaaaatcattttcctcccaagaaccaaacgtgtattactaaatatgtttagttgaccatgcaggctatttgagagacagtgggagatgctgaaatattcaagcaccactgttttggtgggtatcggaagattttcaatcaatagtttacttatttggttatgtattaggttgtattgggtggggccaatcattatgtgactatttttttcttcagagtggtgattgaaaagcagcccccaaccgttttctccgagaggtgcatgctgagcctgcctgcagcttacccccaacccccagcccctagcccggctctccttgtcttacatgagtcagtttccttctgctgctattctggacaaaaacctctatcaggacagagaccttgtcttgttcaccctattcctggcatcaaggctgtgtctgacatgtaatggggatggctgtttgtttggtggtggttgagatgaccaagatgttcttgacctgtgtagggtggtagtggagaaacaggcacaggcccttgtggtgtagttgcgaaaaaggagctcacactaatgggaaccagattgtatcattggctgagtatacagcagatgcgttcccctttgttattttatcacttgcttacctggaagctctggtctgactttaggaacatgccacacacttggataaacatggactcctttactagagatttatagaatctttttcctagagccatttgagaagcacttgtccaagacgtgctattttataggctattttgatgtaagggaaaagacgtatcctggatcttccagaaagcatggaattatggctgcgtattaggaagaggcctggctttcctgtgggaattgaacagaagacaggcatctctcatgttctggttgttgcagttttgcttcttctgttcattgaattagcgtttcagagctct

SEQ ID NO: 25259 - DNA, 1048 bp, Homo sapiens
ttgtcctacttacggaggatgggagtccagggccaggtgctggtgggtgtggtgtctgctgagggccatcctcctagtgggatatgtgtttgcatagtggagaacagaggacacaagccctcgccagtcccttcccataaaggcacttaacccatcacagggttccacccttgtgatcagtcacctggcagaggccccacctcttattcccctgggggtcaggatttcagtataagaatttgggttgagttccataccacacccagcacgttcaaggcagaggacaggcagccacccacctctgtgttggaagcatttcgttttcttcaggttgggggtggcaagaggagaataaggactgatatttctaaatattagtttaaaatattcagaaaaagcgtttccgttactgtgacagctcatgtcgcacctccccaggtgatgctgtgatgagtgtccgttttcatgggcacaggagatttccgttccagtttcgtattatagaaataatacactctcattatgtattcggattttggctgggcgcagtggctcaggcctgtaatcccaacactttgggaggctgaggagggcagatcacctgaggtccatagttcgagaccagcctggccaccatggcgaaatcccatctctactaaaattgcaaaaaattagccgggcatggtggcaggcacctgtaatcccagctactcaggaagccaaggcaggagaatcgcttgaacctgggaggcggaggttgcagtcagctgagattgcacaattgcgctccatcctgggtgacagagcgagactctgtctcaaaaaaaaaaaaaagtaggattttatggaatttgaaaagcaaatacctgtgaagctacaacttccgtgactattgcgatttttttgtccttaaaatattttcatatgaagataacatttttaaaataaaatcagttactttgtatattttatatcatagttatatggtatatggtttcttatttgtatatgtattttcatgtaaatcacaaacactctcattgttagt

SEQ ID NO: 25260 - DNA, 1075 bp, Homo sapiens
tagggcattctgtggggagccaatgggtagagctggggcccaaggttcaggtgttgcagtcgaatcagtaaactccggcggcatccagggatgtgcacggtgccggggcacattcacagaacctacctgcaggtgggcacggctttgtagagagggtaggcacagccgccgtgggatgaagcctgctcccagcactgttagcggttgacagtgttgtcggggatctgggcagccatgtgggccaggccccagtttggccagcgctgcagcttcctctctctgattcatcgagttcccagatctgtttcttacagaagaagaaacacctgctgccgaaatacagtttgaaaaaccctgatctcagaaataggattcctgatgacagaccttagcaaatattccaataattataccaactgtactaaagatcccagtactcgagtaattcaccataaatgagtgaaaattattcaactggattagaaattgccagccttggatccttttctcagatattttgttttcctgggtattttccctcttctgggttcttagtgcccgtcccccgtagctccgtcacacagtcctgttgctgctaccttggggcccaggcgtgtcttttgtcccccagtgcctggcacggtgccctccaggagtactcctgggattggtggcaggtcatgcagtcattgctcaccagagccaggacatgcctgggctgctgagtggggcgtgcccaactctttctgctttgagttttctttttcctccagtggcaaggtttgcgtggtcttcactcttttgcagaaaattgttggcattgcatcattggcttatgctactaaataatgttttaaggaattggagttttgcgaggagatggtgacaagcctcactcaggtctttggtttctgtcctccttcctgggcaggccctttgcccaaatggttgttaaagaaatgcaaacagttagttgttccgttcatgctgttgcgtgagataagttaggatgctcttgaagaagtttagtgacattcagaggaaatccttccaacacaatatacaattaattgct

SEQ ID NO: 25261 - DNA, 1047 bp, Homo sapiens
ttttgttttatttggttttatttgtttttttggagacaaagtcttgctctgttgcccaggctggagtgctgtggcgtgatctcagctcgctgcaacctctgtctccagggttcaagcaattccaccatgcccggctaatttttatattgttggtagggacagggttttgctatgttggccaggctggtctcaaattcctgacctcaactgatccgcccacctcggcctcccaacctgctgggattacaggcgtgaaccaccacgcctgaccaagtcctcatgtttctaaaaattataccactaaatagtgtagatcctacctaacctattttcaacattgaaaaattctgccttcttgcatttctagttaaaatgaaaaaatagaatatatgtgtgtttctataaatagcagatttaacagtgtggctggagggtttgagtctctaagcttccagtggaatccaagggacatcgtcctaccagtatgccgcgtgatatgtcagatcgtctctggccgtcctttgtacccaattgataacattttgttttccatttttggccttttcgtgttactcattgaggccaaaaattcttacacaaggtaaataaatcaaatccctctggtttcctcagcaacagtaagtcacagccgaggactcagtaggagaggatgactgtggggggtcatgaggaatgttcttttacttctactaagaaattgaatttcattattatattttataaatattttcttctttggcttataacctgattgcgggcttgttgctgaggtcttggaaggtaggtagggaggggcagggctggagaggcctgtttcttctcaggtgtgcctgtggccccagatggaaaccaatcaaggtgcgatttatgttcattaagtgcttgtcaaaactgaaaaattttctaatcaacagcaatctagctgcagccccctcgatggctgggagggccacctctgccgcatcggctatttgcctgttacaactctaggctaaaaatccgctgatgattacattaggctaagct

SEQ ID NO: 25262 - DNA, 1023 bp, Homo sapiens
gatgtttaacattttcaacaggattacatgcagaatgttcatggtaaggagattgaccttctgagaaccactgtgaaagtcccagggaagaggccaccccgagccacgtcagcctgcgcacccatctccagccctaaaaccaatggcctatccaaggacatgagcagtttacacatctcacccaattcaggtaagcttacagcaaatgcactaacaaatcaagttcaacagcaacaggtggtccaggctcgaggataatgttggactcctaggttaagtggagacagtaactatcacattacagattaaggtttagaaacctgatcacttctgtggctgatcatttcctttaaactttcagttccgcaaatgccagcgagcaaatggtgctttgagtcacagctgcaaaaaccatgcatctaggcctttccagggctgcatagtggaaagtgaagttaacatgtgaactgggtttttaagatccttctgaaaaacgtgaattaacgttaaagtgtcaaagattaactcatttctgataactgtatgtatgaaagtggaaaaaccattcggagcaagattcagaggaaaccatttgacctatataaaatgtaaattctgtgttgttatattttaattatctgccattctttaatgcaactttagttctctgtattctcttttaaaggagattttttttcattcaggatcagagaaagctgtattttctcaaatgttgatgtgtttagaaattcctggcctctgtgcccagttgcaagccatccaaaatgacattgttcattttatttacgtttttgcaaataattgccctgtgtcatgaaccttcccatgtctgctcatcagagataaggagaagatcctcttgagccctcccataaacacacacacagagtcaggctccttcaacatggggacatcccttcaagaatttgcattttctcctgcagaaagtccagaactttcttctctcccacctacatccagtcttcttaaaacagatttctg

SEQ ID NO: 25263 - DNA, 1030 bp, Homo sapiens
agcctgtccaacatggtgaaaccccatctctactaaaaatacaaaattagctgggtgtggagatgtgcgcctgtaattccagctactcaggaggctaaggcaggggaatcgcttaaacccaggaggtggagtgcagtgagccgagatcgcaccactgcactccagcctgcgcgacagagtgagactccgtctcaaaaaaaaaaaaatctatcaagcacctattttgtgccagaagttgtgcgcactgcagatacggagtccctaacctctagaattcttccatttccacctcccttctgaccatcacatctagtcatctagttacataagtaaaagcatttattgagtttcatttttataattttaaattgataaaaatgtattaaatagaattaatttaacttaaataaaaatttattgatctttgtaacatggtgttttgaattatgtatacattgtggaatggctaaatcatgccatttgtggagtttctaacgtgtgcctgagtcacagttcccgccttcaggaatctcccctgttgttggggagaaagacaagtagatggaggccacacggagccacaggccccaggagggctgtgtaaagggcagggcttggagacccagtgatgctgcggtcggctccccaggaggtaggccaggcttcaagggatgggggctacctgctgagtttgaataaaggataggaatttgccaggcacacagatatgaaggaagggcaccaattctgtgaagaagcgttcactatgtaaaagtaggattttgaacttcctaatcttgagatttatgttccttggagccaaatgccactgttgtcctaagggaaacactaatgtgtgattttaagtagataatacaaaggccctataaaccgtaccatatctgatggagtcggctgtggcatgggcctttctctttgagggagtgagttgtgtgtccttggaaggcatttcccattgcccagtttcattctctttaagagcccctgttgggcaaatgggagggttgcg

SEQ ID NO: 25264 - DNA, 1031 bp, Homo sapiens
ttcttattgatatctgagaactccttgtatatttaggatatgaatatattttgcaggtatttccccagtttattatttgccttttaaattttatggtcttctttacataaaaaggttttccctcttttttatttataatcagattatcttttactgttgtgatttctactttaagctatttagaaaacctttcataatcttgaaaccagatcacagtttacatatatatacttctaagttttaattttattgtttttttcccttaaaaaatatatgtatgtgtttatgtgtgtgaatatatgtatatgcatatatatctgtgtgtatgtgtgtgtatacatgtatatgcatgtatttagcccctaatccacctttaatttgtttgtgtctattgtgtgtgatagaaatctaattgaattttttattcaaataaataatcaactgtcgtttttctctttgttgaattttttttctttccctattaattccatatgttgcctttgttgtagaactcaatcacttcatcaaatgggctgtgtttctggcctctcagatgtgttccgagacctggtgtccctgcattgtcttaccttatgtagatttaccacagtgtcttagatgtatgactccgtttgtatctggtagtataacacagttgaatatttctcttttatcttccagtttttcttggctactgctgcctgcttatttttcctcaaatgaactaaagagtaacttgaaaccttctcctccttgataaaaataatcccctcattggtgcacatgacatcaggacctcccgaggctgtgatacgggcacgtaaataaaataataaaaataattctatcatggcttttaactggcattgcttttaagctatgaattgtggaggaagtggcatctttactgtgtggagttccttatcgtggaacactgttctttcccagtttattcaaatttgtattatagcctccagcaaagttcagcattttttttttttatttagctgctggacatgtcttgttaatct

SEQ ID NO: 25265 - DNA, 1075 bp, Homo sapiens
gcttccacagttattttcacatttaagtagagagcaggaaaacataatgtccaagagcaagggtttcggagtccaaatcactgaatagaatcccatttctcctgtctcagacccttctgaagttgtctcactaaaccccagcttccttgtttttaaaatggggaaatgatgtccacctctgttctatggagaagaacacacggcattcctttgaaaagcttggccgatgctgacttcacagaattacatcattaattcatcatcatggttatgccaaaagcaaggaagaggggaaagaaattatgttcttgaattaatttttcaaatacaataaagcattgacatagcctttgagtggacataatggacatagggcttagacttcacaaacccatgctccccaacagacagcatcccactatcatggcagcaagggggcagacagaagaaatgctcttctggactttcatggatgtccatggagctgtctgctccagttctgtgtcctgtggtcactttattctgtaactcctggttgtgacatttttgttctaggatgacagataccttcttgtctctaaagtgtgtctttgttgggtttttgcaactatggatatgtttttatcctaaccagattgatgcttagacctttgtcaaaggaatcctttccccttctcctctacatcccccccttccctacttgaggcccccagcggtttcgaaatattaaagccttcaggagggttgaagctgattttccaggggaggtgggggaggcggggacagcaaatgtgttttgagtattgaactgccgttgacatctaaagtctcaaccatgctgttttctccacacttcagcaatcaggacatccagcaaacccataaaaaaccaaactaatagcatgaatattcagtgacctagaatactaattattgtcatgaatattaatgtgatcggacttgctctttcctctcctctttctctctcgtcctctttctccctctctccctctctttttttccacttagccggctctaaagatgggtcataatgagagcatttaagagggagcgc

SEQ ID NO: 25266 - DNA, 1050 bp, Homo sapiens
cttcgagctgacctggactgtgtttagaacagtgtttggtgcacttgtatcctagcttgtcttgatgtcaggatccttacccctcaagcaatcaaaaaagttatccagcttgtttcacaaatgagaacttcagaccttcagccttaattaataactcattaacgtgaaatgaattccagtgagtgaaaacagttgccctcgagtactttgagtgagaatacagtgattttaaacagaggctttttttatgcttaaagatatttccaaaagtgttcaaaactcctgtgtggtaacacatagggcaggtattgcttgatgcttacataacaaaactggatgccaggacagcattagtaggtcaattagttaatgacattcattcaagaacagaaatgagattacatattagactctgtatgcatatctgtatcaaaaaatgcatgagaaagtatgacactataattggatatggaatgtgcatgattattaaaaagattcactccacatttgggggtggttcgtttctttgacgggtggatttactgaaagtaagtggaaatgcctcaaaactgtggccactggcctgggactgctgacacatggcacgagatgctccatgggcgtgttaacccagcatggcagcttccacagtgtcgtggctcaggtcgtggaccactggtttgcctcagagtttaagcagatgtcttcatgcatttacgttgaaaggcaggtactgtgtttggatcccagaaacaatatttctgaccctgtgtaattttttttagtcaaatatgtttctgcattatcacacaaaatacttttgttttcttttgttggtttttctgaaagaaaatttaagtgatctcaaatatagtgaatgggtatattttgaaacagagatttactcccttaagagaaaatcggaaatgttttgcttatggaatgagcctcctcctccgcatatttttggaaggtcctgaccagaggtcaagagtgaggtgggttgagtgcagtggggtgtggggaggcaggtgtgagcctgggcaaccc

SEQ ID NO: 25267 - DNA, 1076 bp, Homo sapiens
tgtgccagcgtgtgggtcccatagactaactcgcgctggtttctgtggtctgcagtccgcggtggtgttcacctgacttgtttattcctagggaatgtcactagtgcatctgggtctcagatggcaagcggcatcagcctggtctccttcaacagccgacccgacggcatgcaccagcgctcctactcagtctccagtgccgaccagtggagtgaggctacggtcattgcaaactcggccatcagcagtggtaagagggggctcagccccacggacccgcagccacctcaaggtccttcgttgtaagccaggggctggacaggacgccctaagctctcatgctcctctgggagcgcagcaccctgtggggcggctgcatcagagactcacatcttgcctttcatctgtggaacgttttgtccttgctaggctgtcttgcccctgtcatctcatctgttcctctttggcacagggaggaggtagtcatcccatttggtcagtttggaaactgaggcggcagacagggcaactggcttacccagggtcacgtgacagaagtggcagcgctgagaaataagatctgattttatctccccaatcacactgccctacgtggcgtggcccacactcttccaccactagtgcacattttatatcattagggtgaattcagtctccttgtctgttttccagaattcctggtgtaccctctaaattctggagtcccctttgtaatccttcagttttcaaattcctttggcattattattattattattattttgacaagtgtatccagctttttggggaataagcatgcacgttggaaacgatctcgccgtctgtgtggagcgtgaatgacgcagcaccgagggcaccctggtggctgcagcagggtttgcctgtggcgttttgtctctggcctgttcaccggtatttaaaggaattcccactgttgtatgtaatctatcagacggggttttagagtaatcttagcataatttgttctaattaaaagattcagcatcaggtcttccctgtagacccaccagctgctgcagcaggacgtttgcttt

SEQ ID NO: 25268 - DNA, 1090 bp, Homo sapiens
tggccgtcctgtcttacttcaagacaagatgcacgttgagatgcgtcacacctgtcctcagggccagagtgctcacctgcctgcctgcctcctgagtacctgggtgagcctggcccggccctccccgctggctcctgcctgggccagcctcgtcgggtggtctcagctaatgctgttgccatggcagcctcgctcccccagccctggactgtcaggttcttctgatagctccaccccatccccgattgcttcagtccaacagtttatcttctgccacgctgactggccatcactgttaatactgcatttcttcacgtgactcttccatgtggctcttgagcctcacttccctcggcctcccccaggccaccacgcagcctcgtcaccatcgagcacaaacaccatgtccatcttccacatggaaggagtgtatcacatgtgtgtgtgtacgggtgtatgctctggtccctgtttccttctggccacgtaatcattatatctttccagtagactctgtggttataaagcagccgatcctcaatggaaagcatttgagtttttgccagcttttaaatgtcttttctcattataaaaatgttttgcacgtcgattttgatgatgggggttcgaaacatgagtttcagcttcggaagctgtctgtcccacacttactttcggagccaatgcatttgaaccacactttccagcaagcatgtccacaccattcatcaattttaatcattatagttggagcattttttttctcttcttggatattatactgacaattttagtgtatgaccagcaggcggcggtaatgtgatactgccggtctctgacctggaagcttctttgatgggagggtatcagtgaagcgtggtggggaggaaatacatgtgttgacagcctccgctgttgtgaccttcatgcctaacactcgtttccctggggatcatcatctctgataactgagcttccaaaaggctgagaaaccaagaccatacttatcattattagccaaaattcaaacccagatctttctgatttcaaagcttgtaatcattcccctctgcttttttttttttaagga

SEQ ID NO: 25269 - DNA, 1051 bp, Homo sapiens
ggctgctatccaatactgctgtggcccagattattccacccgtggctcctgggggctcctctggctgctcccacaccctttgccctacaccccatctctgtggggtttcttttgtttgagcactttccttcctttctgtcagtacaaggtgcattttgtatctttcctgccacaatcttagaatcggctgtttcccaaagagctctggttccttttactggagaatggtattagaaaccagtgtcttggagctaggcgtgctcgttgcttctggggtgccatttcttggttctcttggccaacagagtaaagaacgaaatgtgtgtatactaacctgcatatgcatatatatctacaaatatttctatatgtaaccatctgtatctatatttaacagatttcatattcttactggcataaaattggaaataactaagtgttttaacatgaggaatggctacaactatgttaatactacctccatgatgcaactgttataagggacaggttggaaaactgtggaaacataatactttacattaaaaagtagtattttttattgtagagtctccaacaaaggtctctgttggagttacgcttacaatgtgatagttgtgtgtgtgtacggatatgaactttaaaggaaaaatggaaaaggtagataagccatggcttattcatattaaactaacataaaattaactttgcttctgccataatgttagtcttccagtgagttcttgctgaaacctgaatgaagttgatgtatttaattttaaatgaaagaaatgagacactttttattccgttgttgtgttagccctgcagtgctttttcaggccctcccagattaataatgaccttgtttactcattgacagtaaccaaagagcctgctaaaaaagttgtgaagttaaggtcaaagcagttttatgggaggaaatctgtgagtgtttaaaggaaggatttccataatagcaagaagagcccaaagttgggaattcttcttttgcttttccactctgatctttgtattaatgcttgattgactg

SEQ ID NO: 25270 - DNA, 1023 bp, Homo sapiens
tataccatgtgaatgtctttatcttcctttccaatctctcggtctttcattcccttatttttgacttaatacactgggtagcagggatggaaaaaagcagttacagtgggtgtccttgtcttgagcatcctgtaactgagtgttcaaaggtatgtttctgacatctcacccttaggattagtgacattgtggggtttagggatagattatctctgtccaaggtaatggagtcctcttctattcctcgttggctaaggagttttaatcatgcttctttctcttattgattttttttctttcttctggttgagaaattggacattctacttattttcttgcagaggtttaccacatggacttaatttacttaccaacatgtgaagtgagtccttacctctcccagtagagcagtacaaggccctatgacatcgtaactcccatgtcctcaccgctactctcacgttctccagcattttgacctttcccatggtagacattgtcattagcagtcatagtcggtattgtttttatttagttttttttttttgtttacatatttatcagttcatttgctcaccaacctgtctttcacaaacctgccttctaggatcttcctgaaatacatccttttttctttttttttttgagatgaagtctttccttgtcacccaggctggagtgcagtggcgtgatctcggctcactgcaacctccgcctcccaggttcaagtgattctcctgcctcagcctcctgagtagctggtattacaggtgcgtgccaccacacccagccatttttttttttttttcggtattttagtagagatggggttttgccatgttggccaggcaggtcttgaactcctgacctcagatgatccacctgcctcggcctcccaaagtgttgggatcacaggtgtgagccactgtgcctggccctgaagtatatcatttagtaatttccctagtggacgtctattggtaataagcacttttgggtgtttttgcagaaaaatatattttg

SEQ ID NO: 25271 - DNA, 1032 bp, Homo sapiens
aaaaaaagaaaatttaaaaaaaaaaaaaaaaaaacaggcatggtggcatgtgcctgtggtcccagctactcagaaggctgagttgggaggatcgcttgagcccaggaatttaaggctgcagtgagctgtgatcgtgccactgcattccagcctgggtgacagagacctcgtctcaaaaaaaaaaaattatatatatatacacacacacacacacatacatacacacacacatatacatatacatacatacatatatatatagtgatccatgcaaaatctgcagcaggggtaggcagacaggaggaagtgggttgcagggtcaaggcaagcctcagagaaaaaaacctgagactgagtggccctgacaggcagttggtgggacagggaagggggtggtacagacggagggaacccccatgcaaaggtataaaagaggaccccccaatatgctaacatgtattccactgttgctgaagactaacactcaaggcactggttaccagggaatgagaacttgtgttgagtttgagattttacttacctggcaagttggccttccagtttcacggagctggtctaagatatgagacttcagggtcagagacaaagaaaaatccgttattcacagcaatagcagtagccagagtattagcatttgggtcatttcccaggtcccagtgcccatagctgtgatgtagtcagggccccatggcatccgcacacatcaagggctgcattgcaggagaggaaccctaagcttaggaaccaaatcttctacagtgggcacaaagcacatttgccctgtgctctggagggagatgctatctccatcatccaaggctgtttcctgtgcatgttcttggaaagatagttgggaaaaaaggcaggcagagcctctgctggaaagacacagggaaaggagagagaagaattgttacccggcaaagatcagactgcctcctccaccaagtctctggtctagattctgtgagtccagaaacctccatctcagtctaggagggacagctagga

SEQ ID NO: 25272 - DNA, 1030 bp, Homo sapiens
ccccatctctactaaaaaaatacaaaaaaattagctgggcgtggtggcgagcgcctgtagtcccagctgctcgggaggctgaggcaggagaatggcatgaacccaggaggaggaggttgcggtgagccgagatcacaccactgcactccagcctgggcgacagagcgagactccgcctcaaaaaaaaaaagaaaagaaatatggtgcttggttcttaattttgcagcattcaggacattaaataagtcatttgctgtcaccatcctttcaaaaaaaggacattttatcatagggaggccgtaacatcagaattgccctacagattcaaaactggctttctgagaacctcactatatggttttttattgtttctcagaggatttggtgatatctttgccaccaagtgacacttgaaagcagctgggctctccaggatcagctagagaatttgaggcccatttcaatttttatcaagaatttgaggctgggcgcagtggctcacacctgtaagcccagcactgtgggaggctgagacaggtggatcacctgaggtcaggagttcgagaccagcttaaccaatatggtgaaaccccgtctctactaaaaatacaaaaattacccaagcatggtggcatgtgcctgtaatcccagctacccaggaggctaagacaggagaattggttgaacccgggaggcagaggttccagtgagccgagatcaggccactgcactccagcctgagcaatagagcaagactccatctcaaaaaacaataaaaaagaatctcaagatggtaagagcagaaccgagcatgggccccttctgagcactgggcctttgcaaccgtagagatccacacccatgcagccagcgttggactaggagacccctgaggccccctccgtgcccctcttctaaggttcctttctcaccaagaagctcagcagagagttttgattttgcattatcaaagtcagtgacattgagcaagttaaactctgtgtcgatggtagaaaataaaacatctgac

SEQ ID NO: 25273 - DNA, 1030 bp, Homo sapiens
ccaagacagagcccggtgcagcctgcatgtgatgattcgcccccaccctgggtccttgccacagagattgaaataaaagctctctggaggccaggcgtggtggctcacacctgtaatcccagcactttgggaggccgaggaggacagatcacctgaggtccatagtttgagaccagcctggccaacatggcaaaagcccatctctactaaaaatacaaaaattagccggacgtggtggcacgtgcctgtaatcccagctattcaggaggctgaggcaggagaatcgcttgaacccaggaagtggaggttgcagtgagccaagattgtgccactgcactccaccctgggtggcacagcgacattccatctcgaaaaaaaaaaaggaaaacgaaagaaaagctctctctccccacaaccctgacttgcacattttcttctgtaaacataaatgcttctctccatcccccgttccctccctcctgatctgttcttcactctgccttggttctgtcgtcgctgggttggctgtcttgctgtctgtgcagcacctgctttctgttcacaggtgctgggagttgtatgacgctgggcaaactgggagcagcgtgggcatcccggcccaagctcaggggctcaggaggcaggaggcggcactcgcattcacacgcacacgcacagaacgctctcccgctctctcagtctggtccctgggcaggttgaaggcagctcagcatccatctttttccagagaagagaactttggccctgctaggttgctggccggccaccttatggccccaggcctgtcctgaaggcgggggccagattgggagcccccctgcttccgctctgcagccctgtctggctgaatggtgtaaaattccctaagtctttccttccttcttgctgtgtttcaaagaaggaaaagccgggtctgtcagttctaggctctccactgtttttccccttttgaaacttgcaataaaatctacctgtctcttctttcctgcagcctttcttttttcccacg

SEQ ID NO: 25274 - DNA, 1080 bp, Homo sapiens
attctcgtgggccagggataggcaacgcgtgcacctagacctcttgcttgcccccacactccgtctccccagggccaccccctcaacccccccatgccatcagagttttgaacaccgctggagatggcgggggggaggggggcgaatttggaggcgggacccgaactgccggccaaggaccaagggctggcctcgcccttcgctcccactgggcaccgttctcgccgcgggaccttgccttgagcgcgccccctgcgggccgcggtggggattggccccttggaaagagggaaataggctgcgcgcgccggggcgggagaggcgctgcctccagtcctcccgggtgggggtctcccctccgagatccccgagggaacccgtcccgtgcactaccggatttccggtctctgaccagctggggcttcatttctacgcgtgcttttactgctctcctcctcctccggcggttttttttttttttttttttttttgaaaggagcaaacatccccagctttaatgcggcccaattatctcgtttgcacgacttaaaatgtttctctttaactcatttcaatctagtaaatatgcttcagcaagtagctaatttctcagggatggcttcgcctcgccatttgcatataaagcgcgtcggggcccggccccttctccgagtgcgcgagtcccttcttccggtgcgcgggtggcaggcagccaggcctcctagtccagggaggtcgcctaggtttggcctagggaaggcggagtctggggtccgcgacagtgcctggggaccagggtggcagggagggcagggaaacttgggccggggagggaccaggaccttctgagccccccaactcccccgcctccccggcctccgccgtcccttattccgaggaggggcgcccgtggggtaacacgttggcgcgagggtcgggggcgcatttatccttaagtgcgtttattaaatcgcgtctggagatggatggacgtggatacaggagaggaaatctcagggctcagtcgagcaatctcctggctttaaattccgaataaaagtctcaaatattcccgggtca

SEQ ID NO: 25275 - DNA, 1089 bp, Homo sapiens
gcttctctgccttcctacctgctgtccaacaggcccagccccagcctgccctgacatcttccagaatccaaacctgccagaatccacagcctgccccctatgcctgccctcggtgccctgtccctgcccccagtgttaactagcggtcagccaggcagaaaggcctggcactgtcaacacgtgggcttccgaagccgtgacactactttgattctcactgcagagcactgcgccggctcggaaggatgccctgtgtccgcctgccgcgacgatggtgcctttgtctgggcatggggagctgtgatttatgtcataagctcgctgtgaaaccttttgcctcggtaattctgcgctccatgggtgtctctttacatctattcacagtacggctgctgcccacggacggcttgccctgtgacagtgctggtgactctacgctcggctcgccatggcgcccgtgtggtgcctgcccagcatctttgtggctggctgcagcgtctgttgctttgatgtcgcacatgattagatgccgtccctggaggagcgattgcagggagactgggtggaggaagaggctgcctctagctttccacagagttttgcttcggttgtggggaccaagctagaacattacaggcactgctgcctttgcttgtgggattctcagcatggtgaatgcatcctcatccaccatcctctcctggccaggtgtaggggtacccactggaggtgtgggggaatcccagtgcaaaaaggtggaatccttatttccaaagatttaatgcaggccatgagcctgcagtggctggaatccctttcattcattcaacaaacactgatggaaggtctgtgcttgcaggcgccatgttcagggaggcagcggtgggcaacgctttttgcaaaagcctcaaggtattaagatttctcaagaaaactccaattccttccaggatgggtgggaactgacaagattccttgtcaagcacttcccatggctttttggcccccaggtacaacaaatctaaacctacccccaacctgaatggaggatgagttgcaccactgactgaccccatttctgtgtggctg

SEQ ID NO: 25276 - DNA, 1041 bp, Homo sapiens
tgagtgatgttattctccaggcataaggaaggatgtctgagttaaaggagcaggggatatggcccatgtgtcatggttcgccctgcatcaagccttagatgagaagtctaattctgcaaatggaccccattttcacatgtgtgcacatgtccgtggtgtgtttacccacactcattccccacctatacatgacgctggtgagatctcttaataaaaactcaattagtatttctttaactttcctctgggtgcttaaatactattaccccaaacacaacataatgcctctatttttctatttcaatcaagaattcaagtagcatcttgacttgtatataatatatcagcagcaaaatcatggaatgctgacatccttaataatagcaattagtaatcagttgtttcttaagtcgtttgattacaccagttaccaaattgtacagttgatgcatttggggggcgagatgggtctcactgcccctcccccagccgtcctttctccctctctgtgttctctgcagctactaaccaattggtattgaaaagaggcaagcacaaataatgcagttgttgctaatattaaacagtagagacttggctttagcagaaagtagaattaaatatttctttgcagaaacccaaatcccaatagtgtctgtggaaatgcagtctgtgcccacccagctgaaggtgagcaaaggagcttagctcttccatgccaatcactgcacccagagtccaagctttctctcagggttaataccctgtgctaggctctggatataatcgagtgttaggcgaggttctggccctagaagaggtggcattcaggtttgaattatccagttggtatataaaaagcagcctagcaaggccatgcacttccgtaatggatggagactaagggctttatgctttcatgcagggaggatgcacgatttctgtcccagtgggaagggatggccttccagtggacgtgacctcccctgcatggggtcggaaggatgagatggcaaaggtgagcagaggaggtgcagccct

SEQ ID NO: 25277 - DNA, 1578 bp, Homo sapiens
gtcgggaaggtaatccgagttggacattgttacgtcgtttctgcagtgaccagcccttcttttcttcctctaaagcgactccaaagtcagcagctgtccgtgagagtggcgtgggggctgctataaatagcagcaccctggctcctcttacagtccctgcggagggccacctgccagcagggaggtgtgaagtaatctttccagaggcctcagcaaaggattattctagagatgggggcagcagacatgtttgtgagtggtgcaagaaggagagacaatattttcaaagacagctttcatgggtattgttgaataatatcttcttttatcaaaagtgaggctctctcctgaaactttgaaaacctcttcctggcactgggcttggacctctattctgtggaaaggaacattttctaatattctaccccttgtgttccttcacttcctctaaaaggagcgtctggtcacctgcaaattggacatgcctcaaacgcatagaatggaatggaatctttggtttccaaatgcagagaaggactggctgatctcaggaagacggaagcatcacagaaaaacaaaaaaaagtaacctaaatattacctgtgacctccctatgcctcaaggctggtaaactttgctcaaagcctataattccatgacttgtggaagtgtggagccctcagggggatttctgtgcactcctaggggcaaaggtggggctttctctccttgacctgtgtcttcagtgtgcttgggtctctgtgtgccaacctgtgcataagcacagctgtgcctgaagcttctctgctgatgccaagtgtgctgtggtctctgagggcccagggcgggccgtggagcttacagggcctccttcgccttgccttctatctcgccatcttttccattccttactttctttcttctcccctgtgcttaattttatgtctcaatttggctaggaccccagtgcccagagacttggcccaacactagtctagatgtttctatgaaggtgtttttgggatcagattagaatttcttgaaccggcagacttggagtgaagccgatggctctccctaatgtgtgtgggcctccatcaatcagttgaacgtctgaatagaacaaaagactgactttccctgagcaagaaggaattctggcggcagacagcctttggtctcaacctcaggtcttccctgggtctccagcctatcagcccaccctgctgatgatggatttaccaagtctgcacaatagtatgagccaattcttgaagagaaattctctctctctccctacataactgttggttctgttcctctggagaacactgactaatacaccctcttcctcctttcagctcatttgtgtgattttccagcttctgttccatctgcacttgaggtgccaggcactgtagttcctgcccaacatccattctccttccacctgcccaacacagcctggctttcttggtgggggcactgtgcccagcccctggggatgagtcatgttgatttaggtcagtagtgtcagtcccagtctcctttgcctgcactcaatgtccagtctccctt

SEQ ID NO: 25278 - DNA, 1020 bp, Homo sapiens
aactttatggccaggcacggtggctcatgcctgtaatcccagcactttgggcggcttaaattagctgggtgtggtgggggcacctgtaatcccagatacttgggaggctgaggcaggagagtcgcttgtacccagggggcagaggttgcagtgagcctagatagcgccactgcactccaacctgggcaacagagtgagactccatctcaaaaaaataaaaaataaaaaacccacaactttattgagctataattgacatgcaataaaattccctcatttaagtgtaaggttagagttttgacaaatgcatgttgtcatgtacccaccgtcacaattgatatataggatgttttcattacctcaaaaacccaagtaggaattaaaaaatattcttcccccactctgacccactgctgtggtctatttttgtgcaatgtgttggcatcttgcttggtgcagtgtaaacatcatagaacctgaggccagccggctgccgaagactgagtgtagcagtcagcattcgcaaaaattctgaatctaaatagtgcagaaataaaggacttattttatcatctaaatcttaaatggattaacttacttcccgagtaggagtctggttcaggaaacctccctgaatgtaacgttgagagacagtttttatgaaaggacatgtttatccccattggactaagtatctttcagaccaatacagttaatggaatcttggtttgagctcggccacagattactggctgctccggtcctgggctccattttgacagggctcaactccctaaccactaggagacacgacatggaacctccctgaccactaggagacacgacatggaactctttcctgggatgaaggacagatcacatctagggcttccaaactggcacaggccacacgagaaagctgggtgaggctctcttcaggaggccgagagatccactcacagctcttctgcttgtgccttgccagactcagagcagcaggggagagaggaactattttga

SEQ ID NO: 25279 - DNA, 1034 bp, Homo sapiens
gacaaagagaatatattaaaagcacagagggaggacccggggggacattatcttcaaagaagtagtggtaaagccagacagtgaaatggcatttttaacatgttgaaagaaaaataaaatcctaactgctatatacaaaagatcctcttttaatatttctgtgttcttacatttaaaagttggaaaaagatataccattgcaaatactaaccaaaagaaagttggtgcacctttgatagtaagagttggccctccatatctgtgggttctacatctgtgattcaatcaactgtggctcaaaaatatttgaaatttttctaaaaaaatacagcataacaattatacattgcattgtattaggtattaaatctaaagtatacgagagaatgtgtataggttatttgcaaatactatgttatataaaggactctgatctacagattttgtatacttggcagtcttgaagccaagtatatcccctgtgaatatcgaagggtgattgtattaggcaaagtagacctcaaggcaagaagcattattagagatagaaagtaatttttaatgaaaaagattgcatatagtttccttctgtaacaaattactgcaaacttaatggcttaaaacaacacagatgtattatcttacagttctgcagtccacaaatctgaaatgggtctcactgggcttatgtcaatagggctgcatatttttctgtaggctctaggggacaagctgttaccttgccctttccagcttctagaggccgcccgcatttcttggctcatgcccctctttctccaccttcaaagccagcaacattgggtagagttattttcacactgctcgatctctggttctctcttctgcctccttttttccactttgaaggacccttgtaattatattgggcccacctggaaactcaggatactcagtctattttgaggtgagctgattagcaatctagttctgtctgctatcttaatttccttttcccatataacctgagattctacggattcaaatatagacat

SEQ ID NO: 25280 - DNA, 1034 bp, Homo sapiens
gagaagaagaaacctcccctggctgtcagaattaaagaaagtgggtagcaatgtaaagtatgtaactaggcggtgggtaaatatgagagcttcttacacgcccctcccggtaaaacccagccgtaggtgcagctgttactagtgctgagtagcacagattgatagggttggagggagcaggtgtgacatcttatgttttagtacaaattaacttctatttctcaactgtgaaaatgaaaatcactattcaaatggcaaatatctactccttgaattcatcagggttcttatagaaatcaacaaaatcgtcttgggttcagtactttcttattcactcattgactcaacagatacaagccatggtatccaaattcctgtcctggggagactggagagtcagggaggaacccggcgaggacctgcctgccctccaggagttgggtcagaaaggggttgacacctgtagatcaataatgctaaccgaagacaggaagggatctgatataaaaagggcgtagacagtgttctgaaggtttggacatgagagagaatcacagccggccagtggtctcagaagtggcttcctggaggaagtggcattttgagttcttgaaggctgtatgtaccagtcaagatgctttggctgctgggacagaaaccctgactggactgacattgacaaggggaagtatattggctggagcacagcaagcccggaggcagggcaggattccccgccagcctcaccagtggctccggcctctttttcccacagcacctgcgcagctggttgggctgggccatcctctgtgggtggcctcatcctcaggctgacttgcttcatggaggccagctggccttggctttcccgggctgccactgtggagcccacacaccgtctcttctggtggctctctccagagagctagcagtatctccctggtaaactttcatgagtctgtctggccactcctgcaccaagctctttgacaaggaccatggacttaggggctcagtgcctgtggcaaaggggg

SEQ ID NO: 25281 - DNA, 1043 bp, Homo sapiens
gcaaggctgttgagacttacctgcactaagacatagaaagtgcccaacacagcgcctgcagggccagcactcggtggcagtctaaggaatgtctgtcacagcgctcccagatggcaggtcctgcctgcctgggcccagctctggctgtgtggctcaggactatgggacctctgcaggctgcgtcccctgcctgcctcagtttctgcgtctaagctagaaagcatgattgttcctccccgtggggccgttacgagaagcaagcacatggaagcgtgccaggcattttccgaacgtctggaacatcctcagcggcagggtctcctcctccctctcctcctcctcacttagaaatattttccctgggagtcccacggaggtcgtgaagatgacagaggctgctggcactaacagctgtgtggggcagcccaagcccctactttgaaagttccattccatccctcgcatttcatctgaagagcgctatgttctccctggggagaactggcctgttgcatatgaagagtccagagattttgaacaagggaaccccttcagcttcgaatgaccattaccgttgatgatcccagaagttccctttccaagcagtgacccatggacttgtgtccctcgtgtgataacctgcactacacacatatcctacaagtgtccatagtggttataagctgccacagccatacagatctgagagccagaggccttcaaaccagctaaggctctgaaacacttcaactccacttaagaaaacaaatcggagcacatccgtgatcccacaaatgctaatttgcttgtcacacatcagaaacccaggaaggcacagaatagatgctctcttactggcttataggttgggtactttaaagttggagacgtttaaatcagagataaacctattgtaacaatacatttcatgtcatgtgagccttttgtcttccagcaactaaagggaactgtggtaggatgagctggggtcacagggacaaggaagacaggtaaggggacggaagccggggcagcaaggagtg

SEQ ID NO: 25282 - DNA, 1032 bp, Homo sapiens
attaaaaacatatttatcttgttaatactctgagtccattgcgtcacctcgggcggaccatttcccctttttctaaaacctacaccatgggagggtctctttgccaaaaaggagaagttcatgagcttccattgcctaatatcattctttggaggcacagtcatagctccttatctggctctcgaagttcaagtccagctgtctagatcataactttcaactaggaaatcaccgggtgccttaaaaaaataaccagcgcaaagttcaggcctcttgttctagaaaagtagtaaggttactcctactagagccacgggatgtagaattccagttactgttggggttgtgtgtgttttaacaggcacacctctttccctgcagcagggggtacacagcaggctgtgcagagtagggcaaggtagaagccctggggtatgcaggaaggtgggtggggaggggctggtgtgtcagggacaaatgtcagctcccacatcccttggtaaagtgtgactgggtacatcagatttagattaaattatcctgaaactatttttttttctttttttgagacagagtctcactctgtcacccaggctggaatgcagtggagtgaggtcagctcactgcaacttctgcttcccaggttcaagcaattctcctgcctcagcctcctgagtagctgggattataggcacctgccaccaagcccagctaatttttggatttttttagtagagacaaggtttcaccatgctggccaggctggtctcaaactcctgacctcaagtgatctgcctgccgtagcctccaaaagtgctgggattacaggtgtgagccacagcaccccgcccctcaaactattttgtagcttgcattatatagatcaaacaccttcattgcacttacatctctagtattgtatttacttaaataatgattatcaatagcaactcatttaatccttataaaccctgggaactgggtaccattatccctcccattttacagatgaggaaactgaaacacaaagag

SEQ ID NO: 25283 - DNA, 1026 bp, Homo sapiens
gctgtctcacgttgctcacggtcagagtgcgtttgcgcctgtgacttctgcccaaggtcaggccaggagtgcgcatagcacggataccaggcgtgcctgctcagacctgctggctcctgagaggggcttagaagcctcttgcctgcgcagatcgtcgtttctagctgcgaggagccaaaatgttcagggtctgagctttaaggtctaactgttgtactagaatctagatcctctggattaaagtggaaaagaagaacggattaatgagtttttaaactggccaaattgttttatttaaaaatatgtcccccgtggtttgtacagtgttgatcacacacgggctccaggtttcaggatatctagagcccgtgtgtgatagagagacgggaatgaacacatggatgaaacagccaggaagaaattcctccctgggaaaatggctagcaatgtgttgacacacctgctcaagccatttgcaagttattttcatcatcttgagctggagctaggagtcatttctgacagcataagggttctttaactcacagttatggtgtgactttttctgtgacctcagagacatagaagctgagacccccactcagtccatgttctcccgtgggccatgccctgtggggccaagggaccatccacactgagcccacccccaagagcttttcttcttaagaagatgtgaatttattttgttagacagaagtaaccagctgccttccccagggttgattttaatacacaggttgttgtttggcttacatagccaaatttaaaaaggcgagccagtgtttaaaaccagtgagatttcggataaaaatctgaatttccagattctcttatggtggttgtagattccgccacattcccagcaaagaccaagctggccacataccctgcagggtcagggccctgccacaggtctaatgtgctcattgccctccgctgctaggagtttgccgctccatgtagaaacctgcatgcagaggctaggcagtgtcaccaagccctgga

SEQ ID NO: 25284 - DNA, 1027 bp, Homo sapiens
gaaataaagactcttcctgctcctgtcttcatgtgtggacatctgcgtattgaatactgccaagtgtgtcgttaaccttggatttgagctgtgggttttgttgctgttgttgtgttgaccttgtcaccattctgtctcatcccctgaccctttcttccaggaatgcctgaaatgactagaaatgatcgtgttttaaagatgctgggaagtttactgttttaaagttaaaaatcatctcagttatctttcttgtaaattttggatttgcatctatcaaatttgcagaaaacacggtgcctcgatcggtttgtttctgtttaaccactgtacagcagttggctatggtgaatgctgaaactatcgtgatggccttttgctgtcatttgttgctgttttttcaaggcttttaaaacctgccatttgctttcatcctccagccctcctgtctgtacagcgctgcccggccttcggggagttaccgggtgcgtgtgctgcccaccctgctgccccgcaccccctcccactgtgcatgcaccgcccccaccaagcccagagccggggatgtgcctgttcccagccccctgggggaagttgcaccttcacgtggagcttacatgtgccagtggggaatgtctgtcccctttggccagatctgggttttctctcccccgattgttgactgtagctgccacactgctctgtctccaggaagccttgtgtttgctgggatcgttaggcaggaatggaacaacagcaatgtttactttacctattggcagaaagaatggtggctttttaatgctttggtaacctggacagatactaatccatgttactatattactttggaaatttccagttttaaatataagtacttatgctatgcaagaaacgtaaagtaaatactcaaagtagctatattgtcttgttaataaccttttttttttttttttttttttttggagacagaatctccctctgtcacccaggctggagtgcaagggcacgatctcggctcagtgcaacc

SEQ ID NO: 25285 - DNA, 1043 bp, Homo sapiens
aggttgaagagcaggcaggcacagtggcctcgtgtcctttagggcatagtgatgacacagtttatcatgatgacaaatgtatggtagaggtcccccaagagttagagacaagcacagggcatagtttagagaaagaattcaccaaccaggaagcagctgagcccaaggaggttccagcgcacagtacagaagtaggtagggatcacaacgaagaagagggtgaagaaacaggattaagggacgagaaaccaatcaagacagaagttcctggttctccagcaggaactgagggcaactgtcaggaagcgacaggtccaagtacagtagacactcaaaatgaacccttagatatgaaagagcccgatgaagaaaagagtgaccaacagggagaggcattggactcatcgcagaagaagacaaagaacaagaaaaagaaaaacaagaagaaaaaatccccagtacccgtagaaacccttaaagatgttaaaaaagagttaacgtatcagaacacagatttaagtgaaattaaggaagaagagcaggtaaagtctactgacagaaagtcagcagtggaagcccaaaacgaggtgactgaaaatccaaaacagaaaattgcagcagaaagcagtgaaaatgttgattgtccggagaatcctaaaattaagttggatggaaaacttgaccaagaaggtgatgatgtacaaacagcagctgaggaggtactagctgatggagacacattagattttgaggatgacaccgttcaatcatcaggcccgagggctggtggtgaagaattagatgaaggtgttgcaaaagataatgctaaaatagatggtgccactcaaagcagtcctgcagaaccaaagagcgaagacgcagatcgctgcaccctgcccgaacatgaaagtccctcacaggacattagtgatgcctgtgaagcagaaagtacagagaggtgtgagatgtcagaacatccaagtcagaccgtcaggaaagctttagacagcaatagcctagagaacgatgacttgtcggcacca

SEQ ID NO: 25286 - DNA, 1027 bp, Homo sapiens
cagtctgggcaacagagtgagtccctgtctcaaaaaaaaaaattgttttaagtttttggacatttaattataaattcaggttactaattgtgtcaattcgatttgaactattgagaagaaactttttaccaaattcattgtgtaacatgtattgttgtgtgacaaattaacccaaaacttagcctcttaaacaacaaatatttattatctcacacagattctgtggatcaggagtctggaagtggtttagctgggtatttctggctcagggtctctaatcaataaagctgtcagccagggaaatagtcatgggacggttcactgggagtggagaatctggtccaggctcttttgtatcgttattgccaagcctcctcattggctggagatctgagttccacaccacagggaccatggacctctccataggctgctcatgacctggcagcagagagagagagagagagagagaggagagaggagagagaaagagagagaaagaataggaaaaagagagacagcatgcgtgagagagggagaacccaaggtggaaaccagtctttttaaacttaaccttggaagtaacagctcattacttcggatattcaaggggagagaaattagctccatttcttaaggagaagagtatgaaacaaatttcggacatgctttttaagccaccacactatttgctgaaaatgtctcgtctcttaatattgtatcttaatattatccttgaacattttttatatcacaaaccaactacgttttcattttgttcttcccagaaaactacaattgctattcattgtggaatttgtaacgtaccttctcccaggctcttttttctttattgttccagtcagtgtttgcttctatatctctacttgattctacatcagtagcatgtctttgttttaaagctataagattatccagagttatttttgaactagtaaaataatttaattatggtcaaaataaacctaagtattccaatttcaataccacatataatttaatgtgt

SEQ ID NO: 25287 - DNA, 1032 bp, Homo sapiens
aaaggggacgattgcaggcccatggactgtgttacagtttgtctctaacatgaaacagcaagaggtagccccctctcccgtcctcatgctccctctcagtcccctggattgccccagtcctgtgaccatgttgccctgaagaagaccatcttcatgactgctcattgtagatggagaattcaacataaatacagcaagaaaatgtgtttgggcttctgaagagttgtctgcttaccttaacatgtttacttttttgaacttgtactgtataggctgttggtgaaattcttaagaagttgtaatgaactcaaaattgaggccagagcttgctttcccttttcccaaacaaaattggttttctgcacaagcgatgctaatgatgtgttcagtgtaactcgcagattggcaataagatacccgctacaaactgtgattggatgcaaaatctcttagcttctttcacgaatgttggccctgcctagatgttgtgaagcctcccagaatgcatagagtcattcactgtagatctcttattgaaatgcgtattttatttaatgtaagtatattttggaacagatttgtaatttgtacaattcaatgctttaattattttttctattctcatttagtttgtattttcattgtatagagcagacagaaagatgttgggtcaagcaactattgaagagaaatacaaagaaaatatgaaaggcacattattcattttgtccaaatgcaatgagaatctcactcttaaaaatcagctcttgctttcgggtccggatgtggtgagcacattttggagccctttgaagctagatttggatgatcaaaacaaaaaggcagggagcccattctaacatgctgcccagaggaaactggctggagcctggaccagctggggttgatgcttttgcagtggtcatgtgattgtgacctggtagctacttatcagagagccagaccctgctgtcctgggagacaggagcgatgcctcaggaatcagcccaatgtctgatgtcactgagactg

SEQ ID NO: 25288 - DNA, 1113 bp, Homo sapiens
cacttccagtttaagctaaataacttaaaaacctaacccccagttcttggtttatcaacacaagcatcctcaatgtaaaaataaggacttggaccttcataagccttcctcgcactccctctgtctccacacatcccagtggatttcttgtatatcggctttaatgagctatcattcatccacttaaagtgtacagttcagcagtttttagtgtgctcaccaggttgtgcagccatcaccactatatttttcagttatagaaaatttttctataattttcagttatagaaaattctcgccagccccaaaagaaaccttgtaccagttaactgtaaatcttcatttccctcaactctaggcaaccactcatctactttctgtctctacagatttccctattctagactcccctatgaatggaatcttataacgtgctctttttgacgggcttcttccatttaacataatgttttcaaggttcactcatgttgtaacatgtatttaattcattttctacagatgaacaacatttcattgtctatctgtaccacatttgatttgtctgtcagttgatagacatttaggttgtttccatttgttggctgttacgactaatgtgacatttgtgcgtatgttttagtgtattggtatgttcttatttcttttgggtttatacttgagtgagattgctgggtcatgcggtaactatctgacaaatgttaggtaactgtttaaccttaagctttgttttccaaagtagccacaccacttagtactcctatttgcagtgtcacagggttccaattcctccatgtctttgctgacatttgttatctgtctttttgattattgccagcctagtaggtgtaaagtggtatctcattttggttttgatttacaattccctgatggccagtagtgttgagcatctttcatgtactccttggccatttgtatatatcttctttggaaaaatgtctattaaagtccttgctcctattttaattggatgacttgtctttttattgagttgtaagagttctttatatatgcttgatacaagtcccttgtcagatagatgatttgtaaatattttctctcattctgtgggtt

SEQ ID NO: 25289 - DNA, 1113 bp, Homo sapiens; identical to SEQ ID NO: 25288

SEQ ID NO: 25290 - DNA, 1039 bp, Homo sapiens
atcatttattgagatgatcatgtgggtttttgttctttattctgtttgtaatgttgtattaccttaactaatttttggatgttaaaccatttaatccttttcatatgtttttagatttggttcactagtattttgctgaagatttttctgtcaatattcataagaggtattagtctgtagttttcttgtggtgtctttgtctagtttagtgtcagggtaaaatttgccccatataaatcatgggaagtgttccctcctgttctgttttttggaagggtttgtgaagacttggttttaattcatctttaaatatttgatagagtttgccaatgacaacatctgggcctgggcttctctttgtggagaatttttaagttactgattcagtctctttactttttataggtttgttcaggctctatctcttttgagtcattttcagttgtttgtgtccttctaggaatttgtgcatttcatttgttatctaattttattggcataccattgtttatagtagtctctggtaatctttttttatttctgtaagatttatagatccctttcattcatgattttagtaattttattctttttctctgtcttgttcaatttagctaaagatttatctttttaaaaactctttttaaagaactaacttttgattttcctgtgttatttttgtagtctctattttattgacttctacactaacctttattaacccatttatgccggaggttgcaagtttttttgtgtgaaaaatcagaccttggcaataaccttgagcagtaggatataaataactcccacaagcttagcgttccaataatggaacaccaggcataaatgggttctttctttctacttgttttaggtttgatttgttcctttttttttttttttttacagtgtcttaaggtggaagattagttatgatttgtattttttttttttttgagacagagtcttattgcccaggctgaagtacggtgacacaatctcagcttactgcaacctccacctcccagattttagcagt

SEQ ID NO: 25291 - DNA, 1039 bp, Homo sapiens; identical to SEQ ID NO: 25290

SEQ ID NO: 25292 - DNA, 1028 bp, Homo sapiens
gaagcacagtcctcagctggtttccaaaggagtgtctatgctggcctgacactggcactccagagttctgcattgtgtcagttggaaacatggaatcatttgcaggaaaagccctggccaaccgctggttccaacccctctctatttatgcattctctttcttttttttttttttaaacctgtgattcatatgatttgagatccttttacaaattctatcacatgatgcgcaggggagagctgcctgccacagagctgagcacgagagtctagcacctgcgctgcctcctaggttggggttccaccctgccccgaaggcttttgtgactctgcgtgtcaaaaggggtggcactcagaggcgccacaaggaagcagcaggactatgcattgcagagcatttctcctgtgtgcccctaagcacttagcatgtatacagagtaggtccttggaaagttcttgttgaataaatgaccaacttttccttccagttttatggtcccaggattggcgcactttatatacgaggacttggtgaatttacccctctctaccctatgctatttggaggtggacaagaacggaatttcaggccagggtaaggcagaaagttaacaaagtctctgacctactgaccgtgtcatttgtagagcagtgacattgtaaagaaacatggcgctgtttcttggtctcgtggaggctctgtagcatgtccacactgctgctgtgtcagaactggctccactgattgattttacactgagggctcacaggacctgcagtctctttgggaatgattgaaagcaatgaaggaaatctctgtttcttttaactgctccaatgcatccaattccccttgtaattttggcccagcccactgaagagaactgttggacccttcatggctgaggcctgctgctgttttaacttcggggatcagcaggaccacacagaagcactggtctcctttctgatagctcctgtgtcccctctatgtatagtgacgtgttaactgggaaattagttgttgc

SEQ ID NO: 25293 - DNA, 1004 bp, Homo sapiens
tagttttctatcattgttcttttccaaaaagttttaagccatcttatttgcttattcttccggatgaattttaaaaactcttcatgactcaagaattccactcttgcaaaataaactaacgtctcagaatttaactggacttgtgttaaatatatgctttcattagtttaggaagtttaggcacctctaacttcagcttagtgaaggtgtccccctcttctgagaacacgttgcgtgtacttggttgcgtatgttggtcacagtggttgctcgctggtttattttattttattttatttatttatttatttatttatttatttatttatttatttatttattttgagacggagtctcactctgttgccagactggagtgcagtggcgcaatcatggctcactgcaacctcactgcaagtgattcttctgcctcagcctcctgagtagctgggattacatgtgtatgccaccacgcccagctaattttttgtatttttagtagagacagggttttaccatgttggccaggctggtctcgaactcttgacctcaagtgatctgcccgcctcagcctcccaaagtgctgggattacagctgtaagccactgtgcctggcctgttgttgcctcttaatccagtagttcttctgttgattcttttggctttcctaagcagacagttgtatcatctgctcttcttttctaattgcttctgatatgtgcatctgtgtttactggtgagcttgtgctctagggttcttttgtatggtcttaagagattttattagcagacatttatgggctttttgacactgagcttccctgagctatcaacagctcagtggactcctgtcttcccctcctgctagccgggcactgacctccctgtgggttccccagcaaagctggcactctgcctgaacattctgcctcgcttaagtaggttctcatttgggcaaatgctcagtacccagaggtgtgtgacacactggacctctgtgtctt

SEQ ID NO: 25294 - DNA, 1032 bp, Homo sapiens
taggggaaagggccgggccaggaagcagggcctggagctgctggtcccggagctgctgttcccggtccacagcagctgtgtggtttacagtgagtgcacacagaagtccttgaagagttttaagcagcaccgaggcaagatttgacttaggttgtagaaggcctccttttaaaactgtggagtggcaggagtaaaggctgcagcgcagcgaggagggggccatggcatctggatgagaggaggtgatggtttggaccagagtgccagtggtgacagcagagtgggtttactgtgctggcaggttggatgccacttgtttgaacggaaaggaatcaaagatgagattcattgtgggaggggtctgggctcctagggggtggcctttattgacatagacggttctgggagacactggttggtggaatgggtggcagtgttaggaattctgtgttggacaacaaatttgagatggctatggaccaaccaagtagaaacatctagtcgacagctggatatattgacttggagatcaggagagagctggagaaaccaaagggaaaaacaaaaaatggagagttctagcatacaagtgatgtttacggacatggacctttgcgcagtaattagtccaggggcgtgtgtaggtaggaaaggacgtggtgaactccagagcttgctgtggtcccccaggtcagaagaggaagaggaggaggaggaagaggaggagggaggatcatccttgcaaaggaaacagaaggccaacaagttggaggaaaacttggagaggaagaaagtgttagggaaggagagggggcttcttgtcaagctctaaggaggggaatcatgtggaggctgagaattgaccatttagttgacaagacagtttgctggtgaccttggtgtaatgtaacccttataaatcccagctaaaacaaccaaacacaaaatcttttataatattttaatctgttgttaactattttatgtcaggaaggaaggaggataatatttcagctaaaagtttagactcca

SEQ ID NO: 25295 - DNA, 1084 bp, Homo sapiens
tgcttcgaagaaaagtccatgttgtcaaagccggcctttgttgcactgactgacccggccctcgtgagccctgtgcccatagcctgggtcatcatcagagaatttgtgggttttattgttaccattttgattttttgggtggattaaagagttcaacaaggaatttatccatttctttttcaaaacatgaacaatttcttcctgtactccagttgttatgcaagctgtaaggcatgctttgttcgctttacaattgtgtgacagttccaggtttttctggaacattaagtcaggtctttattttgcttagtttccctcatttcatttttgcttacttctctaactgtttctattgtgaaaaatatggaaaagtagaaagaatagtacaactagtgcccatatacctctcacccagattcactagttttacgtttgccattttgcttaatgtacagttatgcgtgtgtgtgtgtgtgtgtgtgtatatatatatatagagagagagagacagagagacagagacagagacagagtctcactctgttgctcaggctcgggtacagtggcatgatctcagctcactgcaacctccgcctcccgggttcaagcgattcttctgcctcagcctcctgagtagctgggactacaggtgtgtgccacgatacccggcttcttatgtgtatttttgagacagggctttgctctgtcactcagcctggagtgcagtggtatgatcatagctcactgcagtcttgaactccttggctcaagtgatcctcctgcctcagcctcttgactagctaggactacaggcatgtgtcaccatgcctagctaattttttttttttttttgtagagagagcatctcactttgttgcctaggctggtttgaactcctgggctcaagtgatcctttcacctcagactcccaaagtgctgggattacaggcataagccagcagacccagcatatagttacatattttaatgaactgtttcaaagtatgttaaaaaaacatcctaacactttatctctaaatacttcgacatgcagctttaaaaaaaagtacattttcctacatag

SEQ ID NO: 25296 - DNA, 1031 bp, Homo sapiens
ctcagcataattattctgagatttatccatgttgttgcagcgtgtatctatagtttatttgtttttattgctgagtagtatttcattgtatggatataccacagtgtgttcatccatgtatcagttgatgaacatttgagttgcttctagtttggactattataaataaagctgctgtgaacattaatgttcaagtctttgttttgacagatactttcattatgttgtatgaatacagtagaacccctcttatttgcaggggatatgttccatgacccctagcggatgcctgagactgtggatagtaccaaaccctgtatataccatgttttttcatgatacgttccgatgataaagtttactttatgaattaggttcagtaagagatggacaataactgatattaaacagaacaattttaacaatatgtcagcaccactcccttgtacttaggggccattgttaaataaaataagggttactttaacacaagcactgggatactgccacagtctagactatctgataactgagagggctactaagtgactaacaggtggatggtgtgtacagtgtgtatatatactggacagagggatgatttatgtcctcagcagaactgtgcaagatttgatcaccctactcagaatggcatgcaattgaaaacttatgaatgaattgtttatttctggaattttccatttaatattttcagattgcaggtaactgaaactgcagaaagtgaaactatgggtggggataggactgttgtacctagaagtgggactgctgaggcatacggtaagtgtgtgcttaactttttaagaaactgccagaccatagggctgggtgctatggctcacacctgtaatcccagccctctgggaggccgaaatgtgaggatcacttgaagccaggattttaagaccagcctgtgcaacatagggagaccctgtctctacaaaaaaacaaaaacaaagattgccaaactgtgttgcaaagtggttgtatcattttgcattcctaccagc

SEQ ID NO: 25297 - DNA, 1033 bp, Homo sapiens
ctgtagtcccagcactcaggaggctgaggcaggagaatcgcttgaacctgggaggcggaggttgcagtgagccgagattgcgccactgcactccagcctgggggacaaagtgagattccgtctcaaaaaaattttttttcatagttgtaatttgcatttccttaatggctaatgatgttgaatatctgtcctatggttgtatacataatatataatgacacccttgtgtctcatatgttgtaaatatttttccaatctatcgcttgtctgactttgcctttttatttaaaaaacttttttttttttttgaaacagagtctggctctgttgcccaggctggagtgcagtggtctgaatctcggctcactgcaacctctgcctcccaggctcaagtgatcctcccacctcagtctcccgagtagctgggactacaggcacacgctaccacacctggctaatttttgtattttttgtaggggggttttgctatgttagccaggctggtcttgatctcctaggctccaagcgatccttctgccttggcctcccaaagtgaaccactgcacctggccaaacttttctattttgatgtaaaatttaaacagcctttttctttatacattatttattttttttctttttgttatggccaagagtttaaggtgcagttatactttatttttgattttgtctgaagaagctgtcctatcctggttgtaaaggtagtctctagtttagtcttctttttcacgtctaggtctctgcgtggtctggaagtgtgattttctgctgtgtggtagccagccaaggcttccttaccccgcctttgtacccccacctctctagggagcccaggcactacgtgtttccgggctctgctgtgtctctccttgtttcagcactatggttttacctctgggaaagcctttctaaatgttcctccactcctccccgactctccaggttgtcttgattgtgagtaagtctttatggctttatataattgtgggatcagtttgtgtggttccatgaa

SEQ ID NO: 25298 - DNA, 1060 bp, Homo sapiens
tttctgtgcttttcacataaattgtggtgtgcccttccttagtcttgatactttttatttttttggaggattttttcaatgctaaagaaatgcatatttgtaatttgggcctctctccagcctgtctttgaagttgcattggaagtaaagccatttcttattgtactaatggacttgaataatacattatagaataaatatgtgaatcagattgctttaagcgttttcttcattatcctgacttttttgctctcttttcaagaggaaatataaactttgttaatagtaagatattagctcctgccagcgtttttttttctttcttcaggtttatgaagaagtttttgaaaaaccatcaaaagaaccattttattacagtgtttcttaggctttctaaaggtttatatatgaggatgctttaggctaatggccaacagttttgaagactgttcactcactttaaagtatttaaatatttctcactcctaatttttcagtctccttttacatgatcttccctttgtttctctttttcattttatatctaattattaataaatatgatttttagatgctttttcttttcatttaaattttttattttgaaatagctattggagtacttctttttgtagatttccttctttcttcattttaaggttttgtgactgctctcttctctactttcttgatcttataaaccgtgccttgttctgggactgctagacgtcacgcccatatcttgtcctggtgagaacaggtgggcatgtattgaatttgacctgcatatatgttttttgttgccattctgaaagaaagttgtaataagcaagcaaatattgctagaatgactagcatggatgactgtcttaaagaggcatttatttgggaatgtaagaacttcttgtatcttgaaatgcctcttgatggatacaatgaccttatcgtgaacaagttatgttttaattaaagtcagtggcatataacaaatagtatttagctaaattgttgatgaaagtcagggatttgagtcttaaattatttcactttggtgatagga

SEQ ID NO: 25299 - DNA, 1034 bp, Homo sapiens
aaaatatttataaacatatgccatgggtgtattatagaccacaaaaatgatttggaagccattaaaatattacatgtatatgaactttataaagataattaggaggagataggccttttctctatagacaaataaagttcatgataaggataaaatatgagttctttacctgaaaaaaaaatagatacacatataaatgacttaagaaaactgtattataaaaatgtgtttagctgtattgtcacaaacatttccaaattgatatgcccattatcttctggttcatgattactcagtgaatgataatataatcaataaagattttatttttactgaaaatgtcactgaaattcatattatgtcctcggttttttagattttagtcagttgtggcctgataggttatttctggtcttaatttcaccagtacccttttctgtgctttgcataaaaaaaaatctttatttttgattggttttgacagcctgccttggatgtcaattcagtttctaagtagtgtagaccctggtgtttaaatatactcactgtgacacattaatggatatatgagggaatgatgttgtgttagccccaggatgaaaattagtggaggctgggtgtggtggctcacacctgtaatcccagccctttgggaggccgaggcgggcagatcacgaagtcgggagattgagaccatcctggctaacaaggtgaaaccccatctctactaaatatacacaaaaattagccgggcgtggtggcacgtgcctgtaatcccagctactcaggaggctgaggcaggagaatcgcttgaacctgggaggcagaagttgcagtgagccgagatcgcaccactgcactccagcctgggtgacaaagcaagactctgtctcaaaaaaaaaaaaaaaaaaaaaaaaaagaaaattagtggataaggattagaattaaatagaatttagtcacattgactactaaacaatgccccagctcagtggagagaagtgtaggaggtatctggagagcagtaagtagag

SEQ ID NO: 25300 - DNA, 1050 bp, Homo sapiens
tctgtcagtgtggctgggtttggggcttttatgggctcagaatcgggatgtgttatttattggtttgtgagtatccaaaaaaggctaaaacaaaggcacaattcaaaggtgggcatgacagtgtaaaaaaccaattagggaagggtaggtatatgtaaaataggtgaagcgtggggatcaatcagaggaaagtgcgccaaatgggaagagaggttctcaatccggtccgtggacttatccaagactggtagcttggcttttgggctttaaactgtctttggtttgaaggtggggtttcactagggacctgcccccagtctgcctaagaatttgtctacctccttctgctatcacttccctgataaagcttattccttaatctatcctgtgttttgttgggaaatcatctaagatctgcttcctggcaggtggtgaccaccaagagacccatcttttagacagtgccttttagtgataaactttgtctattttgtcatcatacctgaaaggtagtttccctgggtgtagaattctaggatgacaattgatctcttaaagcacattgaagatgtcattctagtgcattctggcatccactgatgctgttgagaagtcggctttcagttacatttgtttcctatgtggtctctctttctctggctgctttttaaatctttttccttggtgtcctgcagcctcaggacttcaacatgcattgaagtgtgcttctatttaaatcttgctagggatttactgagatacctggatttctaactctggaaaaatttcattcctatctcctttaatattgcttcctctcttctctgttgattcccttcttgaactccagagtagatgctccttagaccctcctaccccagccaccatgtccttcacttcttgtctatatttttctatctctgtctcttggtcctatagttgggatgattttttaaaattttttagatttcatttattttttagagatggggtctcactctgtcacccaggccagacagagtacaatagtgggaccatagctcactgcag

SEQ ID NO: 25301 - DNA, 1083 bp, Homo sapiens
ttcccagtgcatatataagttatgtttacatgatactatgatctattaagagtgtaataggccaggcgccagtggttcatggctgtaatcccagcactttgggaggccgaggcaggcagatcacgaggtcaggagatcaagatcatcctggctaacatggtgaaaccccttctctactaaaaatacacacacaaaaaattagccaggtgtggtggcgggtacctgtagtcccagctacttgggaggctgaggcaggagaatggcgtgaacccgggaggcggatcttgcagtgagccgagatcacgccactgcactccagcctgggccacagagtgagactccgtctcaaaaaaaaaaaaaaaccaagtacaataataccattatgtctaaaaatgtacacgttttaatttaaaaatactttattgctgaaaaatgctaaccatcatctgagctctcagtgagtcacaatctttttgctggtggagggtcttgctccagtattgatggctcctgacttatcgggggctatggtaattcttagatgacagtgaagtttgccatatcgtctggctcttcctttgatgagatttctctgtagcatgagacgttgtttgatggcattttacccacagtagcgcttctttaaaaattggaatcagtcctctctaaccctgctgctgcttaatcaactaagtgtatgtggccttctaaatcctttgttgtcattatgacagtgtccacagcatcttcaccaggagtggatttcatctcaagaaactgctttctttgctcatccattcaagtttgatcatgcgattgcagcagttcagtcacatcttcaggctgtaattctagttctcttgtgatttccactgcatctgcagttacttcctccatttaagtcttgagcccctcaaagtcatccatgtgggttggaattaacttctttcaaactccttttgatattttgacctcccatgaatcacaaatgttctaaatgacatctagattggtgaatcctttccagaaggctttcagttcatttttgcgcagatccatgagaggaaccactacctatggcag

SEQ ID NO: 25302 - DNA, 1034 bp, Homo sapiens
ctcctgccttagcctccttagtagctgacactacaggtgtgcaccacaatgctggcttcttcttattttttaatgtcagactacattgttgtgaatgcttgaaacaagtacatgaccatgggtgttttgtttacatattatactttgttaggttagcactctctctctcttttttttttttacatttttgtcattggatctgccagaaatttaaagaattctgttagtctctgatcacatttttgattttgccattttttccccttgtactttgaataggttttgctttgaaaattttgatgctaattgaactcataaaagttcctgcttacatattatgctctatcaaaacaagagtactattagttttatttaaggcccatttacatggcattatgtaatatttagttttaaccctagggagtttcagtagttctgtttgtgcttgtgtagaaccatttgtctaggagtttttgctttttaatacagtgaacattattgctatagctgatgttggggtctgtttctgttatctttctgttttgtaactgtttccatttgatatcttttcttcttatatgttgtttttttctttcctcttccattatactaggtttacagtcttattttattttattttttttgagacagagtcttgcagtgttgcccaggctggagtgcagtggcgcgatcttggctcactgcaacctccgcctcctgggttcaagcagttctccttccttagcctcctgagtagctgggactacaggtgcccaccaccatggccagctaatttttgtatttttggtagagatggggtttcaccatgtcagccaggatggtctcgatcttctgacctcgtgatccgcccgcctcggcctcccaaagtgctggtattacaggcgtgagccacagtgcctggcctacagtcttattttaatcatactaacggttgcctttttttttttctttttcaaccagattgtttttatttttcatgtttctagtgacttctttccagcaaagatgctttt

SEQ ID NO: 25303 - DNA, 1031 bp, Homo sapiens
ttatgctttggcccttgttgggctttggggttattgtgccagtttcatcagatgaatttgtaagtttctcttctttttctttgctctgaaatagtttaaatagccttgggattattggacctttaatggtttgaaggacttcccttaggaatttttctgtgtgcggggattccaagttctttcctgctaccttatcttgctgaacgtagtgaagctatctgatctgtggagtctcctacagcgcctggtgtcactgaatcaaggccttctgctcagggtggctgtgggatttgttggatctgtgggatctgtgggctgtggtcagtcccctgcacagtctgactttccctttcttccctgcaggtacggggctgatgttgacgtcaaccaccacctgactcctgatgtccagcctcgattctcccggcggctcacctccttggtggtctgccccttgtacatcagcgcagcctaccacaacctccagtgcttccggctgctcctcctggctggcgcgaaccctgacttcaactgcaatggtcctgtcaacacacagggattctacaggggctcccctgggtgcgtcatggatgctgttctgcgccacggctgtgaggcagccttcgtgagcctgctggtagaatttggagccaacctgaatctagtgaagtgggaatcgctgggcccagagtcgagaggaagaagaaaagtggaccctgaggccttgcaggtctttaaagaggccagaagtaagtggcttgagttcagctctgacttgtgggctgggttgattgaatgaatcaagatgtagcaataaacaaaaaacaaaaacctccacctgagcacttggccaaaatcttcagttagaactcgcagttttccagatggttgttcagattgatcttctctttttaaattcctgaataccaagaactgatatcagggaatctctaaaagtacatgtgtgttgtcagaactcctagaattatgctcgcgctctcttttttttttttttttttttgaggcagggt

SEQ ID NO: 25304 - DNA, 1053 bp, Homo sapiens
ttcactgccagttctaataggcgaggaaaatgcccgaggcgctgtcttctgtcccccacacgtaccagaaagtgaaaaatgcagcgagtcctctgggtggttatgagcctccaggcgcatgctgtccagtggacagaacatctggcggttggttgattgctctcttttgtcttggtcgctgcttctagaatctatgcaggggatagcagtgaggtcagaagtctttcccgggagagagatggcctgggttatcattgctgatagctttggctgcatgagttgggcttccccttacccagggctgcacagccaggtgtgagggtcaccggcaggtgggctggtggctgcagcctcagagccctcccaggttgctgctgtttccagtgaatcacatttcgtcatttgaagcccatgaggaccattgtgtggatccatggtgattctagacttcagatatatttaggaaggcgcagatttcaaatctgtgtttgattttctgtaataagagaaatccaatttgtaaaacttgaacaatgataccgttttatttacttagtagcatcactgtgtgtcttagcaggcaggcagtgtctggccattattgcgttctacagccagaggatagaattctatacccccaaccccttgtgtcacaaatgggctctgtgtgggtcaccccagctgacccgtgtatgtgcagatgcagttccgaagggaagaacagtcctcgggtgattcagaggggaaaatgcaatccgggaggtgtttcctcagctgaggtgacactgttagaagctgtgatggttgtgtaaatgtgggctgtgtgctgttcccgaggggagcttgggattgggtcctgctgaagccaggagggtcttcccaagataggagaggaaccgcaggtggtgagcggctggggagggccaggacagccggggctgggtgctgcaggggcttcagcccgggagagggggtgggcgtgttctttgtggtaccaaagtgggactaggacaaaaattgggctgtggctggggcaggagctatagggagtta

SEQ ID NO: 25305 - DNA, 1022 bp, Homo sapiens
acactgttttatttatttttattatttttttgagacagggtctctcacctaggctggagtgcagtggcacgaacactgctcactgcagccttgacctcccaggctcaagtgattttcctgcttgagcctcccaagtagctgggaccacaggcatgtgccaccgtgcctggctgatttttttgtcaagacagggttttgccatcttggccaggctggtgttgaattcctggactcaagctatctgcctgccttggcctccaaaagtgctgggattgcaggtgggagccaccgtgcctggcctttacacgcccttttaaataaaaggactagagaatgtactccaaaaggagaaagcatggcataaaggcaatgggagatccaatgcaaagagcaaggtgactccccaggagcacagcaaaaggaggttccaggatggcagccgtgcactcagcatagaaggcagccaggttgggtttagtgctggctccagagaagatagcttaactattaggacacctgttgcctctgaacatattgagggtttacataggagctgagattgaattattgacaagtacctaggaaaccaagggacgtaactccaaggaaaatgggtaggaaagaagaagttaccgcagtaatactatcatataatttagttatgaatagtatttatatagtcctaaaatataagcactgaacagtaaccatattatgatagaagcctattaggagaatggagggcgggaggaggactgatgggaagtgtgtgtgagcaaaagctgaataatcgtcatttccatggggagaggtgaagagaaaatgcccagtcttgaaaagcattttgcccctgactgagtgccagagagcacaccctgggcagaaagcatacccatgagaggcatgtgggagaggctttggcttctgtttaaaccagcccagaagcagcacagcagagagaaatgctgcaggagggccgagggcagggccttgtggaaagctgtggagtccacacatcgtgg

SEQ ID NO: 25306 - DNA, 1021 bp, Homo sapiens
tggctttccccctgatttgaagaggtggtacaaagccctctgccaggaaaagggattctacccagcaatgtgggctctgcttcctctggtggagaggggcctcatgagcccctaggatggagattttgacccttagtagtatgtgagtggggccactgttgtcctggcgctggatgccgagttcagacacggttgaacagctttctctctgctaaactgaatgaagggtagaagccttacttctctgtattttcctttaccactctccattttcgatataattgctttaaagtatttccttcaaatctatttagaaccatattatgcagtgttataatttcgtttcaatgatgaaacataatttataaaactcaggagaagaaggaaagcctattgtatttattcatatattttcttatgtgtgtttttcttccttcctgatgttctcagtttccttcttttattattttctttctgattagagcattttctttagccattcttctaggtaggtctgctgatgacatattctccttattttcaatttttccttccttcctgaaggatagtttccctgagtatcggattctgggcagacagtttgattttttcccccatcacttgaaaaatattttgctacttccttctggcctccttggtttctggcaagaaatctgttacaattttaattgtctttttttccctatagtaagatgttatttttcttctgttattttcaagattttttttctttgtccttagttttcagaactatgatgtatcttggcatgtatttctttgggtttatccagttagaggttttctcagtttcttgaatctgttggtttatgtgtttttccaaattgggggtgtttttggccattatattttcaaaaaatatgaatgtttagcctctccctttttctcttctccctccaggacgtcagtgacatgaataggaggtcttttgttattgttccacaggcccctgagactctgcctctctgtctgtctcttttca

SEQ ID NO: 25307 - DNA, 1073 bp, Homo sapiens
gaaggcgccggagagcagtgcgggtctgatttgggcttgtgcctctttctctctctcttttttttttttttttttttgagatggagtcttgctctgtcatccaggctggagtgcagtgctatgatcttggctcagggcaacctctgcttcccgggttcaaactattctcctgcctcagcctacggagtagctgggactgcaggtgcgtgccaccacacctggctaattttttttttttttgtatttttggtagagatggggtttcactgtgttagccaggatggtctcgatctcctgacctcgtgatctgcccatctcggcctcccatagtgctgggattacaggtgtaagccatcgcgcccagcctctgggcttgtgcctctcaacagtctcaagcgatgtcctggcatgagggatggtgcctccaggactctgcttcttggtcctggagctggagattttcaggggccgatgggctctgccctcttctgctctcaatttttgtccatcaggtgggcttggcaagtccccttgacctttctcaggaaaactttggtccgtctggccctccccgacctccccccagtgtctgctccctgcaaggtttctcatgccttcctacacacgctcacctggaatgcagccctgcccttttgtatcatgaatgtccagagtaggcactggctcgaggagaattggtgaacacgctaagtaacttccccaaaactgacaacaggcactgtaattccagttagtgcactgatccctgtgcagagattccagatctggagactgtatgtggcagaatttatcatttgacatgtgtggcatttcaaataagtagggagaattgaatacaagattttagatcactggctctccatagagaaaaccatgttacctaaaaagtaacatctttctgccagtccatacgtacaatacattccatacgtacaatacatttcatatgtacaatgcattccatacacacaatacattccagctgcgttaaagatttaggtgtaataaaaaaaaacctgaaaaattccagaaggacatatagagagtatttt

SEQ ID NO: 25308 - DNA, 1167 bp, Homo sapiens
tgaggccatttgagatagaatacttcactgaggtttcctgaaactcatattttcatacagatcttgagctgaaccatgttcttgtcatccttgcttcactctgttctgggtagacggcacagatgccggattccttttgcctggcaaaaaaatttaaaaaaagaaaaaaaaacaccacacacataaagtaaactctttctgagcagagcactataactcataactttagtttaaatctgggctttaaaaaaaacaaatattttaataagccaattttaaaggctgaacttttatgacggtttttaagcttagtatttatattaatctattctcactggtgtctttaaaaaccctgtgaatgcatgctggaatgtctgtttatgtttgtgtcttttcctgggaaaggataaatgtgctgcaaaaagcaaaccaaatacagaactctccgctagcagagagttcacaaatgaggcaataaaattcaaagaagagatgaataagttactgtagccaaggactggaaaaccataaaggagaaacagaatctaagagatacagacatggatgctttcaaacgtaaaggcaagatgaaacactacaaacagaaactgattaaaaagatattccacatggtcacctgagtctacacgtgataaaattgcatagcactaaacacacacacacacacgcacatgcacgtgcacacacatgtacacacgagtgtatgtaaaactggtgaaatctgaatgaggtctggggacgatattgacgccagtttcctgattatgataattgcaagatgtcatcactgggagaagggagtgaagatatgagaatctctgtataatatttcttgcaacctcatgtgaatctataattatctcaaaattaaaataaaaaagatattctacaaaagtattaaatctatatatttagataagcaaattatctaagaaattactactaagatttatctcagagtaataaactaaaaatgtgacttgagcaaaactccacatattttttctgacgccatttgaggaatctcaatatatttccaatatataactaattagaagtggttccctgtaagtcttaaataaagaatagtatcccagaaatatgaaaggtgaaataccaattataatagcaatacatttattccta

SEQ ID NO: 25309 - DNA, 1072 bp, Homo sapiens
tttggggaaaaagtggtttctttctgcatccttttgttttgctaaaagtttcatttatgaaacttctctggtccctcgtacacagtatgagggagaattcgaatttcctctcagaagatgccgtaagggttgttagtgccttaaagatgagcccatgtgtacgtggtattccctcccccaacgcaagctcacctcaccccaaatctaaggaagtacacttctgggctattgtctggagccccgggggcatgggaggtttgaggctccagtgcttatctcggtgagtgattctgggagccacctaccggttgagtggagcgaagggtggagacagagggcaggtgggggtgcaacgttggaagggccatgtgtttgggcagtgggggctctgttctcaccacagatttccagtaacaagagactcttcccaccagaggagattctgaatgatgctgccattgccagaccttctgctaccaaacagagcgaagaggaagagggggcagtgtttggtcaagacagcccacgaaacgttggcgggagtgagcacattagcaatggctaagaacatgcttgaatcatttgtaacaacccaggacagagatgccacaagaggactttggggaaaggcgaatccactcatacatcttggagttgttttttcaagttcagaaaatgaaccttcaccaaggtcttggaacatgaagcagagactctggtgctgactctatcatttgagctcctaagggtactcatgcccagtggagcatgcacaccagcaacactgccaacaccatctcggtgtcccaccccttagaggaggaagaggacacagaggggcgcccggtaataaccctcatttcctctcttccaccccaccacatcatcttaataaaacatgaaggtaactgaatgagtacgactccctcattatcaatttaatcctgtgtctctgttgatgtaggtcagttaagctttttcatgggctcattcagtatctcgctctctctgtctctttccccatgagacttacactcttccggccagattctggtgccctgggcatgtttag

SEQ ID NO: 25310 - DNA, 1050 bp, Homo sapiens
tggcgtctgccggcaggatggcctgctcaggggttccccaagcaggatctgggcagcttagagagcagtcttatgagttgcctggtgaaagccccgtctttgggggtctccggtgttgtggcctgccttggtggtctgtccagcagctctcagtgtgcccattgcagaccggccgagaggccggagtgcggccagaggggaactggtgtgagtgggtggttttgtctggctgggtcagcaggcctggggaaggtggggagctgggccgggacagtgggagccacgcaggacctgggctgcagggaggggagggtgttggcgggaggctgtccctctggtgtccaaggaggggccagaggcgcacagcatagacctcccaggctgggggcacctgggtgggagacttggtggaaggatgtggcctgttgggtttggtatgtcagagggaaagcaggtcaggatataggggcaggggggtctggagtcaaggcccgggtgccattggactgggggctggagggggcaggtagaggatgtggaatgaccatggcagctttgcgtgaggacagcggtggtcagctgccaccttcagcacagagagaaacccgacaccccgcccccattaccctccggggaggggccccggctcccccgagcgccggccctgctgagacccaggagcccctgcaccaaggcctgggcccgcttagctgcagtggggagcctaggaggcccggactgcccgcggagaacaggagcagcacccgcaggcgggagggaggggcccggcctcggcggcgggcaggaaggcgggcgcagggcggcggggacctggccggaggggccggggcggccgcctgcggtttccagggagacgggggcggtgccgagcgcggcggggcgggggctgcgggaggacgctcgtccccgcgccgggagccaccgccctcggccgtgcgcgccagtgcggctgcggcgctgcccggggtggctgcggccagagtctcccgcgcgcccggcggaccgcagcccgccctcgtcccccgctgg

SEQ ID NO: 25311 - DNA, 1561 bp, Homo sapiens
ggcctggcctggggcaagtgggagctgccactaccatgggctgccccaggagggtctctgctcactctgggctgcagagcccccttcagttctgagggtctggcagctcattctgtgagtcaggctgacaggccaggtgcagagattcttcttttgggcctgtggattgcccactccctgctttcccttcccttgttccaaagcccagcgtggagtcgttctccacagagaacatgtgtgccgtcctccttattttatcggccccagcaagaaagatgcttctttatatttgttgtggagtggttgggacaggcagactcattgtgtagtcgttggggaggaatgaggctaccccagcataccaacacttgtgtatcacggtgcttgctggctcaggggaccaggaccctcaccatgagtcataattgaatagccttccctcttagaatgcatttgtcttcttgccaaaggcaactggactgacaggcaggcagggaagctggtgaacatgggaaggctggctggtgacatcagtgcccagtgagcccttccatcccaagggctgttttaggaaaagcagggttggagcttgagagccaagggatgtgggcatccatagcttccacgcctcctgccctgctcctgtgcccacaccggatgccagagagtttctgtgtgtgggcagaggactgcagggcgctcacgcttgctgtgaagtaaggcgtttgaaggtgaggctaagccttgacttggtgaggatgaggaagaaggcagaggggagtaaagaggtgggattgaggcagcggttggacgatttggggtgctacagaccatgggaatcagagagggggccatgctcaatgccagaggctcactcccatggtgattgtgtcccctagggtccatgggtcctacgagcacctgtgggccgggcaggtggcggatgccctggtggacctgaccggcggcctggcagaaagatggaacctgaagggcgtagcaggaagcggaggccagcaggacaggccaggccgctgggagcacaggacttgtcggcagctgctccacctgaaggaccagtgtctgatcagctgctgcgtgctcagccccagagcaggtgaggcacgtggccagcatgggagggctgcagccagcgtgccccccactgccaggcctcaggcacactgtagctttttatgtgactggctacacagccctgtcaggactaagtgggaagaagtaagcttgttctcaagggtggtgtcctcagtttgtgaccttcccctactgtcctcttccagagggacgtggcccttctctcccctgaccagtcctttccactagtgcgaggcaggaagaggtggcaccgagtcaaagcccactgtctgtgccatccctggcccagctggcaacctggcaaaatcaaaacctgttttttattttagtgatagataacattcgttaaaaacagtttgtctccaaaaaatgaaaggggccaggtgtggtggctcacacctgtaatcccagaactttgggaggctgaggtgggagtatcgctgga

SEQ ID NO: 25312 - DNA, 1031 bp, Homo sapiens
tcaatctgcctagggtcctgtccatgccccccgtggctggcaccgcgtgccatgcatacgaccgggaggtccacctgcgttgtgagctctcaccgggctactacctggctgtccccagcaccttcctgaaggacgcgccaggggagttcctgctccgagtcttctctaccgggcgagtctcccttaggtgagaggaaccgcgcagtgctgctggctctccgaggccacaggcccttccaaggcaggatttgggcactttccctctgtggttggcaggtgtccatgtgggaactgaggccaccgggaacctgctgccagcgccctcccatgtttgtcttcttggcagcgccatcagggcagtggccaagaacaccacccccggggcagccctgcctgcgggggagtgggggaccgtgcagctacggggttcttggagagtcggccagacggcggggggcagcaggaactttgcctcataccccaccaacccctgcttccccttctcggtccccgagggccctggcccccgctgcgtccgcatcactctgcatcagcactgccggcccagtgacaccgagttccaccccatcggcttccatatcttccaggcaagctccttgccccagggagggagggggagcagaaggggccctcagagaatttgcatcttggcctccattgtcccaacagagggctctgggctcagtcacttgggctccccctgcccttcgaggcgctgcctagaacccgcacagggccctctcccatctccaacctctcagaggcaaggccgaagatggcctctggaagggccgggggcctgggaggtgggcagggctgatccaggcagggcaggtttccagaggaggtggtgagtggggaggaagggagaagtttggagaggacaggaggccgaggttgagaccagcgggggtgggtcgagccctggcttgggaacgcagggggctgatggactcaggagtgagaggaggggaggcccaggctggctggccacagcagcccctcgggtg

SEQ ID NO: 25313 - DNA, 1037 bp, Homo sapiens
ggcaagtcagaatgtggtgagaagagagggtttattgaaagttgctccattacagagcagggtgtcgtcagaaagcaagagggggaacaccccagctttaactttttctcatacaggggtctcgtctgtgtaaagactaagctaaactgtgcctaacatgtattattctattgatttaaagaaaactgtctgtcacggggtcttgctctgttgcaaccaggctggagtgcagtagcacgatctcagctcattgcaatctctgcctcccaggctcaggtgctcctcccgccttagcctcctgagtagctgggattacaggcatgcacccccatgcgtggctgattttttttttttttactttttgtaaagatggggtcttgctatgttgcccaggctggtctcaaacttctgggctcaagccaacctcccaccttggcctcccaaagtgctgggattagaggcctgagccaccgcgtccggccaagggtagttgtctggaaagcatatattgttctggataccagggcacttggacactttgctgtcatagaagtgtgtccacgcaggcgtcactggctgctgctttagctgtaaacatcgtatgaccatgggctgtggctggcaggtatgtgcctcattggtctcaaggtggagctgaacgtaaacggcttttctctggctctcccaggctcctgcttccctgacatcgcctcacagacttcccttcaaagcagggctgtccaatcttttggcttccccgggccgcattggaataagaagaattgccttgggccaaacatgaaatacactaacactcacgatagctgatgagcaaaaaaaggtctctgcgtaaatctcataatgttttaagaaagtttacaaatttgtgttgggccacattcaaagcccgcagcccgagtgttggacaagcttgctgcagaggctcccctagatagggctgcaggggtggcgtccggcagctctagctggagaagcaggaggaggggcaggaaggaatcctgttcggagctcctcgc

SEQ ID NO: 25314 - DNA, 1035 bp, Homo sapiens
taatcccagcactttgggaggctgaggcaggcggatcacgaagtcaggagttcgagaccagcctggccaacatagtgaaaccccatctctactaaaaatacaaaaattagtcgggcatggtggtgggcgcctttagtcccagctactcgggaggcggaggttgtggtgagccaagatcatgccactgcactccagcctgggcaacgagcgaaactccatccccccaaaaaaaaaaaaagaaaaaaagaaaacaaaaaaaggaaaaagtctagaaccaacccaaagacccagccagtgagaatgggtgaagtatgatataaccacactgtgtaatgttattcagcagtgaaaatctatgaaccacagtgacctacagtgtggagttctcttcttcatataatgctgagagaagacaatatatatcatgatgtactatgaataaagttcataaacaacaaaaacattcactattgtttaggcaatttataaaatttttaagctaattttaattacatattttactgccagaaaacctagtttttaaagacaaggaaattataaacccagagattcttatcgcaagggaagagaagggtacacggtcggatgagcccattcagcattctggctgccggggtggctgctagtcccagatgtcactaagtcattaccatttatttactttttaagcatgaaattaaactttaaaaaaataaatatttaaattcaggagcacaactcccgcttgaaaagaaagctgtggtgaatcatttaaaaccaagatttgtcccagatggactggtttcacaggtgactattatacattgaaatggcaagatgggacatgagacattttctgtcaaacccctgaggcctttgtcctgtcggcctgaaccactggaattaagtcccacagcgtcttctgggagccctggggtggtttcaagcccgccctgctgcttcacagacacagccaggcactgagccccaggcccactgccctgccccgactccaaggatatccagccctggtct

SEQ ID NO: 25315 - DNA, 1026 bp, Homo sapiens
aatatacagccttatttggatcataatgcaagtaaactaaggaaagaaatgttaagacagttgaggaaatacgaacactgacaatctttggtgatattgaggaattactgttaatttttttaagtgttttgaggggtgagtgtgcgtgtttgtgtgtctgcatgagtctgtgtataccactgttgtgcatgcgtgtgtctgtgtagtgtgcatacgtgcctgtgtgtctttgtgcatgcgtgtgtgtgtgcatctgtgtgtgtcttagtccttttcagcacacatgctgaagtaggttccaatgaaatgaaatgaggaagtgcttaacagggaagctgtcgcctcagcagggagagcagctctctccctcctccgcacagaggatgccggctccggggtagagagtcctcgtgaaatccaatgggcttctctgctggagtgagttcaccagtctccccactgagaagtgtgtttaaattattcagtgagcttctttgatcctatctgttgaactatgttttgttttgttttgctctttgcagagggaagtgtttgtagatgctgggccaccttccaaagcaataaaaggcccatcctagagcatctgatgtgcccagcatggtctagattctaatggcctggtttattgccacaaacaaaaagagaaaagctacatgggaggcaggctgctgccagttctgcagctctgggagtcacggaaaggcagtagtgctaccctgctcacctgcactcagctacttcctcccctccttcccactaacaggttcaaaacacatttcctttctcaggaagttcaaaggcacagatggatgtttggtgacctttgccaatatctgaattcaggaaattcagaatgcttaaaacatcactattgttggagcagggtctaaccctgccacattctccaggtcctcagcaaaccttcccattggttcctcctcggggtttgagctggctctgggcaccaaacagccccagacctcagccagaagcagctcttcacca

SEQ ID NO: 25316 - DNA, 1049 bp, Homo sapiens
ggcggagcgggggcgcgcaggggcggagcgggggccgcctcgcgctgacccctccggcgcccaggccttcctcctggccttctcgtccgacttcctgccgcgcgcctactaccggtggacccgcgcccacgacctgcgcggcttcctcaacttcacgctggcgcgagccccgtcctccttcgccgccgcgcacaaccgcacgtgcaggtgagccccgcgccaggtggagggggccgcgggcgcacgaggacgaggcggagcggggctcgggtggggtgggggtgcggcggtggggagccgggaggggcgggcgccgccgggcaaggccgggggagggggggagctgggggcgccgtgggcaggggctggggggaggttccccgcggtaagggacggagctttgcggggctggagggcaaatcgtggattctaggtgaattgctagttggtcatagtgtagcaggacgagtcgcagacagaactcctcagacaccggattaaagaaggaagaggtttttttattcggccgggggcgtcggcagactcgtgtcttcagagcggagctcgccgaaaaagaaattcttagccctttgaagggcttacaactctaagggtctacgtgaaagagtcataatagatcaagtaagcgtgaggaacgtgactgtgggctacatacatcagctaacggtacaaaaagttttacggtgctttctcatacagcgtctggaattcacacataacaccagtagttttggtcaggggttaatattattgttattttaaccgccagggccaggtggtggcgccaaggtcatctagctatttatcttctgtttctttccagctttttgctttcttccttttctcctgtcttataaactagggaaaaggggaggttggggagaaactgggaaggacaacaggagaagtggtggcctcataccataatagaacctgcagagcaggtagatgtacttcacccgcagttgtggagacttcctttgtgatctggttacaatgaagttttgcatgtgtttcaataaacttga

SEQ ID NO: 25317 - DNA, 1047 bp, Homo sapiens
gtgaagaagagcccagctgtcatctaaggcaaactgcccccactgaggacaagcgtaaggccctacctcccccaacctgtgcgcatctcaatcacagcagacactgtgacggccacaggggacccagatggtgcctaccaccttgcctccaggctccactcaccagacctcaggctgagggtctggcagtggaggtaggggcagggacccttggtgctttcagaccccacggcaggtaaaatcaggactgcctgagaacccgtcaccctctgcctctcaggtcaccccccagctccaggaacctgcctcctgctgtccattgccaggtcttccttgcaccctgacacctgtgctgaggcgctctggcagctggaggaggctgattgcactccacaaacaggactgtctggaccaagggaaactggcaggagggaggtgggaaaggaagagggcaaacgtttggcttttataaagtcaaggacgtttatttcctgaggtcatgacacaggaagtggaatcctagccacggctgcggagctctcgtgatgaaggccagagtgctgactgacatgccgggtggaccaggagctggagtctgttatcttagcacgaatgctcatgaccttggtttagtgttaaacagtggagcaggtcctgagcgggcacggccaggcctggaggagcggccgcacacacagccaggcgctaggctccctgcgggacctcgggaagggggaagagcgtcaacaatttacggagggtccagccgctgggtcagattgagacaaaccattgtgtggttgggtttgggtcagcaggctggagagggttctgttctttttgatcattatcgtttggggccccaagggagggtcttgggagccacctgagccccaaagctgggaaattcctcagagctgctcatgtcaggagcctgtgcagagagaggacacggcttcaggaggggatgctccccaactcgcaagcagcttccgacgcagttgccaccctcaggacaccaagcccgcctgcccgcccaccctccct

SEQ ID NO: 25318 - DNA, 1022 bp, Homo sapiens
tgtaatttaaatagatttaattttctattgtttagaaaacagtatttgcctttggttttcagaaatatcctgaattagatttaagcagttttcctttttttctttttttgagacagtctcactctgtcacccaggctggagtgcagcagcaccatctcggctcactacagccttcacctcctgggctcaagggatcctcccacctcagtctcccacttagctgggattacgggtgcccgccaccacacccagctaatttttttgtattttttgtagagacagtgtttcaccatgttgtccagactggtcttgaactcctgagctcaagcgctcctcctgcctcagcttcccaaagtgctggtattacaggcgtgagccaccacactctgccagcagttttcttactgttttcattatgattggttgctgaatttcatatgcctcatcagcatctattaatgcatgattttttttcccctatactgtgttgttggattaatattggtagatgcttttgatacattcctggaatctaattgctagcaaatattgtattcaggatttttgcatttatatttgtgagtgagattggcctatggcgttcattcattcctttgttcctttcttatgtctccatctgggtttgttattaaaactgtgctgtcttcataaaacaaattgttttcccttttctctgtagaggcttggaatagttaaatgactttggtcttgtccaaggttagatggagttcaactctaacgtcaagtcttggtccttttcattggtatgtctttaatcagctgcttagtgatacttgttttagtcagattttccagtttttggttctgtattggtaatttacagtgcccattttttctgcattttcagatttggggccattttgctacatgtagtcttctctgtcattattttagctacttttctatatttgctattttttcctgaattgggcttgtgaggaatttgttttagaaaaccagcttttgcggccaagcacggt

SEQ ID NO: 25319 - DNA, 1051 bp, Homo sapiens
attcccagcagaccagataatttagaattctgataatttattatgatgaaattgatggggctcttagacttgataaattggtttaaatcagcctttgcaagttagttcagagataaattagtgctaaagaacatattctgagaaaagcagaacttgtggttaacattgcaagattattatttctgttttttttttatctttgaatcctgtgggtgttcattactgtccaatgcaaaatcatcataccagtttttgcattttataccagtgttagcatggaacacagataagcaaaaaaaaaagtcattatttcaccactcaggaataaccactgttaatatgttacatatattctttttcacctgtgtgtgcatttgactatacatttacaaaatgtaatcctaaaggaaatactattttgtatcttgcctttttcaattaataaattgatttttaaaatttcttctcattttcagtatgccactgtctagattctggttacttctgctattcttgccttctcatatctctgtcctctctctcatcagatacccttctgtcaaggaatattgatgcttcagtgtagtcatctatgatcttctcattctgtcttttctttcttggtctttgacactagatactcaacatcccacccctaatttgcctgcctcacccttgatgaaactctgttctatagagctagaagcacagcaagagagatgcttttttcctcgatacttttcagaaatgcattgcacctaatacctgggagaagctattctttagccaagtttgttgaatgaaaccattcattcaaagtactgtcagctgtagcagtactttgtaagcttgactgattttcctggaactccatagtctctcaagtcgaaatttgaaattgcattaagatgtattaagcatgtatcttctatgtattgttaaattcctaaacagaatactgattaacaaaatgttaattttcagtcgcatacaactaaggagttatactagataagtttttctttttttaatgctcctagttgaatactac

SEQ ID NO: 25320 - DNA, 1056 bp, Homo sapiens
gctctggatagtactctgaccttgggcaaattagagtttctttgagtaccctcaaagatcatactgcaaacatagtagtactgtaggtactaaacacagaatgatgtttgtgaggtacttagcccagtaccaggccttatgtaaacacttaaccgattgaatggtgtcatatgaataaggtcatgacaaggtttttctttttatttaaaggtgaatcaggtctaggaaaatcgactctcataaacagcctattcctaactgatctgtacccagaaagagtcatacctggagcagcaggtaaaaacattcttatgttactgtaagtgtaattctacatgaaagatgctgaagactgcctaattaatattttatgtcttagctgtgtgttttgtttgttcttgttcagctttgaacacaaggaaaacacttttatggggtaggtgtgctgcaccgaggtccttggatttgggttgtagactttctttgacacgtatccatggatccatcctctcttgagtttgtctgtaaaatgtaataagtagtttctgcctatattaaatatttgatggaaggattaagtgagaatgttttacatcaaaaatgctgtgtaactagaagattactaggatagatgttcgaattcatctactgtcagaaagttccagcacaggacaccagcatccacaaatgactgttgaatgaaataggcacacatagtgagagcctaagacttgggctgctgcaagaatatgtagccctttcagaatatttttgaattcagtttttaaatgaattcgtaaattgctttctttttcccaggaacagaaattataatttttaacatttgtgtttttaaccttccccagtagcacaataatcttagctttaaccttcccctttctgacttctctgggatctttttttcttaatccccatggtatctttggagaacctacctctgtagagaggcagtagactctgaagtcacctgtcgtaagaacgtgagctttcctcttcacatgctgcttatattccctattaagtttgtttcttttc

SEQ ID NO: 25321 - DNA, 1023 bp, Homo sapiens
gttaaaacatctctttaaagggaataaaaacgtgttattaaaacagcttgtacagattaaaagtagagatggcacaaggaagaagaattatgtgaggtagataagggttccctggatggtgactgctgacctcctgttcctcagatagctttgtcccgactgatggtcattagtgaatagatctgtctggcatggtgtatgctggtctgcctgcttgaaaagaatctgcagactccagagactcaggaccaggaaaaggcagatgcccactcccctgtatcttatgtatcttatggacaggcaggctctctgaactgtccaggtggccactcccatcacttgccagaggaaaagcatgaaaggtaaagttaagtaatgacctaagagtccaaagaagagggtaggtcacatggagctggggtaaaggcaaacaaacctcatacaagagatctgattagagcttgaaagagagtttgagttggccaagatctgaggatgaaacgctgggaatttggtagaaggtctctactacaattcagggacctcattctggaagcatgagtgtgttcatgaaaacagggaggggacttgagccttcaacgacatacggcagggtgggttaggcagaaggcagggagtcttgaggcctccacagcatgtggacaggtggctgaggaaggacccagagtgacttgctggagccttagtcaccaaacgctcttgcagcttagtgggaaaggtgttcattgtaaaatacggtatttacacaaaatgcacaaaaatacgtatgtacagtttaataagttactgtaaggaaaacatccatgtcacccccaactgagtccaagttggttgctttagtttcatcatcacagtgacaccttagaatagtcctgagggtatgtgcttagttcacactttactgatgaggaaattgttgccgctccgagagtttaaaagtatttgctgatggtgccatgacttttaaacgatggcctgctgactctagaggctggtcctgca

SEQ ID NO: 25322 - DNA, 2131 bp, Homo sapiens
ctttatggaatgaaaattttacttttagatcgataaaattttatttctgtatactttctagttttgcagcatttccagtttccaggagcctcatgaatggctttttggtttagttaactttgtggtcatgtaagccctgccttttgctcagtttatgacctttgttaaggagaaaagtagaactgttaataattaacgcagcagacattgcctcactcccacttaagtgtgttttgttttcttttttctagaaaacactttcctggataaaaaagaaaacattccagatgcatgatccagctgtgtgttttcaatccttgggagggtgccatccacattttaacagtacctgtgcctgagaatttaatttttaaaagactttgatgtgtttttgtatgaagtacttttaacgtatgtatttcattgctgtgtcacactctgtgttttgtgaggtgaatgtcttccttttctttctccctaaccactaatgttagaattgatttccaagaatcggcatgtatacttaatactgaatttctttgatttaactgacttaacaactgactaaccattgatgagcactcctgatttttatctagaacattcagatttaccataatgttccttagtggtagaggtgtgtgcctagtgatgtagaaagatacactgacttggtgcaaggccatctgcttaccacatcacaccacttggagatctttgcttccttgcttttatgtttgtacacaacacctaaaaccagttttgctgctataattctatactgttgattcgtctgcgattttatctgttaaccaaataaaacataatagaatttcctaatgagatatatctttatacttaaacagcttttttagaggtgagttttaaagaagtctcttaattctgatgctaggttgtttttaaaaccactatgcaaagaactcaccacaagccaccttttgtagtgttctccactaatactggttatcctgtgctacagagaaaatcaaagcagtcataagctccagttttcgtattgcaaataagactcttacctacaaaatgagattcagtgaactaatttggtttttactcaaccaaattaaaaatttttttaaggaaaattagcagttggtctattcagaatcaaacctttttatattttatactgcactttagtgtattttctgtcactgtaggtatagaagatctgcctcccctgtggaaattggggtctgttggtgggcgtgcccctgaagcctggcttgggttgaaaagtgttcccgccctaaggccttggtgccctgaacctctgatgcctaccgggttctcctgatttgagtttcctttaaatactccctttttgagtaattttctgatgggaggaaagtagcagtcatcatctttttgtgtgcaggctgtctcatttatttttagccattgtcgtttcattcattttgtgtaatataaaccgtgtgtcatgtcaaagtgaaagacatttcaaatctgtagcataggctagtgggcaggtccgcacagtcgaagccacacctggtctgttttctgtgcactgtagccttagtgtcacctttcttcttgtgtctccttatggtacactccagcggttgccttttttatcatttctactgaagttgggaaattcaaccccagaaattgacagatgaaaggagacaatggttgtgtagggagatggagaaaatgcttaatctgaggatgagacagggttttttcatttttgtgggggctagaaaaaacataaaatgaggcagttaaataataatagttaatgaaggtgtgctacagaaaataatctggtgttcttgctaactttgcccttcactgttgcttaattgtgaacagccaaaagctatatgttatggcttattgtgtgaaggtaactaagaagtggtgttccatgacttcagagtacatccatgcggagtccattatttgagtttgacatttaataactttgctggaaaatctgtaaaaaagaaaaacaagtttgctagtgactaagccccgcatatgtgagtgaaagtacttcaggcacgctgcctcctggtaacagctatgcagggagggaggacccacactgctacacttctga

SEQ ID NO: 25323 - DNA, 1051 bp, Homo sapiens
agtcttagtcttaaatttagtgttaaagtcttaaatataagtcttagtcttaatcttaaagctgagtaattattaaacggatagtttatgccacgttactattatgtgacaacaaacagatttttctttgggatatcagcaacagagtaccacagggtcatctcctctcaagtgaatctgtcttcttaagatcagtctcatgaacaagggtatcttgttgtggccctgcatctcagctgcagccatgttgacgtctgtctgggctaaatgaaaatgaggatgtaagtcgctgcttggaaagtgtgcaaacgtgtaaagatttcctctgtgagccacatatttgagaagagagtttgatattccttaagctaggaaaagtgttttttatttgtctagtgtgtcatgttctcgtggaagaggaagcaatgttaaaaaacttgttttaaacatttttgttataaaataaacacacataaaaacatgaatcagatatatggcttaatgaattataaaatgaacactgtccagatcaagaaataaaactgtgccctgcccacctaagaactccttctctgtgttccatcccagtgacagtccctctctcccatcaagaagggaccactttagtaataacttcctggtgttttctctttatggttttatcagtggaatgtgcacctctagggagtacaggttagtcttgtctattttttttttttagcagtagatgtttagacatgactttcttataatgagtagaagagaaagaacctgaagaaatttttaaagctatacttaagaaaacataaatgagaattatacagtagaataaataagagaaatgacttctaaaaatgtatttcagttgtataaatgtttacagatttgtagcattacttaagggaaagaatgcctttggtgaccaaagtaaaacatcctatcctttgtttcagaagaacccactgttggtggttctatatttaataaatgttgtgagctgaccaagaacatatagatcacttatttttattttcatgttttcacgttggag

SEQ ID NO: 25324 - DNA, 1031 bp, Homo sapiens
ggccaaggcaagtggatcatttgagctcaggagctcgagacaattctgggcaacatagcgaaactgtctctactaaaaatacaaaaattagccaggcatggtggctcacgcctgtagtcccagctactcaggaggctaaggtgggaggatcacctgagccctagtggtggaagttgcagtgagccgtgattgcaccactgcactccagcctgggtgacagagccagaccttgtctcaaaaaaaaagagaaaaaaaaattttaattacctatttgcccacacccagaattaacgtcttcaacatttacgtcatatcatccatttaactcttctagacattttttgcacttacttatgcacttttatatacacacaccccatctatatcactacttctgtccttttgattacataagtactgagaagaattagcttcccattgtgaatgtgcttatatgtatttctctctttacctcctgtaatttttattttatgaatgtcaacactatggttatttgtccaaagatatacataactgttagatcttaatggatacaaggttactgagcaaaggggctggctgcctgatgtgcatatggcaccagcttgctttgatttgatttttttagagatggggtcttgctctgtaacccaggcttgagtgcagtagcatgatcatagctcactgcatccttgaactccaaggctcaagtgatctgcccatctcagccttccaagtgccccaccacacccagccaattaaaaaatatatattttttaattttagagatggggtcccgctgttgttgctcaggctagcttgagcctgagctcaagtgaacctggccccaagtgatcctccggcctgattctcttgagtagctgggattacaggcgcgagtcattgctccccgctcagcagtggattttgagaaaagaaaagctttattgccagtcaaccaacaaggagacaggaggccggctcagatctgtctccccattctgtccttaagacagtatatttaagggaga

SEQ ID NO: 25325 - DNA, 1032 bp, Homo sapiens
tacagtattttaggaatatgtgagaacccaagatttgaaaatgtgccaaaatgagagtgaaatgcctatcaaaaatgttggtgacctttcaaagaatgtagctacagtttccttttgagcgctcaagattattttcattgtacagtataatattataaaaggaaatttgggattgatctaattaggcaataaaaatcttaagtaatgaaacttacagtacagatatgaattatataataggaggggccatctagatagatagaggagttataatttggcaaatgaactgtaaatgagcacatgaaacaagttaaaggacaaaagctgtttcaagaagaattttcccacagagcttaagacaaagaataaagaagtactttgttagccaggcctttgtcgcccattttcatctagacacaacctttaatagttttgtaaatgtaagtttttaacaatattgtttatacctaagcctggaaaaggaccttaacaccatgaccaactagaaaactggaaacactgaacaaaaagttttgctttttaacttgtattttttatactatgttcttaatactgtttctcctccagcctagtattgaaacagttctgatttgagtcaatgttgagttcagcaggaagcacagtgtgatggcggggttttcttccattctgagcatctggatgatgccagtgctctaactggctgtgaggcccttccgacctagtgcagggagaatcttgtttcatctgatcatttggtactttgggaacatgcagtgattattgtagtccacctgatagtgaatttctgtatttttaggaccagaaggtatgttttaagtcgagaagatttgaaaggataaaagtggacatgtgggccaggtgctttggctcacgcctgtaatcccagcactttgggaggccgaggcaggctgatcacgaggtcaggagattgagaccatcctggctaacacggtgaaaccccatctctactaaaaatacaaaaaaatagctgggcgtgatggcgggcac

SEQ ID NO: 25326 - DNA, 1072 bp, Homo sapiens
actggcccggtgtggggctcatgcctgtaatcttagcaatttgggaggcccaagcgggcagatcacctgaggtcaggagttcgagaccagcctcgccaacatggtgaaaccctgtctctactaaaaatacaaaaattagctaggcgtgatggcgcatgcctataatctcagctactcaggaggctgaggcaggagaatcacttgagcctggaaggcggaggttgcagtgagccaagatgacaccactgcactccagcctgggcaacagattgagactgcatctgagaaaaaaaaagtagatgtaaacacattaacttttttttaaaaaaaactttttcatttatcatttttttccctaaaacataaactgggggccgggcacggtggctcacgcctgtaatcccagcactttgggaggccaaggtgggcagatcacaaggtcaggagatcgagaccatcctggctaacatggtgaaactccgcctctactaaaaatataaattagccgggtgtaggggcatggtggggggcgcctgtagtcccagctactcaggaggctggggcaggagaatggcatgaacctggaaggcggagcttgcagtgagccgagatcacgtcactgcactccagcctgggcgacagagagagactctgtctcaaaaaaaccaaaacaaaacaaaaacataaactggggaaaaaatgtctctctctctctctttatatatatatatatgtatgtgtgggtatatatatgtctgtgtgtatatatatagagagagagagagagagcacgcgcatgtttttgtgtgtggaggggtgggcaatctcgttctgtcacccagcctggagtgcagtggtgtgatctcagctcagtgcagcctctgcctcctgggctccaccagtcctcccaccttggcctcccaagtagctggaacttcaggcatgcgccaccatatctggctaatttggggtttttttgggggggagaggggcgggtagagatgggatttcaccatgttgcgcaggctggtctgaaactcctgggttcaagtgatccaccagcctccgcctc

SEQ ID NO: 25327 - DNA, 1032 bp, Homo sapiens
agaaaccctacaagccagaagagattgggggccaatattcaacattcttaggaaaaaatttccaacccagaatttcatatctggccaaactaaacttcataagcaaaacagaaataagattcttttcagacaagcaagtgcttagggaattcatcaccaccaggcctgctttgcaagagctcctgaaggaagcactaaatacagaaaggaaaaactgttaacagccactgcaaaaacacactgaaatacatagaccagtgacactataaagcaaccacaaaaacaagtctgcaaaataaccagctaggaccatgatgacaggatgaaattcacatataacaatattaaccttaaatgtaaatgggctaaatgcccccaattaaaagacacagaatggcaagctggataaagagccaagacctatgggtatgctgtcttcaagagacctgtctcacgtgcaaagacacacatagactcaaaatgaagggatggaataaaatttaccaagcaaatggaaaacagaaaaaaacaaggcttgcaatcctagtttctgacagaacagactttaaagcaacaaagattaaaaaagacaaagatgggcattatataatggtaaagggttcaacaagaagagctaattatcctaaatatatatgcacccaatacaggagcccccagattcataaagcaagttcttaaagatctaaaaaacgacttagactcccacacaataataataggagactttaacaccccactgacaatattagacagatcatcaagacagaaagttaactttctgaaaatattcaggacctgaactcagccctggataaagtgaccttatagatagctacagaactgtccccccaaaaacaaaagaatataaattcttctcatcaccacatggcactttgtctaaaactgatcacataatcggaagcaaaacactcctcagcaaatgcataagaactgaaatcataacaaacagtctcttacaccacagcacaatcaaattagaactcaagattt

SEQ ID NO: 25328 - DNA, 1864 bp, Homo sapiens
agttatttgggggcctctgagctattgttggcccacttcttgggagggcttcatctcttacctccgtggcaggccctcggttttttgttttgtttttgagatggagtctcactctgtcgcccaggtgggagtacagtggcgcgatctcagctcactgcaacctccgcctcccagcttcaagcgattctcctgcctcagcctcccgagtagctgggacttagaggcgcctgccaccacgtctggctaattttttgtatttttagtagaggcggggtttcactgtgttagccaggatggtctcgatctcctgacctcgtgatccgcccgccttggcctcccaaagtgctgggattacaggcatgagccaccacgcccagcctaggccctcggttttttaagactctgtcctggatatataaataatatctagaactggggctatggggattttgtttccttttgttgatgttttgttttgctttgtttttgagaatacaatttaggacagaaattttgagaatgtagttgaaaatcctccaatattttacttttttttttttttttttgagacggagtctccctttgtcgtccaggctggagtacagtggcgcagtctctgctcactgcaacctgcgcctcctgggttcaaatgattttcctgcctcagcctgctgagtagctaggattacaggcactggccaccatgtccagctaatttttttttttttttaattcctgacctcaggtgatctgctcacctcagcctcccaaagtgctgggatcacaggcgtcagccacagcacctggccttcaatattttactttcagtagaaattagaacgacttagtgttggggcaatattttgggaactaggaagcttaagtcctcatttagaccctaatgtttgtatcttggctttgagaacatctaactcaggatttttttttttttaattgagataaaatgtgtatgccataaaattcaccatgttgaagtatacaattcagttgttttaggatacttacacagttgtatgaccgtcactactatctaatttcagaacgttttcatcatcccaaaaagagaccctcatactctttagcagttactccgccagcccccagcaaccactggtatccagaacaggcacccatcaggatattccctctctatggatttccctattttagatatttcatataagtgggatcatacaaacatgcggtctgttgtgtgtagtgtttccttgtttccaggttcactcatgtggtagcatgtatcagtgttttactccttatggctaaaggggtttgttttttcctttggagctgtctctgaggggactgtgtccctaaccttgctgcctcttacactgagtttgcaggtaagagtaaatgttggtaacatcaaacgtatagtcgctgaaatgcccaagcagtgtctcagacgtttttaaaattttattttgaaaccatttcaagcttatagaaaagctacacaaacagcacagaaaggtcctgctggcctttacctgagatgcccgtctgcctttaactggttgtctcagtgttgtttactacagaaggtccaatctaggagcaaatgctgtacccaggcattatgtctctctggtctctgcaatctggaacattcttcctcctttccttggttttcatgaccttgacattttggaagattacagggcagtcattttgtagaatgtttatgatatgggattgtgcagtgcttccccaggatcagaccctgggctcactgcctaggtgagaaactcccagagtgatgatgcgtcctgattcatgtggcacatagggtccatctgtcccattggtggtggtggtggta

SEQ ID NO: 25329 - DNA, 1035 bp, Homo sapiens
taagatctctgatgttttgcctggatggatttactgtgattgcacagggaccacgtggctcaggtgtctgagccattgagggcatcttgcaagggctggttttccttttctcatcagtgttggctggatgccagcaggggttttgtggctaaccacatcaggcagtttcccatttttgtagctttgttatacctaaaccgcagtctcatcattttgcttatgcagctagaagtttcagtctgtatagttgttattcattctgtccctggtaatttagacctgccttcttgatgctttaggggccattgggcacagctttctacattggctaacaaatacctgtgaaaatgttaacagacagaagcgcagcagtgaacctgaggtcaggacaggactgtttgggaggttcttcttttcttactgtcactccaaaaataaaccttggatttgtgtgctggggagaaatgagtatagataacatttaaaacgttttcctaaaccttagtattcatatggtagctgatggttcctctccccttcattactgttgcctgacgacggtccttgctgatgctgtgaactaacaaagttgtctttttgtttttaagggaacccaccctggcgtctggacagcaggttaggtttgggtggttttgagctagcactgctgtggggcaggggtggccgctccctggtgaagctaatgctgtggaagctggaatgttccttcctaaggagtgggatcatgcccctaccccagcagaggtatctcatcactcgctcatgtgcgagattctaaataaattttgttcttgggcatcttctactaggcctcctataaaatagatcttgctgtttttggtttgtgttaatggaacctcactttctagagataattctttagttttttatttaggaagttttcaaaatatacaaagcaggaatgtaaggaacccgcatcacctcaaattcagtgttacccacacttgaccatgcttgccccagctgtgccttttttctttccttgggtatttt

SEQ ID NO: 25330 - DNA, 1032 bp, Homo sapiens
cttcaaggtatgcttgttccctcccagctcgtggaatatcaaaaaaattcattgctggaaaaattatttcatagacaaaaatgttaatgttctcttggggacttagagttgaaaatatttgtatagatttggttctcaagtccacagaatcgtatctgctgtggtctccctttggtgctcatctgggagccatgtgtatggaagattctgtcacaggcggctgggatgtgggcagatgctgttagcctccctctccacgtggtggtccatgcctgacgtgtcccctagttcaaggaagcgccatctttagcatgaaaacaattgcgttcccctaggaaatgaagaaaaaatgagctgaaatttccttatacatttgaatttgttcattttttaaagagacatttttgttgtctgctttgtggtacttataaaatttgttttccattgaaattgccatttataaatttgcagatatgtactaatttagatttttttaagtgttcaataaaataaggatatatttactgtgaatttttaaatgggctttttagctttctttccctctacttttagttttgatttatataagttaaagattcttttgcatattaatccctgaagcagctgcatattttttataacagtgtcactgacatcttcataggcttctgagcaagaaacagggaacaggcaccatgactcttgtgcagattgtcttgttttaatatgggtgatgatgtctgtggaaggccagtggggaaaggtgccttgcttcttcttggtcttagctctgtcagtgcttcctgctctcgcctggtgtggcctgcacggcagagctgggtgtcggggaggacgtgccgtgcaggcccccaccacaccccacggggcgggccttgtgtccttgcacttttaccgtgcacagaacagatgctgttggcttaaaattctgaaaatgaggttattattgcctgttttttccacagtcagccaaaaccaccctgtaaattacaggggaggacgtgaacaagagac

SEQ ID NO: 25331 - DNA, 1027 bp, Homo sapiens
ttctctgcctttttttttctttttttgagacacagtctcactctgttccccaggctggagtgcagtggtacgatcttggctcactgcaccctccacctcccgggttcaagcgattctcctacctcagcctcccgagtagctagaattacaggcatgcacaaccacacccggcaaatttttgtatttttagtagagatggggtttcaccatgctggccaggcttctctcaaactcctgacctcatgtgattcacctgcttgagcttcccaaagtgctgggattacaggcgtaagcccggccaacatctgcttttaaccatgcattctgatatgcattatcagtgtcaaaaagattttctaagacagaggagcactacggccaagtgtccttttatgatatccacagaattcaaaattgcagagcctaaaaggcactaactttatcctgtcgtatgtcactgtggaaagcactcttcagagccatgttcccacacttgttttctcactgtggagtacatctgtgttggtgacttcagctaaacctgttccccagggataaatgcaacagcccatacaaaatcaggcatgaggacacagtccaacaacttcgtgtataaataaagttacacattcatcgccagttgcttgttttaaaaataaaaaaaaaaagtctccccacagatttactgactttcatgtaggatctgtgtttgtgtaatttgaagtaggcttgatttataaggtttgctatagctaacatttaaagaaatgtttaaattaggcacagtggtgcatgcctgtagtcctagctacacagaaggctaaggcaagaggactgtttgaggccaggagttcaagttcagattggacttcataagatcccatccattaaaaaaaaaaagaaagaaaaagagtctgggcacagtggctcacatctgtaatcccagcactttgggaggccaaggcaagtggagcacctgaagtcatgagttcgagaccagcctggccaacatggtgaaaccacatct

SEQ ID NO: 25332 - DNA, 1032 bp, Homo sapiens
gtgtcagctgttagacactgactcagtggctcagaatatgaaaggctcaggaagtagcatgctggccccacctccctgtccccataccttagcagagcagctgcccagcagggcctccttctctttcctaagagtttactccatccatggtgggtgtcttggtaggcccgagatacgagagggagtgctgctgttacaagaatttacagttgttctcttcagcacagaaatgctgtaaatggcctctttcgatactagtttatgaaattataagtgtctgatgattgtgcatctttggtttcaacagctactctgacctacgacactctccggtttgctgagtttgaagattttcctgagacctcagagcccgtttggatactgggtagaaaatacagcattttcacaggtatcggccatgctggagcccaccctggtctgaccgcttggcctgcagaagcattttgtgatcactgttctctgctaactctgccataacttgtgacttgcaaacttaaggcgttgtgtgtgtgtgttttttttcttttaaacaacctctagaaaaggacgagatcttgtctgatgtggcatctagactttggtttacatacaggaaaaactttccagccattggtaagtactctgttttattacaacgcgggacaaaatatgtttttaggaaggaggaaaacttacgcttgtagatttgacttcaatatgccactgacttcatttgaatcttcacagcaatcctgcttaactgaattggccgaggcctcacgtgtagtagtggcaaagctagaatccacggcgcctgactctaggctagtgtgttttcaactgcaaatcccagcttattactggagctggaaatcagtatcatgagttatgaccaacgttgttttaaatgtaggacagaatgtcatagaaagcggtgtgtgtccgccacgggcacgcagcatggcgcttcagggatcttcgttttcgtttgcatgtttgagtgtgtgttctgggtcacagctgtacaatgtg

SEQ ID NO: 25333 - DNA, 1026 bp, Homo sapiens
gctgtttctctggaagcaccaggccactcgccatgctcgctgtttctcctggtcccctgcctgctccccaccagcccccgcccctgttgctggatgatcctccccaacctgcaagtgctgtggcactcaggcacatggacggcttccagggctgatttgtccctggactccaagctcaggtccagctgcttattctgcatttccacctgggtatctgtgtgcatggtgacctgacagccagagcccgtgctggccccagcctgcttctcctacagtggtccttcaggtgctcaaaccaaaatctgggattgttctagacccctctttttgagacggagtctcgctctgtcgccaggctggagtgtagtggcatgatctctgctcagaatcccaagtgattctcctgcctcagcctcccgaagtgctgggattacaggcgtgagccaccgtgcctggccaggactcctctcttttttctttttttttgagacagtctagctcagtagcctgggctggagtgcagtggtgcaatcttgggctcactgcttcctccacctcctgggtcccggttcaagcagttctcctgcctcagcctccccagtacctggaattacaggcacccgccaccatgcccagctaattttttcaatttttagtagagatggggtttcaccatgttggccaggctggtcttgaactcctgacctcgtgatccacctgccttcgcctcccagagtgctgggattacaggcgtgagccaccgcgcctggccaggactcctctctttcttttttttttttttattttttttccgagacagagtctagctctgtagtccaggctggagtgcagtggtgcaatcttgggctcactgctacctccgcctcccgggtcccagttcaagcaattctcctgccttagcctcttcagtagctgggattataggcacatgccaccatgcccaactaatttttgtatttttagtggagacaaggtttcaccatgttagccaggctggtcttgaac

SEQ ID NO: 25334 - DNA, 1025 bp, Homo sapiens
agtcgtgcttcccactaagctgcagatttctctataaggactcagattccttggttgtcagctcagcgtgtttggtggaggggagagcagagcagagcgtgaaggtgctgggaggcctgcctcaaagttggcaaaacccacagcgtctcagagctgcgttcatgttctagttcctgcctctgtgccagtgagaccagaaaaccaggccactcaaaagcctcttgcgtgtgctctctatgaatggaggctggggcaagggcaggacccctgggcctcaggcgagaagaagcagatttaccctcagctttcttcctgtctgtggcattggctgtgccccggattttaggagccttggcccttctcatccgagaagcacctctaacgcgaaccctccttcgcgcagctatagctgcaaagatgaaccgtctttgaattgtacaaaagcttatggtcattctcctactctctgtaggaagcttgctgtcttcgatacgtggagctccttggcggtccacattgcaatggacaacactgttgtgatggaggaaatcagtaagtggctcagagtttccatggacaagaaagttgaaatcacgggcaacatacacacttcctcgcctgagtccccacgggagcctcggcgagtgttgtcagtcgccccatgccgtgcaggtgctccgtggggcctgtgcgccaagccagatgcacggtggcctcgctctcctatcccggcggtcataccaagagaggagagcccaggctgtctggaggccgcgacttggtatctcacgtcgtgttttgtgtcttggttacaaatcgtttatgaaggccctgctgtgcttaggcgccctcgtgtgggaattctggtgaagttattttgcgtgccttgatgtgcgacagagagatgtagcaaccatctctagctgcaccatctcgagcaaaggcacgtcgtgaaggcagagctcttttcagctttctggaagaaaggtctgctgcaaccctgaaggaacctgggcgtggcaaca

SEQ ID NO: 25335 - DNA, 1034 bp, Homo sapiens
agacttgaacttgggatcataaccaaagggtgtttgtttcttccatctgcctttttcctccattctgtttcttgaaatttttataaaacattggaaacacaggaagagtacaaagaaagagaaaaattattgattttaccactcagaaataactcatatgagcattttgacattcttactctcagtatttctcctgtgcttttcaaaaacttacatagtttcctaagtattttctcctggccatgagtgacagcattgtaattattaactggctacacaatatactattataccttagttccctgttcactgccccatcctccctcccgtgtttggggaaatcacttaccccctcgttccgcacgcgtgctcaggatctcaccaagtcacacctcagtccctggcctcggattagggaggctgttgctgggtgcagtggccaggaaggcgcaagggtcagggcttcctagaacctccgtccctctgggtgcaggtagcactggtgggagtgttgggggcagcttgtctgtgtggactccagctccgtcccttcgggagtctcagggctgcccaaagcagtgctgctgaaacgtggcttgtcagagtgagagtggagtcaggtcctggaagagcttgaatctgcatttcccagcccctggggatggtggctcccgggaggatgtggaggctgcctggtctgactggcttcgtctcactgcgtcagctgcctgaaaggacactgttcctcacaggagcatgtggaaggtgcctgatgcccccatttaggaagaaaggcatccacatccagccagcaaaggcactggcattgatgcacaaggcttgggtttctgggttcctgagtgtggcgtggtgttgtgaggaggacatcggggtcgttctgaatgacccctaccaaaagccccaggagggagtagtggggggagggcaggaagcaggctgcttttttcagtcgtgctgctaagagtgcgcaagggaggacgtctgaggaagaagtccgcaaagccgaagctaga

SEQ ID NO: 25336 - DNA, 1050 bp, Homo sapiens
acttgaggccactggtggaaaagcagcatgccctggggttcattttcagcctggtcgcgggcggcctcctgtgtgcccctttccctgatggtctggtgccctcggctccctccccacctcctgcccactgcttctcagtgtgatgtgggtgcagtgggtctgaaatgcggcctcctctgtccctttcctctgccggctcggccacccacctgcccacctgcctcatcctcccaggtgaggagctcatctacctggacccccacaccacgcagccagccgtggagcccactgatggctgcttcatcccggacgagagcttccactgccagcacccgccgtgccgcatgagcatcgcggagcttgacccgtccatcgctgtggtacgtggcggccacctgagcacacaggcatttggtgctgaatgctgtttgggaatgacgaggaaaactttcggatttttgcgttttttttttcagcatgttgggataagtactgtgttcacgtggttgggaatctgaagggtataagagccggaactgtgtccttgcaccctcacgtccctcccccaggcaccacctcctgtgcagccttcatggccttcgagtggcccagagagcgtgtgtctggatgtgagcgtgtgtgggcgcgtgctgagtgtgcatggatgagtgtgagccatggtgagtgtgtccccctcacacctacatttaaacacacgggcggcccctccacccacccctgcaccaccttcgtcacacccacatttaaacacgggcggcccctccacccacccactcctgcaccaccttttgttttccggaggctctgacttgacctctctgggggatttcctaagaaggagcttccctgtttttccattttgattacctagttgtgatttttggtgtgtgatttatgcagacctgcctgccctcaaatatatttgatggggaaagaggccaaaaaacccccctagaaatcatgaatgacggtgacatgctcagggaagcagttaaccgaatcgggggctctgttgtggatgctccgccc

SEQ ID NO: 25337 - DNA, 1059 bp, Homo sapiens
aggattggacattggggttgttttctgttttctgctcttatgaatgtttcccgtgtggatttctttaggtgacataaggtttgtttagggtatttaagagtagtgtgttctttcttgactgctctaccggaaaaaaagaaaagggaaaaaagagtagtatgccaggtcataggaaaggtggctacaagttattcatacaggatgtttgagagtcgaagaaggcactgtgaccacttgctgtgtaacattcagagctgggactgtcctgggcacgttgccgtaaagtctgcacattcacacgatcccagactgtttgtgcagaacggttctgcccacttgcgctcccaccagcacagcgtgagttcatgtcagcctacatctttgccacaacttggcgttggctgactttagttgttgccagtctggtgagcacatcatggtgtcttgtgcagggctagcttttcccccatttctccatcagataagaaagcagagattgacatcctggctgcagagtacatctccacggtgaagacgctgtctccagaccagcgcgtggagcgcctgcagaagatccagaacgcctacagcaagtgcaaggaatacagtgacgacaaagtgcagctggccatgcagacctacgagatggtgagggcggggcgggggccatggctcttcctctgacctctactcctgcctctcatgcaacaaaatgtaaaaactgcccggaaatgggcatagccaagtggaaggctggctttggtagctgacgctgctggaggaagtgcagacggaatacacttcatgtaggaccatccctgttttttttttttttttttctgggccctttttgtttgtgtatctgctcggaggaaccatttgggttttttttgagacagtctcactttgtcgtccacggtggagtacagtggtgtgatttcagctcagtgcaacctccgcctcctaggctcaagtgattcttgtgccttagcctccctagtagctgtgattacaggcatgcagcaccacacccagctaatttttatatttttagaagag

SEQ ID NO: 25338 - DNA, 1029 bp, Homo sapiens
gagccaccgcacccggccaacacagatgtttattgatcgtggaggatacattgtggaaaatgtttttctctcttttaccatttttgggaagagggataggtaagtgcagggagtttgtgctgaaacagcgcctggcaatttttcagaaatgaatttgatattgcgctccacctttgagctgttcacacctgtggctacccctggaaagcgctggggttgttgatgcttttggctgcccggcttcctgaggtctcgctgctttttggggaaagatgactggcttccctgtgggacgcttttgtctgacacgtgatgatgtggtcctgcctgccactgtgcaccatcccaggtattgaattttgaccttttcttttcaagtttctgtgcttagtgtttttaatgtttacttttgccacttacaataatatcaccaaaataatatgcatagagttttggaagaaacatagaaaacatgagcagaatgagacaattccttgggctgtagtttggacccaactgaatcctgagtgctctgtggctgacgctgtctacccgtgggagagacacactcaggagtggccgtttggccagaaaagaaggtcatggcccctggcctggcccccgccctgcagggacacagaagccacaccatttgcaccatccacgccttgctccagaaggcctggccgccttctccctgggggtgattcaaggatttggtctcggaccagacccccctccacagctgcccggccccagacccatctcttggattgagggtgtgtgggctggaaccagtgggtcactgtggcagcttcatctgagccgaaggtgtgggtcctctgtggctgtgcgattgacctcgatgggaaggagcgttctacccattttccttgttttcagtgctgcggtatcagtcagtgatctgaggaaatcctgtaggggaaggcaggctgcagtgaaaacaggagctggtgaaaccgagccctctgcatctgcgaatgtgccctaggtgctgctgctggggac

SEQ ID NO: 25339 - DNA, 1044 bp, Homo sapiens
ggctccctgcccttcccctccgggccctgagtaccggccccccaccaaggaggagcccgaggtctccgtcccggcggcgatgctgccccgtcggcctctggcgtggcccgcgtggctgttgcggggtgctccgggagccgcgggttcttggggtcggccggttggccccctggcccgcagaggctgctgctccgccccggggacccccgaggtgccgctgacccgggagcgctaccccgtgcggcgcttgccgttctccacggtgtctaagcaggacctggccgcctttgagcgcatcgtgcccggcggggtcgtcacggacccggaagcgctgcaggctcccaacgtggactggttgcggacgctgcgaggtgggtgaggcttgggaagctgcggcgtttccgcgtccctgctccgctgcgccttcccgtggaggcttcaaagcgggctgagaacaacctggatgggggtgccagcccctggctgcgctgagaggggcgtgtgcaccgccacaggctgctggaatgaatgaccacgaacgagtcgcttagaacaacccaagttttgttgttgttgttgttttgttttttcttttttttaagacggagtctcactctgtcgccaggctggagtgcagtcacggagtttcactctgtcgccaggccggagtgcagtggcgcgacgtcggctcactgccacctctgcctcccgggttcaagcgatttgcctgcctcagcctccctagtagctgcgactacaggcgcccgccaccacgttccgctaatttttgtatttttagtagagacagggtttcaccatgttggccaggatggtctcgatctcttgacctcgtgatccgtccgcctcggcttcccaaattgctgggattacaggcgtgagccaccccgccctgccaacaacccaagtttgcctggcgcagtggctctgcctgtaatctcagctgccctggaggctgaagccaggagttcaagaccagcctgggcaacatagccagaacccccgccccactcacctctaaaaata

SEQ ID NO: 25340 - DNA, 1558 bp, Homo sapiens
tgggggtctcagcagacctgcctgctgctgtgtctccacaggcctgcttcactcacagccacttcttcggttctcctgggacctgcctgcggctcctttcttgcttcatttgaatcgggcgggtttatccagcatttcctcctcaggagttcagaagtcgcacagcccggcagtcttcgcgcgggaggtggcgggtctagctcaccaactcccagttcggtgtcttgagctgccagaagcttgggcagccctggaggatgctgagactccgcatgcttgttccttcagccacttacatcttcttgttgtgatgtgtgttccgtattttaagcaatctcaccaggattattattttatggccactttctctgccctccactctcttgtgtccgatcttctgtctgggattatgttgcaaacatatcctcgttcatttcctgcagtaaaggtctcctggtgaccacttcttcacttctggcgtgtctgaaaatacctttatttcatcctcattcttgaaggctcttttccacaggcgcatggcttcaggctgttgtttgttttcttttatcccggtggaaacgctgacccgctgtcctctggcctcctcgctgttgggaactttgctgtcggtagctgctgctgtgaagggattctgcctctctcctggccccccttgggccacttaaagatcattctttctgatcttctaaagttttcagtgtgtggtgtgtgtgtgtacgttctttttcatctccttggaattactgaatttcttaaacctgtggcttggtatcttttaccagttctagaaattcttagccattattgcttcagatattgtctgtgttttcctctccttttgggactgtgattcaggatagaatgtctcagtccgtcttctgtgtctcttaatctcccctccatattgtcatcatcgtgtctctctgtgctgcattctgtgtgatttcttctcatctgtcttccagttcacgaatgccctcttctgctgtgttttatttgctgctgaacccctccatgagtggttccctccgtccattgagttttacattttgattatgaaagtttttatttctaaaagttttgttatttttgtcaaatctgcaatgttactttttatagttttctattctaggtattctcaagctcaccatttgtgtctttaaacatagtttgacgtctataatcccagcactttgggaggccaaggcgggtgggtcatttgaggtcaggagtttgagaccagtctggccaacatgatgaaaccctgtctctactaaaagtacaaaaattaggctgggcacagtagttcacacctgtaatcccagcactttgggaggctgaggcaggtggatcacgaggtcaggagtttgagaccagcctggtcaacaaggtgaaaccccatctctactaaaaatacaaaaattagccgggcatggtggtggacgcctgtaatcccagctacttgggaggctgaggcaggagaattgcttcagaccataaggcagaggttacagtgggctgagatcatgccactgca

SEQ ID NO: 25341 - DNA, 1034 bp, Homo sapiens
ccgacccaggctgggagcgggcacttcgagggagggggtgggacaggggcttacgctgaacggcttggccaagtacacgttcagcaggtgacgggaggagctgtggatattcatgaagggggtcctgacgcacgtgtcctgaacaaacaggtgtgttacttacttgtgacccacgttcaccttggggtggagactgcacatctaactgcgttacaatcaggccctgcacgtcagaaggtggagccgggacgggaagcactcggtgcgcagcctctgtaaaccgccagaaccagtccggggctgggggtccctgctcaggggacagttactgaaatgcggctcttgtccgatggcagctgtggttctggctgggggagcaggggtcagcgaggcagcgtctggcagcgggtgagctgcacctgctttaacgttgttcgtctcaaggccagcgtttgggtgtcagagaaaaagaaaactcccgtggcaggtagaacataaataagtgcagcgtgtgtgacttcgcccctgcccggcatggcctcaggtcccgttgataatgtagcgtcttatggccacagtcagttctgctgggccatggtctccttttattttttaatttttaaaaaatttactttaagttctgggacacacgtgcagaacgtgcaggtttgttacacaggtatacacgtgccacggtagtttactgcacctattagcccgtcatctaggtttcaagccccgcatgcattaggtatttgtcctaatgctttccttccccttacaccccatccccgacaggccctgggatgcgctgttcccctctctgtgtccacgtgttctcattgttcaagtcccacttatgagtgagaacatgcggtgtttggttttctgttcctttgttagtctgctgaggatgatggtttccagcttcatccatgtccctgcaaaggacatgaactcattcttttttatggctgcacagtattccgtggtgtagatgtgccacattttctttacggtctctatgtaacatt

SEQ ID NO: 25342 - DNA, 1041 bp, Homo sapiens
gcgtatactattttcttctttgagaattacaaaaaaattatttctacactgacaggatttactagttaagcaatgtttaatataaattttaaaaaacttctgttctacaaaatttccattccgtatgtaaaagattttgtttttctatataaaaagagctgactgacatatctttaaatactttgtactaactttatcacacttactgtgtcatagaatatcatacagtttatacgctcatagttctcttgtgaacacttcaaacatcgctaagcatttgatctggccatgtatatggtagctgtgttttaatttgagaatcttgagggtagagccacaaatttcaattcttacatttccatttgcaaagtgactagagaaaaagaaatcagcttaaatgaggtattaagtaatgtttagagtcgtaggtattaactagaatataaatccttagaaattgtctttataccttcaaaaattatactatgcatttatcatagaaatgtgattacaaagaagtctgactaccatgtctttaaacatatggcatctctcaacttttcttccttatggggctacatttgttcatttccagcagtagcataaacttacggtgacatggtagacttgtctctaaataaaatttttaaatgtttactaagttaatatttcaattttgtttttcttattttttttgtaaggtaggcagaagtcctatgtctcatatgcagggtgaaatccacctccgttctgggctgcctgagctccttcctgaactctagactcccctctccagctatgcactttacagctccgtttggacaaggaacaacacctcagccttcacgggctcaaatccaagctcttctttctcctcacttagcctgcccctcccacagtgttcctcttcagtaaatggaaattccatccttggatttccttggtcctcagggtgacttcagagccaactttcgttcttctatctcatgccctctattaaatccaccagagattctgttgcctttcagacactcgctgacc

SEQ ID NO: 25343 - DNA, 1102 bp, Homo sapiens
tccagtgtttttcccagatgtttctcctccgagggggttgagcatctgctcctagagtcctgtatggagagcaggtgcgatggtcgggggctcacctacagaagatgctgtgccatggtcttaggtatgcagagaaagctctgagaggttttaaaaatgtgtttcaccctttgtggttcacacccatgttacaggccatgttaaagagacatcaagttcacacccacattacaggctgatttaaagagacatgaaaagtttggcctttggatacacatcctgtagaagcaaaagtggttaaggtataaatgttgacaccaagacagcgtaaacacctagatttttatcttacacagcctcttacttttaaagactcaagattagacttagacttaggtatctggttgttaaagtgctcctaaacttgacaaggtcagctgactggctgcacttgcttgggaagggaggggatccctacagagagacagagctgagggaagctggctgaaaaagagctgaggccacagatcccccaaagaatgccttggtaatgtgacattgggaactagagttcctttctctattagaaacttcctataaacagcaccaaggaaaaacgtttcctgataagaaattaaactctaagtgggctgtggagacagagattccagttcgaacccccgtactttcacttaccagctgtgggacccaaagggaacatcacttgccatggttggtttctccgttgcttctgtgtttgtatttgaggacaggacaaggtaaatggtaactcagttacaactgagttaatattcctttagcccattctccaaagaggttcttgaagaaaaaattaaaagggaagatttacagtccactttttaaataaaactcactttacgttacggaatttttttaaacgcagctgtgaaggcattaacctcttaccaaggatttcctcatgtttgcttaccatcgctgcagagaaaagtcacagttacatggccccagggcccgagccttaaattgaaaacctgatgaagcaggacactgagtcctccacgtgcgagctcctgaatctgtctcagccccacggaggggc

SEQ ID NO: 25344 - DNA, 1060 bp, Homo sapiens
ggaataaagaagggctactcaataggtggagtagtggcatgggctgctcaactaaggatacttacaattgtttttcaattatatgctaaacacggagtggattattcgtgagttttctggaaaaggggtgggcaattcccggaactgagaggtcctctcctttttagaccatatagggtaacttcctgatgttgccatggcatttgtaaactgtcatggcgctggtgggagtgtcttttggcagctaacgcattagaattagtgtataatgagcagtgaagatgaccagaggtcacgttcattgccttcttggttttggtggatttggccagctcctttactgcatgctgttttatcagcaaggtcttcgttacctgtatcttgtgcggacctcctgtctcatcctgtgacttggaatgcctaaccttctgggaatgcagcccagtaggtctcagccttatttcacccagctcctattcaaaatggagtccctctggtttgaacacctctgacaattgtatatgagaagaatgaaataataataaatttctcacttctatttagcagaatttttcattaaaatatcttttgttatgtttcagtgaataaccctataccttccaatttgaaatcagaagcaaaaaaggctgccaaaatattaagagaattcacagaaataacttccagaaatggacctgataagatcattcctggtaggtaaataggatgagtgctgtttgtctctaaatgtctttttcctaagttgttttttgcattgttcgacactccatttcaggcagaagcctccatcaatgccaacaagtagttcagccaccttttgttccaccaccttttttctcatgactgatccagggatgctttggaaactactacctgttcattacaacttctggttatttccaaagggtgttcacagcataacttgtttcatgcaaaggagatccaaatgccaattaactttggcaatgttacagaccaacctccctcttaattaatcacagcacgtgactctgagctctgttttaaaaatttgttattg

SEQ ID NO: 25345 - DNA, 2029 bp, Homo sapiens
ttcttgctgcccaagctggagtgcaatggcgccatctcggctcactgcaacctccaccttccaggttcaagtgattctcctgcctcaggctcctgagtagctgggattacaggcgcacgtcaccacatctggctaattttttgtatttttagtagaaatggggtttcaccatgttagccaggctggtcttgaactcctgacctcaggtgatccccccacctcggcctcccaaattgctgggattacaggtgtgagccaccgtgtccggccataaaacatttttttacaaaaggcttacaaaggaatatttatagcagttttatttgtaatagccaaaagctggaaacaacccaattgtctatcaacagtgactggaaggacaaattgtgctatgtccacacattagaataccagttggcagtcaaaaaggaagagctgatctgtgcagcaatttgagtctcagtaatttcatggtgagtaaaataagctagacagaaaagaacacacactgatgactatatgaagttctggcacagacaaaattcatacttaatgacagaaatcagattggcactaacctgaggcaggggctgggtataggagtgaccactacagagggcacggatgctgtgatcaggagtggtctctacctctgtccatgcacactgagctatacctgtaacaggtagatttcattttgtaaattgtatctcatgaagttgatttgaaaagcctacactgagaggcagtattttaactattctgagataacattgattaaaaaatgcaacatgccaaaatacactaatgctgtgatgccacttgtttttaaaaggagtaaagagctacacacatgcatcatgcacacttaattttgcataaagtatctgtggaaataccttcctctatctgacttaataccattgatgaatcttgggatggatttttttcctggtctggatcttgttaatactcctgtgttgagccacaaagaactgatactgacatcttttaaagaaatttaaatagaactccaaaatgaccctaagtcagttttcactttttaaaattttattttattttgaggcagggctttgccctgttgcccaggctggagtgcagtagcccagtcatagctcactgcagccttgatctcctgagttcaagtgatcttcctgcctccgcctcctgggtagcaaggacttcagcaaggaccatgactggctaattttttaaatcattttattggtagagatgggggtctcactatgttgcccaggctggtctcgaactcctggcctcaagtgatcctcctcccttggcctcccaaagtgctgggagtacccagccagttttcacttttaagataaattacatgtttcaaacattccaggcaccaaaatatatcacattttattggagatatttatattttgctgaataaaagaaagggatttttttctctgctgtttcagcatttgatctgtcgaaagaataaaccatgagtttatacatgagctctgacacaggttttaatcaattttaaaagtttattttgtcaaggttaaggacagcccatgacacagcctcaggaggtcctgatgacgtgctcaaggcgatttgagtatagtttggttttataaattttagggagacatgagacatcaatcaatatatgtaagattgattagatccagaaaggcgggacaacttgaagtgggtagggggcttcctgatcataaatagatagaagacaaacagttgcattcttttgagtgtctgattagcctttgtgatttacaggaatagtcacttaggctgtagtctggcttagtgaaacaacagggcaaaggaaacaatcagatatgcatttgtctcacgtgagcagagggatgagtctgagttccatctgttgtccacagggaatttccttgtgatcaaattgtgagggaggtgtgtagcttcttacctttgtagctatctttttaggaataaaatgggaggcaggtttgcctcacagagttcccag

SEQ ID NO: 25346 - DNA, 1029 bp, Homo sapiens
aaaaaaaagcaaattcaaaagacaagtaacagagagtcaatgtttttaactcatattccaaaaaaatattaatttttaatgtataaattaataagaaacagagagaaaccccctgtaaataacaaggtgcatgagaaacctttgatagagagagtgaaatgtggtcagcattgctcatcataaaagaacaaatggaaaatgcactgagagctactggccagggcagcgaaatggctcctgctactcacacatggtaaacagctaggaaactggacagctgtgtgtagagcactttttgcacatggtggacatgtctgagatccacaagataaggggaacaggaggtgaactccattagtgaccgttttctgcctggagcacttcctaaactgcaggacaaggagggggcacccagagcccaggctcctgcttaaaagaagaggcagaaattgagtctgaagaggctgaggtaactggaatttgcagagcatgttactagcaatgagggacggctgagagaaagagctccagaaatctgcagagggatccccctgagccttctgctgaatattaagtgctagctgtgtagggtgaaatttgcaaagcaggcaagaacaactgccatgaagctttgaggtgaactattcacagtgcttgcatcaggctggggacagccattcgaaacagccacaatggagacagcttattaaacaaccagggcacccaggagagagcccagaagggacacaccttgatggataaaatagttctaaaggctactctagacacacaaacagaacacaacaacaagccaacaagtgatcaagctgatctacaagtaactcactgcctgctaacacaagtgttaacacttttaagggaagcaatgaaatctaggcactcaacatggtaatatctacaatcctgttttactagaaaggagtaaaaacaggaaaacataacccatagctggaagaagaatcagtcaaaaacagatcgagaaatggcagattatacaatttaaaacac

SEQ ID NO: 25347 - DNA, 1021 bp, Homo sapiens
aggtccctgtcaggaggggacaggtttcagtcaggtgggggcgggtttctgtcaggggggcaggtcccagtcgggatggggcagatttcagtcaggagtgtgcaggtgcctgtcatgaggggaccagttttattcaggaggggacaggtttcaggcaggaggggacaggtccctgtcaggaagtggcaggtttcagtcaggagggggcagctttctgtcaggagagggcaggtctctgtcaagagggggcaggtccccatagagggctgtgtcccagcagccaagtgaaagaagcttttttgtaagggtgtgttgggctgtgtcagcgtctgtcaaaagattgcgtatgttgaagaaaaatgaaatcaactttggatttattagggttcatgtcattgggtgagatggttagagctgttttcatcactaaaaataaaagttggttggaattagtttatagtatttggtaaagtatcaactagggacttactattaagcagaaaagaatgacaagagggaactagaaagagggcagtaactttaggggtagataaggtgtgtgattctgtgtgtgtgtgtttctttggtttggtgtgtttgtgtatgttgtgtgtttgtgtggtgtttggggtgtgtgtttgtgtgtgttgtgtggtgtgtctgtgtgtttatagtgtgatgagtatgtgtggtatgctatggtgttggtatgtgtagtgtgtatctgtgtgtatagtgtcgtgtgtatctatatgtttgatgggctatgtgcgtgttatttataaggtgctgggtgtgttgtatttgtgtggtgtgtatgtgtgtctaatgtgatgtgtgtgtcgtgtgtatctgagtgtagtgtgatggatgtgtgatttttgtgtgtatctgcatatataatctgtgtgtgtgtggtgtgtgcgtcatgtcctatgtgtggcgtgtgtctgtgtttaatgtgctgtgtaggtggcatgtgtcaggagggggtaggtccctgtctgaagggggcatgttt

SEQ ID NO: 25348 - DNA, 1742 bp, Homo sapiens
acgagctgcagtgtgtcctcatccgtgccccgtgtgcattgcagctggcggtgtggttgaacggtctttgtgtgctttccagggtgatgctgagaacacacccatccttcatcttctttccgttctgctcccatcttctcctgtgccctctgcctctttctgactcttcgttgtagacattgctcctaatggtcagacgtctgccaagactgtggtcattttcttggtcgcgtttttaccccaggctgttttttacatgtcctgttttgaatgctttctctccggaagctcttcctcagttcactgtgacgcctcaggacagagtcgttattgagggccagaccgtggatttccagtgtgaagccaagggcaacccgccgcccgtcatcgcctggaccaagggaggtaagacccaggccggccctttgcctgctccctccgcggccacagacgcaggaagcacacatttccactgtgcccaggcaaccccagcgtgttctggacagggctgagctgggactggattccacaggaccaaggcactgggaagcgcagaggtgtctgcacatcccccgcggcttcctgtccatgcatggccgtccctcatggacatcatggcaggaaactctgagaagctctgtcattgcggaagagacttggggttcctgcctttgactccctcacacctgccttgtttcagatagtctctaggatgtgcttttaagtagcctcttgaaggaatctatttgcatggaggatagaattttctggaaacagtcgaggaatatattgaaacagacgaatagcttttgctctgactttgcttcccagagccctcactgtcacctccccattcggcatcatgacctttcatcacattctttgcctacagtcctagccctctttcttcaatgggaaagtcgctgggcatgttactgcataaaggcacagcctggatgggggttggggtgagggcaggagctgaaactgctggagaaggagctacgcagacctcctggttcctgtcctgggatgcaagcagtgaccctgagacatcctggccactccagcttgcaccaaatggccagcccatcccttcagccctctgaggggccccacccagggctcctgaaagtctttggggaggaggcttgtgcctgcatcacacgccctggatttcccttttctcaggcagttatgggcaagaacaggagaggtttatcccggaaaggaacttgctggggcctcgcttggctcttcgtcatctccagcactcaatcctctccctggttctcccagctggccatccaccccgctctgactccccgagtccccatgtcctcctggccccctgtgtagtgcttttccctctgttctctgccactgtcaacccctctgtctgagttacgggtgcagggacgttcaggtgtcaccatggtgtctgctggggaggcaaagatttgcttatgcagggccaggccaaattatccggcgccccgacccaggtggagacaagcttctgtggtcatgctgtcagtctgagagcaggagttctccatgcgtccgagtgtccagtgtaacgggcccatgcccttgcagggagccagctctccgtggaccggcggcacctggtcctgtcatcgggaacacttagaatctctggtgttgccctccacgaccagggccagtacgaatgccaggctgtcaacatcatcggctcccagaaggtcgtggcccacctg

SEQ ID NO: 25349 - DNA, 1095 bp, Homo sapiens
ctgctcctctctggccatgtttagtcatgaggcagcaagagggatgcgtctgagatgtgagccctgtgatactcgggctcaaactgagtcattgtttgatactcgggctcaaactgtgatgaggcacaaactgagtcattgttccagactccagaggcaaaccgggctgggcttggctctcgggcaaggtggtgtttatagaagagatggacaggagcagggagctggccatccccagtggtcaggaacagaatgggaagatgtgttcatgctgaagaggacatgggaggtttgttccagctctagattttgttatcctcatgactgaaaagtcatattgaccttggctgcagtgccggacaaggagcctgtaaggtgcagtcactctcttcacagcttttgtcttggatggctcccaagttgatgagatttaaaatccagagaacactggaggaattctgcagtattatgttgtgtgcatttaaaagtcagggaagcataaatttggccccagtccatcacacctacattttatatacgaaaaaattgatgcccgcagttgaaatctcacagctaaatatggcagagctagagccaaagccctgaggcctggtgacctgtgctgggctctgccctccaccagctcgagtctcacctgccggctggccttacctaacatccagagtcacctgcaggccaccctcacctgctggctcgccgtgtttctggtgggggggattgggccacatcagagagagtcttgtttatggggcctaagctgacattgcttccatccagcaatccctgtgggtaaggacagattgcaagttgggggattggtgccaggcgaggagagcatgaggaagatttgggagaaggtgggcgttggtctttcgagtgttcccgacggtttggctgcgcgctggcaggtttctgagggcggtcatggggaagtgcttttgcacagtgctggtgctgctcctcctgcatgagcgacccagcttggtccaggctgcacaggctccttaggaaactcgcgtggaaggtgatgaatctcgtgcactgaggaagtgggtttctgtttcacagaggtct

SEQ ID NO: 25350 - DNA, 1035 bp, Homo sapiens
cctcccgagtagctgggattacaggcacccaccaccacgcccagctaattttttgtatttttaatagaaacggggtttcaccatgttggctagtctggtcttgaattcctgacctcaggtgatccgccggcctcggcctcccaaagtgctgggattacaggcatgagccactgtgcctggccaaattcttaattttctatatttaaaaatgaattcaaacacatctgagacttgcgtatgggaaaagtcaagattgttttattttaaaaatcagtattatggaaggtattagaataaactttataacataatctttagtgaccgctttttagaattcataactttggcatgattaaattaagcattaccaagtggtctgtgcattttagtttactgtgaaagggaatctaatggcaaaagtccctggagggaattagattaaaacttggatctccaagcttccttttagttctaaccttcaactattctgtggttctgcagtgacttgtgattttgatattgagtgtaaacctgtactttgatgtttcgttccaaacactacaattcttgacattttttttttctggtaggatttttagtacattaagatttgagaataatggaaacattacagcaaaacaaaaggaaacacaaaaactaccctaaaactccttgacttgaagttcacttgctttttaaatgtaaaatgtaaatgaatctgtgttctgtttttgagactgtaaattgaaaaattcatagttcatgcttaatagttattgcagtcttctctttgaacttgagagggcttgtgttggcgtcgacgttccctaagtaggtcagaggcagcggctctgctctaacacttgggagaactcttgaatgtaagtggaagagtctggtgaattctaccagggaggattaacctcttgaaatgccttcaatgagagcaattttaatgctgagaaaagagccctgggccgactctaattgcatttctagttctgccacttacagactgactgactttagacaaat

SEQ ID NO: 25351 - DNA, 1241 bp, Homo sapiens
gcatggaaccacaaatgaccccaaacagccaaagcaatcttaagaaaggagaacaaaatatgaggcattacacttcctgatttcaaattatattacaaagttataataattaaaacattatagtactggaataaaaacagacaaattggccaaacaaacagaatacagagcccagaaatgaactcaggcatagatgatcaactaactttcaacaagggtgccaagaatacacaatgaggaaagggtcgtctctttgtaggagagcagtctgttgaatggcagagtggtgccgtcttgaagcaaaaccaccatgatgatcaatgtttgactcctccataccaaggtgttctgcagcaagatctttaaactgcagcatagataaacactcataaagatgcttatctaacctcctcagtggtcacaagtttcacaagaaagtctgagatgtgaccaactctacatgttttgtcaaaagaacctactataaaaaggatattttctgtgtaagtctctattaaatattgctttctgaccaaaaaaaaaaaaaaacggaaattcagacttactttaaataaaatataaggctgatgttggtagagatggaaaaattttgacttagcacggattgaaactcttagattaatatttttctgtggggacaaaaataagactataacaactttcaggcaggaagatttcttcactgagaattgttgtgggaaagaaacatggctttggagacaaaatgcgacagtgtctgtgtttcagcagtggaaaacaaaggctgcagtttatctgaagtccttgtcattaaatttatgctccttttcctagtcatagccaagcttccttttgggaataagatgaaacttgttgcatcctggcatgaagcaaatatttctaaaaatctataaccagcagagcaacacttttaacttttaaaatatcaattaaagcagatacagttactcatgattgtaacttactcaaacgtgggatgtttgtattggcatggcaacaggcggctgatgttagtcttgaacatttgttttcttgtgcatgtttttttcattgtataattttcctggatcagtgcccatgtcaccctatccattcacgtttacccatccatccataacccccctttcatccatccattcatccatccatccatccatccatccattaatccattcattcatccatctattcatttattagtccatctgtctgtccatcca

SEQ ID NO: 25352 - DNA, 1029 bp, Homo sapiens
tgcctgtggctgggccgtccgccataccctgagcctgactgcggtgctgccctttagccaaggagccccggctcttcctgtttacttagcgcaattctaaagttgtgtatgaatttgtaagagctttggaaagttgccccactgccttctctcccaggacccctcaactgcccatccctgttcacctcttgtaggtgtggagtttggttgggcacacagaggggtataatctgccaggcctgtttgccacaagggctcagcagctttttctccacaagctgtaagctaagaattatgatgcctgctcttttacccactaattgcatcatccagctttcttttacaacatatttttaaaatatttttatgcaagttacacatgttcatgttagaaaaatttaaaaataaacaggaacaaagtgaaacaaattactcacattgctgtcattcaggagaaacattagctgggctttgttctcagatgcacacacacagaagcattcaggcgtgtgtagtacgtagcagtatttgtctacctgttaatatttatctgtcatgtatctattttcaaaaattgggtcatgatacatgttctgctctataatgcactttgtatggttttaaaatctgggaatatattatgattgtgtgtctgttcaataattagaggcctccatcatcattgttaatgaccacacagtatttgtttgaaatgaccaaatctgcctaacagaatttttattatgggtcatttctttgtttctacttttctgctcctgcaaacaatatttccaaaatgtgattgcatgcatttttgtgtgtgtctgtctagattgtttttacggcacatttctagagaaatctttttttaaaaaaaatttcagtagatttttggggaacaggtggtgtttggttacatgaataagttcttcagtggtgaatcctgagatttgggtgcacccatcacccgagtggtgtacactgtatccaacgtgtagacttttatccctcacccccctcccccaccct

SEQ ID NO: 25353 - DNA, 1072 bp, Homo sapiens
agcaattggattatgatatgccttggtgtggttttctctgtgttttttgtgcttgggtttttaaattttgattttaattttttatttaattttatttttaaatttttggacctgtgggtttacagatttcttcaaatttggaaaatctgggggtgtttcatcttcagatatgttttctgtccccatctttgtctcctctttttgaagattccagttatacgtgtattaggccacagctctctcatccattgcttaattttttgttactgtgcctttttctctatgtgtttcattttgggtagtttctattttttgtcttgaaagtaacaagtctttctttctcaatgtctgatttgctgttaattctacatgtttttcaaatcagacattgtgattttcacctctagaaaatgcgggtattaaaaacaaaccttccatgactacttggtgttttgaacttgtggaataaatacaattttaataatctgctaactctaacatctgtggcagctctgggttggttttaattgaataatttaatcttctcaatagggattgtaatatccttcctttcatgccatatcattttttaagcagattccagacaatggaatttcactttggtgagcactggatatttttgttttcttataattatccttgagctttgtacttggtacagttatatggaaacagtttggttctttaaggtcttgcttttaagatgtgttgggcaggattggagcagtgctttactaaggctcatcgttttcaacaactgaggcaaggcccttccatgtcccataccaactgcctgtgaatcatgaggttttcagtctggctgatgagaacggcactgctcacttctggcccagtgtgtgtgtgaccctgtgatccttctggccccgtgtgtgtgtgaccctgtgatccctactccatttgggtggctcttttctggctgtgggcagtttgtgcagctcagggctcagctcagtgctggacgctctgcaggcccctgggccttttctctccctatcccgggagggctcaggcgtcccatctctgtcctgcc

SEQ ID NO: 25354 - DNA, 1047 bp, Homo sapiens
ctcggcacgtgtccagctgcacaaagcagggtcattagtaacccactttccccgcaggcgcctctgcagcatgggcctggcagggctaaactgagaatccaggagctgtgtgagattgggagcaatgggagattttggatttaacacttttcaggagccccttctggtgtgggctgcccagtgagttggcgctgctcttaaatggccgggctgtggctctccattcctgctctctgcctggccgggtgatgggagggagggttggcgctaattgagaatcatcttctgacaccagcaggcgaagccctgccaacccacagcaagcatcacgcagcatcctcagggtgtcctggtgaagccctgccaacccacagcaagcatcacgcagcatcctcagggtgtcctggagctggagccggaagtccccctccccacacccggggcacatgctgcatactgcagggacacactgtgtgggctgcacctgccccataatgtgtgtggctcgttcagaagagctgtggctgcttcctctgggatgtgaaaagctgcggtgttgggggcagggtgtgagagcactggatgggctcctaggggtgtcaccaatgacatgaggacagcccttgttagtgggaactccagagggccagctttagttcaacaacaaggaccccagacaaaggtcttgggggacggagttgggaggagcaggccttcagcagggcgggtgagcctgctggtgttctccctgagacactgtgctaggccctgcaaaggcatctcctgtagccagggaggcagagactgaagacaccagaaatggggggtgggggatcagaggagggaaggaaggggtgagggacagaaggcagagaccaggtcaaagatttgtgggcccctgaggacctcagggctagagaaagtgggtgccaggcaggggacagtcaggctgggttggataggtgggtgggtagaagggtggatggacagattgggtgggtgagtggatagtggatgggtgggtacaggtgggtggatgggttgatg

SEQ ID NO: 25355 - DNA, 1059 bp, Homo sapiens
ccatgaaggtctctgacatgccctggagaaattttccccattgtgttggtgattaacattcgacttcttgttacttatgcaaatttctgcagcaggcttgaatttctccccagaaaatggttttttcttttctattacatagtcaggctgcaaattttccaaacttttatgctctgcttcctcttgaatgcatttccacttagaaatttcttctgccagattccctaagtcatctctctcgagttcaaagttccacagatctctcaggtgggggcaaaatgccaccagtttctttgctaaagcatagcaagtgaccattactccagttctccatatcggaccacctcagcctcgactttattgtccatatcagtgtaagcattttggtcaaagacattcaacaagtctgtaggaaggtccaaactttcctgcatcttcttgtcttgtgagccctccaagtctccaggtaggagttccaaacttttccacattttcctgtcttctgagctctccaaactgttccaacctctgcctgttacccagttctaatgtcacttccacattttcgggtgtctttacagcagtgcctcactctctgcagtaccaatttaccgtatttgtctgttttcatgctgctaataaaggcataactgagactggataatttataaagaaaaagaggttcaatggacttacagttccacagggctggggagacctcacaatcatgggaaggtgaaggaggaacaaaggcatgtcttacatggcagcaggcaagagagcatgtgcaggggaactgccctttataaaaccatcagatcttgtgggacttattcactgtcatgagaacagcatgggagaaacctgtccccatgataccatcacctcccaccaggcccctcctccaacactgggaattacaatttgacatgagatttgggtgagaacaccaagccaaaccttatcagtattggccttggcaatgatcttttggataagacacaaaagcacaggcagcaaaagcaaaaataaacaaatgagagtgcatcagatttaaaa

SEQ ID NO: 25356 - DNA, 1114 bp, Homo sapiens
gttgaccatcccaaacctgtaatgtcagtttactgctattctccccgctggacggaagcggaaaccaaggctcagagagatgcaggcaccaagggctcaatccttccaggctgctgcagactcatgtgccgcagcattccacgcttgcctctcagcgcgttccatgtaattgccatgccgttctgtgctctcctcttagcgcgttccatgtgatctgtgctcttagtcatacagcagtccctgttccaagaccctagcggacccctgaaacggctgatagtgtggaaccccagacgtacagtgctttttcctgtgtgcaatacatacgataaagtataacttgcaaattagatgcagtaagagctcaatgcagtaatggctaataaaatagaacacctgtaacaatagactggactaaaggttctgtgaatgtggtctctctctctccttgtctcccaatatcttgttgtactcacctatttttagactgtggctgacctcaggtaactgcaactgtggaaagcgaaactggataaggcaggactgccatatgtatggtgtgtgtgtgtgtgtgtgtgtgtgtgtgtgtgtgtgtgtgtgtgtgtgtagttttcaaaatacagcttaatcctgaaaagtcagatcttctttcctcaggttaatgatttgtggttttttctggacagttctcctcgccctccccatctcccaggtggacctgtgtggggatcactcagtctaatccctccctgggtgcgtctttgtgtgccttgtgaggagctgtggcggctgctgcagccaccgtaggaaatcacagccacccggctttgtttttctcgtgtgttaacatggtacaaatcagtatagtcagcagctttgaaggtaccagatagtgttgccttagtccttttgcctaatggtgatattgaagccaacaagcttcctgaaaattgtgagctttcaggccacgtgcagacctcaagatactgagtcagcccttggttgactctcagctctgccatttatagctttttaatttggggctggtcactcatctttctgtgtttgttacctcatctgtacaataaggaagagcgtaggagtcacctcctag

SEQ ID NO: 25357 - DNA, 1050 bp, Homo sapiens
tgtactcaggaggctgaggcaggagaatcacttgaactcaggaggtggaggttgcagtgatcccagatcgctccactgcactccagcctgggtgacagagcaagaccccatctcaaaaatacaatacaatgcaatgcaacgcaacgcaacgcaacggtaaagtaaaataaagtaaaataaataaaataaaataaaataaggaatggttatcagagtctcccttgccccatataaatgttattaaaattaattattagaaaggagatgatgagaaaatactttagtaaaatgcaaagtacaggcgcaacttattctaggaagagtcataatacaaaaatctaaatatacagtgcagaaaatatagataattacttatattgcaagagaaattcctatctcccctaggattttagttcaatttccattaaataatgtggttcaaaagtatgtttttgttgatccttttatgaagcaaatgggtgttttaggtaaagagaggcagatcggtgtgtccaggcgaatggctcagaaaacgccttagtccatttgggctgctttagcacaatcccataaaccaggtagcttccagacagcagaaattcattgttataagttctggaggttgggaagtccacgatcaaggcgctggctaagttggtgtctggtgaggcccctcttcgtggttcacagatggctcctttttgctgtgtcctctagtggtggaagggaagaaggagctccctcaggcctctttgataaagggcactgattttgtttgccaaggctttgccctcatgatctgattaccttccggaggctctgactcctaatactttcactttggggattagaatttccacatgtgaattcttgacggggtggggggcttccaacaagaacatagcagaataagtttttcaaaattctatttgtgatatttaaacttgaagtttaaataattttaaaatgttatgcctgaaggtatactaaccctgcatgtaaggaattttaactagagttgacttttcttctatgtttaataaacagggg

SEQ ID NO: 25358 - DNA, 1042 bp, Homo sapiens
taatttagttttcttttttttagacagtctcactttgtcgcccagtctggagtgtcatggtgccatcttggctcactgcaacctctgcctccgccttccagtataagtgattctcctgcctcagccccctgagtagctgggattacaggtgcccaccatcacgcccggctagtttttttgttttttttctttttcgagacggagtcttggtctgttgcccaggctggagtgcagtggtgcagtctcggctcactgcagcctcttccgccagggttccagtgattgtcctgcctcagcctcctgggtagctgggattacaggcgcccaccaccacgcctggctaatttttgtacttttagtagagacagcgttttgccatgttggccaggctggtctcgaactcctgacctcaggtgatccacccgccttggcctcccaaagtgctaggattacaggcgtgtgccaccgcacccagctcatgcccggctagtttttgtgtttttagtagagatggggtttcaccatgttggtcaggctgctcttgaactcctgatctcaggtgatccacccacctcggccttccaaagttctgggattacaggcgtgagacaccacacccagaccccagactcttttaaacatccagattgtgtatgaactaactgagcgagaactcactcaccaccaagaggatgctgctaggctattcatgagggatccgcccccatgccccaatacctcccaccaggccccacctccagcactggggatcacattgcaacatgacatgtggaggggacaaacatctcgactatgtcgctcccttaaattctttctggaaaagatgggctatagataaataagaagaattaataaaattctaccctttgactgttacagaaattgaggctaaatgagatgaataccaacgtcacccttataattgataacaaatttttactttccaagagtagataagaaaggtttctttaggacaccttttaaaaatattgtatatggttattcttctattaaaggatta

SEQ ID NO: 25359 - DNA, 1030 bp, Homo sapiens
attgtatctggtgtagactttgaagggaggtagcttacctgagagtggaaaatcttacttcacctgtaccacttttgctttattgagggcaacgtggatatagttaaggagtttggtgagctggcgtttacaggaaagtcactttctttacacctgaacagaattctccaaagaaggaacttgttggggatgtgggggggagtgtctgccattagtcatttcttccacagaatagctgtttttactattccctgcctttgtcatcttgtgtatttcattcattttgaagtgcagccacaatttagtgctcccattattagttctataacttgtaagattagacatgtatttttctaccatttagaaagattaagataatctacacctctgttgggttagtgtgtgctagtgggttaggcattcatttttttctttcctactccaaattgccaactttccctttggttatttttgtgtttccaggagtgccattgccaatctcgtgggctctgcagaaagatcgtgtaactgaaaatttcagcaaataaataaataaataaataaataaaattcccttgtagacagaactgtctgtacactccatttttgtaaagttggaagtgtgaacattatatgaatatatgatggagttttttttctttaagccataattgcatgttcttttagacccaatatggtatataaaatggtcactgaatttggaatcagaaaatcctggttgaagtcttaatcttttaacttcttatcattcaatcatggttaacaatggtattaataatattcacaaagttagatattttgtcattgagttcgttgctatattgcttggtcgattagttgatattgagatcgcaagagcatcatcaccagtaagtgatacattttcgattgtaacctaaggtcgttgttattttgtaatgccatgctgttttccttcttgtactacccatgaaatgtttttttatgttctaacgcaatatataatatttttatgttcttcacttgttat

SEQ ID NO: 25360 - DNA, 1026 bp, Homo sapiens
tgtcaaatagcatcacatgctagagaaatctttcatgaaaagaagagtcaatagatgcagaaacttcattgttatctaagaaactgccattgccactccatccttcagtagccaccaccctgagcagttagctgccatcagttttgccattaaggcaaaaccctccaccagcaaaaagatgacaactccctgaaggctcaggtgattgttagtattctttagcaataaagtattttaaaatcaagatattcccagtagttttttagacataatgttattggacacttacttgactgcattatagtgtcagcataacttttacatgcactaggaaaccaaaaaattaatatgactctctttttgcaatattaatgttattgtggtggtctagaaccaagcctgcaataagtgtgcctgtgtttcagaaagaggggatttcatccagggaggaaacacagatcttagttaccatgggaagcagctaccaccgccgcatggagacgcaaaaggaaaaggtaatgaacctggagcttggaggaggtaccccgcagagcacacactggcacacgctgacacaccccaggccctctgcgggagtgttggcatccatggagcaggtcttctgagagactctttggaactgagaccctgcagcgagcacccgtgtgggcacagatgggcttgcactctgctcagcctgagccctgacatcccctccttgtttcacccctgctttgtgctttccaagtcctggttatatgggcaaaatggaggctactgcctctaaatcaataaagatccatatctctgcccatctgcccatctggacaatgtggacagccaagtgtcctgctcagagttttgcctcctggtatgatttctccttaccagttgttgtcagagacatttcttcatggagcacctaccgtggctgcagctcatgaggcagtgctgtgtgcaagccaagggctggtgctcccaagctgagggatggtgctcctcttcattcgcgtgctggggagcttc

SEQ ID NO: 25361 - DNA, 1043 bp, Homo sapiens
cagccatctttcacgaggacattttccatggtggtctgacgtgtccctgtgtatttaaccacttctccattgggggacattgactttcactatcttgcccttgtacaatgctgtattgaagatccatacctacacgtctgttcttctttcttggggagagttgctgggtcacgtggttctgacacccgctttcccttctcacagtgacctcaccacgatctaccccggggcctctgcactctgtcctctcgcagccaccttctcttcctctgactctgctgctggcgggcccccctttcccaactgtgtgctccttcctgccacaagcggaaaggcaggataatgacacggggaaatggatttggagttgggcagactcgagttggaatcctggctccatttgagttactgtatcctgagaagtgaaccgttctctgcccctgacttttctcatcaacagaatggaaataacatctgctttgtggagtgacattagatgggctgaagaatgcaaagtgcaggcacataatagagattgagtacatttgggttctgtttccctttctgcaccactgtccgtggtctgcacactgctcaagacccggcctcccgccccatctccatgtgcccagcttatgtgcagccgtggcgcggccttctgtgcctgtgggtggcctccggccccatctccatgtgcccagcttacgtgcagccgtggcgcggccttctgtgcctgtgggcggcctccggccccatctccatgtgcccagcttacgtgcagccgtggcacggccttctgtgcctgtgggcggcctccggccccatctccatgtgcccagcttacgtgcagccgtggcgcggccttctgtgcctgtgggcggcctccggccccatctccatgtgcccagcttacgtgcagccgtggcacggccttctgtgcctgtgggcggcctccggccccatctccatgtgcccaccttacctgcagccgtgccgcggccttctgtgcctgtgggctctcccatttgcacgtctgcttcctg

SEQ ID NO: 25362 - DNA, 1033 bp, Homo sapiens
caggacaagcatgtgccaaggccccaggtggcggcgggagactgtggccctgccccacccgctgctctcatctgccatgacgccaccgcatcaggatgccaccccgtcaggatgcaccctgcgacaaccttacctacagcagactcgggccacggggaggagaggggaaccctgtgaggggccacgaggagctctcatggcaattaccccttagtgcaggcagcctactccttactcagtaccctctgcacacgaccttggcccctccaccgcctgggtacataggggctacagcatgccgaatgagctttctggagcatggtgaatgagctttctggagcatggtgaatgagctttctggagcatggtgaatgagctttctagagcatggtgaatgagctttctggagcatagtgaatgagctttctggagcatagtgaatgagctttctagagcgtggtgaacgagctttctggagcgtggtgaatgagctttctggagcgtggtgaacgcgctttccggattgtggtgaacgagctttccggagcgtggtgaacgaactttctggagcctgaatgaactttctggagcatggtgaacgtgctttctggagcgtggtgaacgcgctttctagattgtggtgaacgagctttctggagcgtggtgaacaaactttctggagtgtggtgaacgaactttctggagtgtggtgaacgagctttctggagtgtggtgaacgcgctttctggattgtgaacgagctttccggagcgtggtgaacacgctttctggattgtggtgaacaagctttctggagcgtagtgaacgagctttctggagcgcagtgaacgagctttctggagtgtggtgaacgagctttctggagtgtggtgaacgagctttctggagtgtggtgaatgagctttctggagtgtggtgaacgagctttctggattgtggtgaacgagctttctggagcgtggtgaacgaactttctggagtgtggtggacgagctttgtggaacatgttgaa

SEQ ID NO: 25363 - DNA, 1027 bp, Homo sapiens
gccctcagctcggtcagcaccttgtgcgctcctggggctccatgctccaccccgcgtgcgaggcacacagtaggccctcagctcggtcagcacctcgtgcgctcctggggctctgttctctacccggcatgcaaggcgcacagtaggtcctcagcttggtcagtgcctcatgtgctcctgggtctctgtgctccaccccatgtgcaaggcacacagtaggccctcagcttggtcagtgcctcatgcgctcctggggctctgtgctccaccccacatgcaaggcacacagtaggccctcagctcggtcagtgcgtcatgcgctcctggggctctgtgctccaccccatgtgcaaggtacactgtaggccctcagcttggtcagtgcttcatgtgctcctgggtctccatgctccaccccatgtgcaaggcacagaatcctcagctcacacatgcactatttctgtgcgtctgactcttggtggtacctgacagcacatggtctgttttcctgaggcattttgagtctctcactgttgggactgtgtctagactatggcaagaggttggcgtggctggggaaggtgtggaccaggtcagggggctgtgaggccaaggagcctggtggcctggctagcgtctgttctgcagccaactttgtggtttgttacttgaagttatctgtacagcaaccctttggggaaaaaagtagtaattacacagcttcattgtgaaaagtcaacgtgaagacagaaaaactgggtgaaagttgaaaagcaggaacttgaggaatgggtctcatagaacgtgtgagtgtggcctgtgagttgggagagaggcaggattctgtccaaatagtaatgaatttgcaacatcaggtataatggctgcctgtggattgcctcataggaagtttgtgtagaagtatgggacttaaatgtacctaatcaaggtctatttcaggcattaaataaataaataaatagataagtacttaagccaagctggtgtgccacagtggctttgcaaa

SEQ ID NO: 25364 - DNA, 1035 bp, Homo sapiens
tcctctgtgccattggccttttcccctgagggagttgttgcaatgacctgccgggccagcagcgctaattaggagcacacagcgcacttccagagcacctgacctacagctacaaggcttcaaggatgctgcttctgaggcacagattttgtaaatacgccttgttgtataaacatgttttcttcttgctggtttttgtcacgcaggatggagatgtaactattgtctcagagtgacatttgtaatgacgctcaagcactggagtttagaagccaatgagattaaatatcttaaacacttttctcctttctgtctttagaagtaaaattagatgttatggacccaactattttgttgctggggtaagttccaagtatctgaattccttcttgtctttttaggagacatcatagaatcgtttggcattcttcctgtagctcagagtcccacgattgtctttgtaaacacgttgcaccaggtcttcttcaggggacaggtcgcaggtgagctcaaaggtgtttatgtaaacaagcacccctcctgagtttggggtgcatgtgtggcgatcgaggagtagcacgtcaccagatgtattttggcttcagagtttggaacggtgtgtgaggagaactctgattgccgggacagagctgagcattgcagaatgagagtcctggttctggatatgaaggacgtgaatagcaaggggcttcagacagtagggagcacctgtgttttttgtttagttgtgttatggaaatgaggcatggctctggaatagtgggccattttttcgaggccgactcctgtgttgtttcttgcgttcctcactgactcttcagatcccgtttgtatcatctctctgtcctcattgactttctgtagcacctccaaattcagtgtcatctggcagtggaattaatgtgctgtttatggctccttccagatcactaatgaagatgtgaaataagacttggtccctggagcagcccacgacggctcctcacggcgtcctgctctatcatttgccgggtg

SEQ ID NO: 25365 - DNA, 1030 bp, Homo sapiens
caagtggtgccctgggcagggtcggctttcagaaggtgccgccttgagcgggtgggtggccaggggctgccctaagcctgagttagcatcatgggagaatccccccaggacagacagctgcccgaagctgcagggcccgtatgtggccacggcctgggagtccagcctggagggcagcatcctgcatcctgaggagcagcagtgggcacacggagcgacactgtctaagcactgggccactgcccgggaggagctgggaaagccaggtgggtgccgggaatggtgcagcctcgtgtgctgctcatcatgggctctgtgggtgtccctgcaggggccgttaatcatgtccccaggggcagtgagctgtctcgggtgggtcctgcgctccaggggctggggacctgctctggctttcacagtgccacatgtcgctcgtgcagtgcctggggaggaggtgctcctgtctctgagcctcagtcttctcatctgtaagatgggaggaattccgtctgccttgactactttagactttgttgggattcagagaaggccgtgtgcataacatgcttttgttatgtgatttcttaaatcgttgttctgtcccgtcattgttttcacactggcgctgtgaattcagttttcctacatgtctgggccttgactctgaaccttccaagagtgttcagcctcacccttgctgcctactccaacacggcagcagcggagcacccctgcctccgccagcagggcccagtgctgcctgtgccacgcactgtgctgcctccttatgcagatgggttcatttagccccgtgatactaagcagcagacactgttggaaatcccagcttttcagatgagaaaacagggttcatagaggttgcctggaggctggattcaaacctgggcccatccagactctgctctgggtgtcttcacgtcttgccaccatagctcccagactctccctcacatggtaattctctgtaagggactttaaaggcactcctcaggaggaggctgctcacgtg

SEQ ID NO: 25366 - DNA, 1030 bp, Homo sapiens
gttcctcactcctaaacttcaggaattcgccgaggggaaccttgtcaatatctaaggacctctgacccaggaagcccaggctggtgccgcaagatcattagagaatggtcatggaactgtcatctgggggagcccaggctggcacctcgagatcattagagcatggtgggtagacctgtgatccaggggagtccaggctagtaccctgagatcattatactgtggtatgtggactgatccaagggagcccaggctggtgccccgaggtcattagagagtggtcatggaaccctcatctgggggagcccaggctggcaccctgagatcattagagcatggtgggtggactctgatgttggggaacccaggctaataccctgagatcattagagcatggcgagtagagcctgatgcaggggagcccaggctggtgccctgagatcattagagcatgataggtgaactctgattcaggggagccaggctggcactcggagattattagagcatggtgggtagatctgtgatctagaggagtccaggctagtaccctgagatcattagagtgtggtaggtggactgatccaaggaagcccaggctggcaccccgagatcattagagtgtggcgggtgggctctgattcaggggagcctggctggaacctcgagatcattagagcatggtgggtagacctgtgatccaggggagtccgggctagtaccccgagatcattagagtgtggtaggtggactgatccaaggaagcccaggctggcatcccgagatcattagagcgtggtgggtgggctctgattcaggggagcccagctggtgccctgagatcattagagtgtggtgggtagagtctgatccaggggagcccagctggtgccctgagatcactagagcctggtgggtgggctctgattcaggggagcccagctggtgccctgagatcattagagcctggtgggtgggctctgattcaggggagcccaggctggtgccctgagatcattagagcgtggtg

SEQ ID NO: 25367 - DNA, 1089 bp, Homo sapiens
caaacatacttgtgctctgtagtttttgcccttagctcacctgtaaatcactaggcttccacattgccatgaatcatatatgaattaaatccagaagcaccacagacttagattagacggcattgcttaaatcatcacttcgttataacaaatctctttgtaaagatcagagttgcaatttatcctctttgtcttccagtagtgttttctcctattgtgcttttaccctgccggtgcctgggctggtgggaggcatcttgcggcgtttcctgtgtgtgtgccgtttgttaggggtgcttatagagaagctcctgttgtctgctgtacttggagacccacgtgtgttttctttgttgttgctcttttgtagccccttccttctttttgtttccattagtttgtgtgatattttggtgaacggtggcatcttttaatgaagaggctgagggcttctgagacacacctttcggcgcacaccctgcgtggggcagccagtgtggacagtagaaccgcacgtggagagggcaggccgatcacagggccagctggcgtgagttgttaggagcaccctccttccgaaagacagttgccctcttctaaagctgctttccgtgtctttcttcacagatgtcctaaaatcctttttcatgattttttttttttttttttttggaggtagggtcttgctcttggctcttgtcacccagtctggagtgcagtggcacaatcttggctcactgcaacctccacctcccaggctcaagcaatcctcccatctcagtctctcaactagctgggaccacaggtatgcactaccatatctggctgatttttaaaaaaatttctagtagagatgaggtctcactgtgttgccaggctggtcttgaactcctgagctcaaatgatctacccgcttcaccctcccaaagcactgggattacagctgtgagccaccacacctggccttccatggatcttatcttatggggaggaaaggagacgcagccatggagaaggggcctctgaggagggtgtctagaaacagagttcatttggagggcccggctcttctttaggacgtggctattg

SEQ ID NO: 25368 - DNA, 1043 bp, Homo sapiens
gaaacccccctcgtgcaggaccagcctcagcacaacaggagctgcctccatggtcctgcagggcatggcctttctgcaccctggatattccaggcaagctctgctttttctgtggctcctcaaaagcctcccagcctctacccactgccaaaatccagagctcctcccgcatttcaggcagttgttactgcggccccggcttccatagtcattatacactgcagaggaattcccacaaacagcggcttccaacagcgcatgcctcttcaacagtgtgtactggctgtagcttcgtagcgcactggcctggggtctccaggcccccaccaggctgtgtcagggctctcgcctcatgtggctcctggggttgtaggatgcaggcttgtttcctggctgtccgctgggaccaccctcagctgctcccagctgtaagtgggctttgagttaagctgccaagtttgtggcaatttgtagaagcaacagaaaactaaaacaattgccaagcactcttggtcttgttggtcgtccacaggtgtaagttgattgtgtccttcaagttaccctggatctcgtgatttccagtcgtggcttccagagactgactctttctgccagactttgaaggcagcatagatcttctgttaagtatttccctaatctgtcagcctctcaaggaagaaagacgaaattgttccacaacattcatgtctaagttccaagaattctattttattcctgccatagcagaactgagatttacatcccacagggaaggctgttttccagtgtgaaatgctgcaagttcctgctctgatcaggaaagagcagcacagctgcttgactcgtgcttaacctggctcttcgcccttcgaagcacacacggcgccacgtctcatctgaatcaggtcatctgcagcagtggtcgcacccgtggggcaaggcgccaggccctcctgcttcaggtgcctccggaaaagcctggagtcacagacctaagcttgctgtgcataacgcagggcagggaaaacattctagagacttca

SEQ ID NO: 25369 - DNA, 1020 bp, Homo sapiens
ttctccatgttggtcaggctgatcttgaactgctgacctcaggtgatccacccacttcggcctcccaaagtgctggcattatagacacgaaccaccgcacccggcctatatgctttcttaatatccattctggatcagtgctgttggaagacaaaattacaacaaatttagttaaagatctaattagcttttattcttgatttgtgaatagggcaacctccgttctacaaaatagaataagagctcgatagggtaatagcacaacagtgggttttgtagggcggcaacaaagaaacagaacaataggtagaaaagctgattggttaacgtcaagttacattaggttacttttttcctaagggttaaagcagaagcgacttccttattattctgactcaggaagactggaatcttctgatcgcaggaaaagctggtctgtttgagatgcacctccttctttaaagttttagtttgatcaagtggcatatggcatgagtggctgcattttggtttggtctcatcctggggcctagtgcaggggctcagtccaaaacagtgacctctcctgggccaggcatggtggcttctgtcatcccagcactttgggaggctgaggcggcagattgcctgaagccagaagtttgagacctcatctctaaaaaaacccaaaaaacaaaaaagccacacacacaccccatattaacattatatatatgtaacatctcccataatttttaacagaggtaacacatgtggacatgtttgtgtatctgtttaatcaatctgttattagtgacatagagttctaaaaaaccttttgtcatacatacaaacaattggaagattattttagcttggaataaactaaatacctgctgctataacaaaatgacaaaaatagcttaaactgggcaatttataaacaacagcaatttatagaattcttatagttctagaggctaagaagtccaagattaaggtgccagcagatttagtgtctgatgaggatcctgtcctcat

SEQ ID NO: 25370 - DNA, 1030 bp, Homo sapiens
tcttaggggctcacctaggtgagtgcacagcctgtgacgctacagggagaggctgagtaaaccgagatccagcgttctgtatggcaggggtattgcttatcacagaggttctgaagagtaggaagtacataatgaagagggctttaaaaattgccaacaaagtgagtcaccagggctggcagtagtgtgacggggctgtcctgagctgttaggagagtagatgcggggagggctggtgacctccgtgggtttatatgtcggaaactcttctctccaaatcccaggcctggcttccagcaccatccagctgtgcccaagaagccaccctggtctgttctccaactcttttaaatggtgcccaacttttctaagtgagcttagcaatgagaagaaaaaaaaacatgaattctttttctggaaaatcagggagacatgggtaataataggtactaataaatatttatagatgagtgaatgaggaaataattacatcaaaaaggtcagtgacaattgataaatgacaaggaaatatttaattaggtaaaactaaatcattgctctctatactaggatagactttatctacttcatctgttcctaagtcagcatgttagttctggggaaggatcataagaaaggaaatactttttaaaaaaaaatttggaaacatgtaacaaagcaagggtaaaatatatatatatatctatataagtgctgtgactgtaaaagtgtactttccattaattattagccgagttaagagaatggtcacattgaagtactgtgtggactagaaatgtaccctgtcatcatgcaatgaaatattgttatcgttttaacatagctcatttatgtagaatgaattctggtggtttaccccaagtcacagttaggacggtagatggtgagatcgcagatgcgctattatctagattcagtgttacattttcgatgtttatcactcagtgggtttttattaatatgctgattaagttatttactgggccagtcattgtgctaaatagttgct

SEQ ID NO: 25371 - DNA, 1045 bp, Homo sapiens
tcttctccacatagcacatattacatgggtcagagttcatcagggggctctattcattcaaacctagagcaagaaaaggggaaggatagtgaaccaaagcccgatgatgggaggaagtcctttctaatgaagaggggagatgttatcgattattcatcatcaggggtttccaccaacgatgcttcccccctggatcctatcactgaagaagatgaaaaatcagatcagtcaggcagtaagcttctcccaggcaagaaatcttccgaaaggtcaagcctcttccagacagatttgaagcttaagggaagtgggctgcgctatcaaaaactcccaagtgacgaggatgaatctggcacagaagaatcagataacactccactgctcaaagatgacaaagacagaaaagccgaagggaaagtagagagagtgccgaagtctccagaacacagtgctgagccgatcagaaccttcattaaagccaaagagtatttatcggatgcgctccttgacaaaaaggattcatcggattcaggagtgagatccagtgaaagttctcccaatcactctctgcacaatgaagtggcggatgactcccagcttgaaaaggcaaatctcatagagctggaagatgacagtcacagcggaaagcggggaatcccacatagcctgagtggcctgcaagatccaattatagctcggatgtccatttgttcagaagacaagaaaagcccttccgaatgcagcttgatagccagcagccctgaagaaaactggcctgcatgccagaaagcctacaacctgaaccgaactcccagcaccgtgactctgaacaacaatagtgctccagccaacagagccaatcaaaatttcgatgagatggagggaattagggagacttctcaagtcattttgaggcctagttccagtcccaacccaaccactattcagaatgagaatctaaaaagcatgacacataagcgaagccaacgttcaagttacacaaggctctccaaagatcctccggagctccatgcagcagcctctt

SEQ ID NO: 25372 - DNA, 1045 bp, Homo sapiens
aaaaatgctattctgtcaatgtaaacatctttcataactgtagtataataatcaaaagcaaaaattaaaattggcataatactattaactaaactacagactttatatgaatttcaccagcttttccacaaatgtcatttttctggtccaggattcaattcagttgcattttatttctccttagtctgttttaatctgtgacagtttcttggtctttccttatctttcatgaccttaattaacacttttaaggaatactggttagttattttgtagaacgtccctcaatttgggtttgtctgatgtttcctcgtgattacaaggggactgtatattgctagaaaactgcaggagtgatgctatgcccttcccagtgcatcagagttgaaggttcttgatgtccataagccttcccaccactaatgctaaccttggtcacttggttaaggtggcatctgccaggtttcagcctgtaaagttttattgttccttctataactagtgaatatcttggaggagatactttgaaactctgcaaatatcccgtttctgcttatacttttgcccattaattttcacttccgtctgtggatcatgtgtgcactcactgttactatgtttgcctaatggtcattttctgctttcctgttctacatttattaattggaattctgtaaagaaaagctgtctctgcttcctaattaattcacttttttcaattatttagttatattactatggactcatggaaatttattttatctatgaggcataatccagtaagatcattagttattttgttgattaaactatttttttgtgatttttttgaacaacaaaaaatgtaaacaattgtaactgtatccagagcaaggagactggttgaggaataaaagcatttgaaagatagaaaagataaatatgactcagcaataagaagaaatgaaggactggcatgttatgacatggtggaccttgaaaacattatgttaagtgaaagaagttggaaaaaggaaaataggaagttataagacctgataagtta

SEQ ID NO: 25373 - DNA, 1056 bp, Homo sapiens
attctgtttgaatttggaaaagtatttactcatttttgcctcttattaaagtatagtgaaaaattgtcttcacttcccgcttgaaagtctttgtgccagacttcaactcaagaaaacttttttcctaaacaattttcaactaaattgattgggatattttcacagaaataatattacagtaatgttatgaaatcctagagtacagttaaaagtttaaaaacaacaaaattatgttcattgcagtagtttagtacttgtgtttttattttgttttgtttcattttggtttttttgagacagagtctcgctctgtcacccaggctggagtacaatggcacaatcttggcttactgcaacctccacctcctggattcaagtgattctcctgcctcagccttccgagtagctgggacccaggcgtgcaccaccgcacagtgaaaaattagcccagctaatttttgtactttcagtagaaacagtgtttagccatgttggccaggctggtcttgaactcctgacctcaagtcatccaccactgtggcctcccaaagtgttgggattacaggtgtgagccaccacaccctgccagtacttgtgttttttaaaagattgctcttaaaatgtagtgttatgcctaatttgtcagctttgacctagtatttcttaagtagcttgaagagtaagttatattttccaatcaggtgaataatagctttcttttgtgttttggatgtcttgtagtaaactgtaatttccttagcactcctattttggtatttttgcaaatctctacagacagctttttaaaaacctatttataataaggtcgatagtgtaaactagaaaacaggatttccacgaagtgccccagatattgaatatgttaaaagaaagacatcaaacgtcaggctagcaaaaaccctgccatttaatatactaaaacagtgttgtaaattaactttggtacaaattgccagtcatctctagatcattttaagcattttaagaatatttattatcaatctaagtacagaagaataactgccagcagtgatt

SEQ ID NO: 25374 - DNA, 1047 bp, Homo sapiens
tcctttgagttaatgttaataggagagaaaaagagaaccgttgtggtgctttcgttgagaggttgatgattattttaaagtcattttaacatttcagctgaagtgtttcagtgacttcagttatccacagtaaaccacaataattctcttcagtgcttacaggatctttaatccatgggtcatcatcactatatgcaagaatgacctttagtttagtcagagagcctttaacatacacattattgcatgcaattcaattctctgagctaaaattcctgagcaaagttttgaagaaaatcagatactgtgaagaagttaatggccttaatgacacagacatgctgacatagtagctattcccatgctcaagaatgtagacaaatacatgtcattaaaaggtgtctgtagtttcttttagggaccagtaaaggagcattaggcaaattttgaaatgagtttttggagaaggggaaatcgtgtgattcttgagatgtgtttagaagctcaacaaaggtgctctgcatatattagtgactttgtctagtagaataaccatatcatttgcttttattttactatgaaaagatcattttatgattagcataacaaataatagatgcttactaagcttcctttgcttttaagaaattaacaacgacaatagaatgtaaaatttgttttgtcgaagcctagaaaaactaagtagtcacttagttcaatgccaaattgaaagctgtggtggaaggtaaagaatcagaacatgggaacattgccagaactttgtagctggaccaacagagagtacctagcagaaaagtatgtgtagcccatcgagctctgtagcagaaaactctgtgtttctggacaacgggatttcccattggtcccatctctgctcagtcagccgtctctatacaaagcctgcagaagagtcaagaactacacaaacgtttttggacaaattgtcatgtcacaaggtaatgtgttaaaaaagccaggccataaggggttaaccagctatggtcttttcaaaatagagatgatccc

SEQ ID NO: 25375 - DNA, 1091 bp, Homo sapiens
tctcacgtccatcagtaaaaacgagtttgcccagagatcagaacaatggcctagtaagtatataaaagggtaacgcaaatattaatttaataataaacatagatagcatttgaggtttggttatttcctttacatagtaaaagagtgcaactgattttatacatagttttaagaaacaacctattactaacataaaatgtatttattttcatttctggtaaatatctatggaaggaaaatgactagcagtctcagcgaagaaatgttgacttgtttatagccagaaatttctggcttgtaatatagtgtttgctaccaaaacttttaaaactaagcctttacatttggtaatttctaatatcttcttaaagaacatgtgtatacagtacctttatagtatgtaaatattagcaccatgatataaaaaatagaggatgtattgaaggaagaacatttcaatcaaatggcaggaattaaacaagataagggaaattcttccaatgaactattgaatctaagaaagacatttgtgcccaaaatattagaggttcctgatgataaaagtaatagtttaaaaaaagaaactctctattaatatgtttttataaatcaggaggcaaaaacataaactgttgagtttcagtgttgtatattattttaccatcatgttcatttgtcttcacagtttggctccccccttccccttttcacccacactctcctgttttgtgttgttaggaagttatcaaggaggatgctgctgaggggctttcttcacccacagactcctcgagggtaatggagtagtcctgtggtgtggatcgctggcatctcattgcttctgcctcagtaatgactgtcttaattgtgatgatagcagctcactaactctgcgtttgtggtgtgatgagcagctagtgtagagtagctgaatgctaataattatggttcctgaattaattaaaaagcggatgtttaacttcacccattatttcctcctgcttttcccctttttcaatacatgggatggggtttttttttattcttcaataaggaagggctttttctatcagctgtcaggggtgttccgt

SEQ ID NO: 25376 - DNA, 1114 bp, Homo sapiens
atgcccttggttgcgtttcttggagttctccttttctatctagacctgctaccttggcgaccgcatttactctgaaaggcttaaatgccatctatatgccagtgactctcaaatatgtatcttcagccctatagctcttcagttgcttgtttgacatctaatggtgtcaatatatatctgacacataatatgtccacaattgaatgtttgattctctgactcaaacttcatccatccatgtctttcctatctattaatccaactcttttccagttccttaagtaagaaaatcttgatctttctttcatatactaccaccaatctactagtaaattctgtagcactgttttcagtctatttccagaagatgagcactgttcgccattttctggcataccaccctcatcagatacattatcatgttctacctttattaattatggaaatagtctaactggtctctactcctgtctttttctctctacagcctattctccatacggcaaccacagtgattcttttaaaatagaagccagtcatgttattctctgctcagaactctgtaatgtgtcctcatttcactgaaaacaaaaatctaagtccttatagtttcctacaaagccctttatgatctgattttctgcatccccttcctccttctgacctcatctcccaccattctcctcctccatcccttactgacttctttgctgttccttgaaaatgtcagatatgctcccatcaaaaggctcctcctgcaattgctatttcttctgcctgtacagattgttctttggatatatgcatcatggggtttctcacttccttttaagtctttgcttaaatgtcagcttttctacaagatcttccctcaccatctcgtataaaatgacatcttctttggtatgctttgcgttacctgttccctgctttgttttactcaacagaaaaaatcacctctaattcactacatcatttacttttttgtttgtttgtttctttggtttttgtttgtttcccctcagtagaatttaaaatccacctggcaaaggttttctatctatctttctttccttctttttttttttttttttgagacagagtctcaccctgt

SEQ ID NO: 25377 - DNA, 1052 bp, Homo sapiens
aacacataacataaaatttattgtctttactatcttaaccatttttaaggatacagtttaggagtattaagtatttctccattgttgggcaatagattccagaactttttcttttttttttttgagacggagtctcactctgtcacccaggttggtgtgaagtggtgtgatctcggctcactgcaacctccgccccctgccttccagtgattctcatgcctcagcctcctgagtaacttggactacagtcgtgcgccaccacacctggctaattttttatatttttagtagagatggggtttcaccatgttggtcaggctggtctcgaactcctgacctcaagtgattcgcccacctcggcctcctaaagtactgtgattgcaggcatgaccactgcatccggtctaccagaactttttcatcttgcaaaatcaaaattctgtctattaaacagcagctctccctttccccctctccctaaaccctggcagtgaccgttttactttctatttgtatgaatatgactatttagacacctcatgtaattggacttatatactgtttgtctttttgtcactggcttatttcagttagcataatatcctcaaggttcatccacgttatagcacgtaacaggatttccttcctttttaaggctgaataatatttcattgtatgtacgtagcacattttcttggtctattcatctgtggctagaaatttgggttgcttccatcccttggctattgtgaataatgctgctataagcatgggtgtgcaaatattatacatgtttttgcttgtgttttttgtttttagacaggttctcactccattgcccagcctggagtgcagtggcagaatcagggatcactgcagcctcgacctcccaggctcaagcgatcctcctgcttcagccctccaagtagctaggacacaggtgtgcaccaccatacctggctaattttttgtatcttagtcgagatggggttttgccatgttgcccaggctggtctccaactcctggactcaatctgtctgcccgcctcgac

SEQ ID NO: 25378 - DNA, 1027 bp, Homo sapiens
tttacaggtagagccaaaagcatttgctaatagattgagtgtagggtgtaagaggaagaggtaagtcatgaacaatttcaatgcttttggccttggaagaatggacctggagctgccgtttactggcatggtgacagcaggaggagcaggggagcattttggagtggtgatgaggagggtttggggatggatgtggagtttggtgtttggataagttaagatggaggtgagtgtgaacctaagagacatcacggcagctttttgacacctgagctatggaagccgtgggaagtcgtatcttcacttctgccactggaggtgtccttgcatgaggttaatgttaagaaggatattgtatttaatagtaacttaattttttctaattataaattatgtgtattttgtctaatttaacaggtattcaaataaagttaattgcagctttctgtgaaaatgtcagttttgatatcacagagcgtcataaattatgtagaggaagaaaacattcctgctctgaaagctcttcttgaaaaatgcaaagatgtagatgagagaaatgaggtaagaccaagtttgcaaaattacattctttcacaaatatttgttgactgcctgctatgtataggatagaagtgtgtaagaaataggtagttctaacccttagtaatactgcactgtacttatgatagaatgtcttatagttaaaagtacttcaaatttcatgtttttggagtacattttaacttatataaatgactgttgaatttagatttattgttttttttcccctgatggaataattaatattcaggaagcttgattactgaaatcaagtacttctgtgaaactttacagatcatctggacctgatcttgattaaccagacaaaatcagggattgttgaaatactttcttttttatttttatttttattttttgagatggagtttcactcttgttgcccaggctggagtgcaatggcacgatctcagctcaccaaaacctccgcctcccaggttcaagtgat

SEQ ID NO: 25379 - DNA, 1033 bp, Homo sapiens
cgtcgtaatcatccttggaccttttcaaaaatcaagattgacgcttgttggcagcaaggcctaggaatgtggaggctgaaggaggtgaggggaggtgctgggagacctggaaggagtgtgaactacaggccccgcgaaaggcagaggtctcgctcctggatccggaagaaggctgctgagcgggctttcatttcttatgtatgtgcagtttcttctgaagatataattgatgtttatttctctgaataagcttgattataatggaaaatagggataataaattaactgtaataagagtgacattgacactgaaaaaccttgcctggggcgcttgtcctgggtgtccccgccccgcggcccctccagccccgcctgctctacgccccgccccgcccctcccctccacgcccagggggcgtggcaacccggagtccctcccctacccagggcacgtgatctgtcagttcgcggagagggaagaatatggccgccgggtgtggtgagggcgacgcgcttgcagtcgccgtctcttgcttccccgtcctctgacatcgcctgcagccgagcgggcccgttccgccggagctgaggaccaggttgggagaccgtcagtgtggaggccggtccgcgaagctttgccgcgggattggggaggagtcgggggcgaggccgggctcggggagtcgggcggggaggtgggacagccgaggagtgcgcggaaggggcgagctcggaccgggggtcccggggagggcatggcgcgggccccggacgctcgggccccggctttcggggcgagtccgcgtttcctggagcgccgggaaggtctccgaccttggagtctctggtggtctgtctcctgaggggcccctcgggtgggttggggtgaagggtgttggtaaaaccgttttttttcttttgccaagcagcctctggcacatccaccaccttgagagcccccttagctggtaccgctagtctttctaggttcctcctcctaggcttccacgggccgggaggtgttgttttctcc

SEQ ID NO: 25380 - DNA, 1035 bp, Homo sapiens
aaataggcatgatgatgtgcacctgcagtcccagctactcaggaggctgagacaggaggattgcttgagcccaagagttcaaggctgcagtgagctataatcctgccactccagcctgggcagtgacacagggagaccctgtctctattttttaaaaattctagagacatatacacagagtaggttctggtgaaccaagaaagaaaaaaaatggaaggaaaatattatgcctcacttatatattattgtttataggacacttcaaatatatgattaaaaagaacatggtgctcccagagcaaaaacatccccttagcaacttcttggcagctggttgagcgtactctgctgtgttccagtggcacagctaatgttggggagcgtttcctgttcgagtcttcaccttcacctattggtcctcagcagcttttaaactctacccgcccccaactcatgcatgatgtctcatgtattactgactaaccaaattgtcctagatatgttattttcattgtatgcgatgttgtttctgacttaaaaatcagaataaatctacttttactgtttaagaataaaagatataataacacataccttctgggagaatatggtaaattgttatggagattcttaatacttttttctaatgttgttttctatagctgatgccattaataatgctgcaggctttggtttcagagggtatgacgaaaatggagcagctcgctgggacttaatttccaatttgagaattcaacaaatagaggtgagtcaatctttaagaagttagttactatatactttaagtaccatagtttgctttcataagttatggtgtgatgtcctaggagtggtattgaaggttttttaatattaacactcattctttcatttaaccaatacatattggtcgtcaactatgtgccctgggcactggagacaaggaataagataggtgcaattcaggccctcatggagctttagtttcctagaggttacagaataaggtaaaacaggtggtgatcagagaggggt

SEQ ID NO: 25381 - DNA, 1045 bp, Homo sapiens
ggaaaaaatatatatatccatataaaatttattgccaaaagtaattagtgttaattttttatattcacttccattcacaccaatacacttatgcttgcttttagatttttttatttcctgaaaattctgaatacaaaatggagattttagtatgagttgagcaataacccctaggtagtacttatagatacagttggaaaagttcataccatgagaccatggaagactttaaatgccaagtgcaatgtagctcttgaattttgaccaggagagttgtaggactgatgatccattcaggaagattaatctgtcgataatacatagaatgaattaaaaggagcatggataaagttgatgaagtctcgccttgcgcttttcagactgcggttgttcagaagctcttagtttgtgggctgtccttgttatttcacttgaccatctgtacaacattacctgtggagtacaacattgatgagcattttcaagctacagcttcgtggccaacaaagattatctatctgtatatctctcttttggctgccagacccaaatactattttgcatggacgctaggtaagtaacatgtaaatagatttccctgtgtctggttgaagcgtttcttaccttgtcgatagattgctatcagtgcgccctcttgaggatacataaagaccaattggaaaaattaagtcatctgtgtagaaaaaacagccctcgcaactcatatgtaagtatattctaaaaactgaatcaattttattataatacaaaataaaaatacatggatcaatgaaagacaacagatatttgttgaatgcatattatattctagattcagtgctagccaggatagatacgagtatgtataagacatagttcttatcctccagatggttataatttagtatgattgtattcagcttacagttatgatacctgttaaatagaccattagccatagtataatatgatcagtagtttatcagcaaagtgaataaaatgatattggcacattgatagggggtcatcagttatgcttggcagg

SEQ ID NO: 25382 - DNA, 1034 bp, Homo sapiens
atccaggccctgcagcaggtggggcacacagtgcacagcacgtgtttgttagaagagcaaatgattgcctaggaggagacagcactttgcagatagtgcgtccatctttgatttgtctcatcgtgagaaatctaagttgaaaccttcatatttgctcataaggatctgtatagaaactcttattcagacatacttttgagcatgactatgttctgatccttaaaattcttattgtatgggtacaaatgaaaatgaaagcttgttttactttggaaatggagagcagtgaggtggatcgttattctatcagatgttctgaagcttatgctgcatctcactggttgcatgtcttttcattgcaggcgcatgccaagcttactggagtatttgagttacaactgtaacttcatggggatcctggcaggcccactttgctcttacaaagactacattactttcattgaaggcagatcataccatatcacacaatctggtgaaaatggaaaagaagagacacagtatgaaagaacagagccatctccaaatgtaaggtcatgagatttatctggagcctttacagcatgtattggttagtcttatttaaagatacaaatattttcacattgtgaacttatccatctgtttctttaaaaatacttttcaagataaataacttcacactgcacctggtagaagtacagtcatgattaagaacacaaataaggtcacttgagaaactatgtggtaaattcctcagtgagaataatgctttatggttataggggattttacaagaaagctcttagcatggaattggccagcctaacaattttccaggctcccttcccccttcccccttccccctttccttcccttccttttctttctttcttatttctttcttacctatgccttgtgttccagcagattgtaaacactctgtatcctccatttcttttttgctttccctctcctcttcttaattattgcaagttgaaatctttcttctctttaaaagcctacttcaaatacca

SEQ ID NO: 25383 - DNA, 1022 bp, Homo sapiens
ccggagaattgcttgagcctaggaggtcgaggctgcagtaagctgagatcgtgccactgcacttcagcctggatgacaaagtgagaccctttctcaaatgaatgaatgaatgaatgaatgaatgaatgaatgaacaaataaataaaatgtaagagccatgggtaaatcagtggtatttcttacccccaatgcatgtaacagaacatactttaattagtaatagtactttctatagcagtaatttttacctctttgaagtaaagggttataccagattttgggggactggaacagtgattctgatatgttattatactcttttatccccacctggcatacaaaaaaggtaccagccaatttagagatctatttttgtgtctgctgacataagtagaaaatttcccacctccccactaccttttccatttaccgctctttcagtttgcgggcttatctggctgttctgttcttggtgtctctctaaattgctgtcatttaccatcctctggatcagtcatttgcaaaatctgatccagagatctctgagagtccctgagatctttttaggagggaggtggtatagtcaaaactattttcatagtaataacacttagacattatttgcctttttcactttcattctctcaagagcatacggggtctttccagagtctatatgatatgtgatttgcagtagaaacatttgaggatctgttggtctactattaagtcagacattcagtagagttgtaaaaatataggacagtaccactcttctcactaattttttttttgttttggaaatatatttttcataaaaattttattataattattcttgaattaacagattttttaaaattctcagttttaattcgtaatatggtatatatcaatggctattatttatgtaagttatgtttctttggtttcctcaataatttttaagggtaaaaagggtcccgagaccaaaaaatttaagaacagctgctctagaattcattcatgcctcttgggtagct

SEQ ID NO: 25384 - DNA, 1122 bp, Homo sapiens
aatgtctagctggaggggaataaagtaatacttggaaaggtcttgataagtccctgtcagtttttcgtttttctagaaagtgtatattgatttttggccaaaatgttttattttgtgataactctggagttatcagctttggagtttaggtttaatctgtagtgtgcttcactgtgagtgtcagcatgccttttctaatactaggactgacacagctgttcttattacctatatcccaagaatagcagtgacagagatttttggtttgcaagtagagccaagaagatgaaggtagaggacaggggagaggtttgttgaactagtacttagtatctttggagatagttaaggggtccttagtataagcttataattttgggtgctgtaattatagcccttgtgtatttcttgtacgatgagactagttatgtcttcaccttttgttcttggaaaatacttttaaagccacatagtaaaggaaaattttggtaaacttggcatcaaacattgagcctcagctgtctattagacctggatggaaattctgatatgttaatcaaaattaattctaagtattgttgcaatttttatgtgaattgaaggaattcatttctaaggattcaagtttctttttaaggtgtaagaaatataaattaatggagaaatattccaagaaggtttttggcatatactcagagttttactttataggattataaagtgatctattaaataatttttaaatgaatatttcattgggtaggaaatgcttcagtagattaaaaaattcttagaaattaatagtaaaatagtatattaaagataaaaggatgttagtaccatgtcagcaaagactataatgccagaggctggacttggattgctttcctttttgtattttattgaaagcaggaaccactagaaaataatataaaaatattaaactacttttcctattttgtctctatctccagatttgataaatgtgtgatattggagtttagcccttgtgaaatgaaggagaaagtataaattttctcagaatcctggagcaaaggtgcaacttctagttaaggaaactgcagtgtaaagaagggacagcctagctcattcagtatttat

SEQ ID NO: 25385 - DNA, 1058 bp, Homo sapiens
taacatctgttcatatgtatttcatttttaatctttaggacttgctttttaggaagggaaatacaaggcttgggttcggtcgtatgcccacacagtgattaaactaggattaaaatctagttttgaatttggagtcaaaagtggtttttctgcttcctcactgcttcaagagctctttgtctccctgctttaaaaatgcttcctatgttgttactgcctctgtaggtacaaacagccttcatctccttcaactcggtttattgggtccatcagggccaactttccagggaaataaaaacaactcacactcagcttttggctccagttggtttaacaggtgggactctacaatgatagcacttggtaagattcctttaaaataaaagcagccataaatacgaccctcagcagagtggtcttttaatgatttttatgcgtgctatgggtgattgaagcaggcttttctcagtatgtagtgtgtggcaactggggcagctgatgggtggaaaggtaggctcaggattcaggagatcggaacaggcactggtgacgtgcctcttctaccatggcttcccaatcctaaccgtccttcctgtatccactgcaccttgcacacgaatctttttctgaatcccatctgatgtgactgcttccttatttgagccacgagagtattttggatttggcattgttctggcatttacattctgcttaatgttatacgtatcattcagggttctgctaagagatacagattgaagtaggtaactaaggcaaccaggtaacttaaagagctatttacaaagatgtgggcaggtcttgggaaatcagcaaggaatagcgaagttcccgagccagctgcactagatgtggagggtcaagagggaaggaaggagcagaaccccaagatagtggctgtggagcaggggctgcttcacagcaggggaggaagagctatggcctccagttgaaggacgcagccagcctacagcgaacctgagtgagggctgcggccgggagagcatgcccctgcctctcgcttctcccatcctctcatc

SEQ ID NO: 25386 - DNA, 1032 bp, Homo sapiens
tatttaaataaaaaataaatgtgatttcttacctctttgggagcatggtcagggaggaaagaggaggcaggaggagaggcaggtctcagaacaatccagctgtcaatgcgtgttctctgttccagaaactgacaactcctgcaaggtgtgctgcagggacctttctggccgctgtgtgccctatgtcgatgctgaacaaaagaacttatttttgaggaaaggaaagccctgtacagtaggattttgtgacatgaatgtgagtatttatgtacagctttttctgtaacagccagataggaagtttttattttgtaagtacttgattttgcagatgaaaacaaatcaaaacacaagtggggctacatccttctggcccattgttatctacgggtattacttaggaggagaagacggagtgctttcaggtccctgcctgtagtttccttctgtggtgggaggctttgagcccagagactgagaaggactggggtggggactttatggtaaagttggttggtttcaggcagtgggtcctaattatgttttcctagattacttacagaactgactaagattgcaaaattattcagggtgtgattttgaaacaggtgctgaatgagtaggaaagacctagaaggctgcttgacttacttaagccagacccttttgttctctagagaagcataatttttctcatgcagaatgatgggagagggttttaagatttacgaggcttcacagggagtctggctgtgttgttcactgtccactgtgtatgtgtagagtccttactggaatgcctcatctttagcaaactggtttccttgatttttgtctcctggtaattctaaatcacttgtaaaaatggagtaattatgaaagtgttaatgacagatgttctactttcttgggtactcattacgcggaagttattgccttgtgtcaaagatgggaaaacgtttgattttaatgaagccctttacatgtcagttatttttataaagctacattgcttctgaatacattgtgttt

SEQ ID NO: 25387 - DNA, 1059 bp, Homo sapiens
tcatggtgggcttctaagtagttctatcccagatttgaccttgaccagccaccatcaaaactgcagagtccaccccagtaaacttaccacacagtggcagaggagaccagaatgggccttctctgcaggcaggcaggcaggcaggcaggcagagagactcacagaaactctgagctgagcatggtttccttctttatctcacacttactaatgggagcctttgttacttttttttttcttctttgcaggtttaatatgaatttgtctgaaatgcctgtataaggagaagactctattcttagccttttattcctttgatgcacaaagagatgtatattttattattctttcctgagttgtcgactgtagtcgtaataaatattttaggctcctgtaacccaagttcttattttttcaaaataaacatggaggatatgaaaatttaagagtacatttataatattataaataattcattgacatatgttttccataccatatgcttctctgtttgtttcaaacattgaatattggtactgaagaatttatgaattttggttttaaaatgttttttttctagaacgattctttttttgaacagataaaataatgcagtattcagagccttctgacttattttggaagtgttctaagtatatgatctctttaagtatagattcgcattctcaagtctccacaagaggtaaaacctggtgaaaagcactacaacatggcaaaaagttacccaaatgaagaaaaggatgcttgggatgtgaagatgttgctagaggtaggtcttagaatcctggatatggtgctaacaccactttgtcatttctgatatgtggattgtatgtgttttaatgaaggagcatgttagaaaagatggacacccagaagcagtctcctccagctgatccagcagtaaccccatcccatgtagcagcatagacaacaaataacaaaaactctatgaaaaagaaaaacgctataaagcaatgcttccttttttttttttttttttttttgagacagagtttcactcttgttgccctggct

SEQ ID NO: 25388 - DNA, 1355 bp, Homo sapiens
gcctgactctagggttctagcccacataagagatgatgatgttataatcagaatcaacacagatggggccgaatataacatagaggtaaatttatatgtgaattttttttcagtagcttatatctctgattttcaaaaagctgctcagttctgcaaaggtgaaaagtaattatacttatttctttcctcttcgtatttgaagttttttactaggaaagtagactttttaaaaaaggataatctctaagaagctgtgttatgatacaccctgtatttctaagtaccataattgagagagttacatgtgggatggataataggaagagaaaactttctttccctcctgactcattttttaattctttctcaaataataaatgtaaacatcctcagaaatgaaaagtgaagtattatttttcaatttctctgtttttctgctagacacactggaaatgctagatcaatgaaaggtggtagttcatagtctgagaagttaaagaggaagctaggaaagtcaggctgtggtcactcttccattgaaagagtagcaatagaaatcaagaccacagtggctgcattggttaagacacatatctatctgtcagatattagtctacaaaacaaaacgtttcctcataattgtgaattgaagttgattctgtgtttcctgaaaaatgagaagactctgggtggtggtggtgatatcactaaaatagatcacctgtgggaaaactgagtaagattggtcaaaatgaaatgttcaggtgtatttgagtgcttaataggggtaaaacagtctgctggagctatatatactatatgttttaattatatccaatctacatgactgttagtcctttgactgtccattattgtgaaaaagaaacctatggccttgcagtatgttatagtttgttaatgtttaagctatttaatgtcaatgttttgaggagtctggcctaccagaaagagtcagaaatttagtagaaagtaaaggaactaatattataaatgcattcattctagaataggcaaagcatcactggaatgtcttaaatttgcctgttctttcaaatcaatttattttttaagaatacctttattttaaaatatatgctcattgcaaaattcggaaaatagattatctgtacttggacagataactactattgacattttgacagacatccttccaaatttttttttctatgtgtaaatacacaaataaatatagttatacccactattttttcctgcaaaactaggaccatacaatatgtacagtttgtcttcacacatttttcgtttaacaatatgattatgaaccttttcgtgttaatatagatctaaattag

SEQ ID NO: 25389 - DNA, 1041 bp, Homo sapiens
catgcaccaccatgcccggctaattttgtatttttagtagagacagggtttcaccatgttaatcaggctggtctggaactcctggcttcaggtgatccttggcctcccaaagtgctgggattacaggtgtgagccaccatgcatggcctcatttgggaaacttttgatatcagaatcttaggtttttcattagagattgtcagatttccatattcctctggaaggtaaaggcctaattgctagcattctggaagccagttagggtaggagggtaggagggtagggtattgggtagaggataaagaaggggtttgggaaaggtggggggtgtctcttggcagttgtatggttaaattgagtttttgttttatttagtgatatgtgttttttgggtacatgtgatattttgatacctgtgtataatatgtagtgatcaaatcagggtgattgggatacccatcatttgaaacatcttttctgtgttaggaatattacaagtcttctagctgttttgaagtatacaataaattgttaactataatttctgtactgtactatcaaatattagaacttactaatcaaactgtatttttgtaacactaaccactttctgttcatctccaccactcccacttcccttctcagcctctggtaaccaccattctgctgtctacctccacgagatccacttttttagcttccacacatgagtaagagtctttcttttaaaactggttttgtgagcatatttaacatcagtagcaataaacttgtattttaagctcctgttgctgtattttgaggaccttctaagtccattggaaggattttgaataccatagtgtctgcagtgatagttgttgaaagaaagggaaggcatcagtgcaaatatttttagacagtttttaaagagactcaagtcacccaatttgtcttctaaaaatcctgattttggaagaggcagtggagtttctgttgataaaaaatgatttatagtttgtgcttggcacttcctaatggattacatcaggaaagatttat

SEQ ID NO: 25390 - DNA, 1028 bp, Homo sapiens
tctcaatctctactggctaaattaaaaagaattcttaatgaaaattgttttttttccttgccactcagaaaatgaaggctttagttcatatttatctggtaagttttttttttttttaaggcatgagccctctagttactttctgaaagtaaggaaataagcatttatcatccagcattgcttgtcacatttattttacatgctttacaccaaaggcccttatataatcaatgttatttgcatgctcaatgctgcaatatagtggaaaggccatcagccagggtcccgggccaatcttcccactcactggcaagctacacggaatcttggggccagcatcttcacttcttaataggcatgttttttaggcatcctcacaaataaaactcagtttgataacaaagttttattagaaggtttctcttgatttctggagggggaaactgaagcaccgaagttagtgacatgacctaggacttgggcttcatagccaagtagcggtgtcaggatttgaacctgggcagtcctacttcaaagttagtactcttagcaactgtgttatgttgcctttttttttttttttttaagattacagcaattgatcagtgctttttaacctctagtcatgaccaactggtaacaaacttcatgggtgacagccaacttttttaatagaagggaaaatatgtagcatgttataagggaaataatactttgtgaaaccaatttcagtttatacatgtatgaaaagtgggttgtgatgtcaaattgatttcaaataagtttgaaagccatttcttatggatggtcttaaagatttctgcaatccatctcctaggactgtaagttggtcataattttactgttgtgaataattccagaagtttttttcatgatggcattgttgagtctcttccacctacagcactgtgacaatttctacttcagaatttgctgagccatgagtatcccttaatgcccttcagaagaaaggggagacttccacttttgagagtgatattttcatt

SEQ ID NO: 25391 - DNA, 1099 bp, Homo sapiens
agggaataggtaagccagaggagacagaagagattgggagcaccccattgttggagcagtcagaacagacacagcatatatcgattaagtttaccatcttgtgtgggcatgcattctggtaccccaaaacaattacagtagtaacgttaatgaccaccgatcacagattgccatagcagataaaataatcataaaaagtttgaaatattgggagaattaccaaaatgtgccacagagacatgaagttgagcacacgctggtggaaattggctctgatagacatgcttgattcagtgttgctacaaaccttcaattggttaaaacaacaaaaacacaccacagtatctgcaaaagagcagtagagcaaaagacaataaaatgagatctgtctgctaggacagtgggcttaaactggaatggtcctgggcagccaggtcacatggtcactttactactccagtatacctcattgttaaaatgtggttgtagaggtttggaatttggtataggattaaatgaaaagttttaaccttgtggatacaaggatgtaaggatctgattaggctttgcaacttgagtttgactgatgtcttctgtgtggtgtccgctaaatcccacagcatataggatcagtcgcattggttataaggtttgcttctggctgggtgcggtggctcatgcctgtaatcccaacattgggaggccaaggcaggcggaccacctgaagtcgggagtttgagaccagcctgaccaacatggagaaaccttgtctctactaaaaaaaaaaaaaaaaaaaaaaaaaaaatagcccggcatggtggtgcatgcctgtagtcccagttactcgggaggctgaggcaggagaattgcttgaacctgggaggcagaggttgcggtgagccgagatcatgccattgcactccagcctgggcgagatcgcaccattgcactccagcctgggcaacaagagtgaaactctgtctcaataaaaaaaaaaaaaaggtttgcttctatctctgaaaatttttacttcattccatacttcatttttttgaaaatgaacttaacatgggcaccagaatggggttgattcatcatt

SEQ ID NO: 25392 - DNA, 1062 bp, Homo sapiens
aactaagtttatgcagtgttttcagtcctttgttgtcatttcaacggtgttaatggcatcttcaccagaagtagatccttctcaagaaaccactttctttgctcatccatgagaagcaagttctcatctgttcaagttttaacatgagtttgcagcaattcagtcacatcttcaggctccatttctaattctagtatttctcttcctgtttctaccacatctgcaggtggaagatttccactgaaatcttaaaagtcctcaaagtcattcatgagagtagaaatcagcttcttccaaactgttgttaatgttaatattttgacttcttcccatgaatcacaaatcttcttaatggcatctagaatggtgaatcctttctaggtggttttcaatttattttcccagatctgtcagaagaaccactgtctatgacagctatggccttacgaaatgtatttcttaaataattccacttgaaagttgaaattactccttgatctatgggctgcagaatggatgttgttttatgtgagcaggcatgaaaacagcattaatcttgtacatctccctcagagctctttggtaaacaggtgctgcattgtcaatgagcaattataatttgaaaggaatcttttttttctgagcagtaggtctcaacaatggacttaaaatattcagtgaagcattttgtaaacagatgccgtcatccaggcttggttggttgttccatttgtagagtgcaggcagagtagatttagcataattcttaaggaccctaggatttttggaatgctaaatgagcattggcttcatcttaaagtcaccagctgcaattagctctgaagagtcagccttcctttaaagccagatactgacctcctatgaaagtacttgatggcatcttctggtatgaggctgtttcctctacattggaaatatggtattttgtgtagccatcttcattcatcagtgatattagctagatcttctggataacttactgcagctctacattcgcacttgtaccttcagcttgtacttttatgttctggaggtgacttc

SEQ ID NO: 25393 - DNA, 1025 bp, Homo sapiens
tagctgtttaaaaaaaaaatgtgcgtaggtgtattattagctactagtttcattttaacttagttaaggaggcataaaatgttattaaaggacttatttttatttatttatttattgagacagggtcttgctctgtcacccaggctggagtgcagtggtgtgatcataggtcactgcagccttgaacatctgggtacaaacaaccctcctaagtagctgggacttacaggcatgaggcaccatgcctggctaattttttaatttttggtagagacaagatcatgcttagctgcccagactaatctggaactcctggctacaagtgatcctcattccttggcctcccaaagtgccggaattttaggcatgagccaccacacctggccaggagttattatattaaaggataagtgaatagaggaggagggaaaggatatttacaaattaaaagctctaatgtatcattactaaagttgctttattttttggcattactgaggttaatattatggttcgttgtctgaattagtatctgttcatttgatatatagacaactttttgtttttattaatcttaagaaccagccaggcatggtggctcatgcctgtaatcccagcactttgggaggccgaggcaggcaaatcatctgaggtcaggagatcgagaccaccctggccaacacagcaaaaccccgtctgctaaaaatacaaaaagaaattagccgagcaaggtggtgagtacctgtaatcccagctacacaggaggctgaggccggagaatcgcttgaacccgggaggcagaggttgcaatgagctaagatcacaccactgcactccaacctgggtgacagagtgagattctgtctcaaaaaaaaaaaaacaatcttaagaactgctcttagttatggatggcatcacgtgtgtggttctcagtgtatgcctaaggaagttttattaccttttatatgaacgttaaatggtacaccaggatgattcattttttaccttttaagtattgaagtaat

SEQ ID NO: 25394 - DNA, 1019 bp, Homo sapiens
atgaagaaactgagatacaactaggtaaggagcaaatttgtgagttattagcatgtagatattggttaaatcataccagtgaaatggacccatgtcgtcttgtcatttaccttaagatagatactgggctgttgaaatatttaggatccttgattattctagtgaaacattttcttctggagcaaataatcaatacttcagttgtcagattttagaaagtatggtcttaaaaggcagacacttggtagattaagggggaaaaaatcatgtaactgtcctccaaaattaagataatcctctgaaagagatgcgggaaacacgtgtcctcttcatacttctttgctttaatagccaactcagtcctttacagtactcttattttggactgttaatactctaattgatgacttcttttattccattacttcttccttcccactctaaaaaagtttcttttagtaatgatctgtgagtgggaacttctgtctttctggaaacgtctttatgtttttgcactgtttttgtgtggtgctttaattggttacagaattctagttgacagttgtttttctccgcactttgaagatacttacttgattgttttctgatgaaaaatcagctgtcatattgttgtttcttcctttatggtaatgtgtcatttctctggttgcttttaagaattttcttgtctttggcattctgcaattttaccatgatctaggtatgatttttttttatcttgcttgggatttattgtgcttttcctatctcaaggtatttatcccattactggaagtctcggccattatcccagaataacatctcatcttcattctttctgttctctcctgaaatagctgttggctattaccttagaccttctctttctattcgcatcttataatttttccactttttttgtcttattctttattctgtattctgagtaatttattcaaatatgccttttgttgtattaattttctttgtccatctccaattttaaagttgttttcatt

SEQ ID NO: 25395 - DNA, 1030 bp, Homo sapiens
tgatatgcctgtacttatgtcttcagcttgtaactgctagaaatgtatgggtatctgaaaaagcaagtatggcaaaaggttaatggtaagatccaggtggtggatatgtgggggtgttcactgtaattgttggttgccatgtattgggggttatgatatttcacatcactggttgagtgtctttaatacatatagcaagaagatagtgtgtagcctgtgtcttgttatcctcaagatacgagaatgtatagaacggtattgatccccacttaggagacatcactggcaccatcacttttttgtttgggtgatgagtgctaagtagattgatggagttaccagatgctgtgtaagacgtcttaattggccatactctgggacagtggttcacaaatttgatctcaggacccctttttagaaaataaaataactttaacaaaaaattgaatgagaatagcggcattgcatttcattcaacctattgtagtattccacctcctgtagcttctggaaaactccacttgtgagaaaatgacagtggaaaaaaagcaaatatcttagacttatgaaagtggttttactttgtctcctctccaccccacaaaggatataggggagacctctaggggttcccagactatactttgccctatgagaatttaattactgaagttaatagtagaactgctgttctacgagaattttattactgtgtttgggtgattgagcagtttattttctgagtagtcatcatatgtggtgataatggaatttgtaaaaccttccccacccttcccatttctctgcccctgcaccccatcttatccctaggaatataggtttgaagaccaggaaaatcacagatgtgataatgaagaaaggagaatagttgatattagacattgggtaataaaagtccctgttaattcctggaaaccagctaaagatctggtatgttggaatgtctttctgctttcttgtgttgagaaggataatatgaagttaataatctcttaacttgcccctccca

SEQ ID NO: 25396 - DNA, 2211 bp, Homo sapiens
gcggggccaacggtcgcttccatcttgggccggccgggcgggggtggcgggagcggccgcggctcgggctccctgcgcgcggggcctccgcgccgcccccgcctcctccagccgcgggccgcggcctccccgggtgcccagcgggggagggggcgggggagagggaaattcaagcggccgcgtgtgcgggagacaaaagcgggcggcgggccgcattgtctgacggcgctccctctctgctttttgttctcgcctcgccgccccgcccctccgcagctctcgaggctcctcccgctgcgggtcggcgctcgccctcgctctcctcgccctccgccccggccccggccccgcgcccgccatggagaagactgagctgatccagaaggccaagctggccgagcaggccgagcgctacgacgacatggccacctgcatgaaggcagtgaccgagcagggcgccgagctgtccaacgaggagcgcaacctgctctccgtggcctacaagaacgtggtcgggggccgcaggtccgcctggagggtcatctctagcatcgagcagaagaccgacacctccgacaagaagttgcagctgattaaggactatcgggagaaagtggagtccgagctgagatccatctgcaccacggtgctggtgagtcctcggcgcggggagcaggggaggccttttgtgagatgcttttcattgagagtttcgcgggcacggaaacaaacgtgagccggggcttgccggactgtctgctggggtggagggttttaggtgagccctgacttccctactgtgtccctccggttgttgagactcaagaagccgcttttccaaggataagtccttttttttcgccccagatgctgggtagctaccaaacgatggaacttggaaacatccaagtaggtctctgcgagactgaaaggcgtttttaagtttcttgtgcggggagactgcgtcctgagatctgtgagccctttaaatgtattcagtcggttcacaagcttcaggcagttgaaagaaggcgcaggcacctttttgttacagacaatgtagtagggattttttcccaaacccagtaatggaaatttacttagaaaatctgaacagatactttatttttcaagtaagagtatctgttgtgctcccccccaccccccataaacaggagaggaggggagttcgggaaatgtgaaaaggacacagctgtatctgaagaacacaatgtcctggtaaatttcaacatttaataacatttccttgctgttgcacacctgtgcttaaacactagtgttgaagtgaattcgtttccagtgtggagcagacaaggaaagctttccaggttttgaactgtccagtcttagcaaggacgattgttgggtggagtaggtggctgctgtgattcacccttattagtgagagagaacatttttagctttgtcattccatggatcttttgatccgtaggataagtttttaaaactgaaataccagcattatatccaggagtgtttttaaatgtttcagtgctgccaagagtcatttctatgaataaaatgggaaataatctcatatggtttgccttttaagtgtcacttttacaagaggcctacttatttttgatgtgtttgtgcacatcatattttaggtgggctttgatagacaagcatactagactggggatttttcaaaagggaatggaagaaataatttctccctggcctcctcccccacccccaccccccaagccgcctttcttcatctcatcagaatggtggggcagggaatatgttccccaccccttgtttaaaaaaaaaaaatccacgaaacttttttaacctatctatttttctaatacgatgacaggcgatccggacaaaatcatggctgatggaaataactggtaaagaggcaaagaaagtaatgcagacagtgtgtactaaagtggagaaaacttaagattatttactttatgaagtcaaaacttcgttgtattcttccgtgtgctcttagcttccagtccctgcttggcattgaagaagcacttgtaaaagctttttggactgaattgctcgtattaaaaaattttgccaacttgaaagtagtggtagacttcaacttgagtaacatatggtaatggctgttaacagcattatctgttaccaagggaagactcataagaattccatatgttaaggttttct

SEQ ID NO: 25397 - DNA, 1099 bp, Homo sapiens
gagcccgtcctccctcaaccagggcaggtgctggcttccactctgcgagggctcagcgttgtgggagatgaagcggacgcagtagaagcctgctggtggatatgtgctgggcgagagcgccacagggtgtcccagggcaaagacttcggtttgggtttcaggatgggcccactaggagccattgtggtggccaggggaaatgagtgtgaacgcaccatcctgcctcctgacagccctgtcccatttctgacccacagagccccaggcagcggtcgcaagaagcccgagaggccggcagccatctcctacgaccactcggaagaggggctgatggcgagcatcgagcgggagtactgccgctgaggacagcatgctccacccccgccaggcctcggaggcacctgctggctggggcaccctctgcttgcacagagctctagcaggagctgaaccacctccaaaacgcagtcactcccggatattcaaagctgccctttcaaatccactttcagaccgcgctgacctgggccagccactggcggtcatggttgctggtgggggcgattagctgtgtagacccacaggtgcgtgggcctgggccgccggcgcctcctccccaacgcggggagcctgcccagttcttctggagcctgaaatgcgtgcccctcttggttgcccgctctccacagtggggagggctcacgaggactaggtgacacaagcgagcccctcctggcatccgcgccacaacacttccggaaggttctgctgtggaaggtgcacccgcgctgctccctcagtctcgggcccatctctccaggggtggccgggtcagcttagtgcttctcaactttaactccctaatgagcagcctgggggtgctgttgacttgcagggcctgaggttctgtacgtctaaccagctcccagcccaggcccgagctccgaagccccaactgcactttgaggagcgagaaccccagctctgatctgccttgcagtgggaggtagagctcgtcactgcctctctgggcctcagtttccctctctggaaaatcagctctggcagctcttggaggccctccccagctctgacaatc

SEQ ID NO: 25398 - DNA, 1084 bp, Homo sapiens
accaactaatctggttgaccaccatgacctgggaatattctcagttctggggtaacagaaataggtggtcactgtattagtctgttctcacattgctataaagaactacctgactttgggaggccaaggaaggcagatcatgaggtcaagagatcgagaccatcctggctaacatggtgaaaccccatctctactaaaaatacaaaaaaattagccaggcatggtggtgggtgcctgtagtcccagctactcgggaggctgaggcaggagaatggcgtgaacctggggggcggagcttgcagtgagctgagatggcaccactgcactccagcctggttgacagagcgagactccatctcaaaaaaaaaaaaaaaaagaactacccaagactgggtaatttataaagaaaggaggtttaattggctcacggtcctgcaggctgtacaggaagcatggctgcagaggcctcaggaaacaaccatggcagaaggcgaagcagaagccagcacatcctacatggctaaagcaggaagaagtaggcagggggacacactttaaacaaccagatctcacgagaactcactcactatcacgagaacaccaagggggatgtccacccccatgatccaatcacctcccaccaggtctctcctccaacattgccgggaatacacttcaacatgagatttgggcagggacacaaatccaaaccatatcagtcaccccacctacatggtggcccagggtaacggtaatagttgcatatattcagagctcgctggtctattctgctaggtttgtcatttatttaggtacagatagcatcatgaaagaaccatggggtttgcagagagagtggcttgagtcccagctctggctgtctctggcttcaagaccttaggccagctccccactcttcggagcctcagttttgccatctgtaaaatagaggcagaaaatatctatcttacaaggttaccgtgaggctcatttaacgagccacagtcggtaaatggtcagggcagggcctctcgaagtgtcagctgtccccgttgggtggaggttgactgcgcggtgaaggaaa

SEQ ID NO: 25399 - DNA, 1091 bp, Homo sapiens
ggcctaggagagaagaacagtttcatgggcagggccctgctgccctgcgcaacctcagtacactgctccctgcatcccagccactccagctcagccatggctaaaagtgccccagattaatctcaggcagctgatccagagggtgcaagacataagcctcagtggcttccatgtgatgttaagcctgcaggtgcacagagggcaatagttgaggcttggcagcctccacctagatttcagaggatgtatggaaacgcctggatgtccaaacagaagtttgctgcagggacagagccctcaaaggaaacctcaactagggcagtgtggaggggaaatgtggggttgaagcccccacacagagtccccactggggcactgcctagtggagctgagaaaaggggccaccatcctccataccccagaatggcagatccaccagcagcttgcaccatgcacctggaaaagccacaggcactcaatgccagcctgtgaaagaagccaagggggatgtatcctgcagagccacgggggtgcagatgcccaaggccttgggagcccacccattgcatcagtgtggcctagatgtgaaatatagagtcaaaggagattattttggagctttaagatgtaatgactgccctgctggggtttggacttgcatggagcctgtagcccctttgttttggctgatttttccctcttgaaatgggtgtatttacccaatgcctgtacccccattgtatcttggaagtaactaacttgcttttgattttacaagctcataggaggaagggacttactttgtctcagatgagactttggactatggacttttgagttaatgctgaataagttaagatttgggagactgttgagaagagaggattgtgttttgcaatgtgagaatgatatgagatttggaaagggccaagggtggaatgatgtggtttggatttgtgtccccacccaaatctcatgtcaaattgtaatccccagtgttggaggaggggcctggtgggaggttattgggtcatgggggtggatttccctcttgctgttctcatgatagtgagtgagttctcatgagatct

SEQ ID NO: 25400 - DNA, 1063 bp, Homo sapiens
gttggttctgactggagggggagggcgggaaggagtgctgtagtccacagccctaccttccgggagcctgagaagtaggatgctggtgtgtttgggtaactctgagctccccaacaagggcagttccctgggatccgggacccactatgttaagagagttggcactgagtatgtactgtgtgccaagaaatttgagctagacaccaagcctagaatcttggtaaattaggtcttccatcttaaaaaggaagaaattcccgagatcgcttagtggcagtggtgagcttggactgaaaaggggggtattccactcaaaatcaactaaggctttggaaacaatgctctttcagccagttagggaaaatgtaatccaacaacggtcagtagtgccagtggggacagaaacagccgcaggtaatcccgtgctacacgtgagtggcccctgaaacctcgcttctgaccacagcttggcgtagccacttacaggccccaacaaagccagacttgggtctgtgaaatgatgtggccaggcttgatcaagtgatcttccttggcccttgtacatgggagcaggcaggcgaatttggcaggagagaccagagaacgaggacagccagacggtagccggggctgtgtcgacaccaggcaccgtcctccaggaggcttaagtcctgctttgcatttgggtatctccacgtcatttttaaagatggtgctgtctggtcgtgcacagatactgggcatttctagactcgtgacttgaagtgaatacagctccaccaagaccacttgtgaatttcttcctggcgtgctggcccccgggagaggggattcaggggaattgaactattgggcaaaggtaaaggcagccagagtgcattagaatcacttagggtgcttcttaaaaatactcattattgccccctgaccactttccccagactctggggatggagtagtgttggagcaactggagaaccatctggaagacataaaagtatccccaactcctgctccaaaatacattccagatagatgaaagttttaaatataacagattaga

SEQ ID NO: 25401 - DNA, 1209 bp, Homo sapiens
catagtgagaccctgtctctacaaaaaattaaaaaattagttggccatggtagtgggcgcctgtagtcccagctgcttggctaaggtgagaggtttgcttgagcctgggaggttgaggctgcggtgagctatgatagcaccattgtattccagcctgagtaacagagaaagaccctgtctcagaaaaaaaaaaaatacattgaattgtttcctgatgggaagtaaatactctcatgcccagttaggagtgagtcagggtttttaatatgccactttttctttctcaggcaactcatgcagcaattccagaaccccgacttcccacccgaagtagaggaacaggatgccagcaccctgcctgtgtcttgtgcctgggagagtgggatgaaacgccacagagcagcctgtgcttcggctagtattaatgtgtagatagcactctggtagctgttaactgcaagtttagcttgaattaagggatttggggggaccatgtaacttaattactgctagttttgaaatgtctttgtaagagtagggtcgccatgatgcagccatatggaagactaggatatgggtcacacttatctgtgttcctatggaaactatttgaatatttgttttatatggatttttattcactcttcagacacgctactcaagagtgcccctcagctgctgaacaagcatttgtagcttgtacaatggcagaatgggccaaaagcttagtgttgtgacctgtttttaaaataaagtatcttgaaataattaggcattgggacgtttttatggtgtgttcattccagacagttcacgaatcccgtatagctcgctctgattctcagagaacaatgagtgggtccacccacacacaggtaggaggacaggtgagacggaagccccatcctcccatgtggacggtgcacatctgctcagcccaccccacatgtccagagttggctgcaaactccttgtccagagcctctggtggtgggacctacttaagtctgacggacctgtcctgtccaggccagtgcccagggaaggtgtgggaggccctttgagcctggcctgcagagaccatccgtgtcccctcccaccttcatgcctgtgagaagttaggaatgtatacggtaccacatttggcagtcagcttattttaataaattcagcaacagcaagtccctaccatgttgtgtatcttcacca

SEQ ID NO: 25402 - DNA, 1030 bp, Homo sapiens
agatttttttggtacaaatatttgaaatgcttagtgtgctgccttggaaaaacctggtattttttgttgtgtccttatactgccaaggtttatggaatcatgtaccttatgcctagtaataattaggatgaccaggccagtgagtggttcatatccggggcatgattagctctgcgtgtgctcagccagtgccccatcttcaactcgatgtgttcctaaggtagacagcaaattccctattttatttctcagattgtcactgctgttccaagggcacacgcagagggatttggaattcctggagagttgcctttgtgagaagctggaaatatttctttcaattccatctcttagttttccatgtaagtattcagtttacatttatgttgcaggttaatcttaagaattgtattgctaaggcttctaagtgaatttctccactctatttgcattttgttgcatttcagaggaacatcaagaaatcatgaacaactttggtaatgaagagtttgactgccacttcctcgatgaaggttttactgccaaggacattctggaccagaaaattaatgaagtttcttcttctgtaagtatatgaggcccatgctggcagtgcagctgagagtgccaggcaagtggaaaactttggcaaggtctaaggaagagcaatgaggcttacatgtcttgttatggaatgtagaaattaattcactggtggtaaattaatagtgataatggtgatactcatatcagtggctagactcaaaagagcaggattcattgtgactgatgggaatgaaggtcgctggctattggtgtggtgtgtggtgaggctgctagtgagtcacctgtgaccactcttgtttcaggatgataaggatgccttctatgtggcagacctgggagacattctaaagaaacatctgaggtggttaaaagctctccctcgtgtcacccccttttatgcagtcaaatgtaatgatagcaaagccatcgtgaagacccttgctgctaccgggacaggatttga

SEQ ID NO: 25403 - DNA, 1032 bp, Homo sapiens
tggaagcacagctgtgcagctacaggctctgccgttcagctgccgcgggccggggccggggcctgcggcgtcgtgcgcgtgcgcggaccagttccaggcgggcgagaccgccgcagggcggggcggggcgaggcggccgcagggcggggagggcggggagaggcggccgcagggcggggagggcggggcgcgaagccgggggcgggggccacgcgtggggcaggcggtgctcggctcggctgacgtcggcccgccggcgccccaccagctccgcgcgggcccgggttggccaccgccgggcccccgcccctcccccggcggtgtcccggccggaaccgatcgtggctggtttgagctggtgcgtctccatggcgacccgccggtgctataagtagggagcggcgtgccgtggggctttgtcagtccctcctgtagccgccgccgccgccgcccgccgcccctctgccagcagctccggcgccacctcgggccggcgtctccggcgggcgggagccaggcgctgacgggcgcggcgggggcggccgagcgctcctgcggctgcgactcaggctccggcgtctgcgcttccccatggggctggcctgcggcgcctgggcgctctgaggtgagggactccccggccgcggaggaagggagggagcgagggcgggagccggggcgggctgcgggccccgggccccgggcacgtgtgcggcgcgcctcgccggcctgcggagacacgtggtcgccgagcgggccacgaccttgaggcgccgcttcctcccggcccggggttctcccgcggctggataagggtgatccgggcgcctcgttctgcccccgtcttcacagctcggggctggaggggcctaggggagacccacccggagaccctgcggccccgcgccggcctctttcccaacccttcggcggccgcgcgctggccggggagccgttggggaggccctggcggccgcgcagcaggtgcaggggcgcagagcccgggctcgccttggtacagacgagcgggcc

SEQ ID NO: 25404 - DNA, 1828 bp, Homo sapiens
ccagccatctcctgtcactctctcacccaccccatgaggtcatgaccacgctatttagattgtcacaccccatctcctggattgcagatgagatgatatgcaatgtgctttttaaaaagactactatggacaatgtctaacatataccaaagtagagacaaatttaatgtgcttccatattcccagcacctgcttcagtagtcaacagtagctgaccctgtttcatcctcacttctacccattgtcccattattttgaaatatttgatccccagacgtcctattgtttcattcataaatcttcatagtggcttacttgtttatggttgattcgccagccccactcccttccatagcagcctagtaagggtagggatgtgggtttggatgcgttttgctcattgctgtgtatccagcatctagaacaatgtctggcacctcgtagctacttatcaatatttattagatgaataattaggtcaagtttgatgaagcctgaagattgaactctggctttaatacaagaggggtattaaatgttttgactgcagctgtttgagaggggctgggaatgctgaaaagcctaattggaatagttgaggagagaatggggaaaaggaatcagaaatagcgattatgcacaacagctgatacaggggaacagaaaataggacatctgagatcaagagagagctttctttaagagggtagatattatagcctgtctgtgtgcccctgggaatgatcaggaaagactgaaagcgatgatgccagacagagggcagctcctggagtgatgtcaggaagtccgtgtggtggtgctctgtcgctgcataacaaactacccactacttagaggtttaaaaattaaaagcaagttagctcacagtttcagtcgatcaggaatccagcttagcagggtgattctgtccaagttcctcctgagggtacagtcatctaaaagcttgtccggggctagaagaaccctcttccaagcttccacacatggcttttggcaggcggccattgttccttgccacatggcctctccacagggctgcttgaatgtcctcacagcatggctgacttcccccagagcaagccatccaagagagcaagagactaagatgggaaccacagtgtcttttgtgacctagtattagaagttgcatgtcatcccttactctgatttgttagaagggagtcactaagtacaaagtagggtggccagacatccaaataaagataaacaaaggcttattagtataggtgtattccaaatattgcatagggaattcttacactaaataatgactttatctgaaactcaaagttaatgtatgacctgtatttttatttgttagatttggcaacttcagaaggaatttgtggacatacttttaaactacggctagccaaagggaatgggatgtagtgcatatgtagagctcaggcctacagaaacacggcagatcatagggagagggctggcggagtacttggcaaatgtagataggtaggcgggtgggtaggcagaggcagtgaggggagcaggtggacatgctcttctgattgcttctcttttctcaccggagtaagcagcaaggttatgggcaaggtaaccttctcccgccccgccatacaccttgcacagagcttacccttgactcagaccctccatgctgggggaattacctccctgtgaccatcctaggaagacacctcttggctcttgcagagtcagaaaagcacaggacatggagttgagaaacccggtttcttctttttcttctttttcttttttttgagatggagtctcgctctgttgc

SEQ ID NO: 25405 - DNA, 1029 bp, Homo sapiens
ctaatgcctgatgatctgaggtggaatagtttcgtcctgaaactgtccctccctgcatccgtggaaaaattgtcttctacaaaaccagtccctggtgccaaaaaggttggggaccactgacatatatcgtaaatgttctgcatgtgagtacatcacatgtggacttattttgaagatctcagtctttttctgtgtcaatatttggaattaataaataattcctgtgacatagagcattcttatgtgaccaccagcaccacaaattctaagtgtaacctattaaaactgggaaactctgtgaaagtattgtttgaggcagggttctcaaatgctgactggcagtggacttttcattagtccctgatgaggagtgcatatgtgatatgagtattaatatgcatgtatgtatgtttatatatggtggtaggaatttgtcagctgttctttcttggaagacggttctttctacgttgtttttgtgagtgtcctttgtctttgcaaatggtcgatgacaatgtttctcctctctcccttctcctcatttcaatttggcaacttactgttgatccccagtattattttctaaattgaacttgtttgtggaaataaaaaatctgaggaccactcagagggtataagggaaccctctttgtcttagttcataaggactttctcatcatttttgtgtgtagtattattacatttaaaataaggatgatattgctgaagtagattaaatgttctctatagatatcaaagaagattagtaattctaatccttaaatttttagtctgaagtgaaatcttactataatcaaattgttgcccaagaaaaactgttgaatgttaatgaagattgcataaggacctgctgtcttctgtttgacctttcccagggctcacccacctcattggatctcctttcctccgggcatatatgcatgggtttttcatggatataagactctatcacaaggtaaacagaaaactacagttattatgtttcaggtaactaatgcgcagtctgtg

SEQ ID NO: 25406 - DNA, 1057 bp, Homo sapiens
ttgttattgtttttattattgttccagttccagaactgatatttatatctatttttagagtgtcctgaaaacagttctataataaaataactagatacttgatatggttgttaggtggtaaaaaaaacttttatattcaaactccctgttgctgttagtaaatgtagttcttacctgtttgatttaatagtgtcattataacataaaagtttaaattcaatttctaggattgtaatagtataagatcactgaaaggtaaaaatgacaattcttttaactaaacatcttctgtgtaatcagtgaaatatattaattttatgtagcactacattcttactatttagtgtggcagttaagctttcctggttatgaaaccatagcctctcagttgttcagggccttgctcaagtgccccttgcaaagctatcttgatcggcctcagcagataaagggcttcctagaaccttttaaaaatttctgttttggcactaatcccattgtattgtacttgattgttttccacttacttatgtttgactttagcacttaacttttaccaaatgctcagttaactttttgaatgaatgaatgaagttgaagaaattaagaataatttagtccttccacataagtattgctgtatttgaaacaactctgttccttttgggtttcattctactatttttatagggtatactgtacttggaacataataaatatggaatttaataaatatgtgatgaataaaaattgaattaaaatctatttcattacatttcatggtttcagttttattcctgaaattaaaataatttacttaggtcctttttccatgtgattctttttctttctcttcttgtcttctctggtcttctttctctcttttttttttttaacagggtcttattctgttgcccaggctggaatgcagtggcgtgatcatggctcaggtgatcctcccatctcagcctcaggaatagctgggaccacaggcacatgccaccatacctggttaattttttaatatttttaaaaaatatataaaaaatgtgtagag

SEQ ID NO: 25407 - DNA, 1033 bp, Homo sapiens
gccactgcactccggcctgggtaatagagcaaaactctatctcaaaaacaacaacaacaacaaaaatcaacagtatatacacactgcttccctcccacagtcatgcacacccacatatacatcttagtgagattctaaatattatcacatgtttgtgggaatcctgtttattacctcagaggaaactatgcatacttaagactctacttaagtactgttgtggttgaccacattttattccactgagttcagattgagttcctttatgtcctttgctgtgtcagtatcatgctttctttccttcagctttatttgggggaacatatgggaaatcttattttgtatgaatttaaaatacgttcttcaggatttcctagttccgtgcatgaccgcctccccaagataatcggtaactgctaaatggtgttaatatattttttcaccttcctagaatagcactgttaaggtatagaaccttgaataaaagtgtacatataatttttttaaagttttgctcttcctttttttctgccgagtttccccccctgggtatttttacatatatcggtacccttagtttttacatagatttcaaaattaagaattagaaagcaataagaatatgcagaaaagttattaataaacacttttgcctgcaaggaagtcgagtagaaccaggaaactactgatgtgctaaggataacacaccaaaccatctgtgttactaactcttggcaggaataaaatgacaaaacaagatcttgggagatgctcattaccaggtgcatgatcaaaaagataaatacattctcatgtaaaaaaattggcgtagtgcctttagcatccttggggcatgtgtgcgtgtgcatgtgggcaagtttagcatttggtgtagttaggaaattgggagaggaaaagggtagaagtagaggactttaacattgcttagagtcattgttattgcaaagtctggaagtgaactctaggaaactgcactggaattcaagtgtaatatgatgataaacatcaaatg

SEQ ID NO: 25408 - DNA, 1021 bp, Homo sapiens
aaatgtggacttcctattttaatctaaacactttcaggtagtaacagtatctgtggcctttttctcaacaaaggatatcctccccgtttcccatcacaatttattggatcacaagaatagcggacatacagaagcattaatgtgtgacaatcaggaagtaattttctgagcatcctgtcgcattttcaaagttaatttcagttctgattgggtaaaaatgtatgtaattttcatggagatatttgatacacatatgacatatattgtgttagtgtatcagatgatgtttgtttttgcttaaatagtcttacatctggcatgtccattttcttgaaaataaatgacaacttcctattcagatgctagtttgacttcaatgttgaccaaaggccttgtctcctggttccggcatttcctccatcttggtgcttaccaagtcgatctcgttgccattcttattttggatgagatatagtcggacttaaacctagtatttcagtgtcctggttgtgtagtcacttaggtggcgatgtctttagttaacatggccattatctcttctttttttttggttttgttttgttttttccttaaaaaagaaggtagcttatacaagtaagccagaaatttagactacattcttttaaaaggcccaccttatacagaaaataataagaaagttctaggacttacaccatctctactttgattcagtgttctcaaatcccaacgtaagtttctcttctgatgcccacttaggatgtaagctccacaaggcgggaactttgtatgttgtgctttttgctgtgtccttggttcttagaacagtgtcttatacttcataggctttcattgactccatgcatgctggtttaaagtaatgaatattgacccttttaaaatttgttttatttattattattttttgagacagggtctcactctgtctcccaggctggagtgcagtggtgtgatcatggctcactgcagcctccaaactcctgggctcaagtaatcctcc

SEQ ID NO: 25409 - DNA, 1103 bp, Homo sapiens
aaaggtaaaattttaatttaacttttaaaaggaaaagtgtaaaaaaggacaaatttacatggaataaagttatattgaattgggaatgtgcaagtagacacaaaatggtctattttggactatttggggccttttccaaaggtataaactgtccaccagacataattcatttgcatgtctatagacaattattttgcattgcttccagttacttacaatttgcaaagttgtaaaataggtcctgtagaatgagaatcagatgatcttgcagggtgtactctagactggggtttgggaaactacacaccagctgtctgtttttgtaaataaagttttattgaaacacagtgagcccattcatttatgtattatctatgcaactttctgactataatggcaaagttgagtagctgtgacagagaccatatggctcgtgagccctaaaatattttctcttcgtttatttacttctttacgtctatatttccccattgtaatgtaagacatgaatgcaggggcgtcattttgtctttttccctgttatatcctcagcacctaaagcagtgcctgtcatactgtaggccctcacttaatgggtgtggaaaaattaatgagcacacaagtgagagtgacctgattactgcaatttggagcgtctttgataatggttgtgtactttgaccatggctggtttgcagtgcttcttgaccgtacttaatgccagattgaaattttgcatttgcccttttctgctactactattaaaatatagaaaggcactctgggaggccgaggcgggcaaatcacctgaggtcgggagtttgagaccagcctgaccaacatggagaaaccccgtctctactaaaaatacaaaattagctggatgtggtggcacatgcctgtaatcccagctactagggaggctgaggcaagagaatcgcttgaacctgggaggcagaggttgcagtgagctgaggtcgtgccattgcactccagcctgggcaaacgagcgaaactccatctaaaaaaaaaaaaaaaacagggagaacatggttcatgtgtgccagagtataattttcatacagtaggattagcatcagttc

SEQ ID NO: 25410 - DNA, 1035 bp, Homo sapiens
tgaggcatgagaataacttgagtctggcagacagaggttacggtgagccgaggtcgtgctaccgcactccagcctgggtgacacagactctcttaaaaaaaataagaaatacatgaaattcctagatggacgagtgttttgctattttgtctcttaatatttttattttgtcttcctatattataaaagtaaatgtaggagaccaacaagtgcttgtatttgttcagtaaggatatattgagtacggtactaggctgcaggaatatgttggtgaagaaaaccaacatgttctctattgtacactcaccgcccttgtgagcttacaatctaggtgaggggtggtgataaacagatctgtgactaagcgctgtgaaggaaggcagcagggttcagtggcttcctacgcattttccctaagtcaagggtcaggcactttgtatcagtctcttttttatgtagatattttatcagcccccttcttctgtgtagatattatatatagatttgtaaaaatctcccccaccttcatcttaaatttgaatttcagggttggagacttggtgttttctttgccttatgatcatagcacatatctggggcaaaatagtgaatgaccatatttgtcccacaatctctggaaacaaaagagaacagtagagagaatgttggccgatagagaacgtagaggttgagcctctataatccaaaaatctgaaatgcagacgctccaaaatttaaaactcttttgagtgccaacatgactccacaagtggaaaatccaaacatgagacttaacctaaagtctgtttcctgccaaaaattattaaaaatataaaatgtttaaaggtataaaattaccttcagtctgtgtgtataaagtgtatatgaagcatgaatgaatttcatgtttagacttgggtctcatcccaagatatctcattatttttatacaaatgttccaaaagccaaaaaaaaaatcaaaaatttaaaatccttctgatctcaagcattttagaaacaggctactcagcctgt

SEQ ID NO: 25411 - DNA, 1048 bp, Homo sapiens
gtgagccactgcgcccagctgcccatgctgtttctaattgcacactgctctcccaagaaagatgagaaaccctggactttataatttgcatttcatctgtaatagttgagagaattttattataatcatgggagtaaagtgaaattctggtgagttcaggaatagattgcagctgaggatgctgggtcctagttagggtattgaaatgacctacaccagggtctcggttaagtaggtaagtgagtaaatcaggtggagctgaggttggggcaagggtgacgagcagggatagtgcgactgggggagtgacagtttgaagggcacagagagttgggagagaaagagtcttaccttgggctgtacagtttggtagccactagccactcgtgggcattgacatgtactgtgagtataaaatatacattggatttaaaagacattctacgaaaaaaggatgtaaaatagatcattaataattttctattaattacatgttgaaatgaaaatattttagacctgttggattagtaaaatatattaaaattaattttaccatttttaaaaatgtggctactaaaaattttaaaatcacatatgtggttcacatgctctttccattggacagtgctggtctaaactgggagagcttcaacccttgaggatgctggtaaggtttagtagtgcttgtgcctggcccagtgtagcggggattgttgagcctggtaggctgcctcagtttttccattgtaaccaaggatatagaagcccaaagagacacctgctgaaatgagtgccaatctgttggcccccgcaggctgtgtgcctaaacagcttctccaggaggcagggctggagggtggactcttgtgggcaacttgatttctcaggtcagtttttgtgcatctcttcccccacctttaatggctgtaaagatctcttaacccacaaagggtgtgactacttggcaaagaagcctctttctgagaaatactcaggctcagactgttgaggaacccattcttgaaatgccaccactgacgacagtggt

SEQ ID NO: 25412 - DNA, 1041 bp, Homo sapiens
aacagagttggcctgttagactgcgccttaaacagtgtcacagcagattcagagtaagtagaaattaatttgcaatgtaaatgttcatcaacttttaatttaagtaatgtgtctatattaaattcaaataaattgctacaggatatctgaaattgtactttccatgattgtttttcataaagatcctctcctgtaaaagctcactagtgagtaagccagatagaatttctttccaaaatactatacagaaggccttatttctttagttgctgtacgattttattaaaacaattacactacaggaatttgtattccaattttgtagaatctagtgatagaaccaggagtccaccacaaagtccacagaggtgtgctttgaattctaaggtggaaggaagcaagtgtttttttaatattttcttgttcctgtttgcctaatttctacatttaaaccaatcagaagagttttcactattatacatccatttacagttttatgattatttcctgagaaatgatacctagaacctgaatttctggattaaatagcatacatgttttgaaggtttttggtacattgctaaattgccctacagaaaacataacctcaggttaaatgtctccctgcatgcccagagcatacattgctcactctcctcagcctgggacgtccatcacagcactgctaataataagtcttagaaagagcctgaggatattgattaaataaagcttagtagaaatagtagctgacagatagtgctttctatttgccaggtactgggtctaagttctttacatatattaacttatttaatacgacagccctttgctgtaggcactgttattgtatttattttatagatgaaaaaaatattcgtcaatggcatacatgttactcagcctttaggaattatgttgcagaagcatatttattactagggaaaggtggtccaaatgcgcctgtcagtggaaaagcgagccatactgttgactatagagtgttaccacattgttatcagaaaaacagtgaacacaagc

SEQ ID NO: 25413 - DNA, 1090 bp, Homo sapiens
tgccatagaatgtaatgtaatcatgggagcaatgtcttatcaattcacagtttctacccacactctcaagggaagggggttatacgagggtaaaggtcactgggggtcattcttagaattttgaatggcactgaagtcaagttaaaatgggaaagttcaagtgcttttatcagttggcctagaatttgggattgaggggaaaggagttaatgggatatgtggtctgtggaattatatgcatagtctcccaacttgtttcaccctttgttgtttttttttttatttttactttttagaaacaggatctttttctgtcacccaggctggagtgcagtgttatgatcacagctcactgcagcctcaactacccaggctcaagagatcctcctacctccgcctcccaaatagctgggatcacaggcatgcaccaccatgtctggctaattttttttctgtttttttttttctttcccatagtgatagggtcttactatatctttgtttattgaaaacaatagaaactctgtgtgccactaataatggctatttttcgctctttttctttatcaggtagactatgaatgggtaaaaaatgacatcttttttgttaagcaacaatttttttgttctttaatgtatatttgaaagtctttaaaattattttgttttcaacatctcagagtgtcagaatttagaagtcattatattttgtgaatttgcattcagttctacaagaaatctagttgatgtgtattgagaaattatgaggcttttaagtttttgttggtgttttgggacaatatactatgacaattttcttcttgtttcacgtagaggcagaaaaaaactggtatgtatataatttctgtgttgaattagaatctttgcatcaggtttgcgttgttactaagaatattgtttgataattgtatttttcctatttcttgtttttcagttgtcacctttgaaattttgtctgatgactactcaaaggtatgttttatagcattggtttgtactgactagacccaagaaatgagtgagtggaatttattttaatgataagcagttttataatatttttattgtt

SEQ ID NO: 25414 - DNA, 1591 bp, Homo sapiens
gaaatgtttcacctgagttctgagcttttccatccgtataatcataggtacgaaggtcagggtaggagtcagactgaggagaacctggattgtagcaggagtagctccagagagtcgctcttccataaaatgagatgttgaccttccagggtgtccccttctgcagatctaacagtggctttctgtcgtctcccagcttcccgtggaggatgacattgacctcagtgatgtggagcttgatgacttagggaaagatgagttgtgagagccacaacagaggcttcagaccattttcttttcttgggagccagtggatttttccagcagtgaagggacattctctacactcagatgactctaccagtggccttttaaccaagaagtagtacttgattggtcatttgaaaacactgcaacagtgaacttttgcatctcaagaaaacattgaaaaattctatgaattgttgtagccggtgaattgagtcgtattctgtcacataatattttgaagaaaacttggctgtcgaaacatttttctctctgactgctgcttgaatgttcttggaggctgtttcttatgtatgggttttttttaatgtgatcccttcatttgaatattaatggctttttccattaaagaataaaatattttggacaatgccgataaatgtatgaagttagtatccacatcataaattcagagtgatgtttagcagtaaatcaatattttgaagtgatacacagatgtctttcctccccacaaacttttttaaacaaaaaacaagacctcttttctttagatggtgccacctatgcccaccacaacagagattttacatggaaaccgggctcagtgagaactgatttcctgcccaatatttgtctttgggctgtctctagtgactaattattaaggaatctagctggttatacagttcaaggctttctatgttgttaatgaacctcaaaatagccgttaagacatgaaatacagcagcaggttaccaatgcgaacaggtagttcgcatttatgtaaaacattcagaaaatgaagttttgaatttgttggaacattcaaaggacttgagagcattttattgtaacttaaaaaaataaatacaactgtcactaacttttgtgagcaatttctctgaaaaagatcttagttctgtaagacatttgaaccattctctggctaaaggaaagaggtgtctgtaataatctgcacgaacatgagacagaggtgccagctggcctttctagtcaagaagactaaggtcaatatggaagtagacataaggaaaatagtcttggttattgagttgcagtcccgggatctccacagatgcctacaaaagaagacatggtaatgctctaagtgcataaactagtttcctgtcttatccttttagttttgaggaagctcgccaggcactgagcgtacgttctgctctgcgtagctgtggtccacccctccaaccctctccttgctgtgctttaatgtgtatgacatgtagattttcataacaggctgacagatagttttgctttgttttgtttttgagacagtttctgtcacccaggctggact

SEQ ID NO: 25415 - DNA, 1047 bp, Homo sapiens
ggcgcacgccaccatgcccggctaatttttgtgattttagtagagatggggtttgcaccatattggtcaggctggtctcgaactcctgacctcaggtgatccacctatcttggcctcccaaagtgctgggatcacaggcgtgagccaccgtgcccagcctccttcctatttatctttttgcttcttgtcctcagtatccattgctttccccaggtacctagcgccccctgttgtccctctctcgatgaccttgctcctcctccattagtccagcaaatgtttattagatgcctacagaacgcgagaacatgcttaataacccaaatgatattggtgggatttcaggtaaaaagggaaaatccatatagaaactcatcttttgtttttatttgtcattctacgaaatatctgaagcgtgatcttttgttctctaagatcttctagttagatcgtaagcaatttaaaagacatatttgccctaaaaaccagtctggttttctaggtggctgtggacagaagctggagcccagtctgaacttgagaccgcgttggggattggagggtttgggtaccccgccatggccgccatcaatgcacgcaagatgaaatttgctctgctaaaaggctccttcagtgagcaaggcatcaacgagtttctcaggtaatttgttttcttaggttgtttgttgttttgtctgtttgtttggttctgttgtaggtttatatttggaactaggtatatataagccaggtaataaatggaatttaaaatgcaaactaattccagagaattgaatgtttatacattagagtttttaaattgtctccctgttcgttcttttttccatggaatactctgcttgcgggatgaggagaaagcattgctaccctcgggccgccctgtgtgccattctgtgcatctggccctgggctctttctcattctcataaaggtctcatatgggctagaggcagccctgtctgtccatcctcaccctcatatgcattgtaatcttgaccttggggaaatgtggtttccatttctggg

SEQ ID NO: 25416 - DNA, 1059 bp, Homo sapiens
aacttaagaagagaaatcgggctggacacggtggctcacacttgtgatcccagcactttgagaggctgaggtgggcggatcacttgaggtcaggagtttgtgaccagcctggccgacatggtgaaatcctgtctctactaaaaatacaaaaattagccagaaatcactcgaacccgggaggcggaggttgcagtgacctgagatggtgccactgtactccagcctgggcaacagggtgagactccatctcaaaaaataataataataaataaaaaaggaaaaggaattggttttccaagtgttaagtttagtgcaaaatgcattgtggggagaaagtgtgttctgtcagagatacacgtgtcagaactgtgtcacacctggtgaagccgacagtgaggtaaagacacagtcttgggccgggccagatgaggcacttgctgaaggccgggctgaggaccgcctaccttccgtctcctgtaggtggcagaactggtgaagccattgtagatgctgcgctgagtgctctgcgccagctcgtgaaggatcgcctcgggggacggagcggaggatacagttctggaaaacaagtaagaccataaaatgtcagtttttaatgtgtcataattttgaagccagagtggataccttgtataagatagttgttttttaacagtatgttaaagtggtgaactctcaattaaagaataatagaggattggatccaccgatcccagagggaaccagccctccagcctgctcatttggcctcctcagaattgctgttgccaaagccagtcagtcccagggcctcttgccacacctgcagtccaagtaccaggcccaggagccacgtgctggcatcccatggcacttgtaggtccagagtggggatgggatggacgggttttcctctaggtaggctttggcaaaccgtgatgagattggattacctcttggcctgtatctgtggcagtcagccccaaatccatggaaaattctacacaaatggatagggaagaagagagagagagaggagcagattggtgttttagatgccct

SEQ ID NO: 25417 - DNA, 1049 bp, Homo sapiens
tggtgagttcatccaggttgctgatcctattttacttatttatttttatttttattttttgagacagaatctcactctgttgcccaggctggagtgtagcggcatgatctcagctcttgcaacctctgcctcctgggttcacgtgattcttgtgcctcagcctccccagtagctaggattacaagcgtgcaccaccacgcctggctaatttttgtatttttattagagacggggtttcaccatgttagccaggctggtctcaaactcctgacctcaagtgatcctccctcctcggcctcccaaagtactggagattacaggcgtgagacaccgtgcccggccttgatcctgttttatttgtgcttgtcctctttgcaggcatctcattcaatagaccattgatggggttttttaattgaatttttgaattttttgaattgagaatcaaaggctttaatggttgctttgtgttgtcttcccccaaaaggtgtggtcactgtcaaagattaacaccagaatggaagaaagcagcaactgcattaaaagtaagtttcttaggaatgcaaaaggcttacaaaacttttttttacagtaagtttctaagatgtccatattcacctgtgtatgtttaagtaataagtatgcagatggtttaatgttcaatgggaagctagtttgcatatcagagttgaaaatactggttctgttgtcaaaatcatactgagaacaaggggataatacacatttaaatgtttacattgcctgtttttgtttattgtttttcccagataaatgacagttactctcagccctgccaattctgtgagctgcagagttccctccatgggctttgatttcccccatcattccatttagattctcttctggtgttcaaggctaaagcccttattgactgattgcaaactgcaccctgtgctttattacctttttctgagtctatgtgaagcagataatgagttcttgtggagtctgctttagcggaaggaaaaattgttatttcttttacatttccacaggatgttgtcaaa

SEQ ID NO: 25418 - DNA, 1050 bp, Homo sapiens
aggaatgattactacgtgattgcccagggttacacaggcagaagtgacctcccaatttttcagcgtccatgccataaaatgacagtagtactgcctcatggagcggttgtaaagaacaaagacgttgatacatgaaagccactaagaataatgcttcagcctttttccagtgcagcccaaggagtgggagtggggaccgtccgttcctttcttgctcagcgttgcagcaatgggagtgaaattccaggggctccaactgcagcaggaagggcagaggggccagagctaggccgtcctcctgtgtgaagggccctggtcagttaaagaggactctggttccccagggtttccagtcaaagcatgaacagtgctgttaatggtgcacttttgtttttatcttcaggtctggtgagctgtaccttctttctggcagtgaatggtctgtattcctctagtgatgatgtgatcgaattaactccatcgaatttcaaccgagaagttattcagagtgatagtttgtggcttgtagaattctatgctccatggtaagtattataaaatagttgtagattatttatagtactttctgaaattggagaaaacgctgtataaaaatctgattttattaagacatctagtttagcttagtgtttgtttaaaagaagtagagaagagggaaatgggaaatgcaaagtatctagtctgttgttaaggaagatctgtcttttgatgaggtgatgcgtgtggaaggaaaactgcttttatgaggaaggaatcttgagcaaagaaaatggaggggccagtgattaacttcactctgtttcttgaagagaattatttcctgaaaaaatgtagttagaaaatctggtttaatttaaaaattcttttcttaccttacattcaatgctggaagaacccttgtggggtaaaaatgtaatcaccattgaaactaacagcacaaaattatatacagtcaaaagtacaacattgcactagttatttgtgtgattaaagcatttaatgcaaaaaaacaccaaatagaagagtgga

SEQ ID NO: 25419 - DNA, 1027 bp, Homo sapiens
ggaggcgcgggcctcggcgtccggaggagctgctaggttgccccggcggaggtgcgggtgcgcgggagactcgggcgcccgtggggaggggcttccgcagccgcggggggcgggagcctcgtgcgctggagccgggcgcggggtccagggccgggcgggagagccgcggagcccagccccggccggatcccggggagggggtctgtattcccggagagtcgcaggggagcttgttccgggctcttctcgaactcgtgcgtggggacggaggttggcgggcgtcctgcactgctgcttgtttctgccacctgctttatgcagctcctacttttaaaaactgaaatgttaagccgggcgcggtggctcacacctgtaatcccagcactttggaaggccgaagcgggtggatcatctgaggtcaggagttcgagaccagcctgaccaacatggcgaaaccccgtctctactaaaaatacaaaattagtcgggcgtggtgtcgcgcgccagtgatcccagctactcagaaggctgaggcaggagaatctcctgaacccccaggaggcggaggttgcagtgagccgagatcgcgccactccagcctgggcaacaagagtgaaactctgtctcagaaacgaaaaactgaaatgttaaatctcagtcctgaaataaggacccatagttcccttagaaagggacagtgccttccaaaagctgggcttaagacgcaggggcgcttcgcatgtgatcggactccttaaaaacgaaatggaacgcggcgtcttaggaattctgtaaatgtctgcttcttagtgggcgaggccgagggtcctgtccttgccgggctcgccttggtcacagccttggctctgacagtccttaacctcggctctggcctcagaccaccttccccctatttactggctctgtgacttggagcaagttacttaaccactctgtgccagtgccttttcaacggtgttcaccattttagggactgataatagtactcccttagggttgtcctgag

SEQ ID NO: 25420 - DNA, 1019 bp, Homo sapiens
aaactcctgagccacagggaggatgggtactcgcttcctatgcccatcagagggagggagtaggatgatttcaggtaatcaagttggtgtactttgaaaatcaacccatgcagaataagaaccttcctggagaagagaccacacccccggtgggcctccgccaaggcactcagttccctggcatcggtgagtgctcggtggaatggtggccacttccagcactggtcgcaagccaggcactgtgctaagctcggaggcctccagcaccacccacgaggagggtccatgctctgaaacctccacgtgatgcagccaccagcatcacctggaggaccctttaaaatgcagattgcagggtgcccccagacagggctgccaaacttaacaaacaaacattcaggacatccgattaaatttgaatttcagataatgaattatcatttaatataagcatgacccaaatattgcgtggataatattaatcatctgtctgaaattcaaatttagcggatgacctgtagtttgtctggcagctctaccccccgggtttctgaaatggcaggtctgtgctggggcttgaggatttgtatttccagtaagttctcgggtgatgccgatgctgctggccaaggccacacttggagaaccaccgaggaaggtaatgttatgatccccactttatggtgagtcagatggggcacaaaaaggctaagcaacgtgtccaaggtcacagctctggctgggacccggggagcctggcttccaggtctgcttgttagccacggtgccaccccaccccaacgagaggtgcttctcagaagtggtgcagcacccccaccctcacccccacccccacctccaccctcacccccacccccacccccaggctgtctcctcacatgcttactcccaaagtattctggaggtaaagccaaaatggttattttattttatttttttttgagatggagtctttctctgtcacccaggctggagtgcaatggcgtgatcatggctca

SEQ ID NO: 25421 - DNA, 1044 bp, Homo sapiens
tgacttggaacaaaatgccactccattcatgttcatttttgtcctggagaggatttatttcctaaaagattctgaaagccaacaaatcaatgtagttcttcatagagaacttaagagtaaggctcaaaatggcctcaaaatgggcttcttggatgacttccaacagtgactggcctcaacactgcagatgtctgagcactaccataacctaacgaagtgaggaaggaggaggcaaattggtatttttaaacaagaatttaagtggctctttctttcaagtctaaaaaaacctttggctttaaagattataaactgatttactaaatttataaaagaccttaatttagcaaagagcttctttttcctttggttcagttactcaaaatccactgtgtgaaggaataatgtatccatcattcagcctttatagcggtcttccggtagcgaagtactgtcactgttacccatatatttaaagccagcatgatcacaaaacgtagaagaactgaaataaaaaaaaaagtgtattaaaaactgtctttacaatacagaccaaaaccacctcctgctcaaagtataagcctaaataaagcttcacccccaacctccgaaatgaacaattttggttccagttatttctggggaaatgatctccctatcatgacaatttttggccccttggcccaacttcataaataataatttatcatcttaagtgctcaattgacagtaatgtggctctggctaagaagggttataacttttaactttttttttttttttttgagacagtcttgccctgtcacccaggctggggttcagtggcctgtcttggctcactgcaacctccaccttctgggttcaagtgattctcccgcctcagctccccaggcacctgggatgacaggtgcccaccaccacgcctggctattttttgtatttttagtagagacagggtttcaccatgttgcccaggctggtctcaaactcctgacctcaagtaatctgcccaccttggcctcccaaagtgctgggattacaggc

SEQ ID NO: 25422 - DNA, 1060 bp, Homo sapiens
ctactgtattaagaaattagcattaaattaaaactataacataaaaccatttttcacctgccaaactggcacgggttaagaaacgaaatgggtacttttgtggactgctggtagaactccaaattaaatgcactctttccaaagcatctttgacaataagtttcgcaggcctgaactatatccctgttaatggtggagacagtcaagcaacaggcaattacagtactatgtaaaatgctgtttataatatagggatgaacagagcgcttggggaaacgagggaagcatggagaattctgcctgaggacattaagaaagatctcaaacaatggaggatggataattttacaagcagacaaataagggaaaatcagttccaagcaaaatgtcatgtgcagaggtacaaagtcatcagaattacttatgtatttgtaattttgtgttggcttggcgttgggagaaggcaagggtagggagtggtaaaagatgatgtgacactagagagaaagtctgaacccaactgaaaagctccatgtacactgtgctcaggagttttgatttataagtagaagtctttcagtaagggattggtattcaggcttaatgagatcctgaactgagtacttgacaatgaaaacgaagaaaataaacctggatttggaaagatttcttcagttgaaataactagaattagatgactgattcgaagggatgagggagagggttgtaagggaagtctcgtcatacactacagtcgcatctagcgattagacttaaatttgagattgtgacactggcacacacttcaaaggttttgaaagggtatgcaatgcagctttctcctaacctatgctaaagctgaggcttggatgccctggaaggcctgctgatcacaatctcccaagcagtagagctgaaactatggctataagttacattatatataagtctagagaagtgagtgtgtgccaggttgcgatatgtgttcagtgagtaattatatctgtttgtgtgttttctcaaatgttgtgctgtgtttagcacattttaaaagagtaat

SEQ ID NO: 25423 - DNA, 1050 bp, Homo sapiens
aaagtgtttctttgtagccctgtatgtagggaaggagagtatttgtgattgtataacttgttgctcttgatgagatactgagaaaccataaacgtaatttattttatttatgtattatatttatttttacattttttaaggctgtgaataagttggctgagatcatgaatcgaaaagaacctgtcaagcgtggtaatgacacagatgtgcggagaaaagagaaggagaatagaaagctacatatggagcttaaatctgaacgtgagaaattgacccagcagatgatcaagtatcagaaagaactgaatgaaatgcaggcagtaagaatactttttggactctagactgaagacttctttttaagaagtagaattattttcatgtctgtgttttactggttatagaccatttctatttaataattattattgaaccaagaagcaaaatgttgagttatgttgcatccaattaacttattgtaattaaatttcttatagcaaatagctgaagagagccagattcgaattgaactgcagatgacattggacagtaaagacagtgacattgagcagctgcggtcacaactccaagccttgcatattggtctggatagttccagtataggcagtggaccaggggatgctgaggcagatgatgggtttccaggtatggatttgttttcagcactaatatttatcttaaatataaatcagttgattgttttaagtcttgcgactgactgctctgaaggaaaaatgtttgtaatttctttaagggaaaacctactccttggagtaaggattcaagtaacatttcaaacttattttatttattgattttttttacaaagtttttcataaacatacaaaagaaaaactccacatgtctagtttttaaattattatattagctctatttttaagctttcgtttcattttctcttctttctgcattcttacttccttttatgttgggtgtttagttcatatcactcagtcacacactatggaatccatgtcattcacctaccagcgttcctctacttctctc

SEQ ID NO: 25424 - DNA, 1046 bp, Homo sapiens
aggcaggcgaatggcgtgaacccgggaggcggaacttttagtgagcccagatcgcaccactgcactccagcctgggcgacagagtgagactccgtctcaaaaacaaaaataataataattattattattattatcatcaagggttccaaatgagtttttgtttacgtttgttatatctaatgatttgtattgtgttagaaattaaaactgagaaaactttaaaacacaggaacacacaaacacgttattttagccatcagaatgatgtaattacaagtcatgtggcctcaggaaaagtacatacggtatataacgagggaatgagagttttaaaaaaaaccatggtgctcagtattatgaaaatgatttgaccttatgggttctgtggaagaacctcagagactcccagggcttcccccagaccatactttgagagctgctcgtttaaaatatgtgtaagttatttaaacctttgattcattgtcctcacagagaacgtcaggatgcagatgggcaaatgaaagagctccaggatcagctcgaagcagaacagtatttctcagtaagttcaagacacattaatttgcaaatagcaaacagagttttggttgggatattttatttataccatacaactcatataaaaagagcagctgggcaaaagaatgtagatagtttaagagaaatttattatcattgctagaaaaataattctaagcacaaaacatacctggtgaagctgattaacagcattgttttcaggaagaaaatattttcataatgcaagaaataaaattgtaataaaattatcattttaatagttgtgctttttttgagatcagttttaaaaatatgaagtagaaactcctgttttattgatttaagccaataacatttttttgtctaaattgttaatgtttttccttgcctccttattcattttacctatctgtgctattaaatgagaaatatcactgtgatatccagttgaaaatcatgcttcttaattattacctgaacttgtattagttaattgatgactagaa

SEQ ID NO: 25425 - DNA, 1033 bp, Homo sapiens
atgaaagtgaaaatattaaattgaaaattaaggccaggtgcagtggctcatgcctgtaattccagcactttgggtggccgaggcgggtggattgcatgaggccaggagtttgagaccagcctggccaacatggcaaaaccccatctctactaaaaatacaaaacttagctgggtgtggtggcacacgcctgtaatccgagttatgtctggaggccgaggcacgagaattgcttgaatccaggaggttacaaagagctgagattgcgtcactgcactccggcctgggcaacagagtgagactctgtctcaaaaaaaaaaaaaagaaaagaaaaaaagaaaattaatagaatataaggcagcatcatttattataatttttattagtatggtgtcatttaatgtgcttttacttacaaatttatgatatgcttcttttatttgtaaatttatgattgtgtccatttttattatactagaaatggagaagaagctcttggaggaaagaactttaaaacagaaagtggagaacctattgctagaagctgagaaaagatgttctctattagactgtgacctcaaacagtcacagcagaaaataaatgagctccttaaacagaaagatgtgctaaatgaggatgtaagtattaagtgtactaatgattaataataaactaatgaattaataggtttattcatgaaggtctagtgatggtttcataattttaaagtttttcttataatagtctgcaacctgttggtttaactaaattttgatgatatactaaaggaatcataatttaaacatttttaaagttatatttaccttattatattttatttaaaaaatacaattataatattattagaaatacaaaaaaaattttagtatgaaatgaattagctacctaagggtaaaaaaatctgttttacatcaccatattttataccaacttcattgattagaaaaatggaaataatttacttatataccaagtacacaatttatttcttaggttagaaacctgacattaaa

SEQ ID NO: 25426 - DNA, 1048 bp, Homo sapiens
tatgagtagcagtcaaagatgagtcccagatttgtaggttgtgacaagatatatagtgatgctgttaataaagaataaaggaaaaatagctcatgagacagtgataaacccactttagtcctcttaagtttgagggtacctatgggacagccaaattagcatgtctgcactgcagtaggctatagtagtagaagttagaaatatttgagtcattggtatgtaagtagctgaaatcatgtgagtggaatagcccatctgggaaaagactgtgtgaagtagtgatttttttttttcttttttaggacagagtagattactctgttggtggattatgtggtttgagaaatcattttttgtatgaaaggctttatttggaaaaaagcctttatcatatttatgatatgaactataaaaatcaaagaattagaaaacctttggggtttatgtagaaaataggaggagtattggggcttagatcaccaacatttaagggacagctgggaaagcttcaggagcaacagaaaggatgcaagcagaatggagagaaccaactaagtacaaggtcggcaatgccaagggatagttttaaggggggcagtgagttcaaataagactgaaaagggtctttagaatttgatattgagaatagcattggtctttttgttgagattaagtgagcttgatacagatctcagaacagcagagtggtggtgtagactgttgggtacagtgggaagtagagaagtagagtatatagattactattctaaaaggtttgagtgaagacgggaggggaaatactgaacattctagttaagcctgttaaaaaacaagttaaggttgagcaccatggcccacacctataatctcagcactgtgggaggctgagtcgggaggatcacttgagcccaggagttcaagatcagtgtaggcagtgtttaatgagaccttgtctctacattaaaaataaaataaaataaattagccaggagtggtgacaaacttctatagtcccagctactttggaggccaaggtgggaggattgct

SEQ ID NO: 25427 - DNA, 1082 bp, Homo sapiens
taagctagtcacagtctgtctctctgggcctgacttcctcttatgtaaaataatagagctggtttaactcttgcagcagccctgtctggcctatcatgatgtaaatgatttaaatctgtgctgtccagtgtggtgaccattggttacaacatgacttaaaatgtggctagtataactagggaattgtgtttttcattttatttaattcattttaactttaaattgccacctatagctagtggcaactgtgttgtataacatatctctagagaatgatttcaaaatgctgatccagcccaagcattaaaggaccctgactgatctgaccccacataggaactctttctcttggactattcagtaaaacatttcctctcttaaattaaaaaaaaaaaaaactcaacaaattcgggagttatcattgattttattttgcttttaagggatgagggatcattggtggtgttaaattttaaatatattctttgatttagaatataacaatatgtctgttgttttgactgggactctgtgcccgtagaatatttgttcttccctgcatgtgacaaatttaaacttaacatatttaagtactaggtgaaaagtgtttcctttgcattctctgttacattcagtatcttctttcttgaaattttaggggatactccattttatgcggattcacttgtaggaacatatagcaaaattatggatcataagaattcactgtgtttccctgaagatgcagaaatttccaaacatgcaaagaatctcatctgtgctttcttaacagataggtaatgtacattgaatttctttgtagagaagccctttatgttaaatttatagaaataaaagcatgcctagcttattaacatatgaaatcagtctgcctctcattacccaagtagcatctaattctgggttagccttttccttctgctaagcctggtgttgggctaccttgttgttatgtgtgtacagcccagttgtaatcgaactctaaccttaaccctcatgtctaaaaaggaaaaaatagaacgtggtaaaacaatggatttgaaagaaataaaactttcgtg

SEQ ID NO: 25428 - DNA, 1051 bp, Homo sapiens
taatgttccttattcctgtttgtttctttcttaaatgtttctatttaaatagtttcttttgtattgtgttctccatgaggggaaatattcatttatgcttgaataaggtacccatataaaaattttgtctgatactgtttatccattacatacgcctgagtctaaaataaaagatctcataaattttagttttggttataaaatagtttgcctttttcaatagtaataatagttttttaaatttttgttctgattatgatttttggtttgggtttttaaaaatttttccttttccttttgttttccagcttttttatgcctttcaagatgataggtatctgtacatggtaatggagtacatgcctggtggagaccttgtaaaccttatgagtaattatgatgtgcctgaaaaatgggccaaattttacactgctgaagttgttcttgctctggatgcaatacactccatgggtttaatacacagagatgtgaagcctgacaacatgctcttggataaacatggacatctaaaattagcagattttggcacgtgtatgaagatggatgaagtaagtaagcaaattatttaaaacgatagtgttttgagggacagaaataaatgaaatactttaagtcaggtcttcatagttttgaacaaaggtaaatttagttttcataactgtatagcacccaaacaagatataaccaacttaaaacatttccttaaccaacttaaaacatttcttttgtaatcatttatgtagctgtagagtacttatcaagagaaataaaaacttagcttagttatcttcctcatagactgttgacaagcatttgctaccaatcaaaaccggttcatatgtataatttaggtgaagaaggacacaaaatctaaattaaggtaaataggtattttcaccaccattgttacttctgcatttttttctttaagaggaggtaaaagtaagtaaagaaatttatgttacaacctcctcgtcactccctctgcatcaaccacacagaataaatttgggaacatcatctgttccga

SEQ ID NO: 25429 - DNA, 1194 bp, Homo sapiens
tctcgtgcctcagcctcctgagtagctagtattacaggcgcctgtcaccacacctggctagtttttgtgtttttagtagagatggggttttgccatgttggccaggctggtctcaaactcctgatctcaggtgatccgcctgcctcagcctcccaaagtgctgatattacaggcatgagccaccactactggccaaaacaaagactttaaaacagctatccaaaagatgctcaaagaactaaaggaagatgtagagaaagtcacgaaagtgatgtatgaccaatatgaaaatatcagtaaagagacagaaaacctaaaaagaaaccaaaaaatttctagagctgaaaagtacaataactgaaataaaaaacactaaaaggagtcaaaggggcagatttgagccggcagaagaatcagcaaacttgtatatagtaaaatgaagattactgagtctgaggaacaaagaaaacagattgaaaagtgaacagagtctaaggggtatgagtaggacacattcaaatagaacaaaatagatactgtgggagtaacagaagaagaaagagacaaaatatttgaatgggtgtaaactcccgaattttgatgaaagccatgaatatccaagaaagtcaacaaaatccaactaaaatgaacttgaactcaaggaaatctacaatgagaaatcttacggtcacacttgaaaattacaaagagaatttgaaagcagcaaaagagaagtgatttgtcacatacaaagaatcttcaatagattatgaatagatttctcatcaaatatttcagaggccaggagacagtgggccaatatattcaaagggctgatagaaaaaaagtcatctgtgaatgcagagacacacacacacacacacacacacacacacacacagtgcaaaactgttaaatacacacacacacacacaaggaaaaaaacacacacacacagtaaaactgttacatccggagggctgaccttaagaagcgaatgctgtggcatatttcaaaatgttcctttccctttaaccctcttggaagtgtgaggggatttttctccaatatttactgtgagactctggttgagctcttggatataaaatctgtaaaggtgtggggtctcacctataactgggtccctttcaaagtttttaattttctgacttgaccaccacttagcccccagca

SEQ ID NO: 25430 - DNA, 1090 bp, Homo sapiens
ctccatttgcttagttctttgatttctgtcatcagagttttgtagttttcctcatatagatcttatacatgtttagttagatttatgcctgttttatttttgtaggtgctttaatgtaaatggtactgtgtttttaatttcaaattccactttttcattgctcatatacaggaatttaatttcatatacattgctcatatacagaatttaatttcaaattccactttttcattgctcatatagaggaatttaatttcatatgtattgctcatatacagaatttaatttcaaattccactttttcattgctcatctacaggaaagcaatgaacttttgtgtattaaccttctgtcttgcaacttggtataatgacttgttccaggaaactttcgaatcctctacatagatgatcacatagatccttcccaatctgtatacgctttacttccttttcctgtgttattgcattacctcggactttcagtacagtgatggaaaggattggtgagaggaaatgtccttgcttttgttcttgatcttagtgggaaagctagtttcttaccagtaaacatgaagtgagctgtggattttttatagatattcaagttgaagttcctctattcttcatgtactgaggtttttttttttttttttttttttaaataatgagtgggtgttggatttgtcagatgctttttctgcatctatgatatgatcatctgtctttcttttttagcctgttggtgtgatggattacaataattgattttgaaatgttgaaccagtcttgtatacctgtaataaatcccacttggttgtggcgtataattcttttacaccgcataatacattgttggatttgattggctaatattttgttgaggatttttgcatctgtgttcattagagataatggtttgtagttttcttgtaatatctttgtcaagttttttgctgacctcgtagaatgattctggaaatattccctctacatctgtcctctaaaatacattatagataatttcttcctttaatagttggtacatttcaccactgaatccatctggacctcatgctttctgttttgga

SEQ ID NO: 25431 - DNA, 1049 bp, Homo sapiens
tcagccctccaagaagctgggactataggcatgtgccacacacccagctcattttttgtattttatgtagagatggggtttcaccatgttgccgaggctgatcttgaatttctggactcaagggatctacctgctcggcctcccagagtgctgggagtacaagcatgagacacctcactgtgcctttcttgataggtttattggacttgtagatcagggtagtgcaatttatgtaatacatatccataagaagaatattattcttctgaagaagtctgacacacttgaggataatatgatgaaatggcacagtaataattgtatgggtaggcaagctttataactaatgtactagttttattccaaggaggctggtgaaagcatggatggtacatgggacagagacctccaagaaaggtttcagggtccctcttctcctattaaacatttttttttttttttttttttagacagagtttcactcttgttgcccaggctggagtgcaatggcgcgatctcggctcaccgtaacctccaccccccgggttcaagcaattctcctgcctcagtcttctaagtagttgggattacaggcatgcaccaccacgcctggccaattttgtatttttagtagagacagggtttctccatgttggtcagtctggtcttgaactcccgacctcaggtgatccgcctgcctcggcctcccaaaatgctgggattacaggcgtgagccactgcacccagcctcctattaaacattttaatgacttgtttgggagcaatggtagcacgttgaataattttgcaaatgagttaaacctgaagtataatgaggatgattttaggtgatgagccaaaattcagaaatcatcaatgggaaagaacattggccagatagaagtgaaattgaaccagaatatagtacttggatgtgaagaacacagggaatagttgcttaacagtactgtcttaattaaagaaccattttccttggattgtaagcaggcaagagtcattaatgatcagactacctaaagtagtaaaga

SEQ ID NO: 25432 - DNA, 1033 bp, Homo sapiens
agggtcaagggattttttcttaagggtaagagaaataacaacatgtttccatgccaatggcagtaatcaagtagagaaggcggcgagaagaaatgaagagatcatgggagaattgctgttgtggtgttaatgagcaagagggaatgggagatttagtgtgtaggtggagggattagctgtagctaggactgtacatccataatagcaggaaagaaagtaaaatgtgtgggcacagatgcaggaacgtggatagatttggtgatgaaggcttgtacaagttctcagtgaggtaagaagcaagatttgaagaattctgcacttgaggaatttacagctaatagatgtgagataagctgtgtacaaaaataacttttataaggacaaagtgacatcttctttgaagaacatgtaatgtgtaggagttaggaaggagagatttttatcctggaggatcctgaagatttcacagaaataagttttatctgaactaatctttgaagaatagataaaaatttgaacaagtagacatgactgaagaactttaactttttaatttttttattttaatgcttagcactcagccttggtacatggctacccctcagcaaatgaatgagtgttgaatgttctgtggtgaaagactgtgaggaaagtgatggaagtagaaagaccaaggtgaaaggtgaaagtttgggtggtccaaactttccagtggatactgttcaatagatatataatgtgagccacatatataatttaaaatttcccaggagcctcattttaaaaggtggagggaaacagatgaaattaatttcaataaatatttcatttaacccagtataacaaagtattattttaacatgtaatcaatattttaaaattattaacgagttattaaaacagttatttcatattcttattagtactaagtctttgaaatccaatgtgtattttacatttaccagagcatctcagttcaagctaaccacatttcaggtgcttggtagccagatgtaactagtgccttctctat

SEQ ID NO: 25433 - DNA, 1060 bp, Homo sapiens
tgtgagcttttctgacagaaggaaatagtgagtccaaagtccctgagtcaggaacatgccttttgtggtttttaaaaaacttcttattttgaaacaattttataaacttactgcatacacaaaacatttgatttgtcaactgtccaaataatgttcttcatagcaaaagaatctgacccaggatcatatattcatccaactctcatggctctcgaatctctttcaatctggaacagttccccagtcttgactctcatgctcttgacagttttgatgattacaagccatttattttgtagaaattgttccagatttgccactgggagccctttcatactggcttatgtgtcctcttgacaagtcaccatcagtccttgtacacttctttacttatttttaaacttttttcttgaaataattataaattcacagtaactttgcaaaaatagtacagaatggtcctgtgtaccccatttcccatagtgtttatatcttacataactatagtttattctcaaaacgaggacattgacattgatacattgtgtatgtatagctctatgccattttatcacctgtgcacttccttcctttttggcacaagatgctacaagctcatcttatcattttcctactccagccttagaatcagctatttctgcaaggagccctagttccttttagtgaagagtagtattttaaaaccaagatctgagtgctagatgagctcattgctatgggagtatctattgtacaccaggccctttcagtggtcacatccaggaagcatgtgcatgcacgtaagtgtgtgtgtgtgtgtgtgtgtgtgtgtgtgtgtacacccacacagacatttatctacatctatatttctatatccatctttattttttttaactttatttttgagacggagtctcgctctgttgtccgggctggagtgtagtggcatgatctctgctcactgcaacttctgcctcccgggttcaagcaattctcttgtctcagcctcccgagtagttgggactacaggcgtgcgccaccatgcccagctaatttt

SEQ ID NO: 25434 - DNA, 1050 bp, Homo sapiens
agtaatttatagtgataggaaaacaaatcattcgttgcttggagaaagtgggggcttttgaagaggggcaggagagggggatttttaaggagtacaggaaactttgtgggttgatggctatgttcattatagtgactgtggtgatgattttatggatgtatacatattgacaaaacttatcaaattgtacactttaaatgtgtgcttttattgtacgtcagttttaccttaataaagctcctttttaaaacgaagcttagagtttaaaagaatataaagtatatgctaaaaactgagaaaattttaaaatatgaatttgttaatttattgagaataactgtaataaagccatttaatttcacctatgtagtacttaatgaaaaatatgtttttcaatacaaaaagtttagtgagaagagtggcattgctctgtaattttgcaaatctttagtgtctgactttagtatgaaacgacggctggattctcatctgcttcttcatgtcatcagttgtgatatgttgtatttgttgaagtaaatgaggaaaaatcatcattgtacatatttgtagttggaaaagggagggggatagtaatagcctttctagataattctggatattcttcaagttctctgttgaaatcccccgtcttgatatctcaaacatattaatagcagtgattttgaagtttatgttaagtttctggatctcctataggggtgtgtgtgtgtgtgtgtgcacgcgcgtgtgcgctttctctcgattttatgatattttagttttatcatctggtatggctgctaatgtttgactgctgggcattgcatgtgaaaaaattgcatagaattaggtaacattgtcttcaggaggatttacgttttcttctggcagttactgttgaggcagactaccttaatctattcagtaattgaactgatttgaggcagatttttaatcttttgagggttggtctagtttttatttttccttattacttctaggatatagccctttagtagactccattaaaaaccctggactttttcttct

SEQ ID NO: 25435 - DNA, 2046 bp, Homo sapiens
tcatgagtgaattcccattcacaattgcttcaaagagaataaaatacctaggaatccaacttacaagggatgtgaatgacctcttcaaggagaactacaaaccactgctcaacgaaataaaagaggatacaagcaaatggaagaacattccatgcttatggataggaagaatcaatattgtggaaatggccatactgcccaaggtaatttatacattcaatgccatccccatcaagctaccactgactttcttcacagaattggaaaaaactactttaaagttcatatggaaccaaaaaagagcccacattgccaagtcaatcctgagccaaaagaacaaagctggaggcatcacactacctgacttcaaactatactacaaggctacagtaaccaaaacaacatggtactggtaccaaaacagagatatagaccaatggaacagaacggagccctcagaaataataccacacatctacaactatctgatctttgacaaacctgacaaaaacaagaaatggggaagggattccctattcaacaaatggtgctgggagaactggctggccatatgtagaaagctgaaactggatcccttccttacaccttatacaaaaattaattcaagatggattaaagacttaaatgttagtcatttaaaaccgtaaaaaccctagaagaaaacctaggcaataccattcaggagataggcatgggcaaggacttcatgtctaaaacaccaaaaggaatggcaacaaaagccagaattgacacatgggatctaattaaactaaagagcttctgcacagcaaaagaaactaccatcagaacaggcaacctatagaatgggagaaaatttttgcaatctactcatctgacaaagggctaatatccagaatctacaaagaactcaaatttacaagaaaaaaacaaccccatcaaaaagtgggcaaaggacatgaacagacacttctcaaaagaagacatttatgcagccaacagacacatgaaaaaatgctcatcatcactggccatcagagaaatgcaaatcaaaaccacaatgagataccatctcacaccagttagaatggctatcattaaaaagtcaggaaacagcaggtgctggagaggatgtggagaaataggaatacttttacactgttggtgggactgtaaactagttcaaccattgtggaagacagtgtggcaattcctcagggatctagaactagagataccatttgacccagccatcccattagtgggtatatacccaaaggattatacatcatgctgctgtaaagacacatgcacacgtatgtttattgcggcactattcacaatagcaaagacttggaaccaacccaaatgtccaacaatgatagactggattaagaaaatgtggtatacttttatggaatacaatgcagccataagaaaggatgagttcatgtcctttgcagggacatggatgaagctgggaaccatcattctgagcaaactatcacaaggacaaaaaaccaaacaccgcatattctcactcgtaggtgagaattgaacaatgagaacacttggacacaggaaggggaacatcacacaccggggcctgttgtggggttgggggagcggggagggatagcattaggagatatacctaatgtaaatgacgagttaatgggtgcagcacacgaacatggcacatgtatacatatgtaacaagcctgcacgttgtgcacatgtaccctagaacttaaagtataattaaaaaaaaaaaaaaatatatatatatatatatatatatatatatatatataaatgtgtagatcagggcggctttaaaaaatagctttttgaagttaatagctgtttatgtatatgcctggtgttttacagacattttatgtcctttatttccttttcataacaatgctgcaaagttatgttattatctctgttttattgatgctatgaggtttagagaagttatgtaacagttgcgttggtagagttaatattcaatttcaagttcgtctgattccaaatcac

SEQ ID NO: 25436 - DNA, 1056 bp, Homo sapiens
gtgctgctgcactttagcctgggtgatagaatgagaccctgtctctggaaaaaaagtcatttctttttagttttatctgtacctgagggaagtgacaaccaactatggctgagagggaaacatagattttattttttaaagtgaagaaagatttgtcattttttaaattataaaaataatatgctctcgttgtagaaaatttagggagcatagaagggtataaatgctaatagcacttatctacaatctccttccttagagataatcactgtttaaattaacattttggtttatatatcttaacttatatgtatttaaaaattacagtattcatgtgctttatctttttaaatatttaatgaatagtatgagttttatatagtcacaattatcaatcgtttcactgtaaagtgatttctggcttagtggtcatgtttaggaaattctctgttaccaggattatatcatcatatacctgactttttgttctcacatggctttatttttattgatattttcatttcatttggaattctgatggaaagtatgaagtaggagttcaaagattatatcaggagattgagatttgtctaggtattaaatttcccaaaatattaattgggagtttctgtttacatctctttattatactttctatttggagagtggtgattggggtgagaaaaaaggtttaatgattaaggtctaatgattataggttaggtctctatttgggcctcttgaatttcttcatgaaaatactatacaactatacttaaaactctaatttgttagtgataaggattactggtggagagaatgtggatgactcagtgcaacttacagcttttaaaaataataaaagaacattttcccttggtggactagcatatggagcttactgtttaataaattgatgtgaaatcatggtgcatttggggctcaactaaaactatactcactttatccttaattggagtcatttttctttcctctcatctgtactcctgcccccctttaaagtattattaaattatatagatattcttgtaaatt

SEQ ID NO: 25437 - DNA, 1031 bp, Homo sapiens
aagatggcgggccgggcgacttgagatccgcgggtctccctcctctttttccgtctgcgtcgggagctcccgggcacgtgaggccgtgccgcgtttactggcgggcgggacggcctagccgggcggcgcctcggaggaagccgcggaccccttaggtgctgggcccttggaaatcggcgcgtggggggcggtgctcgagctgagcgcgagagggcgggagagctcgtggggtgcgaggggagcaggacgcccggccgggcagcatgagtcagcagcggccggcgaggaagttacccagtctcctcctggacccgacggaggagacggttcgccgtcggtgccgagaccccatcaacgtggagggcctgctggtaagctccgggacgggacggggacgggcggtggtctcccaaatccggccccctcctccccgcgccgccgccaaccccgctggccgtcgtctgggtcgtctgctccccctgggccaggcgctgcccatcacgtgctgcgaactgcgctctcccgccttctgctttcagcatctgctcacagacgtggtatcagtcttctaggcttttacatcggaacttcagagcactgttggagaaaattgctcaactttgcattagagagtccatgtttatctccttctatggactctagctgtatctctgcaacctatcatttgtttttctgcctcctctcccatccttctgctctactgcagccgtttaaaaccttgtccacgctttatatttcccacgccacagctcccattcatcaaattatctccccacctgtttgacagagaaaatggttaggaaatttggctccctttcctgcaaaggctgatttcttctcttgttcaggaccagatgctgtattccccgcggttatcagggccctcaacaaatgcattttctttttcttttctttcttttttttcttttttttttttttttttgagattgagttttacttttgttccccaggctggagtgcaatggcgcaatctcagctcactgcaaccc

SEQ ID NO: 25438 - DNA, 1111 bp, Homo sapiens
acagaagaaagaagaaaattcaggaagcttgggaggtagtcacaagacagcttgagtgactcataaaagctcagtggtgcattttctggtgggaggctgttatcgcgagaggacagccagatcccatgggtgtttccaagcatgtcactgctgttcccagcatgtgctttcttgggcattgtccagggtccattcctgcttgtggaactgtccttccacagcacatttagtcttttttcaaggtcaatgttttcaggagccatcactgaaggagagagctaactctagtctgattcctggtagagatgaaacttgtgagggctgtgggctgtgtatttaaaaatgatgaattaagtttaatgaatatttccttactagatttctatccctattaagtattttgcaagatttttattacttcctaagaatctaagttatttcccctcatttttcttgcaaaggatgagttcagtatttcagctgttctcatttattgttaattctcttttcctcgtcatttattagaagatccatttttctctgtggtttatctttttatcccttaaagtgtttataaaatcctctttagctcttttaccacttaaaaaattacccttccgatttttttttttaaaattacctgagtctttctggtttggcctttagctgaagaataatcaaattttctcctttattctgattcttttttattactaaactcctttaaacttataattttttgaactctctctgctaaagctataatgacagtttctatttttacccagtctggttggaatggagctgcaattccatttgattatggaatatacttttattgagcacctactaactaatccatgtgaagtgactgtcacagtgccaggcacacagttagcactcaatatatgctgacattattgttatttccaggcaccatgctgttgaccctagggttacaaagatggacaagaaatgagctgtgcctgtgcttaaacctggcagtgactttccctcacctccatgggaatttcaagtccttaagatagaccccaaggctgtcagtgcaagtccctatcttgtggacctcaagtatcagccactacccccg

SEQ ID NO: 25439 - DNA, 1030 bp, Homo sapiens
ggtctccaggcactcgactatgggctcagtcagcaatgatgaaggtagctgatagctcaatgccgcagtgacatggaaatcacctcagacttcagatgggacttgggcttactagacagccaagaatcagcctctgatgttattggaacacaacttgtatttctgtcgccaagtcccagtccaagtcaaaccctgggagagacaccttcacaaaaattttatataggcggatttcccttatatcctttagatttcagcctccttcaaattagcatgactaaaacggcacgttatcagcagaaagggcacactggtttgcatggtttgccattgattctgagaaacactaggtcctattctgctcaacggacttttttgttgttgtggatatgttagatattccatgatcagacttctgggttttcaatgccaaacttcaaaacttttgtatcagataagacaaagcaaacactcctatcttttcaacttctactgtctgtgtggagtggaggagagcagctggaacaggctacaaggctcaagggctcgtgtgcctaatagaggtagttattagagcaggagttgttcaaatagaggtgcttattttgaaaaggtatggctcttcaaagtcactctgcctcaaataattgtttggagactaaaggtggaggggcagatttgtaattctctatctttaaatatctctctgtattttaaaagtaaaaacgtgttcattttgtttgaaaaacttcaattagcacaaattcatacaaagtaaaatgtaaaacattcattgtttccaatttttaccaaccaacttcattcctagaggcaaggactatgtaaggataccgttttctgtgtatccttctgggctttttctgtgtgtatatgtgtgtgtgtgtgtgtgtgtgtataaattttggggggatcacataaatggcatcatactacacataatatatcaggatcccaataggaaacaaatggcatgttggaattaggataatttaaaggcagtttagttggt

SEQ ID NO: 25440 - DNA, 1051 bp, Homo sapiens
taaatcagtgagtgtccccctcctcctttagaaagtaaagatgtctgtctggcattactgattgaaatctattttgaaggacaggtgcatttgatgggggaaaatgacttataattgtaaataacctcttgttacttggtgagtgaatgcagaagtattgtgtttagaatggaaacaccaacaacttctggaatgttacaaaactatgcccatagtttaaattgtctcttaaattattgtttttcaaaaattgtcttacctttcactagagtagtagaaagatcagggcactagtgggcagatacttgtgtgtgtgaccatcctccctctaccactagttttagaatttgggggaagattcttcatctgtgtgcttggctgcttggtgtataaaatggaagcttcaactagaggagatagaggatgttgtgctcccctcatcatttctctcacacacattaaactccactcttcatctccatatcccaaacacctagaagatccccaagtattgactgtatgagctcttgtttttttcattttctctctatccccttcttcattctcagagataactttgggtgatattaaggatagagacaagttcttacagagtaaggataagaatagataatgatattgcaatgttcagttaccaaaaaatgtgtgactgctactttcactgtggctgccaaccctcttaggcagactttgcatacatcagagagagacttaatatttaattatcctcgaggtgcccaaagtagtggccccacaaatcagtgtgttgctgggaaaccagccagctcctgcaaaattaaacacagagtctctggttcttgctacctcactggttctcggagagacagtaatttttagttttctaatgattagttaacagaattaaaaattcagaggccttcatttttcaacagtttgagaggcttttatttccattccagaaatatgccccagcttggggtgggagggaaaaagagagggacatgggggcaggggagaggggatgaatgtgttgtgttaatcctcatag

SEQ ID NO: 25441 - DNA, 1072 bp, Homo sapiens
actcagatctcctgatctttctaatagaaaatataaactagctacttagagctaagttgatagatctttgcgttcagacatatagagggctatgtgtgtgtgtttgaaagtgactctatgtttacattggaatgaaccacttacctactttctttttttttctgctaggtcttaattacaaaaagctgacagatgaaaacatgagtcctcttgaagcattggagccagttctttcaagtcaaaatatcttgtctatttccaaacttgttcccaaaatccctgaaaaggatggacagatgctttccccaagctctctgtacaccatctggttacagaagttgttctggactggagaccctcatctcattaaacaagtcccaggctcttcaccggagtggcttcatgcctatgatgtctgcatgaagtactttgatcgtctccacccaggtgacctcatcactgtggtagatgcagttacattttctccaaaagctgtgaccaaggtaaacaaaaagatattttaaagtggtttgagcacagtagaagaaatgaaaatttctcctacattctgtagattttatttttgtttcctttcttgaaaataattacatgttggctttttaaaaagtttttgttcatttgctgtgaatgaggtgttttaattaggaaattttttttctctattgtagatgtacaaatatgctaaaatagagatgactattctcatttacacgtatacttagtacatgttacagttctcatgtcactttatagtaaatatgccattctgttctttccagttgacaaatgtaaaggagctccagtgcccagcccagattacctgcattcggaaaccaggctaacaacttagcttgggttagcctgagtctttaaaaaagttattggccgggcatagcggctcaagcctgtaatcccagcactttgggaggccaaggcaggcagattacctgagatcaggagtttgagaccagcctggccaatatggtgaaatcccatctctactagaagaaaaaaaaaaaccaaaaaaaaaaaaattacctgggtgtggtgg

SEQ ID NO: 25442 - DNA, 1005 bp, Homo sapiens
ggtctgcctctcccagtccactgactcaaatgttaaccttctttggcaacaccctcacagacacacccaggaacaatactttgcattcctcaatccaatcaagttgatacttaatattaaccatcacatctatcaaattgtctcttcctttgaaagtgttccttggagctctcctgccctcatgctatctcttgttctctaattcctggttgtcacactacccacccaccctgtggcatagttccagccacccaccaccattccctttctgggtgcaacaacatagggtagccgctgttcagagtcattgcttgaggaagcagcattaatcctgtgggaacagaagccagtacagtacatggggcccagtgatgatgcctgaacaccggatttctaacctttcagctgctccagatggaaagaggtgctctctggtagcctgagatagcacatgggcatgagtcagctagttctccagggacttcttggcaacttctggaaagcatccgattgtaggtctaaaagtagaagtgaagagttagagagaatccaggatgtttttcctatcaagatgcaaagcctttttgaatgtcttccagacagacagatacatcaccagtgagtgggtgagagttaccacctctccatttgtttccatctctccaccctgtgttctcaccttaattcagtctttcatagttcttcacctaaacgtcctgcgacagcctcgtgaacatcaccttgtcttcatttatttacttctgtattttcccccaaacaactgccagagtagtcattctaaaatggaggtgtagacatcctcctctccacccaaaatccttcaggatctcccgttgccccagcatgctctgcacatcccatgattggcctctgtttttccaacttcatccttccatgctgcagccataccaaaaactctgcctttaatgctttttgctaccatttctttgcttagctacttggttcaggtgttacctcactcag

SEQ ID NO: 25443 - DNA, 1049 bp, Homo sapiens
agtctaagtaagacataattgggagggtaaatcttctggaaaaatcatgtggtgcatttccaaagtcaaatatcatttccgttgaattattcgtatactatccccttcattagtgccgatcatgagcatctgtgttttttaaaaataaaggattcatattgtgattacatatgactacttagtatttgctactgagatgctaaatgaataggatacatccttattgaaacaagctgtgtacaaacacagaccgtattgacaatgcatactcttatgttaaagctatgacattggcaagttgtggtttgtgtaaaaatttatgtgaaaaagacaagtttttaatggttgggatattttaagacatacaagcaaaatgaaagactgattttctttttgtggagcgtgatgaggaggggtgttattggaaggaacaaaatcatattatcatcattgtagtaatcaaaagatttactctaaatttgcactcctaaagctattttattgctctgatctttagtactcatattatcaccctccatattagctaacattgatacacaattttgcagcatggtctgcatctttaaaaccaaaatacccagctctaggaaaccagcctctctcatgtctttgcacttaacctttgcagctgccctgacagaatttcctcatgtgtaagtaaccaatagtatactttttctgaattaaggcaaggttactatttaacacagttccatatgatctgtttttagatggtgctgaacagcctttcctaaaaggtctctgccactaattatttgttgaaatcttatggggctgaaaacatggcatttaataactatgaatatcatatgcaacctcagtaaaataatgtttctttttctgcattcagttctcttgcaactagcaagtgaagccttgccaaatgacatgaccttggctcttgcttaccttcttgccttaccacaagtaagtttgcccttaccaatgaagaatttaaaatgactaaatggaaaatgtatgctgtgaattttcatcggtaaaattgt

SEQ ID NO: 25444 - DNA, 1041 bp, Homo sapiens
gtgattctcctgtctcagcctcccgagtagctaggattacaggcacgctgcatgcccagctaatttttgtattcttagtagagacggggtttcaccatgttggtcagactggtctcaaactcctgacctggtgatccacctgcctcggccttccaaagtgctgggattacaggcatgagccaccacgcctggccgcaaaataattttattgaatactagacattatgaatttttccttcttgtatgctatcatatttttgtatttttataaattttcttttttaaaaaattaagtcttattttatatatttaaagtatacaacaccaagtgatgggatacatataaatagtaaaaaggttactatggtgaaacaaattaacattcatcatctcacatagttatctattttattttgtttgtgtggcaggagcagctaaaatctactcttttagcgtgatcccatatacaggacaattttattacgtatagttctcatggtgtacagtagacctctaggcttgttcatgtacatatctgctactttgtatcctctaatctgcatctccttatttgtcccctccaaccctttatagtaaccactgttttggtgtctatttctttatacttgatttttaaaaattttacatgtaagtgaaaacatgcaatatttttctatgtctgatttatttcacttagcataaatattcttgtacttttttctgggacatggttaatttacttgcaaacagtttaatctttttgctttttgcagttgggatggaggaagagctccttctagggctaattattccccataactgagctaagactctgcttaatgcctgtgtgtcttgaggttttccagcatgtgtgagcttgacatgttttctttttccccttttcttttcctagcctcaggcagttttattgtaggcgtttatggcttctacttgtctgaatattcgtggggacccttcgtagatcttgggaatttcttccagttctgctatgtcttccctggtgcttcatcctgcatgtgc

SEQ ID NO: 25445 - DNA, 1066 bp, Homo sapiens
ctgcctcggcctcccaaagtgctgggattacaggcatgagccaccgtgcccggccgggtaatattctttaatatataatgaaataaaataataaaacctgttaccctacagattactagtttttcgtattctggctgactggaacttgaactattcctggccctatgtgaggtccagggatgttctttctgctcctttggttggtttccccatccttgtgtgatttcatcacaggtacacactgagcagtgcttagtcaatgactagagggacccctcccaggatttttggagctttctttctcagtgcacgttcttctctgatccattgtctgtaaattctagctactctggctctctgactttcaaactctgtctctgcagcccagaaggcctgccaggctctgtttagagttccctttttatgctgcagcctgtcacttctcttcaggcagtgagcgagggcgctgctgggctcactttgtttttttcccttcccttagtgtcgttatcctgcagtgcctggtgtcctgctgtctatttttgttgttgatcgtggtggtagttttttagattaattcaagagattcattactgttcctgttactccatacttcattgttgttcaaagcagaagttctcttttagtgttttaaagtaattttcctgagctgatcttttattagtctgttttgtgtaggtttgttcatctcattagttgagttcttatccctgttgtcatggagcctattctgtcttttcccataacatatgatttatttaatcaaaatacgagctccaccagccacctcatggtgtgtactataaggttaatgtctctatgcagttgattaaatggatttcagaattaggaacaggtgaaaggctttccttaatctggaaattacagaaagtgatcgagaaatgtagttgaaatacagtatattttaacacatggacttttcattactgcgaacaacaaataagcaaagctgcaatgtattgagccagagatgttctttttccaaattgccatcccagaggttgactgtcagccgcaggtgttt

SEQ ID NO: 25446 - DNA, 1050 bp, Homo sapiens
aaatagtttactagtacttcatgtataatgtaagaacttaaaataatgtttttccattttcctccttctggcttttgcactattgttgccatacatttaacttttacaagcatgtgttatgaactccgtaatacatttttgttatttttgctcttatcagtaattttttaaaattgaaaatgtattttgtttttacacacatatttaccatttccagtcctcttcattgctttgtgtagatacaatttatatctagtgtcagtttccttcagcctgaaacactttctttagcatgccttgcagtgctgatgttgaattctctttgcttttatggatggggagaaatctttgcttagttttggaagatattttattgagtatagaattctaggctaacagttgtacttgtttagtacctcgttggagctaccctgctgtcttctggcttgtattgctttaagcagaagtctgctgtcattctttatctttgtttctctttgcatgatgtgtcttgttttctttgcatgcttttaagattttatttataactagttttgagccattttattattatatgccttggtgtgttcttctttgagtttattcttgttggttatcaagttccttggatctatggacttcagagtttcaccaaatttaggaaatttatggtcattatttcttcaaatatttttttcccttccttgtttctccttcccaatacacacacttttttttttctgggactcctattatatgtatgttgaccatgtgatcatatcttacagcccattttaaaaagtttcttttttatactgattttattttggattgtttctattactgtgtccttaaatttgctattcttttcttctgacttgtctataattgatgccttcagtgtattttttttttaatctccgagactatgtttttcattcctagaagtttgatttgggtctttaatattctgtgcctcttgttctcatgtcattggtgtttcttgatctgtttcaagaaattgatttttgttctggttataagccataa

SEQ ID NO: 25447 - DNA, 1029 bp, Homo sapiens
tggaatacaaacttatgtcttcattgtcattttattttctttttcacacatagtaggtgttggactaatcttaagtagatgaatgaagagtaagtgggaagatggcagttgatgcgatgaatcttgatataatccacagctgttttcacaatttcaccagactgtgagttctttgagaataggcactgaatatgtatttcatcacagactctcttaggcttaacataataaataataataaatatttgtggaatgaataagcctttgaaatgttgcttttatgttgttggaggcagggatttcattatatttagattttagtggtaaaaacaattagcaaataaaattctcaagtctaaagaaaacattactttagccgtaataggttttctgtacaaaacctataactattcttagaacatcctcctttgggttatggctgcagtataaaatgatggcatattaggctgttttcagtaatgtggtagcatgaatatgtcgggtggggagacatgataccttactgaactcatcataaggatcacagctgacagtcctataacaaaagacaggttaacaagagaaaagcataacaaatttatttaaaaacaaatgattttccttgctaacttgaatttggaatggaagatgtaaagataaatttttaccttctcttcttgaccaggcactatagttagagatccaggaaagctgactttgtttaaaaaaaaaaaaaaaatcaaagaacttcttacctttctttgcttgccttttgtcagttgttccaggattttgtctgcaggttccagagcaagtcaggtgtctcagctgccccactttgggtgccagaaactgttggggtggaaaggtgtgatacctcttctaacccatcataagaggacacagccatcactcctataacaaaagacaggttaacgagagaagcatgacaaatttacttaatcaacattttacatgacacaggcaccttcagaaatgaaggctctggttgggtgcggtggctcattc

SEQ ID NO: 25448 - DNA, 1094 bp, Homo sapiens
catatacctctaaacctaaaataaaagtaaaaaaacctaaaaaacaaaacaagtttcacactaaactttttttttttggccaaaagatgaatatacctgtgcaagaatttctctatagtttccttggagcagtttgtgggatagttagttgtgtgcatttatttgatattgtcaagttgctccaaaatgattgcttcaatttgcaatctcgctagtagtttttaagagttactaggcccctaaacattctagagggtgattggtgtaaatctgtgttgttttaatctgcattattggcttttggatttctttttttgtgatttgctgttgcttatcctttgtctactttccttttgaactggttttgggagatctttataaattctgcctactaatactttgttagttctgtgtgttgtaaataacttctcccagtctttttttttttttttttttttgaaatggagtctcactctgtagcccaagctggagtgcagtggagcgatctcggctcactgcaacctctgcctcccaggctcaagcgattctggtgcctcagtatcctgagtagctgggtctacaggtgcacgccaccacacctggataattttttgtattttagtagagacggggtttcaccatgttgcccagggtggtcttgaactcttgagctcaggtgatccacccacctgggcttcccaaagtgctgggattacaagcccagtcttcattttatggatggaaattttaaattttaatatggtcaaatttgagtgagaatgtcttaatgatggcagggtaggaaaatgtttacaggtcaagatgcacaaagcccagctcataagtgaaagcttgatgagcatgaactgagttggctcttcttagaacttattttcttatgggaattctgtgtttttctagtttcattaaatcagtttgttcagttccatgaaaaattcttacaggatttatgtgaaattgcattcaatttgtaaattaagaggaattggcatgtttaaaatacccaccaaagaagatagtatctctccgtcttcattcatgtaactctcacaagcttgaaattttcttctcga

SEQ ID NO: 25449 - DNA, 1023 bp, Homo sapiens
gctcgacagcttcaagttgagaccatgaatgttctcaggcagcaatccgcatagtggtatgaatttctccagaggtcctagtgaatctcagagacagttgcatcaatgcagagttcaggctgaggaaaatgcaacaaaaaaattagcaagagaaaaacttaaggacatgacagagatgcttgaatggatggaccctaaagcccaggttgaaaaaggaagaaagaaggaaagaaggagggagggaggtggggagggaagacgggacggagggagggagggagggaaaagggaaggaaagaaaaaaagaaggaaggaaggaaggaagaaagggagggagggaggggaggggcagggcaggagggagggaaggatggcagaatgggtttcataagggtagcagggtcaaggcacagttttgctgcacccaacgatgaggggtgaaggaagaaatgagatgtgtgaaatgcagaaggctatgggctaagagttgtgtgttcgaattgagaacttgaaggacagaagctccaattgatggcaatatccaagtgagactaactgtgaccctgaggggcaaggaggatgctgtcttagttggtttccctagaagcacagcctgagaccaggactcctaggaaagtgattattgagggagtgctctcagggtagtgaatcaagcaggatggggctttgcctggacccaaacttcagttccggagcccaaattgtgctatgaaatgggcacagttggctctgaggcagggacaagccttttgcagccccacgtcagccctctgtcagtcactgccacaagctggccctgtgtggtcaagggaagttctggagaaaaagggccagctgtgagtagttgctggcccacacttacagcactttgggattgtcacccagtgtggaaaacggatctaaggaagacaccaccagcatctaccacagatgcaacccacccctaatctgacacaggtgggttcagggagagtcagcagatgccacaaaagaagcagctgg

SEQ ID NO: 25450 - DNA, 1035 bp, Homo sapiens
acaaattgggcactgggctaacttactacagaaaacctactctccatctgctctaaaagcttaaaattataaaactgcctcgaaaagatcacgctaatttacatataacttacctgcctgtcaaaactaatctcagcactctataaatgaagacaacaaaatacagacactctaatgcaacattcataatgtccaggaaccaataaaaattattacacgtgtcacgaagcaggaaaatgtgacccataatcaggtgagaaatcaatccataaaagctctgaatagaagaaaggaagagctagaagtgatggggagaaacgtggaagaactaagagaaagaaaagcagccgctgacagccaggaaatggcccggactgcccaccgggccttggtgctgccgggagctggcccagccctcacagtcaggtctcacaccaaacataaccaatgtcacaaaatgccagtgaccatgatggagcaaggcaaaaacaagaccactctgtcattaagtctgaacacagacacaaaacaccaagcatccctgcttcctgctatggtgagtgaccactgcttcttcacccgttaagagcattgcattggtctgtgtgccctcctcctaggtatctaatcatagaagtgtccccactccctgacagtaaccaatccacagtaaacctctgcttctccgaaccctccccaaatcaccctcccaaagtccagatcctagaagtcctttctaacaccctcctgctgaattgccccaagattccctcactgcaagcagtaataaagtcaacttgtgtaagtgtgggtatgtccttggggactttggctgaagggcattgacaaggattagagagaaaagttttggagaggaagggttttggtggccaatgaggggaaatgacaagaagtcaaagaggagaaaaaacttggaaaaacctactctgtagggagcttatagagagaccttggagggagccaagttaagtgtggaagatggacaaaagattaaagagtgagaaagatgagaaa

SEQ ID NO: 25451 - DNA, 1027 bp, Homo sapiens
acaatgtacagaacataagcgagcaagaacttttgaatttccagttaaaaagcataggatttgagacctacctctgacaggcaaaatatctctacttattgggtctcaatttcttcatctacaaaacaatattattaccaattcctacctctcatggttagagtgaggctcaaatggtgtctttcatacattatacttactgtggttcaggcatatagtaagttctcataaattagcaattattttcttcttcatatctcattgtttgctcaatctactgtaatctggatgtagatgacactactctagcaaaacttgtttagcaaaggttataaatgagctttaatcttaccttattttttgaagtatttgacaccacagacctatcctccatcccttaaaatgtcttcttaccagctgccaccctctctttcctggttttcctgtttttctattatttgttcttaatctgccaagctgcctcccctaattctgttgcccttaaacgtttgagatctttgtttgcttgttatagtgttgttgattttcctgaattccatatcctacttccccctacaaatatacacatatcacagtccccaaaactactacctgcgtatggacagatacctatcaactcatagcaccacatcctgacatctctcctgtactctagacccagatgccctactacctattagacatcacctggtaaaccaccaatatctgaaattcagcagccccgaggttgaaagtgccttcatctcaaagcctctttcttttcctgaattccctaccttgattaatgcaaactgtcatttccagcgcagtcacctacctttgacatctgtgatttacctttgattcttccttgttcaagtctgacctctgtccgcttctcctttaagaccgctctttggtctctgccctcttctcctttctcactgatattcttcctctcatccccttatcttcgcctcatacctgtggtgatagcctcttctccggactcccaggcttgcatgtg

SEQ ID NO: 25452 - DNA, 1096 bp, Homo sapiens
tctagttatcattttgtctaaccattttgtctttttttttcattttgcttgattttctcatttatgttctttatttccatctatgtgttttccacatttctcttttctcctatgcatcttctcattttgtcttcatatctgtgtgtgttctttttaggaggaggttctagccctcctaccttcccgtctgtgggttctcttgctttacctactcctcttgtttgattattaccttcttttgtgtatctattctttcagttcttttatgtctgctttgaggtattccttcctggtagcacttgtctaatgttcgtgtttgtttgtttgtttgtttttattctttaagacaggctcttgctctgtcacccaggctggagtgcagtggtacaatcatggctcactgcagccttgaacttctgggttcaagtgatcctgtgcctcaccctcctgagtagctgggaccacaggcacatgccaccatacctggctaatttttattttattatttgtagaaacagaatcttgctatattgtccaagctggtctctaattcctggactcaaacgatcctctcatcttggcctcccaaagtgctgggattataggtgtgagccaatacaactggcctcttgttttgttttaatttatggtgttcaattataattttcatctgctttgtggcaacactgttctaataagttttctttgtctgtaggagagttttgctgttctttttcatattttccccataaatatctggatgctgtgccagcgcgttttttgttacttatttttttaattagttgaattttcctgggccagttatttgaaggagaatgggaagggtagctgtgggagcctcgaccagggttgcctttcatgctaattcagttataggcttgccacagtaataggctgttgccttttgtaatagcactctgagtagccatgccatctctgcctctttgatcttatcttgtttaggacaggggagggtggattctaatgctggcttgagttctttttttcttttattggcatctgtcactgaaggaaacctttcttccagtgtgaccccttccctttttgaaggtgt

SEQ ID NO: 25453 - DNA, 1051 bp, Homo sapiens
cttaggtgatccacccgtgtcggcctcccaaagtgctgggattacacgcatgagccactgcacctggccaactaaatttcttaaacatatggataatatcttatttatgtttgtttacttagcatctaacatattctctggcacaagatatatattgtatagtttggaaaaaatgaatagaatgaaagtcattctttttgattatgatcttaagcagaatattgtctcctaaatatcatcccttctgatttttcagcttgttttcctctacttcctaatttaccattaagagtataaaaatattctagtgttctatttgtatttgatctgatttgcatatagcctatagtttctcctctctcagaattatttttatgtttcttctatttgaaaacttaaagtattttaattaaccttatatgctgtttaaattttatcaggaagatgaagctcaggaaaataaaagcaaaatgaaaatggttgaggaacatatggagcaacaaaaagaaaatatggagcatcttaaaagtctgaaaatagaagcagaaaataagtatgatgcaattaaattcaaaattaatcaactatcggagctagcagacccacttaaggtatatatttttggtactgtgttacgtatgtattttatgttttagttttatatccacatgtactctatggatattggcctaaaagaatttttggttaaatgtaaatagcataaaaattgaatataaagaatggtgggaaccaaactttcatcattagatcaattagtattaaacacttctgttcatggctttaggagaataaatcaccaaatttccatttctcctagaggattatagcttttttttttcacctttttatgatttttaaaaatcagaaccaggagcagagacgtctcgtacgtgtacaatgtctctgtgcttgcttgttgtcccagctttgcttcaataactcaaagattagttgctgtaaaagccaacttgaaataaagtactactcatctcttgtttgtcagctatctcagttatgtttcaggctgaat

SEQ ID NO: 25454 - DNA, 1050 bp, Homo sapiens
gccaacatggcgaaaccccgtctctactaaaaatacaaaaattagctggatgtggtggtgggtgcctgtaatctcagctattggggaggctgaggcaggagaatcatttgaacctgggaggcggagattgcagtgagccgagatcatgccactgcactccagcctgggcgacagagtgagactctgtctcaaaaagaaaaaaagaaaagaaaatttatatagcagtaggatatcagtgcttctgaagttctcactgtactaaagatagtttaaatacaaggagtagctaggaatgaagataataaagtaggtgtttggtaatcaagagaggtgtttgataattcagagagcaaatatatgtagtcatttaagaaatgttttcatgaggtactgtaacttaatgccaagtaatcatactagctaatgaaataaaatattcattagctacattatcagaggccagccgcccttcccctcatacttcagtggttctcaaccttaaccgttcattagaatcaacttggggagcttttaaaaaatcccattaattgatttttctgaggcataatctgtcttaattaggtaatattgtttttatagaaaaaccacaccaatttattcaaggtagctctaggaaaggatatttaccataaagatgcagggatatatattcatgaaactgcagagaggaaatactgcggggtctcttgagggaccagactgagaccctgtaagaactgagtcacttctctctctggggctttcttttaattgcatctctggctgtctctgtgtgtcttgtctctggacctctgtcttcctctccctcccattggtttgttctgcaactctcctctgtgcacctccctcacaatcctaacttaattggctgtacttctgtgtgtgtgcactatgctctcctgtctctccttgtgaaaagtgtacaggtaagtgagtgtgtttctctccatcactgtctcaagtatgtgtacttccttattttttgctaatctttgttgctgtgtgtctttgcatgtgcaggcatttata

SEQ ID NO: 25455 - DNA, 1032 bp, Homo sapiens
ctcggctcactgcaacctccgcctcctgggtttaagccattcttctgcctcagcctcctgagtagctgggactataggcgcgcgccaccacgcctgactaatttttgtatttttagtagagacggggtttcaccatattggccagtctggtctcaaactcctgacctcgtgatccgcctgccttggcctcccaaagtgctgggattacaggcgtgaaccaccgcgcccggccattaatttttcttcttgaacttattattttattgataatcttcattgttcctgcttgtatcctgtaagggagaaatgaggtgttctttaattctgttttttttaaattataaataagtaaagaaatattaaaaactatgacgagctttatggataaattgaaaatcccagaggaggcttttttctcctttttttattccagcataattaaaatatttttctttgcatctgtaaatatgtttctttagccttttggaaacaattttactattttaatctgtatctgatgctctagacattcgaatctgtgtttgaaaatccatcatcattaaattacaaagtgattcctattttaaaaggtaggatccttcagtgtctgttagatgcaagttaccgtggcaacctaatagcaaactgcaaatcccaggtcatgctcagcaaataaaaaacattctcagcaaataaaaaacatcgtcatcacgtagtgtttgggtgtactgtcttctatatagaatctcacattccttgtgagaagcgtatcacattttccctagtgcgttatccattagcttatgtctgagtgcttgctaactgcatgatcatgtgttaggcattaataaaaacagtttctaaaagggcattaaatgttggggacaccaaaaagtaatgctttctgtttgctcttctataataaataaattactgctcagtaactgagaagggaatagagggtggttagcagagaagaaagtgttggaaaaataatggcctggtagtatctcagggaatttaaattaataa

SEQ ID NO: 25456 - DNA, 1076 bp, Homo sapiens
agtgattctcctgcctcaacctcctgagtagctgggattacaggcatgcgccaccaagcccagctaatttttttttgtatttttagtagagatggggtttcaccatgttggccaggctggtctcgaactcctgacctcaggtgatccgcctgccttggccttccaaagtactgagattgcaggcatgagccacccgcccagccaataatagaatcttttttttaagtttaatgaaggatagacgagatgaaggacagattaatagccaatttcactctctatgaataattaactgtcaaacttcagtttatgccagtaggaacctgggcgttaaagaggtttaactgggttttgacaaacctggatttggatctgagctctgctatgttagagctatagaagcctttgtatgttagaactaagttgtagctacataaattcaagtcatttacttgtgcctcagtctctccttttgtaaaaataagggcaatatttatctcataaagatgttggggatcaaaggaaatagaaagtgttcatctcaaaagctaagtatgtagttattcagcagatgttaattctactcacccatttgtactcaccaattctactaattcagtcttttaaatctcttgttttatctcttccctttgtccctgatattaccactgcttttgtttagcaactcatctcttctgctactattcttactttctgtttcatctatcttctatattgagccacaggatgttttcagtacagaaatctaagtgttcagattttattaactgaaatgctgtgctttatacttcccggttttgctgatcctgaaattttagatgggtggacttaatgaataagtctcatataatttcgtgatatattccaagcagtgtacttaattaagcacattcaaaatgaagttgtttaccatagaataaatgtctgttgtgataggcagagtagaattgaggatgtggtaaacacaggccagggcagattcagaagtagtagtaatttgcctttttaaaaaaatgataacacttttttattaaattctaattctgttatgtgtg

SEQ ID NO: 25457 - DNA, 1077 bp, Homo sapiens
ccttctcctttgaattatgaatgttcttaatggcatctagaatggttaatactttcgcagaagattgtcaatttattttgcccagatccatcggaggaataactgtggcagctttagccctaggaaatgttatttcttaaataataagactttaaagtcaaaattactccttaatccatgggctgcagactagatgtatcagcagacatgaaaacattaatcgttttatacatctccatcagagttcttgggtgactatgtgcattgtcaatgagcagtaatattttgaaaggcatcttttctaagcaataggtcttaacagtggacttaaaatttcagtaaaccatgctgtaaacagatgtgctgtcatccagaccttgttgttccccttatagcacataggcagagtagattaaacataattcttacaggccctagaatttttagtatggtaaatgtgcattgacttcaacttaaagtcaccagctgcattagccccaaacaagagagtcagactgtcctttgaagctttgtttccatgcattgacttctctctagctataaaagcctcagatcgcatcttcttccaatggaaagctattttgtctgcattaaaaatccgttgcttagtgtattagtccattttcatgctgctgataaagacgtacccaaggctgggcaatttataaagaaaaagaagtttaatggactcacagttccacgtggctggggaggcctaacaatcatagcagaaggtgaaaggcatatcttacatggctgcagggaagagagaaaatgagagacaagcaaaagaggtttccccttataaacccaccagatctcttgagacttattcactaccatgagaacagcacaggaaagacccatccacatgattcaattacctcccacgggtccctcccacaacacatgggaattgtggaagctacaattcaagatgagatttgagtggggcacagtcaaaccatatcacttagtgtggccaccttcatcaatgttcttagctagctcttctggataacttgctgtagcttctgcattagcacttgctgcttc

SEQ ID NO: 25458 - DNA, 1077 bp, Homo sapiens; identical to SEQ ID NO: 25457

SEQ ID NO: 25459 - DNA, 1013 bp, Homo sapiens
acaaatgtcaccgtcaatgtgttgcatcctggtattgtacggacaaatctggggaggcacatacacattccactgttggtcaaaccactcttcaatttggtgtcatgggcttttttcaaaactccagtagaaggtgcccagacttccatttatttggcctcttcacctgaggtagaaggagtgtcaggaagatactttggggattgtaaagaggaagaactgttgcccaaagctatggatgaatctgttgcaagaaaactctgggatatcagtgaagtgatggttggcctgctaaaataggaacaaggagtaaaagagctgtttataaaactgcatatcagttatatctgtgatcaggaatggtgtggattgagaacttgttacttgaagaaaaagaattttgatattggaatagcctgctaagaggtacatgtgggtattttggagttactgaaaaattatttttgggataagagaatttcagcaaagatgttttaaatatatatagtaagtataatgaataataagtacaatgaaaaatacaattatattgtaaaattataactgggcaagcatggatgacatattaatatttgtcagaattaagtgactcaaagtgctatcgagaggtttttcaagtatctttgagtttcatggccaaagtgttaactagttttactacaatgtttggtgtttgtgtggaaattatctgcctggtgtgtgcacacaagtcttacttggaataaatttactggtacaaattcttaactgtgcatttctttggaggcttcactgaatacagtcctttatcatgtcaccattagcctatgctgatcttggtctgcccagtctcttcttgccacgtatcttgtacactgctctgagagataatattcctaaaacccaaatctatcacattcctgcttaaaaaacagtgggttttgagccttaaaaaaaaaaaaatttggcagaattctttcttcaaaagcggtgtttcactgaaacgtagaagc

SEQ ID NO: 25460 - DNA, 1059 bp, Homo sapiens
aattagatgtggtgacatgcgaaaagcacaaagcctggctcctatcaagcttctgcatctatttttttttctatttttctctcaattattggaagctcatagaagcattttgggatagaattttagtagtttgcaagtatttttaaacattttatcataggtacacttataattttgatatgatctcagtattaacctgataactcccaaattgatattttcctagttcaactgaaattaaagggagaaatatgggattgtaggagtgccttgtcctcaaattgactgtatttctgttttgagaaagatcttggtactgatcacgtagtcaactttctaatgcaatgttaaagtttatatatttgtaaatgttattgttataaaagcataaaaccagaaattaagtcttagatttagtttctacatcttttattggaagatgactgtagataaatatctttctgtatatcattttaataaatgagaaaaaagagctgttgaatgaaagatcatgaacatcagtatttatctgaggaacatcctgcggaggaatccctttccccatttattaaacacaaaattgccagtgtttcaagtagttctctgatcgatagaccaacaactgaaattaaatgcttttagtctcaagtgcccatttttattaaaatgtaattatcatgaacagaaaaagcaatacaaggcgtgtgttcttaataattctgccattctctttttgacatttaaaggaagagcctaggctggatgtcttgatcaataacgcagggatcttccagtgcccttacatgaagactgaagatgggtttgagatgcagttcggagtgaaccatctggggcactttctactcaccaatcttctccttggactcctcaaaagttcagctcccagcaggattgtggtagtttcttccaaactttataaatacggagacatcaattttgatgacttgaacagtgaacaaagctataataaaagcttttgttatagccggagcaaactggctaacattctttttaccagggaactagcccgccgcttag

SEQ ID NO: 25461 - DNA, 1059 bp, Homo sapiens
ggctgcggaactcccgtggaggggccggtgggccctcgggcctgacgatggcagtggccactgcggcggcagtactggccgctctgggcggggcgctgtggctggcggcccgccggttcgtggggcccagggtccagcggctgcgcagaggcggggaccccggcctcatgcacgggaagactgtgctgatcaccggggcgaacagcggcctgggccgcgccacggccgccgagctactgcgcctgggagcgcgggtgatcatgggctgccgggaccgcgcgcgcgccgaggaggcggcgggtcagctccgccgcgagctccgccaggccgcggagtgcggcccagagcctggcgtcagcggggtgggcgagctcatagtccgggagctggacctcgcctcgctgcgctcggtgcgcgccttctgccaggaaatgctccaggtgtgggcctcggggggccgggctggtggggagggcctgggcacggtgtgggaggggactgcgggctggggctgagccgcgagggaccgccctggggttcagggtgtcaccttgggaaccgctgaggctgagaggagtccaaaaagccactttgaggcggccgggaagctgcagggttgagagggaaagagaaactaactgggagggctgccttctgtcctctaaggatgtcgaaaaagaaatgggcccaagagaaaaataaataaaccagtttctgaacgtttcatttcgttacgtgaggaccgccccgaagtagatccatggcctctgaattgtttttcctgtgtcagaagtgaatttgcaccaagctgtgtcttcagaacccctgagcactgggggaagttgctagctaaggacctcatatcagtcctttaaaaaaagttctccttcccccggcctctgccccttttctgctggggtaaggagctcgctgccaccagtaaactcagcaccatccttaacgggactgtggcctgatttccaagtagaatacattttggaacccagtggtcatgctccatacagagacaggaataaaaataacacccagcattattga

SEQ ID NO: 25462 - DNA, 1049 bp, Homo sapiens
ctgagcaatggcgggtgcccctcccccagccttgctgccgccttgcagtttgatctcagactgctgtgctagcaatcatcgagactccgtgggcgtaggaccctccgagccaggtgcgggttataatctcgtggtgcaccgttttttaagcccgtcggaaaagcgcagtattcgggtgggagtgaccggattttccaggtgcgtccgtcacccctttctttgactcggaaagggaacttcctgaccccttgcgcttcccaagtgaggcaatgcctcgccctgcttcggctcgcgcacggtgcgcgcacccactgacctgcgcccactgtctggcactccctagtgagatgaacccggtacctcagatggaaatgcagaaatcacccgtcttctgcgttgctgacgctgggagctgtagaccggagctgttcctattcggccatcttggctcctcccctgcacttttcaaataaggtaacattggaggaaacacagagttcatgactctatgccatgcactgtgctaggtggtttctcatgcactttctctctttctctctctctcttttttttttttttttgcttttggctttaactaagtggaataaacaaaacaaagaatccattagagagcacttgtgagatgggacaggaaaagtttgcttttataagggaagaggtaaagggaagtatttgccaccagggcagggatttatttactctgctagtggttctcagattacacccaaggggtctgatgcctttgcaaggccctgcaggattctgtgtacatgggtgggacccttggcactttgaacagagccagggggatgatttctataaatgtttagggcactctcatttgtgaaagaagaaacaacatgagaaggcataatctctgtcaagtcataagctcgcaggctggctaggaagaaaaggaatgatatgtaaaagattaagggtattagacagcatatggctgtgcgtggcacaaacattcagggcccaggagaattggtagtttctacaagctgggggtccaggaagcc

SEQ ID NO: 25463 - DNA, 1041 bp, Homo sapiens
taccacccaactcttctcattaaaaatgacagagataatgagactctaatgaatcactctctaagcatcaaagtcacagtaatcaattataactctatgtcactaggacaatgatctctgtgaattggtgatctttacgtaagcttgttaagagatccattaggagggagcgtgtactctctccctcctttgatatattatcccagcaagaagcaacttgtgttaactcacgatgctttaagctgggagtcacagattggcaatggggagcaaagcgaacctctaggattcaacaactgcctgggagaagatattagacaaagtggaaaggcattttctccctccacactgtgggaaaagctgagatgtttgctgcttcactttctttctctccccgaagaatctactcttgcatctcatcctggctcatctcttacaagggatgagacagacctggtagcagtgttggggtggacgctgagtcagctagctaggatggtggtaagtagcctagagcagatgaaagattatgatcctggtcaaagaagagatcccagtggggttggatttaggaggtaagttctctaggactcagacaagtgaatggggtcagtcagctattttgattttggaagtgataagagaacacaggactttgatctagaacagggaagaggtgtccagaacttccattagtgaagtggtgctcttacagtgtaatgtgtgtgtcagttggaaatgcagaaatcacccatcttctgtgttgagcaggctgggagctgcagactggagctgttcctattcggccatcttggaacgccctggaaggtaatgtgtgtgtcaaggcacagggttggggttgacaccgccaagcagcagcaccttggtgtgcactcctttctgctgggtctgctgtagagtgtggcatgggtactaccgtctccccttctctggaagacctcaatgcgtacttttgggaggaaggtactgtagggtatttctgcagcaatctgcactcagaggaatccccagagtgatcac

SEQ ID NO: 25464 - DNA, 1030 bp, Homo sapiens
tagccatctgtgttttaacaaggcccctggggagtctgaggcacactcaagtttaagaactacttccagttcatctggcccagcatctaattccagggtgcttttccatttcctgtgttcctctccctcttcaagatgtggaccctgaaggcaggagccatgttggttgtctgtctggcactcagaccagtttcaacagggtgattgacgtcccagggcaactgatctgttttccttacccctccctgccctatacaagcacaagggagtctggggagaaggacagtggaggaaagggccgatggaagatgaccttcttgttttcccgagtcaagggtttgaggtttttgtgggaggttggggtgcattatgctgcttctctcaaattggagaccattgttaccatgtaattttatgttgtggcctgacttgatccagaattctgtctccaatagttttacgtgggttttctccctggaaaaagttattacgattgagcaaataaagcaatgttggctaactgttcccttttctggatcgacatgtccttcatctgggtaagtggcagtggccagctcctctggcttgcaggaccagcaaggaagattttcagacgtgactaatgtataggctccttggacttcctactcatgaactctcataaaatgtgctttgttccatcattgtcaattaacacagcagcgagcagtgctgggctggggagcagccgggcctcgcctttagtgcacttcctccttggctggctgtgagctttcagatagccagacataattccttttgagctgcttaatggacacataattttaatcagtcataggacacttgagcgggaaggaactggagaaatcatctactcctttattttacaggtaaaggttccggcttaaaggttatgcagttggttaacagaattatgaccagatctagcccttccggttctcagtttaataatagtgacttccagttagtgaagcatgccccggtgtacacttattttcattaatcctga

SEQ ID NO: 25465 - DNA, 1024 bp, Homo sapiens
tcaagtctttttaagtctcttctccaccttcccctctttatttgttgaggaaaccgattcttgtgtcctttgaatttccgtgttttggacttgctgactgaatctcttctgtcgtttaatgtggtcatctgtctcatattgctgtgaattggtggttaaaccttgaggtttgatccaattgaattcagattcaatatcatggcaagaatactttttaggtgggtgtgtgtactttcaccaggaagcacataacgattcgctgactttctctttgtgatgtgagcggcttcacctgttactgtctgcttgcccaaagcatcttttcggcttgtgcctggatgtgtagcatttgtttttactccaagtcttgcctcgactgggcttgttgatggtatggagtggatcaggatgagaaaagaacagaggggttggttgaacagctttttgaatagttgtgagttgtctgttgtggatttgagttttctggacaggatgccagcttgtcttttgtatgaggcttaactaaacactaaggacttgattcttaccctgtttgttacgctacatggaattaaaccagaaagaaaattgccttctcatttcaataacacacaagaataataatagaagtttctgaacaggcaataagatgataccatctactttcctcagtgcacctcccccataaaaaagataagtaaacatagaaagcgaaactattcatgtttcaagctctaagagtagacttacctagtagattttaaaaagtatttatcagcatcaggtatgctgttgctgtctagtcttgttattcttccttctttgcacctctcagcctaagaacacaagtgtctgtagcatatataatagctatgccttaccagcacaggaaagacagtttgtcatagcgcagtagaagggagttcatcatgcctgaattccagtcttggcactgccacatggctaatgtctcagcctcagtttttcatctgtaaaataagcttttgataaaattctaggaact

SEQ ID NO: 25466 - DNA, 1016 bp, Homo sapiens
agatctactctctgctagcactctgcgcatgcgccagcagagcctttgggacttgttcaaaagctttcattaaacttaaatctttagagaccctcagttcagaacagaaacagcagtatgaagaccttgctttagaaatcttcaccaaacatacttcaaaagataacagaaaacctgaattggacagccttatggaagggtaggctaattttaattagtggatgccattctatcttattagaagcttggatttctagatgtacaatgtttaatgtaggaattaaagcactgaattttgaagcaattcacattaacattataccctattttatttatttttacaagtgtattcatgctttattttgtcattgtaagaaaggttttttcttgaaataacttttttaaatgaaagtatttgatgttcatctcagaagttttattctttaggttttttttaagtgtattaaataaagttagactaatgagaagttttaaagtataatgaattgtttctccccgttttacagtggagaagggaaactgccaacatgcgttgccacaggaagcccaatcactgagtatcaattctggatgtgcagtgtatgcaaacacggtgtccttgctcaggaaataagccactacagcttctgccccttatgccatagtccagtgggataaaggaatgataaactgtatataactgtaaaatatatgtagcatatatacatggctatatgctgtatatgtaataaggtttatttctgtgagttttgtatgaaaatcagcctcattatttatagttgaatttttgcacaaaatatatgttaataaaataatttttatggcaatacaactgtgaaataataaggccgattttcatataaatgtatgaaaatcaaccatgttttctctcaccctctctcttttgtttatcttgtttttggttacatgataccatggaaatattccaaataaatttttttctcacagtgtcaaggtaactgaattcattaaaa

SEQ ID NO: 25467 - DNA, 1044 bp, Homo sapiens
atgtggtctctgtcggcccctacatgggtcccagggacccactgggaggtgtttcctagtcaggatacatgggggtcagggacacacttgaggaggcagtctgtcccttatcagagcttgaacactgtgctggttgatccgctgctgtcttcagagctgccaggtagggacgtttaagtctgttggagctgcgcccataaccacccctttccccaggtgctttgtcccagggaggtggaagttttatctataagtccctgactggggctgctggctttttttcagaggtgtcctgcccagagaggaggtagtctggctgcaggggccttgctgagctggggtgggctccgcccagtttcaacttcccagcggctttgtttacactgtgagggtgaaaccgcctactcaagcctcagcaatggtggatgcctcttcccccaccaagctcaagcatcccaggttagctcaaactgctgtgctaaccatgagactttcaagccagtggatcttgagcttactgggctccatgggggtgggacctgctgagccagaccccttggctccctggcttcagccccctttccaggggagtgaatggttctgtcttgctggtgttccaggcgccactggggtatgaagaaaaactcctgcagctagcttggtgtcagctcaaacggccgcccagttttgtgctggaaacccagggccccggtggcgtgggcagcgaaaggaatctcctggtctgcaggttgtgaagactgtgttaaaagtgcagtatctgggccggagtgcacggtacagtccctaatggcttcccttggctaggagagggatttccccatccccttgcatttcccaggtgaggtgacgccccaccctgctttggctcatcctccttgggctgcacccactgtccaactagtcccaatgagatgaacctggtacctcagttggaaatgcggaaatcacccaccttctgcgtcaatcttgctgggagctgcagaccagagctgttcctattcgtccatcttgccagccaaggcc

SEQ ID NO: 25468 - DNA, 1022 bp, Homo sapiens
aataagcagaaaattatttgaaaaatgtttgcatatgttactttccaccatgtttctctagaaataatagacataaatgataattgaattgtgattcaagactagtttgtcagtaatttgcaatatgcacttatgtttttgtttcttttaaaataaaggcgcctactggctgaagcagctcttcagaaactggatctatacactgcagagcaagcatttgtgcgctgcaaagattaccaaggcattaagtttgtgaagcgcttgggcaaactactgagtgagtcaatgaaacaggctgaagttgttggctacttcggcaggtttgaagaggctgaaagaacgtatctcgagatggacagaaggtaagttatgaaggcgcaggcatccctgagtactctatcagttcatcattgtattttttacaaatggaaactataaatacgttaggtgtatcatatggttccttttagaaattaattttaagtttggattacaacctagatattctacatgcctctcattcatttgtgtttcatagtctggaggcagttttcttctctgtttttacatctaataatggctgactctgggaggtttttttttcatttgatgggaaaaaatgatagaacaacagagactgggatcttttatatttaagacatagctcattattccagttctttctttctttgtttgtttaggccattatttaattttatgttgtcaagaggcataaaataaaaatcagaagtcgttagggatcgagattagttctttatatttcgtttttgatttatataaaataatgtatgaacttcataaatatttcttcttttgaattaaagaactgtaaggcctgtctccctggccaggaatcaaacccaggcagctgctatgaaagcagataatcttagccactgaaccacaaggcggagagtctgtctgaacttcatttcagctgttaagattgtatctcatcttcattaatgttatttatactcccaggagatctctaatatgac

SEQ ID NO: 25469 - DNA, 1025 bp, Homo sapiens
actgtagaaatgtctatttgtatccgttgctcacttttaaattgggctatttgtctttattattgagttgtaagagttctttatattttctagataaaatttcttttcagatacacgatttgcaaatattttctcccattctatgggttgtctttactttcttgatagtgtcctttgaagcccaaatgtttttaattttaatgaagtctaatttatctaatttttcttttgtcatttgtgtttttggtgtcatatctaagaagccaattattgcctgaccaaaggtcataaaggtgtattcccaagttttctttaagtgtttatggttttagcatttgagtctctgatttattttgagttagtatcgttgtatgatgctacaagcttttgattcttttctgatttcagagactgtgtatgggtattttgagactatgtgggggtatattgtctataaaatgaggggttgaactccgtgattactaaaggcctttgcagcacaagcattctgcaattctgtgtaactgtaaattatcttaatgttatttttaacagtaccattgtttgttgcaatgaccaaaacccatgtgatagcagcctcgaaagaagcattttatacctggcaatatcgtgtggcaaagaagctcacagcattggaaattaatcagatcacacggtctcgaaaagaagggagagaaaggtatatcttttgatacatactttttagtagctcaaccatatcacattgaagtcagacatagtaattgtaaattgtcatgcttgataactgtagtgtcttgattagtagaaatgttttttcaattaatttgattatctttaaaatttatgtgtttaaatttattaaaataaaagagaagtagaatggtttaataaagtccttagagataaagagtggaaagctgtgtttttataaggaaatggctgtcctcacttaccctccccaccagattagagttaatatgctatactaaaatatgattattcacttgagatcgaaggatcta

SEQ ID NO: 25470 - DNA, 1039 bp, Homo sapiens
tcccaatggccaaagctggagcactttgaataataaaataaatgatgtattattttattgtgacccaaagtataaatgcccaagagttgatgctgatatagatggattatttgaataaataaataaatgggagaggagaaacagatcttccttacagaattattccagtttacttaggtattgccttctccaggaggtggaacataggcccctgttcccctggcttgagtgtggctacacttagtttccaaagagtagagtatggagaggggaaaaaaagtagctttatattggtgaaacttgtcaatcacaccttggccaagtgataaaggttaacatcattaggaatgtcatgtggctatcacatgccccctgatatggcatgataaagaagtgcacttcggttctgtgctagtcttcctaaaaacctgaagtccaatctaagcatgaggaaaacatcagacaaacccaaattgagggacaatctacaaaatacttgaccagtactcctcaaaactgttgaggtcatgaaaagcaaggaaagactgagaaattgtcacaccccagaggagcctaaggagacatgactaaatctaagtatcccaaatgggattctggaatagtgaaaggacattctggaaaagataatgaaatctaaataaagtatgatgtttacttaatagtaatagtaatatagttaatagtgatgttgatttcctagttgtgacaaatgtaccatggtaaagtaaaatgttaacaataagggaaatggatgaggagtatatgggaactctgtgctatctttgcaacttttctgtccatctaaaactattttaaagtaaaaaaacttattttagaaagtaatcaggatacaaaaagctaaacatggtttagcttagtttgtttgaatggtaaacacaatcatgataatatcaacatgatattttatttcatttttatatttttaatataatttatgtatttttatttttttattcaaaattaaatataaacatgttgggagagttagaagggaaag

SEQ ID NO: 25471 - DNA, 1118 bp, Homo sapiens
caaaggattttaaaggagaattaaatctgatacaattttttttctctctttagtacgttttgccaacctatgaaatggccgtgaaaatgcctgaaaaagaaccaccacctccttacttacctgcctgaagaaattctgcctttgacaataaatcctataccagctttttgtttgtttatgttacagaatgctgcaattcagggctcttcaaacttgtttgatataaaatatgttgtcttttgtttaagcatttattttcaaacactaaggagctttttgacatctgttaaacgtctttttgtttttttgttaagtcttttacattttaatagtttttgaagacaatctaggttaagcaagagcaaagtgccattgtttgcctttaattggggggtgggaagggaaagagggtacttgccacatagtttcctttttaactgcactttctttatataatcgtttgcattttgttacttgctaccctgagtactttcaggaagactgacttaaatattcggggtgagtaagtagttgggtataagatctgaacttttcatctgcagaggcaagaaaaatatttgacattgtgacttgactgtggaagatgatggttgcatgtttctagtttgtatatgtttccatctttgtgataagatgatttaataaatctctttaaatacttagggttgtcattgtttttaatccgttacttttttttaagataaaccctgacattttccattacagtgtattcagagtgccagtgtttattttttttttaactttgagaatacagttggcccttcgtatccatgggttctgtatccatgggttctatatccatggagttaatcgactgtggattgaaaatatttggggggaaaaatggatagttggatctgtactgaacatgtacagactttttattcttgtcgttgttctctaaaaaatacactataacaatttatgtagcattcacattatattagatattataagtaatctagagatcattttaaaaatatgggaggatatgcatgggtcatatgcaaatactataccattttattataagggacttgagcaactgtggatttgggtatctggagggagaacct

SEQ ID NO: 25472 - DNA, 1050 bp, Homo sapiens
gcctcccctgccaccaggccacctccccagcattccagcccctctggtcgctcctgcccacggagtcgtggggtgtgctgggagctccactctgcttctctgacttctgcctggagacttagggcaccaggggtttctcgcataggacctttccaccacagccagcacctggcatcgcaccattctgactcggtttctccaaactgaagcagcctctccccaggtccagctctggaggggagggggatccgactgctttggacctaaatggcctcatgtggctggaagatcctgcgggtggggcttggggctcacacacctgtagcacttactggtaggaccaagcatcttgggggggtggccgctgagtggcaggggacaggagtccactttgtttcgtggggaggtctaatctagatatcgacttgtttttgcacatgtttcctctagttctttgttcatagcccagtagaccttgttacttctgaggtaagttaagtaagttgattcggtatccccccatcttgcttccctaatctatggtcgggagacagcatcagggttaagaagactttttttttttttttttaaactaggagaaccaaatctggaagccaaaatgtaggcttagtttgtgtgttgtctcttgagtttgtcgctcatgtgtgcaacagggtatggactatctgtctggtggccccgtttctggtggtctgttggcaggctggccagtccaggctgccgtggggccgccgcctctttcaagcagtcgtgcctgtgtccatgcgctcagggccatgctgaggcctgggccgctgccacgttggagaagcccgtgtgagaagtgaatgctgggactcagccttcagacagagaggactgtagggagggcggcaggggcctggagatcctcctgcagaccacgcccgtcctgcctgtggcgccgtctccaggggctgcttcctcctggaaattgacgaggggtgtcttgggcagagctggctctgagcgcctccatccaaggccaggttctccgttagctcctgtggc

SEQ ID NO: 25473 - DNA, 1087 bp, Homo sapiens
ctggtacccctggaaaagcaggaccaggccctgcagcctgtgctgccttccaggcccagccttcgtccccggagcccacctgcctgtcagctccagcagctgtcttctgctcagccctgctgggtccagccgggccggctggtgggaagccagtgggctcagccccaggcacgaaggagcctcagcccagcttcaggtagacacttcccagtcatgtaggtgcttctggatgttcagtgggccttcagctcctgggggagggaggctgggctgccaccgtggtgtgctatctatgcgagtggacgtgtcggaaatgtagaggacattgctgagctttccctggtcctttggccactagagcttgttcacagggctctgttgctactcagtgccttgactttgaacactggactcaagtgaaacgagctcttgcctcctccaggctgggccactctgggggatgccttttcctcccctcattgttttcaaagtgcagtctgaagaccccctacaggacctggggcttgtgaatgacagagtcagcctctgggcggggaactcgaaagacttcatttgtagtggtctcctggtgattcttggggaccctgaagctgagagcccccagtctggatgcaggtgatggtttggttatcaccctcagccagtatggtgtcttgatgcagaggtgggggtaaaggctggggctctgcagctcagagatatcagcccccaagagtcctgaagtctaggggaggggagagtcagcctgttttccttgtatgtgtagatctgactgagaaaccaagggggtaaagaagatttctaaacaactgtgaccctgtttcaagcctcctgaggacatttgccattgtgtggaatctcgggatggggagggtgggtgtccagcctgccatgaccatgggccctcctgcctcatgacctcgcagcctgggcttctggaacaggtctgggtctctcctgtccactggccccagagccagtgccatggcccctggtccaggttgcttgtcaaaggtggtgacctagctcctttgataaggggcagctctttatccctggtttgttg

SEQ ID NO: 25474 - DNA, 1054 bp, Homo sapiens
ggctgtggcaggccattgcctctctgggcctcagtttcctcctctgccaaagggtcgttcttcctgtcctcagttctgagagccacatggttacagagagaccttatcctgggaagggcagaggtggcactgaaggacttgttgggggctcacatttctctgccagtattctttcttgggactcgaaggagagttggttgcccaaggggtcatcggtgggatgggcaaggccagtggagggcagggcaggctgcttgaggggtggattcgagctccttgtgggagctggagtggacagaggtgcctgggtgacgttgggccagggctggggctgtatgatgttctccgcacacacacccaagagtcctggcacctgcccgaggtccgctcagcagcaggaatgaaggctgtggcgggcaggttggggcagtggggaaggcgggcatgttgatcagtccactcatcagctgagtcatggtgccagggccacgggtcctcccctgagactcacccaaccaaccttgatccactgcaagccctctgggggccggcacgaggcagagagtgcagcaagacacagccggggctcaggggcctggctttctgtcttggccctgcctcctctctctcgagtgactgtgtacagaggcctctcttggtctcagtgaacccatctgtgacatagggggaaggggctgagaggcagaggtgaggcaatgcttttgggtgtgcatggcctcttgtggctgtgtcgtgtgactggtgggtatctgggggcctgcctgtgctctgctgcctcaagttctgagggcttcatgagacctatctggcttgaccagatctaaagcccagatcctgggtacctgctgtgtgcgtagccctgtgcagtggtgagagttccatatctggtccaggggattcctgtaagagagggtggctgttactggaaccagacgagagaggtggtctctgcagtgacaatgaacgggattcgcgattcagcacctgtcacgtctccccacaggaagggttttgtcccagagtcccacgatac

SEQ ID NO: 25475 - DNA, 1025 bp, Homo sapiens
gtacagtattcttttaataaactggctcacagtctggtaggtctacaaccccatagcacaacaggtttatagagatgtatatagaattatagtccttatttttttcctttgcgtgaaaccttttataacagattaacaatcaactgcataaatattattaatattttaaaaagagttaagttgtattttgataattcacaaactatcatgcaaataacgagtaagtagacaagaataaagtggtttgagatgaaaagaacctaacattatttacagtagatgtggttttaatacaattactgccctaaaatgtctctggcaatgtacagaaatattgtatatacttacatatgtaattgttgtaagagttaaatacaaaatcatggtgacacttccaattaagtgcactaaatgaaaagttaagtcacttattaacttttcagtttggtttgcaatgagaaagagtggaaatttgtattttgttttgcttatagaattacagacatgttgaggaagtgttgagctttattttgctttttcatagaggcagaaagtaggaaccagatagagatgaaaaggggccactgaaaagtgaatttgatagctcagcatttaagcatgattacatattcagatagctctttttgctttctataaatatatgcattgtgtgtgtagtaatagatgtaagtttacactttgaaaggaaatcttgtttcaatgtttattataaaagccttgctaatttagtagtgatgctttccttggttgtacaggtgtacatttgtaaaccttcatgctgtaaatggaatttgttttatctctttgggatacatttgcattttagtgtacatttacgtccctgccctctttgacctggcaatatagtgttgtataatgtaaatttatttctccaaatcgagagtgattttttaaaaattttttatctttatatggtttcagaagtatgaaccagctttctttttattattgtgagatcattttgttttataacatagttgttg

SEQ ID NO: 25476 - DNA, 1050 bp, Homo sapiens
ctgggattacaggtgcacgccaccgcgcccagctaatttttttttgtatttttagtagaggtgggatttcaccatgttggtcaggctggtctagacattgttccaggcaccaggtagctagcatgtaaattaattttatggctcttggattggagatggggctggggattcaaataaataatgcataatatgctatgtaataggaagttcaatgaaaaaaagtaaagctaggacagtagggacagaaagtgaaagaggaatgttctaacccaatttactctccaggatttgactgttttactgctctctgtccttgtagtccttttcgacctttaatacctccgtatagctttgcactgacagtgtatccttgggaccatctctaccctgtggcctggattgtatatatagtactactctgcatagattttgcatataataatagcatgatgctggtagtggattttgtttttctgaactctactaatgtgtattttacaactatctatacatttttcttttttaaaaggacactgtcaagtacttttaaactgttaattgtaattttaaaaatttcctgcatgtatttatttttatttctattgactgctctttgattttctttcttggaacggaatgtaagttaaaaatgttttttatttattgtaaatgataaggctctaggaataataactgctgtttattaatactattgtttgtgaaatagtggatttatgtcaaatatatatatatatatatatatatatatattttttttttttttttttttttttttttttttgagacagagtgttgctgtgtcacccaggctggagtgcagtagtgtgatcttggttcactgcaacctccgcctcccaggttcaagcgattctcctgcctcagcctcctgagtagctgggattacaggtgcccgccaccacgcctggctaatttttgtatttttagtagagacagggtttcaccacgttggccaggctggtctcaaactcctgacctcgtgatccgccctcctcgaccatccaaagtgct

SEQ ID NO: 25477 - DNA, 1149 bp, Homo sapiens
ctcacctctgtaatctcagcacttttggaggctgaggtgggcagatcacttgaggtcaggagtttgagaccagcctagccaacatggtgaaaccccgtctctactaaaaaaaaatacaaacttagccgggcatggtggtacgcacctgtaatcccagctactcgggaggctgaggcaggagaatcacttgaacccaggaaggggagattgcagtgagccaagattgcatcactgcactccagcctgggtgacagagtgagacctgtctcaaaaaaaaaaaaaaagttacaggcatgatgtcccttactcaaaagtacattagtgtatgtttcttgacagtaagtatatgttttcatataaccacaatttctgaagtcaggaaattaacactgataaaccactaatcaaagcagccaactttattccaactttgctacttatcacactgattacctttataagaaagagaaagggagattgacaatgggggcccattgtcaaattgaggatcacggattactttcatcactgctcttttctttaatctcgaactgtttctgttttttatgaccttgacatttttaaagggtataggcctgtttcatagaatgtctcaatctccagatattttagatgacctgctttcaatatttagacaacaaaatttaaaatgtctaatgtatgttaaaaattgggttttacacacttatttgtgagagaaaaggtatgcttccctgggtgaaattaattggtgatagttcgtcctttcagtgaattagtttctggagaatatttttttctttttctctttttttttttttggtgggggggttgttgttgttgttgttttgttttgtttcgtttttgagacaaggtcttgctctgttgtccaggctggagtgcagtggcacaatctcatctcattgcaacctctgcctcccaggctcaagcgatcctcgcaacctcaccctccccaagtagctgggactacaggcacacaccaccactcctggctaatttttgtattttttgtagagatggggttttgccatgttgcccaagctggtctcagactcatgacctcgagctatgtgccttcctcagcctcccaaaaatgctgggattataggcgtgagccaccgcgcctgg

SEQ ID NO: 25478 - DNA, 1036 bp, Homo sapiens
tttccattatgctattctataggaactgaacaattttacaaagtatataaataacttattctaattagcctctcagaatctaatgattacctcattatggtataagttatgcttttctttggttaaagtatgtataggattaccagctttttaggttcctttctcagtttagttattcttgagatttagataaaaatacttgtctaagcacatatgttatatttgtacttcttatttgtaataagaatacttgttaatctaaggcaggcaatttagggactgtgtatagagcagcacacccgactctcaacagaatcttacttacaggttctcatgttaatataaattgaaaaacagctacaaccctctggtagacctagaagtaatttatttgctgatgagtaggaaataatgttttgaagaaattacgttactagttgtatggaagaatttgtgatgtttggttttctgtataaaaatgtcttgatcttggttgtacttgttttagattactaattttttatttattatcctttaataacattatcagtgacattgtggttctaatgtctgagaaagttttcaccagttaatttacttagttaagataatcacaaactgaagactagaaaatacttgatcccatcctgtgttttggcatcagaatcactctggccacttgtttaaaatgcctcgtagtagacttcacaaggatgtgaacagtttgcaaatgtgcggcaacagggtttgctcgttacaatgattgtggggattctattggcattaaatgcctggtagccagatgttatactttgcatagtcagcacaaaaatagtttcgtcccactgaaattttcagtagcctccacatgaaaacactgacttgaaataatttgtagctggcagagattattttaatctaccaagaattcacctgtaatttacaccatcccaccatgcttataaggtaccctaaggatcaaaaggtagcctttaaaatacaggcagatgtgcttcatgagagatttgcagtgtta

SEQ ID NO: 25479 - DNA, 1046 bp, Homo sapiens
ttttaggattaatagtttataccctgaaatgcagagaacagtgtaaaattctgggcttcaggttcaatattaaatattgagttattttctcatgttgtattaatctataggaggggggcaatctacctacagttgttttatacatcattgtctaggatagaagtaagcatctttttttttttttttttggagatacttcacttgttgtgaagaacattaaatatttctagtattgccttatttttctacctggagctagctgactagttctttccttgttttccttcttctaataaactttttaaatatagtgttgataattttttttaactccagtctttgtgctcatagtaatttgattgatgtggaacttactaggtataaagcagtgttcgtatttttgttatttaacttaggttttgacaaactaacggcttcttgccctgtacctcttcatttttgaactagctatttttttcttaacaaaaagggtgctaaagtgtaatgtgggctttgaacccagtaaaatttattgaaaggggactatgaagtctgaagaatgtcatgtattcagcaggtaaacagctgtgctttagtttgctgtggattataaaatttcctaacctgtcttccagttacagaaaattttaataataggcaagatattataaatttttagaatcattctgtttaaattgctggcctttggcagacttagtcttgtgcttctcttatgataaaatattcagagaagtaaaattagtactgcaaagttgatagtaaggccacctgccatttttctgagtttcacatacagtcattaatgaaagcagaaaacaatatgaattattcgaagcattcactgaaaatactgttatcctttagcagttacagttctctgtaactgaatagcattcgatagttttttttcttaaagcaccttcatattcatatttcatttcatcctaattgttggcatagactgtcagagtggtttgttgattaaagatgaagaaattaaagatcagttgattaatagactttcc

SEQ ID NO: 25480 - DNA, 2375 bp, Homo sapiens
aaccctttttatttgtatgtatacatgtatgtgtgtttgtgtgtgtgtttataatatatgtaaaatatttaatgttggttaaaacatgccaaattgcttttgcttttagatattagtcttttgaaaaagttctactttcctgaaaattcaaagtgagggtctaatgtacaataaggtaaagacccccctattgtttcttatgttttttttatgaaatataatggtgtgttttttcttgtctgtgcttttgatttgtgtgttttagagcatctgaaaagtcaactatataaacataatagtgaaagagaaatttcactatcaaaagatttgcacaccataagaaaaacattagttacatagctactgaactaggttagtacactggtttttgctttggtctttctatgcctggccattttaccagataattatttcagtgaatttgaatttagtgtatttgtcacttaaggaagcttataggcttgggccatatacttcttttttggatatgttaaagaaaaaaaatgttttaggcttgttgtacccctgaagttggagcattgagaactttgtttatatttgtatattaaaattgttcccacccccaaattattaaattggtgattaccttttttccctctccaggaagtatttatccatgtagataatacgttttgaagggctttggatatcaggggctgtgtatgaatccctatcttgtcaaagaaattatttttttaaaactttattttgaatttttataattctagttattcagctgaaactgagggattctattgccagcttttatgtaattggaaagatttaaatcagcttgtgttttaaaaagtaatgttgctactgtaagcagatgtactgtaagttagtgattatgtttgaccaccccctccaattacatgggtatagctatttaaaagaaaaaaacaaaaacaagcaaaaaaacttactaatacaataaatgtccatgtaacaaaggtatctgttgcagtgttcattttgatttacattattgcacacacactgggctagatttcttttttaaagactctggtcttccaccccaaattctgggcctttgctcatttggggtattgatactgaacatatacagccaattaatgtattcaaatggagccctaagatccactttgcagtactagatgtgtagatttacctatctttagcctaatacctttcttcatttatcatgtattcttagtcgcaggagctgctcagctcctgatttctgttattactgcccaggcatcctcccttcataagacatgcctatgaaatggacacaaaaatttggaacacaacaaatctaagacttatcataatagttttttgttttattgttaagattttgtcatgtcctgtcatcttttcataggtaagtttcagatcagattcttgttcagctcttaactgctgtgttgtgctttagtgcctgtataaatggcagtaaataggttctacacagcttgcttagaaatcggatataaatgactttttagatgtctctatgattgaacagcaatctagatatgtgcttctctacctttctttaggttgtaaagaaagcagcctaatagatgcttagggaaggaattctggtcagttgtgggaaataatcaccactgggccagcattctgcattatagactaacatagcttcagcttgaaatctgatattttaatacacctctgattggaattagcaattacctgtgttattttctttttgtgacccccagtttcccatagttttagtggtggtatgactggcaacattgttaacaacaaatagacccatgccagactgaaaataacttgaaggatttcataaattttctttttgcatactattcatggaaataatctactctgcacttccctatgaatggatcatgatgcaaggctgtccaaaaaaaagaaaaatatttctttatgaatcaagtctcaaggctgatagtataaaagacttatggaaatggaatttgcatatttttaaagtaattttactgagctcacatatcaagaatatgaaatcatgagatagagataagttctctcaattctcattagaattggttggaattaattccagattatttttctgggagattttattttaagatgtgaatgttacaaccattacagttacctgtaaggcttgagatctgcatccccaaagtatgttcctttgttagtgttagttatttgagattcacagaaaatgcccagtagcaacagtctgtgctgtctttcaaaaaaaaaaaaaaaagttttcattttttaagataggcttataaccaacacatgtatttttagcaggatgactagtaatcact

SEQ ID NO: 25481 - DNA, 1028 bp, Homo sapiens
gcttgacttttcctttttggaggaaaataatattgcatgtgtcaaaactggtttcttggattatttgtcaggggaataatgctgctcttattagagctgttgtcttttcattgtcagttaaattgttttctgaaataaataggaatttaaaatgtagccatattttagaaaaatcactttgacagtgtccttttaaattagcatagttaatgtagcatacattgccagttttaccaaaaccaactcaagaataactgtttattacatgtgcttataattcacttttgcaataaaaatgcatatagacacctagtattttcttactatgatatcttaaaatgtaaaatcttcaacaaaacatgatcagtctcagaaactgcattggctggtataaaaggttgaatagcattataatcttttgcctaatgtggtagcataagcctggtttttttacccctttatagaattttgaatttggcaaaaccaacgtaattaagttttccgtctgtattatactcttaccttggtctacccatgatgtactctccttaatttttttctttataccctgtatgacctatttatatatgacttgtgcttaaataagatttaatagaaacttagatcccttgaaaagcattgccatattggtccgaatatagagcttgtcatttaaaaatgtatttggcaggttcagaaatgtggtttgaaattttcttagatgtaaaagttattcagttaaaagaggctagtgcttagaaataggaaggaaacgtacttgaatatatgggctttaagtgagacttgagaactgagagtttggacagcccttagagatgcatgctgtggaatttgattatccagacaggtgttgattaacagccagatcttgattagctcttctgagcatgtatagctcaccagggcctacatgacctttattttctgcactataaaaggaaaaaggattagaaggataatagttacatttgatattaagtaaaaatttggtatgcattgtattaagg

SEQ ID NO: 25482 - DNA, 1033 bp, Homo sapiens
ttgttttatttttacaatgtaccctttttttggtaaactctattcggtgttttaatagtcctcatttcaggttcagcttacctggctatctgtagaaataaaagctttttattttagtgattcagtcaaatatactgggcttttttcccctttgaatgcaacgtgaaaccgagagtttgacttttaaaaatacattaatacaaataaagatgtcctaaaattccactgataacattttaggacatgtttgttatgtaagtcaggaatcatgacattttattcattactttaatggtgaagcttattgtgcataaaactatttactttctaggaatcaaatattatcttgaataaagtagactagagcaggaacaatttattcttattttcctagtttcccttctatttttctttctgcttatattatctagtgctttcttgtcttgactcagtttcattttcctaaccacataaatgctgacgtctcatttgttttcttataatttgcagttgttctgtgagaatcgtgactgaaatatgaaaaatattttaaaatttaaggttttcaactcaaataccattgtagcatgcttggtaccagaatgttccccagttttgtgttatagattggaaagtaaaatattttaaaagtatcttgtaatccatctcagtagtcaaaattctctgagagaaacgatgaatgagcatttaaaaaatcttagttttatggaatctgtgttccctgaatatattatctgtatagtgtcagacccaaaaattggcattcattaaatgttgaatagatggttaagtgtcctatcagtttattggtagccttgaggttggattccttgaggatggattctcatcttttccctttaagaccattgctgtcacccatcaatactttgtcttttattataaagacatgttcttctctaagtcttcttcctgcccccttttataatctgatgataggtagctaacctcatgtctatgtaaaatctagtaactttttattcgggggtcgggt

SEQ ID NO: 25483 - DNA, 1026 bp, Homo sapiens
aggattggctgcagcagctacattagcaggtaacatactatttgttcatctttattatggttgctttttaatgtatttagttttgggtgtaagctttatttttctctatttgggcaatttgaaattcctaagaaaaactgaaacattatccagaatgaactaaagtttccaggaagttagtactatttttcaactgtaatgctacagggaaaagcttaagcaataacttttcctcgtatacgtaattggcttacatttcagctttatagttttagaaatctatatagtcaaccatgaatctccattttaatgacaaaccccattacccgcagagacaatgcaaagtaaaattacttctcagaaaataaaatagaggtaggtggcctgcatacataggtcaggggtagaatagagtaagataaacagatacagtaattctgagaaaatatgtatctaaaatttcttgagcaatgctaaaatgtacaaacaaggtgggggacaaaaagtttggatcaagttggaaagaacgtactaaaaactgcccagcctgagactaccacccagaatctgaaataaaagccaaagctggccaggtgcagtggctcacacctgtaatcctagctctttgggatgccgaagcgcctggcctgggtgacagagtgagactgtctaaaaatgaaaacaacaacaaaaaagctgtatttattgtctgtgtaagtaaggaaaagttgtgtgctgatcaggcacagtcttatttgaacaaagcgatttgctgatcttagttggggttcttgggaagagtttgttttaggttgaggtggctacaaagacagaaatgagttagtctgaggcattgtttatattgattatacaggcaagaataggttgatatctgccttagaattttgtttattggaatgagtctgctaatgggctgactttcaaaacttgaggctgtccctgttgtttttgggggggctgggggggctttgagcgatatcttgactgaaatattgtcactaatca

SEQ ID NO: 25484 - DNA, 1040 bp, Homo sapiens
ctctactctcatgccatgacaacacagactacttctgtgaccaaatgtgtgggcggttttctccacacaccaagcaggagacaccagctgggtgtcctctaattcagttccaacactgtctacccagagacaatgtcggatcccagaagttgaggcctcagtctccaggactgctttccacccccaacacacactgatcacaagtctgggcctccagaacttctgaccgactggcttcaagttggagttcccacaagcccctctttgggtttgatttgctggagtgcctcatagaacacttacttttactggtttattatgaaagatactgttaaggatacaggtgtgcagagctgctgggtagggtgaggcatggaggaaggggtgcggagcttccatgccctccctgggtgtgccacccttcaggaacctgaattttgattttaaggcctagtaagatatattttccttttgaatgctttttaaaaatattactattatcattattgttgttattgttattattctgagacggagtctcgccctcttgcccaggctggagtgcagtggcgttatctcggctcactccaacctcagtctcctgagtagctgggattaccagcgtttgccaccactcccagctaatttttttgtatttttagcagagacagggtttcaccatgttggccaggctggtcttgaactcctgacctcaggtattccacctgcctcggcctcccaaagtgctgggattacaagcatgagccaccacgcccggcctattattttttatttatttttgagacagggtctcgtgaagtaattttttccagtagctgtggttgaaagacctgtacagtgattcctcaacatctgagagtttcttctctctttaatgagtactgcaaatgtatatttttaggtctttttcagcctttactaaattcatatggacgtatgttactcagaagtgagtgtaactggcctttaagctctttcttgtttccgtattgactggagggtaaaatccaaactactta

SEQ ID NO: 25485 - DNA, 1013 bp, Homo sapiens
tggtgaaaccccgtctctacaaaattacaaaaattagctgggcttagcagtgggggtctgtaatcccgtctacttgggtgtctgaggcagagaatcgcttgaacctgggagacggaggctgcagtgaagcaagattgcaccactgcactccagcctgggtgacagagagagactccgctcaagaaaaaaaaaaaaaaaaaaaagtccacatttataggtgagtgccagtcgcagcatgtactctggccccgtttctttcctctttttgcctctctttccttttttccccacccgctttatcccttgtttgtcctcttatgttagaaatgtactgctacctgtctattcatggacagcacaacggtttttatttctcgaggctttatattattaggcaggctaatacatctattactcttcttttttggggttttaagtttttggttcttgcttatttgcttttttgtatgaacttcaaaattagcttatctacttccagaagataggattaaatgttgtaatttacttagggaaatttgacatctttatgccatcaagcatcaggttttttttgttgttattgtttttgttgttgtttctttgacaaggaggtcttgttgtttgacccaggctggagtgcagtggtgcagtcttggctcactgcaactgctgcctcccaggctcaagtgatcctctcgccgcagcctcccgagtagctgggaccacaggtgcacgccaccacacctggcaaattttttgtagagacagggtttcaccatgttgcccaggctggtcctgagctcaagtgatccacccacctcggccttccaaagtgctgggattacaggcgtgagccaccgtgccctgctgacatcaagtattcttgtccagggtgtgatgtgtctttatttttgttcaagtttactgtagtgtcatttgagtgctttaaaatttttctcataggggtttgcatatttcattctaagtttattttatgtattttatgttttgtt

SEQ ID NO: 25486 - DNA, 1023 bp, Homo sapiens
tttagatttacttttgtcatgtgaatgagaaaaagcattgctaaacaaaaaaagtttgttggcagatttgcaataaagtgatttaatttgctgagcagaagaaagtattctttaggaattcagcacttgtttgtttgccgtagataccacggatgttcaatgattatgttcattaaaatcagtccagctgggtgcagtggctcacacctttaatcctagcactttgaggggctgaggcaggagggctgcttgagcccaggagtttgagaccagcctaggcaacatagggagacccctgtctctacaaaaaatacaaaaatttgctgggggtggtggcatgcacctttagtcccagatactcccggagactgaggtgagaggatgcagagagctatgattgccccactgtactctagcttcggtgatagagtgagaccttgtctcaaaaaaaaacaaaacagtccaaggaggatgattacggagaatatgtcctaagaagcttaagtcactctgtgtattgacttatttgtgactcaactaggtttttatgtaattttgttgtctttgtaattgatgcaaaaggaaggtacagtctccaggctgtagatgacagacttggagaagtagtgcctgtgtgaagttgcaatcattagtcattttgtgttggtaaatgtcttcagcagtacaaaaagtctaagcgaaagccttgttcattgtccttatgttaaaataagcattgtatgttaatatatgaagatatgtaaatacttagtcactatccagatactaattgattttatgatcggaattcacatttcataaaatatggtttttttcattcattaaatgttgaacgtttacatagctaagacagtcactaatccctttgaccccagaggttaatttctactatggtgttaatttataattacaagattataaaagtgtgattagtaccatgtggcagtagagtgctttaataccatttattgtatctccaaatgctttccccaccctgttttt

SEQ ID NO: 25487 - DNA, 1378 bp, Homo sapiens
aagtaacacaataacttttgtactttgatagtttccaaactgtaatgcagttaagctatatttatataggacattaagaaatttattttgctaacctcagtaagtcttacaatatgaagaaatacaaagataaagccaacagtaccttctttaccaaagttgagtgagatgtttattttttcgtacttcccacaaacatatgtagtcatacattgcccccctccttttttgaacaaaaattggatcatatgatacacattaggcaactttgtatttttacttaatatcatggacattttacatgtaactttaattacttgtaatttttgtactggctcattgttttaacttttttctgttgttgagtttggcttatttttttaattttgtaccaccatataagtggtgctgcagtaaatatctttatatagttaattcatttgtgttggtgctgtttgtttaaggtaaatttccaaaagagaaacttctgggtcaaaatattttctttttttgcggggcagggagaggggggctgtgcagagcgcaggtaagagctgtggcccctgctatgttgcctacgctggtcttgaactcctggactcaagtaatcctcctgccttggccaaccaaagtgttgggattataggcatgagccactgtgcccagtccaaagaattttatattgatttttaaacaaataaacaaaaagttcagtttgatgtgtcattaatactctagaaagcacttgcatttcaatttcatttattacctcacttaatctttgcaacagccctatgagggaggcattgttgtttccatttgcaaatggacaaatgagatcgagttcatttagctagttagtggccaacctggaactgtattcttggtcttttgattctgatttctgttacaccatgatgactgatactaacaaaattttttagttgggaaacttctagggtgtttgtggatatattccttagccatatggtgatgtatgagtgtttcaaccctatctgcagagggaaagcatcacctggagagcctaaaaaatactaataaaaatccgcctgtcttgctgcccagactaattcaagccagccttgggtaggtgaaacctgagcaactgtagtttataaaatcctcctacctggactctgatgtgtgttgtaagtgtttgagaactagtgatctcaaaattggggtgctcccatccctgaggggtacctgaagagtttccagactacatctgttagtgcatttaagtcttctgggaatcagttatcaggtcctcaccatatatgtactgagaaaggtagaactctgatccatcccacatcttactgttgtgtattttacccaggtagttaaactttgg

SEQ ID NO: 25488 - DNA, 1022 bp, Homo sapiens
tttacaggtctagctattttgagttataattgccagtaacttacgcattttccagcaatttaagctgtgtttaacacatgctttccttaatttgagtccaaagttctcttaggtgtttcagcatttagcaagatttcaactttttaaaagagcctaaattaattactgacatttactttgctcttacaaagctgtcactttagaataaattctcaggcattacaaatactgtatataaattaccaaataatacttggattttgtttctctcaagcattccatacttgtttatgaatctttttttcttgtttgagacagggtctggttctgtcgcccagactgcagtgcaggtggtgagatctgggctcactgcagcctccgcgtcccgggctgcaactgttcttccacctgagccttccgagtaactgtagctgggggtacaggcgcacgccaccacgcccggctaatttttgcattttttgtagagacagggtctcactgtgtttcctgggctgaactccgatctcaagcgatcctcccgcctcgccctcccagagtgccgggattacaggcgtgagccaccacacccggcttgtttataaacctttctggtgtggaaagataatttgccttccggagtaggtacttatcttagttaacaaaagtaattatgaccagagatttgggccaggtgtgaaatccacagccaattttctcagtgaccaagctgtctcctttttatagaccctaacatgatctgcatagttttaagtggaggttgattcctgtctcctaaactcaagttctacatacgtcctaacttaaataccttgttgggtttccaggatatggaaatacttgtattttttcatattcttaaaatttacagatatttaaaatatccgaatatttgagtctcacatggctttgtctacatggctgcaatcacagcttgagaccattttactaacaggtgtgattaagataaaaattacacttatagccaggtaaattggtctgtg

SEQ ID NO: 25489 - DNA, 1028 bp, Homo sapiens
tttttatgtgtggcttttaaaattgttattattttaagatgttgctatgtcattgaaagtgagttttgttattagctaaatcataagatgcttctaatatttctttgttcttactataaatcctctattagtaatgcataaaagcatgcaactccaaatgtatactaaaacaaagctttgttcatgttcactccctcagggcagaatttgggttttcctgctttggggtcccgtagggctttgtccatacctctgtctgcctgttgtatttaagagccagtttatataggtctgttctctcgcctagtctgtgagctgttccagggcagagaccatcttacacacttctgaatgtcagccacttagcctagtaccagatatgggatggaatcagagtcatttttggtggaactcattttaatctatcagcttcagcaattcactgtccaacagtgctgtttgtagaccccccaaaaagtggggaaaaaaaaacacacagaagaaaagacagatgtggggacaagctgcagcaacctgcagggatattttaggagggccctgtccccttaggtgcacattaaacagttaaagggaagttcatctataagcccagagaccatagtaaccataaatccactttcctgcagaaaacacaggaggaaaagccaaagcatggttctggagaatcaaaatctagactgaaaaaaagttaaattttgtgcttaatagaaaacaatgggttacttaacatgacaatttggaaacagaaaaatttctatctcaataatgtatactttttatcaactctcatgagttccaaaacaagtgctaaggataaataaactacaggaaataatttattttcttctaaacctttgaatgtaaacatcctgctgattgcctgcgattctttgttaacaattccagtactttcatggcagttatcacccccatgacacacagtgcctcagaagagctacatagactgtgagaaggctttcagtaaaggtagttgggaaggctgggtg

SEQ ID NO: 25490 - DNA, 1086 bp, Homo sapiens
tgctgagtggcaaactctcataggactcaggagcaatccacaagtgaaatacgagataacccactggacttagaatgtctttataaaccttgatacatttgacttaaacttttctacattgttaattcttaattccataacctcccagtacaattatcttaaaacgagaagtgtatatgttcttaaaattttttttttagaatattgaaaatattcacccagagaggacttttgaaaatgccagtgttgttttgtctcatggccatagtggtcatcatatttctgaaatagcagttggctagagattgaaatttggaaaccagaaggaagccctcactagccgaagggagagtgctggggcctcaggagggccccctctccagggctttcagctacttccagtcactgagcgatgtgaaaatacaagaaaaacagtattttattttccatttaaactgtaagtgaatctgtttcaaaaatgcatttaagttcttccaggttgggagttcataaaaacagctcaactctcagttaataataagactggcagatgctcacttccaaaattcacacttgctgaacaactagacccatcatgtgtcagagtctgctttaccacctgtggaagccagctgctgtaaaatactcatcatttctggattcagcttgtgtgttgtgctcagaaaaaggtcaaagaaaggtgctaacttattcctgtcccaagtgaaatccatatgcaagtgtaatcattcccagatagagggctgttcatggtaattatgtcaggactgtaagtttactgaaattttatggggaaatacgggggtgtaatggtaaatggtagacatttcaaggttagtattaacacacagtcacaggaataaactttttcaactccaggcaatagttttgtttttgagatagcattaaatatacttctagaatatggggaaacaaagcattgtttcatttaatcatgcaaaactaccttgcagttaattcattatcctttctaccagcaaaattcaagctctccactagaataatacaattacagctcctaagtgaaactaggtacagagagac

SEQ ID NO: 25491 - DNA, 1044 bp, Homo sapiens
aagtactatttgtcgcagcttcacttagtcataacacataggcaccattgctgctctcccagaaaaatggatgcatctgtaataagctatataaacaggtgaagtctttcaaggattttgaagatttactgtttttttaaagcctatttaatgaaacaggttgtgcacaatccacacctaagcaccatacttcttaccttgtggccatacctcaaattgtttcttagctccttttctaaaaaatgattacaacaataataataaattcaagaaaaataagcatcaaaatactttcctctaacccctgcaaatgtatccagtataaaaattcccagtgtgcatatttaccttcctgtactgttcaagaaaacacggttgtgcttcattatcaaaagttcattctggtagataacagaagagaatgtgaaatatgcgaaaatgttttcttaggatagaatgaattggctaacatgggagttctttttttaatgagatagtaacataagaaaatgtttggtcgtgtacacagatttggaaaccttcaccacacagctgtgttatcaaattaggcatacttccttgacttaggtgatttttttttttaccaatatgaagaatgaaaaatttttattactgtgatttatcaaatttggactgcaaatttcattgaaattatcattacaatatctaggaaaagtgtcacccagcaggtaataattgttgttctccaaaggcaagagaggaaaaccagtctcatcaactaagtattagttgtgataaggtctttggtcttcttatatttttacaaggcagtgacgcattcaatgtacatattagaacttccttattgttttggtccattcccattatttcagactgcattttaattctcaatttgttattgatatagatcaatcaaatataaccctgtggttgcttatatatttttagagtttcccttacatgcagttttgcttaacatgggtcacagtaaaggatcgtttataaaagtaatggattgtttcctgtttctgccagctgatt

SEQ ID NO: 25492 - DNA, 1050 bp, Homo sapiens
tatatgattcattaccatattgattttggtgataaaattattccatatttggccactgggagccacttaagtcgggctcctgttgtaactgcaattttaagcaagatgtttattaggcatcatagaagtgacctgctggaggtagagttagccacatggctatctagggtacaagggttctaaacagcagaatagttattacaaaggctttaaggccgtgagtatgcctgtttgagaaacagcaaggccagtgtgactggagcaaagtgactaaggtgtgaagtaataagacagggaaactttcattgcatttgccctccccacactcttctatatcctgtggtccagaagaaacattaaatacacccttatacccaccaacaaacgaagaagtaaaaactgccattaagccaacttcttgaatttattttgtatgttgtaaaatccagatagctacatatagatgtgtactttttgaaaatgtatcccatcagccagtgatagttgtatttccatggagattattccagtcgcctgtatttgaacaattatacaggatctgactgtaattagaaaaaggagatgggcccaagtcaacctagtacaagtttggatttcacattttaaatcattggttaaataaaaacaaagtgaagatgaaaatgtttcttttgttaaaaaagataagaaaatataaaattggagcttttattaatttatacatgtctcagagaaataatagtcacagagaagtagcagacagtggcatgcacttattagcttctcacattattatattacactggaaacatgggctgttactgtacagtgaaactagagtttaaggtggagaaccagattgacctgatgcatgtgtttatgagtttcacattgaaggtgcctggtttttgttgttgctgttgttgttgttgttgttgttgtcgttgttttctctccaaagaatacagcttagaatgagtgaggcaagctcaaatcatgtagctgtaactgtcaacttggtgaatttctgagttatcagaaagtgagact

SEQ ID NO: 25493 - DNA, 1041 bp, Homo sapiens
acaagataattcatttctttattcaacaaacatatattaagccctttccatgtgtcagatcctgtgctatgttttgaggacatcccagagagtaagacagtctttgaagtaggagagcctggagtctgcttgaggagacagtctaaccaatagatgtgatacctactgtcttgtttcagttcagggggtgtgggagcatggagtgctggtaaacctagtaatctgaagccaagataggacgtgatcgcttcatggctgctttgtgctaggattttgactgtttctcactccgtgggataaaatatcttcagtggggtctcagagctcactaagcactcgctccttttcttgccagcttcacctgcttgcttcttattcgtaattgcccttgggaaatgtacaactatagcctccctcgctgtggtttttgatactaaatggaggttttaaattattattgggtataagaaaatatgtttttcatttctaagtgtgaattcaataaattcaagattgtactctgttctctgtattattgtctactgtgttgggtgttttttccctaaataaggtgtcttaatcagaatgcaggctttatttttccttttagcattttgcacagcttctaatctcttttgtgccttcgaagtctcctctagtactgtgtcatgtggttgccatctttatggtgtccagctctgcctcttagtggttctacttgcacagttgctgtgagttctggcagtagaatcaggacacctaggttccaatatttattgtccttttttttttttagtctgtctgatcttagacaagttattgagtctctactttagttttgagtctcaacctcagtttcctcatttgtaaaatggggataatatgttcttcaaagtatttttgtgaggaattatataaagcatcaagaatggtatctgtaactttaaagttccaaataagtattagctattattattattagggaaataactctagagtcattgtctcagtcattaggttaactattgtattaggtatcta

SEQ ID NO: 25494 - DNA, 1024 bp, Homo sapiens
ataagtttataaaacataaacataactttataaaagtacagcatatccaagagttgaaggacactttcaaaaggtgtaacaattggaatgctctataggcattccattcaagggcgttttgtcctagggggtttcctttagttaatttgaggtgagatcgaggtggctgtgacttcattgcccagtttgcttctggttcttgtacgtctctctagtggtatgagcatctttttgtgcttattgagcttctcagttttaaagatattttacaataaagttacattttacatctatagtcttcgttattatatatgcatgattcttttagacattgatgtacaaggttgaacatacaaaagcctgtactctttgaaggctagttttgattatatttatttttaattgtaatctctgacctcagcctctgatcctcatatcagatacaattttttgtttctattttaaaatttgaatgtggtggcaataaatatggctgcatatgtgaactcctctgaatactttctgaaaaacattagtttactaatctgttattaatttgtgtaaatgttgcacgtcagataaacagtatcaatttatctagttttatctaattgttaaccttgtattttgcaactgaccctttagctgcagggagtatgttgtataattttctatttattttcaaaatggattaccttcctttattgtatttttagattaaaaagttatatgtgcttattaaacaatttagtatggaaaactgaataagaaaataaaaaatcggtgtcctgtaagttaaaggttgaaaagaaatactaaaacttcataatggtttaattatgcttaaacattttcagcctaaagcctaacaaacgttagcaccttggcactaagagatgagatttttcaatgaataatactttgtgtaatagctcagatattttctaggctgaagtaagcatctaggaatagcagcacaagggaccatatttttagtgctttttcccctatgtcaatatcgtga

SEQ ID NO: 25495 - DNA, 1072 bp, Homo sapiens
attacgtttattgatttgcgaggacttttttctttgttaaaatgttgctctgctttcagcattttctcccttgtagtattaccataatgtatttaagattgagcacttaattctgaagtcactttaagtatacctcaaccaaagggaaattaatatattatttctaatgagtgtatttaatataggtaagtagtttgtacacttgtgaaattcttggcattaattgatgtccagaagctgaaagctactctctggtacattaaaaaaaaattgtgtgtgtaattacaagaaagtttgatgtcacagttgcaaaggagttgtgcaaaacaaattgcctttttccagtaaagataattcagcaagttcatcttgagtgtagtgtgtggtttcgtttttaatatgtcctcagcagtagtcatagattttatcttcatcatttaagctttattttctggcccacttgcacagatttaagaaaaatctcactggggttagtgtgcagtcattcagacagcaaatacagcaaaagtaggtgaaaatgtaaaagtcattaaaagaagaattgtgaaattgctcatctcgcaaccacatcaagcaggagcaaagacaactacacagaatcttggtgtaacatacactcattaccacttggactttctcctacagtattttgcagtttgttttttggattctttagtgttatataatatttcaaagtaatatgtgactgggaaatattggaataggtatcagaagactgtagaatttattttgccatttaaatgcttatgtccttgaacaaaaaatgtaaacatctttgaccttcaatttcttgttctattaattgcctgctttttaggtctgatgagaaaggaagagaatataatttgcaaataaaaagaagcaaaaaaaaaaagcagtagttttattgcaaggggctagatggtgatcaagttaggatatagaaaacaattacttgttcttacatgttattctggagaaagatgagatggatacccatagttacagcagaagcgtaaaaagaattctgtttatgcatcatctgtttatg

SEQ ID NO: 25496 - DNA, 1029 bp, Homo sapiens
attggaaaccattttgaatcttgttgagtgatttctgtgaattgtatgtatctgaaattaattatgggttactagttttacaaaaactttctacaaatttggagacacagtctaggcagttgcaatgaggcaaaggatgcagtgactttttttatcagatgatttttaaacaaaaagaaaattttgccagcaagttggcttggtatcttcattcattgtagccgttagctgcaggtgtgtctttccaatatatgcaacacatgtagtttgggttttaattagggcgaatggtcttggactactgcagagattctgagctacctcagctttttgtattttagttaccaacagtgtttacagagtcttgtaatcactttgccaccgtttacatcctgaagctaaggtacttgtctccttgtctttggctctttgtagtgtgcagaaagcatactttggccatagcctactgcagtaatccaaagtgcttctttgcatttacatttacatctaacgccttctaattctagcttaatttttttttaaatgccacgtgttttctttgtacctagtctgtgaagtttctgtaatatccagttagtcatacaagtcaagatgctacccatgtagacacactgtatttttaaggtgggcaagtgcgattaacgatgaaccattttaaaggggaggttatttgaaacctctaatttgattattgggaggattttcatgctttctttagtatttattaccatcataccgattcaaactattttattgtctaatacattagcattttgtattttgatggaaattgttacagaatttaaagatttgatgaaataagatgtagcagattttttgtagcaagtttctggtaaaagggttttttgcaagtctcaggttcttgctgcactatttttttttaaatatttattccagttattctaattcagaagcattcttttcaagtaacagcagcacttgtgaaaggaaaaaaaaatgcacatgtttcttagtaggttactaaat

SEQ ID NO: 25497 - DNA, 1076 bp, Homo sapiens
aattagccatatgaaggagcgactgtccttttgctgagatacttttagagatgagacattccctttctagacaactctaaaccaagggaaattcttcctgtataaatatgagcttctatctttgtttatataatttccatcattaaaccacacttctgccttttcaggtcatctgagcaaatgtaatcactcatctacccacaaaatggctaaatgacttaattcaactccctttgttgatttgcctgttagtttgtttatctggtggtctatctattaaatgtttattgagtacctgcagtgccagatgctgtgctgggtgtttggaatgcaaaaaatgagtaagacaaagtctctgctctcaaagaatatttttagtatattaaagatttatatgtaaaggatatagttatttttcatgtgtaattttcttttcttatttggcaatatatgataaaacatttagcaggagtgatttttgttggccacatggaagaacttgttgatcggatgatgatctgttaatacagcctgttagttttgcagagatgtagaatagaatttctttggagctgtttaaagggaaggaaaaaatgcaagtgtcttagatgtatttgacatttgcccacctgaataaaatgtgcggggtagagttattcacattttttttaattctagaacttctttgttcatatggttgcagttttattagcttgaatgcattaaatactcctcaccagtgaaacatctcagtgtggaatcctaataatctagaggcctagtttagggagggaagggattgataacagaatcagcagtgagtggctttcatggtggtagtgatggaagccactcattctggctcttttttaaccctgtcttttcagctctggttggagtgaatagaagtgggaacacaatgcattctgctttttggcataagtttcactatactgaatgcattcattttgctttgggagttagtgaaatataatgaggaaggaagggctcagtctctggagtgaggctgcctgtattcaaatcctgactgccacctgttagctgtcaaattattt

SEQ ID NO: 25498 - DNA, 1032 bp, Homo sapiens
aggtactcttataggaggctatcctaaaattatattattttctctaaattgtgtggagtggagaacacagcttcagcctgggatttgggctatgtgggaaaattttttttttttctgccagtattttaagtcctttagcagagttaggaagcaggaaaatattattcaaagtctaagaattcctttaatggataaagagaaatttactgttcttaaatgctacctgttaaacatttgtcttattcttcaatatttaatactaaaatagttttcagagcagtattcattctgggctatcagatagacagaactttaaaaatatgttaaagctagggttaagtaatgaatataacagcatgggaaaagtggagaaggaatctggtatgaggccgaatgggtggggatagaggagtctattttaatgctgatttctatgagatttccataagcgtgctgaaaaaggcttaaattaatattgtgttcagttggtgatctaaacactataaagataattgttgtgtaaaagtttgacctgaagctttcatttggaattatcaggacagtatcctaatctgagttttcaggcctctagaagtccatggatgtagtaatgaggatcaatatgattttaacaaaactcctagcatatggtaattgaactatgaagtctttcacattaaaagcagcctgaaatataaaatttctctgatatatcatgatacatgtttttgaaggcaatactttggttcgtttgctgtttgttttataaagcaggcattgagaaggaggatgagtttaaagacttgggagtaagaaataagaggactaatgtaggatggaggcgggtccctgcattgagacacttaataaatatgttctccttagtgtccctgacatgggccacatcctgtatgaaattctgaaacagtccaagtttgtctttgtgttccttcccctcactcatcctcctcttaagagtagtcctacttaggggagcacagggctccatggtctacccaccctttgtacccc

SEQ ID NO: 25499 - DNA, 1096 bp, Homo sapiens
aaactggagctttcagccaatgcagtaaggtaagaaaaagaaataaaggcatccctacttccagaaagaaagaagtaaacctgttgttgtttgtagacgtatgatgtctacatagaaaatcctatggaatatttaaagaagttattagaacatgtaagtgaagttagggttgcaggagacaggatcagcatgtaaaacacttgtttttctatatactagcaacaaacaggaaattgaaataacatcaaaaaataacatgaaatatagataaatctgacaaaaggcatgtaagacttatacattgaaaactataaaatattagtgagataaagaagacccaaataaatggagatatatgtcatggcttatggattggaagactcaacattatgaaaatgtaatttctctccagattgaaccacaggttcaacaccatcctatcagaattccagcaggcatttgatagaaattgacaagcttattctaaaattcatatgaggatgaaaaggacctagagtcaaaacaactttggaaaataaaaacagctggaagacttaatactactttattgtaagacttaaaaagttacagtaatctagacagtgtatgttggcatgaagtttgacaaataggtcaatggaataggatagagtcctgaaatagatgcacacatagagggtcaattgctttttgacaaagatgtaaagtcagttcaatgaagaaagtagattaaatttcaatagacagtgttggaacaattggatatcagcatgcaaaaaaagactttgtatgcagaagttgactcacaatggatcacatacctgtatacaagaacttaaaacctatagccagaatattaagtctcagaatttaataataacccaatttaaataatggacataagagctgaagacactttaccaaataagatatacagaagacaaatacacacatgaaaagatactcatcctcattaatctttttatttatttatttatttgtttatttattttttggagacagagttgctctgtcacctaggctggagtgcagtggcatgatctcagctcattgcaacctccgcctcctgggttta

SEQ ID NO: 25500 - DNA, 1044 bp, Homo sapiens
ggttagagtataaggaagtggggctttgcagtggattagatgctgttagaaagtaggaataattttaagaacctagaaggcaagaaaatggagcaaggctaataaagctgtgattgataaagaaacagaagttggctgggtgtggtggcttgcacctgtaatcccagcactttgggaggccggggtgaatggatcacttgacctcaggagttagcaggccagcctgagtaacatggcaaaacctcgcctctacaaaaaaattacaaaaattagctgtgtgtggtggttgcgcacttgtagtcctagctacttgagagactgaggtgggaggctcacttgagccctggaggttgaggctgcagtgagctgtgatcatgccactgtactccagcctgggcaacatagcgatagcctttctcaaaataaaaaggaaaggaaagaaaagaaagaaagaaaaaaaaagaaacagcagcctttctcaaaataaaaaggaaagacaagaaaaaaaaaaaagaaacagcagtcattcatattagtcaggattatgtttggtcattggctattattgtttatttttatttttttgagatggaatctccgtctgttgccccagttggagtacagtggcatgatctcagcttactgcaacctccgcctcctgggttcaagtgattctcctggctcagcctcccgagtagctgggatttcaggcacctgccaccacgtccagctaatttttgtatttttagtagagatggggtttcaccatgttggctaggctggtctcaaacttgtaatctcaagtggtctgccagcctcggtctcccaaagtgctgggattacaggcctgagccactgtgcccagcctgattatttatttatttatttatttatttatttatttatttatttatttttttgtggtcaggacaatgttcatgttttgtctgtgtttagacatgattagacagagtggtttaatttttctcttgacccatcatgagcacagggtggccttgtctgatactggtgttctgtgaaatt

SEQ ID NO: 25501 - DNA, 1059 bp, Homo sapiens
gtcatcagcaaacatctggtgacttttggatgaaattagcgaccaatttatattggcctcttaattattattaacctttgtggtctcttactcttcgatttaagaggattaaaggttgccttagtcaaatatccatactagattatttttattccaggataaattctgctgtcaaagagtatattggtattaaccaatcaataccagttaatactggcatttcccaaattatgtatacctcatcaaaagaggtagctaaaaacctgaaatttctttgtctttcatattttggaaatgcctgtggctgggatgctgtttgaagttaaaacatatcccgtgcaactaaattatttttctttctaaggattttctctgctcccagtggaaaatttctcactttatatgtgtattattttgtgtgcttgtgggagcatggtttgtgatgatgagaaaagaaattttccatttgggaatctaatactatcaactacatttttggtttttgttttatcctgggataatgtagtgtgtggatgaacacaatgtaatctttactggcctctttcttatagttcagactccatgtttgaacagctttggtgtttttagtttttattcatttctttttttaaaaaaatgaattatgggtgattcagggtttaatgttgtatcctaattgtgaaatctgtgcttttggacctgagcagatacctttgaaaccattacctcatctgttactaggaagaatgagctagcatttacattcctcccccctggcaagtctgaaaagaaatactttcccccctttttggaatgaagagactatctataattttatttgtacctttatccacaatacactgttttttccatttgatcctcttatcaaccttgtaggatcattattattattcttactttgcagttgaggaaacagacttgttggcaagtgacatagccaagacttgaaagttttttaaaattcaaagcccacattcattatcatagctactttatatctttccactgggataacaggacatgcctaattggcttttt

SEQ ID NO: 25502 - DNA, 1031 bp, Homo sapiens
agtgctggaattacaggtgtgagccactgtgcccagctcagttcacttatttaaactgcatagttcagtgactttcagtatatttacaaagttgtgtaaccatcactacagtcaatgttagaacattttcatcaccccagaaaccttaaaccctttagccataactcccaaccttcccctcatccttccaagctctaggcaacttctaatatactttctttttctatagatttgcctgtttgggatatcttgtataaatggaatcatataatatgtggccttttgtgtctagcttccttagcaaagtgattacaagattcatccatgttgttgtagctgttggtacttcgtttatttttattgaggaatactgttccattgtatggatataccacatttattctatttatcagttgatggacttttgggtttcttccacttttttggctattatgaaaagtgttgctgtgaacattagtgtaaaagtttttttgtggacattgctggatcatttggcaactcttacgtttaacagaggaactgcaatactctttttccaaagaggaacatcattttacattcccacccatcagtcagtgtatgagtgttccagcttctctacatcctcatcaaaagctgttaattatctgtctgattatagtcatcctggtggtttggaagtggcatctcatttggtttaatttgcttatgcttaatgactattgatgtggttttgtgtatcgtctttggagaaatgtctatacaaattttttgcctaattttttaaaaatatttttcgtttttggagatggggtctcactgtgttccccaggctaatctcaaactcctgggttcaagcaatctgcccacctcagcctcccaaagtgctgggattataggcatgcaccaccgcgcctggcccttttgcctacttttaaattttattatttgtctttgtattgtttagttgttcagttgtaatgttcattatatatattatcaaatatatgatttacaaatattcttaggtt

SEQ ID NO: 25503 - DNA, 1047 bp, Homo sapiens
ttaacatttattggttgattataaaatgaacagccagctgaagaggtatatagaatgaaatctaaaagggtcccctacacaagagtttctgtccccgtggagtggggtagacctcctggtacatggatgtgttcaccaacctagaagctctctgaaacccttcgtttggaagtggaggctccattacatgggcacaattgattaaatcattgatgatgagctcagtcttcagcccctgtcccctcccggtaggaagataaggctgaaagtttcaaccttctaatcacatggttggtttctctggcaaccagcccccatcctctgccagtcacatcattagcataaactcagatctgtttgaaaagggcttcttatgtataacaaaagatgttcccctcacccctaccactcaggaagttactagcattttagaagctctgtgccaggaacctggggcagagaccaaatgtgtatttcttatgtcacagggaccatttaggatttctatatatttatatacatacatatatatactctgttcagttacgcttgttttgaaaacccaaatttgttctaacatggctgtgatattagagaatgagtacagcataatgtgaatttcctgttacttacacaccaattttgtccttaagaaatgctagagctgggaacgggggctgtgtctgtaatcccagctactcaggaggctgaggcagtaggatcacctgaggccaggagtttaagaccagcctgggcaggccgagtacggtggctcatgcctttgggaggctgaggcggggcggatcacgaggtcaggagatcgaaaccattctggctaacacggtgaaaccccgtctctactaaaaatacaaaaattagctgggcgtggtggcgggcacctgtagtcccagctactcgggaggctgaggcaggagaatggcgtgaacccgggaggcggattttgcagtgagccggctgtaacgttttcttgaatgggtggtaggccacagatattactggtccacaagccaggttgggcaggagctt

SEQ ID NO: 25504 - DNA, 1028 bp, Homo sapiens
atttgctgaatggttccatttcaacctttttctttttttcttgagtttggaggttggttagcaggagggaatttttgggtgtgggaaattgtcagtcatacaccccagtgcatccactaatcaatccaaagcttccaaagcttttcttgattgattgattgatttgttttcctttcacctctgatctcagcagtttctccccacccctgtactaatacttcattgctagttcttcaccttgacaggaaccagatcttagtatgtttttatttagtgtaaaaaatttctaggacattatacaaactctttttcttttatgtaaaggaaagcaaagcaaggaaaagaaaacttatggaaagaaaatcttagaaaggaggaagaagaaaaacaaaagcgactccaggaagaaaaaacacaagaaaaaattcaagaagaggaacggaaagctgaggagaaacaacgtaaggataaggatactttgaaagctgaggagaaaaaacgtaaggataaggatactttgagacagtagaacaaatgcaacaagaaaaaaatgacctgataagagacaaaaaaagggaagaaaattagaaagatactaattgtagagtcagaaaaaacctttttataaattaaacttggataaaaagcagtaggcttattaaaacagactgaaatcttaacacagcagtagaaatcttagcacagcaggagaaaagaagatagttactactgattgtgaaaagactcagacatggttttcataattgaagtaaaatagttttaaatattttattcaaccactataactaagctatttattttaatgaaacaacagtaaaattttgatacacctcagtccatttccacaatacttttagtagtattgtatctcttttagatacatgaaccctttgaatcattattaatgatacagtttgttgaaattttataagttaaaacattctaaagatgaacaaagtaaacaattttattcttatcaaattcagtatatttgtgtactcttccac

SEQ ID NO: 25505 - DNA, 1027 bp, Homo sapiens
cgcaagtggtggtggtagaagggtagcgcaaacaatttggactcatatccatttcttcactccaaaataaaatccacgtagatcaaatatatacataaaacccttaaatcatagaggtactagaataaaatataggacaattttctggtataagacctggtatgagacaggcctttctttgtatgacaagacactcactagtcataaaagaaagaccaacaaatttaaattggtataatgaaagatgccctaaaattaaaagacaaacaagctagattaaaagcatttatagcatatgttacaggtaaaagcttactattaatataatatctattattgtaatgcatagaaaaagatccgtggatacaggtcatgttgttaacagcactgggtattttcagagactgatggggaaggatggtcaaaagaattggctttatttgtatgttttaagtttttacaatgagagtattaatgtattatgtgtctattaaaaaataaattttgatctacccatcctgttgaatattatgtagaatcgaatgtggtatttctgatgggtattatcttagaagaaggtttagacaatgtaaaatacatatgggtatatatacgtttatataatatgtaaaaataggctgtgagaatgtacttcagtggctgatatggttatcttggagatggtactgtgagtgaggtaataaagaatgactgtcatgttttgctcttcataattgtacattatttgaagcctttgcttttaaattatttgtacagtaaaaataaaaacataggggaaaaaaggctgaaatgggggaaatctgagctctcacatataaagatcctatagaaccacactatcccatacagtagcctttaatatgtggttaatcagcacttgaaatgtggctagttctatattgagaagtactctaagtgtataataagtgtaaaagctggagtttgaagacagtacaaaaatgtaaaatgtcataagaatttttatactgatcatatgttgaggtga

SEQ ID NO: 25506 - DNA, 1059 bp, Homo sapiens
cctctgctcaattgcccagtctttgcctagacctgctacgtgaactttgtcacagtggcaagtcagagctagcgtggctgcgactcctttgtgggaggaaaagtaaggccttgaacatctaggtgtagggaatccacccccagaacactgccagggaaggcagcagagcaggctgctgcagtgagcggcccctgacactttctccacggtcccctggcacaggaagacaagtccgagagagagcgctggcagcacctggctgacctggccgacttcgcgctggccatgaaggatacgctcaccaacatcaacaaccagtccttcaataacttcatgctgcgcataggtgagcacccccagctggcctgccccgcagcaggctcccttcccatgcaggggcctggcccaccaccaggagagacatgaggctcaggacaactgaggcaattcgggtggggaggttcacgcactcacagggcaaggagacctgaaagacctttagtccagacgactctagatgactaaaccaaaaacccagctgatgtgatgatccgactatactgtgcctactgttacaatagaagcttggcctgcctggctgagaagtgagtttgtgatccatttccagaggggttgctgtgcctgctgaggacatggcttcccagacaggcctgctctttgaaaggagttaagatcacctgctgcttctactgagggggtatcattcctgagtgaggtcccaggagacttgaaataccagctgtgttagaagctggccactaccatgccgagtaaatctgcatatggggggggggtggcggctgacacctaacaagcacacggataaacaggagatgtgatttccaccctccaatagcatacagccaagttgaatgaggacaatgatgtgttacattaggagctttgtggtacaggtctggagaggagatggcttctgaggcccataacaaggtgtggcctgtggctgtgctgaactttatgcctctaccctaggcatgaacaaaggcggggttctggctggggtcatcggagcccgga

SEQ ID NO: 25507 - DNA, 1029 bp, Homo sapiens
acagtactaaaaatactcgagagagtttttgtgaatgtcaaatgaggcaacggcgaggctcttagctgcagttactaactttcatatgattagtccctggtaaatttccccatctttcccggtatttctgggggagccgcgggaggtggcagctgagcgtgcactaccatgcacagccctctgtgaccagcacctgctgttctcttgaacgtgtgtccctgcccgccgtcctggcctccagctcagctgtctccagtactacacgggacccagcaatgcaacggcagggatggaaacggagggcagctgcctggagaaccccaagtattacaactatgtggccgtgctgtccctcatcgccaccatcatgctggtgcaggtcagccacatggtgaagctcacgctcatgctgctcgtcgcaggcgccgtggccaccatcaacctctatgcctggcgtcccgtctttgatgaatacgaccacaagcgttttcgggagcacgagtaagatgaagcgtgactggggatctgtattgtctccttcctcccgcccgcaaagtcctcagttcaagctcatgggcctgtgctgaggtggctttctgccactaggggtcctcaaaggcttgttcaagaaccagttcctggctgctcacagacgtatcactgtttggctaggacctgagaatagattcttcccattctccccgagtggaggacttgggataccccggtgcctggctgggcatcaggctcttgttcccagatggggcctgactgtgctgttatctgtccaacagcttacctatggtggccttagagcagatgcaaggattcaaccctgggctcaatggcactgacaggtaagggccacggcttcccctcctggcctgcactcacagcccttcttctagagacaggaatataacaggcccaagccccgggatctcaccctcccgggaggcacgtgacctgatacgtgcaggttagagaagctggcatgggttcctccaggagggctgcagcagtgcagtg

SEQ ID NO: 25508 - DNA, 1031 bp, Homo sapiens
gcccgtctagtattgccctggaaagaaagcagtgtggcctttaccccaggggtggtagtccaggaactctaacattctctccctgccctgtcagacacgttcaggcagggggctgttcacggctattttcttcacctctgtgtctgcagcaccttgaacgtgcctggcacatacttgatgctcagtgaaatattaactgcacgaatgaataaaagagtaattggcagagagaaactgaggcccctcgggaagtggggatagggaggaaagtcgcttggtgccctcgtcctgctggcctgtgatgcctgactctgggctggccctggcctgccttaccccccacccaacaccaagctgtggggaccttgccaggccccctcttgtggaggggaagaggcccacaatgaatttctcctgcaggagcaggggcagctggctgcctcgtgaaggccacaccctgaccctcctttctgtgtgtacctggcaggtatgtgcgggagaagaccaagactggggtggacatgcgtgtgggggtgcacacgggcaccgtgctggggggcgtcctgggccagaagcgctggcagtacgacgtgtggtcgactgatgtcactgtagccaacaagatggaggccggcggcatccctgggtgagtgccattccaagggggcaggtttgaggactggggaggggaccgtcccctccatcccccagggctgtgaccctgatgagggacagggggcctcagagaaggcctccctacaaccccggaacagcattcctcctgtctcgccctggtcctggccctggctaaggccgttctgacctgccttggggtgaggcctctttgggcctgatattggatgtggcttttccttcctggaccctgcagtagcctgtcctcctgtcccctttaccgacttagggggctgcctcccctttacccactaagggggctgccccagctctccttatgtcagagcccaggtctccccaaagggagagtaatgagcagtcatcagctagcgggctcg

SEQ ID NO: 25509 - DNA, 1065 bp, Homo sapiens
aaggacttgaaggctgaggagaatgaagactttaccctccttcttctctgtgcagaaccacatctgggcacccaggcctcggcccccagggtttggccacatccccctcctccggtccagccttccacccctgctcggctcttcccgcagtcttctctctcggtttctgggaatgggagttcaccacctctcagggcagcacattctttgaactgtttgactctttaaaaattcttccttctctgaaagcaacattctgttccccagcagcctttcctcattagctttctctcttggggcctccaaagcaagtcttgtcccttttctacatagcagctttcctcagacttaaagacagcttcctaagaagaagggggtgggggggacctggggctaaggacacagcctggttaagctggaccggggcctttttatttttctgtcacacagcccagagccaaggggcttgttcaggcagctactttatgctgggaattcattttattttattatttttatttgtttcgggatggaggctcgctctgtcacccaggctggagtgcagtggcgcagtctcagttcactgcagcctctctctcccgggttcaagcgattctcgtgtttcagcctcctgagcagctggtattacaggtgcccgccacgaagccctgctaatttttgtatttttagtagggatggggtttcaccatgtggcccaggctggtcttgaactcttgaccttaagtgatccgcccacctcagcctcccaaagtgctgggattacaggcgtgatccaccatgcccaggctgggaattcattttaaatctaacagcatctcaaatggtaggtgtcccccttctaacccccgcaacattggtacattgtgtctctcccattctgttctcctgcatttggtttgggagtctcaggtacagactatgacctctatcctttttgaatttcatcctgtatgttgcaccagatttcagcagaacaaaagccacgagccacttgtcccagtgacacgccagccacacatttctaaatacatcctctgtatcttc

SEQ ID NO: 25510 - DNA, 1014 bp, Homo sapiens
tgggctgggatggctttggctctaagctgcagcttgggatcagttctgctgtatcagtttattgttctgttgtaccagtgaggttcttagtgtgtggtgttctggtgacgggagaagcacaaaacaaaaagccagccctcatgggcatttcagaatgtgctgcttttatagatgctgaagtctttttggccaaagcaaatcacgtggtcaaagccagcaggaaggaaggagactttttttttttttttgaggtggagtctcactctattgcccaggctggagtgcagtggtgctatcttggctcactgcaacctccgcctcccgggttcaagcgattctcctgcctcagcctcccgaatagctgggattacaggtgcctgccacaacacccagctaatttttgtacttttagtagagatgagtttcgccacattggccaggctggtctcgaactcctgacctcaggtgatccacccgccttggcctcccaaagtgctgagattacaggcgtgagccaccatgcccagctggaaggagactttatactctgcaaggatgtggctgtgtgatgcttttgcgggggagtgaagaactagggccagctgtcttcctcagacctcatctaaagcagctacctagtcactttctaccacttttattctcttttgagctctgatatgcttacatttgaaatattatttctgctaagagcttgacaagggtaaggtcacagactcgtcataacatgtggacctccacaggcagcagaggcaggctgttttggttggagccttggatccctgaaatagcacatcttatagggaggactggagagaggcccattgtgattggagggaggggagcctgttgaggagcaaccagagtcaagacagtagagcctggggccaaggccgccatgttccgtgtctggggaagccatcacgacagatctgtgtagtggcacccctggcagtgcgcaacctgagaagctgctctagctgcctggcagatcat

SEQ ID NO: 25511 - DNA, 1058 bp, Homo sapiens
ccactgtaaacaactaggagctggataaaatatagggaccaggcaatggtggactgtgattccttggaaaaagaagactaaccgagtgagccctatcgttcattacctagcctttctacctgaagagaattctaccacagggagggagaacccaaacggagactggcgagattactaagttgagggaacagagatcagaatttggagacaccaagttctaaggtttctagaatctgtgggacagaatcctaaaaggaagaagctggaaagagaaagatctccagaaatctcgatagaggcctcctggaatctcggtgaatatcaatctgctcatgcacagggcaaccctgtgagaccagaagagaacaactgcagagggagctgtaagacaaacaggatagagccaacacaggaccagggttcactggagtcctctttaaaagaatatgacaaaattatgcattgaaaaatggtaacgtttgcagtgtgagacatccagcaaaaaattactagacaaagaaggaaatgtgactgacccactaacaaaaaaaaagtggtcaatagaaatagacctagcaatgacaaagatgtgatggaattatcagggaaaggacatgaaaataacttttttttttttgtaacagaatctcactttgttacccaggctggagtgcagtggcacgatctcggctcactgcaacctttgcctcccaggttcaagcgattctcctgcctcagcctccggagtagctgggattacaggtgcatgccaccatgcctggctaatttttgtattttttagtagagatggggtttcgccatgttgaccaggctggtctcaaactcccgacttcatgatctgcccatctcggcctcccaaagtgctgggattacaggcttgagccactgtgcacagcccgaatataacttttataaatatgtttcatttgatcaagcatgtaaatgaacacatcaggatgatgggaagagaaatggaaagtataagaagatccagtagcacctctagggatgaaaaatcaaaatatcaactacaaaat

SEQ ID NO: 25512 - DNA, 1119 bp, Homo sapiens
ccaggctggagtgcagtggaacaatatcagctcactgcatcccctgcctcctaggctcaagtgattctcctgccttagcctcccaagtagctgggattacaggagctcaccaccacacccggctaatttttgtatttttgtagagatggggtttcgccatgttggccaggctggtctccaactcctgaactcaagtgatctgcccacctcggcctcccaaagtgctgggattacagacgtgagctactgcgcccagtcttgtctattcttaatttattgattttatttatgtgtcacttgcattttatttacttgctgtcgtttcagcaggcccatcccctctctcctttcccctccttgccattttctgtctgatgactcttccttcttctgagcaggttttcagtcctttcttctaggaaattcctctttgtggttcctaaggaattcactttgattagaaatgaaactgtttctttccttttccccttcctctcctccacaacactttccttcttgtagacaggaaagtaaatgacttgtttcagaagaaatctacccctctcttgagctccattcaaaaccccaacataagcgactggacttgaactttcgcaagatttccatgtctggggtttgttgttcacatgtcacttcaggactgatctccaggaagtgtagtttggtgtcggctgagtcagatctggtagtggaagactgcgacagctgcctatccagctctcggtgggctcctggactgcccttgggggcagtttctcacccaaggggaccaggccctgaggaatttattcccatgagcctgattcctttcatttttatttttatttttttgagatggagttttgctcttgagtgcagtggtgcgatcctggctcactgtaacctccgcctcctgggtttaagtgattctcctgcctcagccttccgagtagctgggattacaggtgcgtgccaccacgcctggctaatttttgtatttttagtagaggtggggtttcaccatgatggccagggtggtctcaaactcctgatctcaagtgatccacctgcctctgcctcccaaactgctgagattataggcgtgagccaccacgtcca

SEQ ID NO: 25513 - DNA, 1035 bp, Homo sapiens
cactttaattttattccttatactttttgtgtattaaaatatatgaatatatatatttaaatagtataaaagaaaaaaatcttccaaagtgtgtatttgctttatacatgacttctaagagttgctggaatatattaaaagtcttttaagttgatgcttaaaaggaattcctattttcacaaaatcatttctaccctgggttatgttttcttcttgtagaccttttatatatccatagttgatttatgtgaaaatggcgggaaacgccctaccaccaatagcagtgctagtttcaccaaagaacaagcagatgccattcgcagaattcgaaatagtaaagacagttgggacatgctgggagtcaaacctggggcctcaaggtaagcgctctgggatacttagtgctgattgctatcataaagaaagactccatcaccaaaattataggtgcagtatatcttcctccagttggctggaaatacgaagatgtatgaaaatatattagaatgactcagtttcactgaattagctgaataccaaagagacaaaatagagggcacagttgcctggtgagaaaactgtgtcgtgtacgtgcataaatacttcatgaaatggtatgctctgctttcatctgtctggaacaagaagagctttgaaaagaactaacaaaagagaattcttcaatcatagaatgttagaggaggaaagcacgttggcaatcaacttgtcaaacatttcattttataggtgggaaaactgggattcagtgagattaaacatgttcaagaatccccggagttagtggtataattggttcttaccctggaacactgtatgtttgactgtctctgtctttgtctctaaagccctgcaagttcctcatctgtgtgtgtatttgtttattttttttttttatttttatttttgagacagagtctcactcttatcaccccggctggagtgcagtggcgtgatctcagctcactgaaacctctgcctcctgggttcaagcaatactcctgcctcagcctcctg

SEQ ID NO: 25514 - DNA, 1052 bp, Homo sapiens
tttctactcttttcagaggggttttctgtttgtttgggttttgtttcttgctgtgactgaaacaagaaggttattgcagcaaaaatcagtaacaaaaaatagtaacaataccttgcagaggaaaggtgggagagaggaaaaaaggaaattctatagaaatctatatattgggttgtttttttttttgttttttgttttttttttttgggtttttttttttactatatatcttttttttgttgtctctagcctgatcagataggagcacaagcaggggacggaaagagagagacactcaggcggcagcattccctcccagccactgagctgtcgtgccagcaccattcctggtcacgcaaaacagaacccagttagcagcagggagacgagaacaccacacaagacatttttctacagtatttcaggtgcctaccacacaggaaaccttgaagaaaatcagtttctagaagccgctgttacctcttgtttacagtttatatatatatgatagatatgagatatatatataaaaggtactgttaactactgtacaacccgacttcataatggtgctttcaaacagcgagatgagtaaaaacatcagcttccacgttgccttctgcgcaaagggtttcaccaaggatggagaaagggagacagcttgcagatggcgcgttctcacggtgggctcttccccttggtttgtaacgaagtgaaggaggagaacttgggagccaggttctccctgccaaaaagggggctagatgaggtggtcgggcccgtggacagctgagagtgggattcatccagactcatgcaataaccctttgattgttttctaaaaggagactccctcggcaagatggcagagggtacggagtcttcaggcccagtttctcactttagccaattcgagggctccttgtggtgggatcagaactaatccagagtgtgggaaagtgacagtcaaaaccccacctggagcaaataaaaaaacatacaaaacgtactggtgctttcctgtctaagtcgccttttgtgtgttcttttat

SEQ ID NO: 25515 - DNA, 1050 bp, Homo sapiens
ggggcaggggtcaggacttgaggattaccccgggaatccctcctgagtaacctggaaccagggctgcttctcatgagcaggtttctgtcctgctgtcactccatccctgtttgtggatggtggcattggtgctctgagatgatggcgttcgagactggggtcacagtgcctcccttttccgtggggcaccctggactcttttctggctgccgctctggcacaccccttttttgtggctggtctggtgctgggctccggcccggggagggagaggcccttcggtggtactcaccccatcccctccctctgctttccagacatctgcatctcctgtgggagcctcaatgttaccctggaacaccccctcttcgttggaggaatgtgccaaaactgcaaggtaggagcacacccacccaggagaggtgccgttgaggccggcccttcggccttctggctgactgtgtccaccgcttctgggcatgtacagggtgacacccggtgtgcgtgtgatgtagacttcagagcttcctctggaagcagagtcctgatgacacgggcccttgggtttcaagcttttgacttgctctcatttttctcctctgaaagattctttacctctctcaagccccattttagtccccagatgtggggatgggagcagagcagcggggacaagctcaggcagagtgtagcagggttgccgtgccctggggagcccaggagaaaaacccagggctgcaggaaggcccaaggtggtggtgcagccccctccctggccttgttctcaggctgctctttggttctgtccatggcggtgcacaggcagatgaggtttccccttcccagatctgcagctggggcctgaccctggctaaggtggtggcggggtcatgtcttcagggcttaggctctgtgaggccaggtgtggagcctcccttcgtcctggccgtcctgggacccgtcctggtggtttctgacccttcccgctgctgtctagaactgctttctggagtgtgcgtaccagtacgacgacgacggctaccagtccta

SEQ ID NO: 25516 - DNA, 1041 bp, Homo sapiens
cctttccagcacctcttttaggctcttgacatccagcatattttcttctcatccaggagttcctcctttcaacatacttttataacaaatccaagaacatggcttattttacatggtgctgctatttgagtttggctatctttaactcaaacaaaagacctatctggtaaactaccagggaggtttactttggaagctcaagagcatgtgtgacctgaggatccttgaagattgccccattttagtaaggggatttttccttttactaaaatcacccctgctctagatcttggggtctcttctgctttggggtctgactgtgcattgaccacaaagaagacacatctctgtttaagcgactcagtctagaaaaggcagtgtttcctgtctgcatagttacaggagagggaagaaagatgctctgggttgttaaggggacacctttgagcctaggcttccttttgcttgttgggaagttgtgtggaagaggtaggatttgactttaatgttaaaggatgagaataaggaagtttgacggccggagggaacagctacctaatatgtggccaagagaaagtgaacagttctggccagttctgacaccttgagtccttgctgcacgcacggcatcattgcagtcttatgtcccaagaccacagaatgtggagtctaaggtgtttagccgcattataatggaagagcgggtatcgtacatgagacagtgtctgcaaaaggccaccaagccagaaccagaaacttcttttgagaggaggcctgaagtaagttctcaggcccgttgaccggcatggatgcagaagaggtatcagtgagagaagcagcgaagcaagtcatgctgcattccctaaaggttgggagcaggcaagagggacaaattctgggcttctcacttctgcttggggagcccctggaaatgtgtaccaggcaaataccttagttgggttgaaagatgggttggaacagaagagggcctgtgtttttgtttgtttgcttgtttttcgaatagcttcttttcctagctgt

SEQ ID NO: 25517 - DNA, 1084 bp, Homo sapiens
ccccacccccgccacacatgcccctcgctcctccagcccacacggggcctgcccagcactcccaggggtgccctctctggccaggagccagtgtccacattgtgtttgaggcgagtgcctccttggtgggtccgtcagtgcccaccctaatgccctaatgtctgtctctctgtcctagggctcccggggccggctgcggggtggcttgggctgggagtccagcctccgtcagcggcccatgccgaggctcaccttccaggcgggggacccctactacatcagcaagcgcaagcgggacgagtggctggcacgctggaaaagggaggtgaggcgccttctggcctgggccccagcccgtcctgcagaactggaaaaccagaagtgatgggcctcagtttccccttcaggctaacccttagaacttactgggagcctcttaatctctagtcatgatgactggttcatctgctccttcagcagatgcttattgaacacttactgtatacctggctgtgtactagaccctgggcgtatacggttcctgctctcatggagttgacattctgatgggggagacaggcagaacataaagaaacaaggggctgaaatagaagatagcagaggcctgctttagttggggtggtcaagacaggcttcttggaggaggtggcatttcagttaaggtctgaaggaaccgaagagctggctctgtgaggagtggggtcagggagagtgttctaggcagaggaaacagcaccagcaaggccttgacttgtttggcaaactgtatgccagggtgaaatggcaaaggagaaagggccagatgcagccagagaggcaggcggggctccacacatcagttggagacctgcagagtctgcccaaaagctggcttacttctgacaatactgggcagccatagaaggtttctgtgcacaggaaggatgtgatgtggatttgagaggcagcagtggagacagagaagagctttggggtgtattttggagctagaatagctagggcttgctgatggaccggcagggaggggaactggtggactcaaggaggactcacaggggtctgg

SEQ ID NO: 25518 - DNA, 1050 bp, Homo sapiens
gctgcagggccagccccagcgccaggcttctgggaaccagtgccgctgaggcctgggggcagctctggagaacaagacccctgggctgtaggagcctaactggtttatgtcttaaactcagatgtggagcagtcattatttcccagcaccagagacagctggttcctttcttttaccccccttccagctgagaatggtaaacttggagcaagaaggtaagggggagtcagaggctctggatttgttactcagcccttcaaagaaatgttctcagcaggcatggagcccaggacttgctccctttgggtagagagccgggttgaaggtgactgaagtgaaatgggacagtagaggcggggggggtggtgagttcctggaggtggggggtgtgggaacctgctgtgtactgagatgcacccctgccagttctgcctgaagatttgaggcggggggcaggggggcggagtgaagtcattttactggtaagtaattttaaaccttttaatattaaagcaaacgtggatatgtaatgaatgaaattcattctggaatgaaaaattcacgtgatgttgaaaaataacacggggcttcagagaggactttctggctggcagcagactccagattcccagggcccctgcaccctcctctgcccacagggcaccttaatggagaaggtgtgggaggagagccaggccggagtcagagcacactggtgactccacatttgcagcgtgccctgcctctctcctgaggcttggcaacgtgcaatatgctaagcaaactccccctgtccccgtccagtttctgaggacaagagccaccacctgtagcaaataaagacccagcaaccctttgactcatctttgtgagtctctggaatcagagggtagccacatcgctgagaggtggagtgaagcactcgggtgaaaaggtacaaggaagtcagggacaggagtgtggggacatcacctagacaatgacagagaagaggggcacagccgagtgaggggagaggggccggcagtcctacatcccctggcctgaagc

SEQ ID NO: 25519 - DNA, 1024 bp, Homo sapiens
aaggcctcctttcctggctctctgatccctgcaagtcagataatctctctgagcttcaggtgtttcatctgtgtaacagaaaaaaataataccagctctgctttctgtaaagtgtaagaatacaatgaaataacatatgtgaagatgctttgttaattaccacgttcagtgcaaatgtgagagattattatcgtcatagcccagcgcatcagaatgagacgttgtatatggcttaaaataatccatccagtgagcagtgttgaaatgtaggtcagatcgtagcctcagatgtttagagagaggaaccacctaatctcacaggccaccaaatgtgaaggtgctttgaaagctgcaaagaatgacataaatgcaaagtgacaattatgtttaagtctagaagggacgttttagtcctcttgtttcctaatctggaatcgtaaagatccgagaggcactggaacctcgtacacagttgtatttgtacgggtttgtagatttgtacgtgtgtctctgtttgcgtctatggactcacgtcaggcacctactctgtgacagtcattcatcaagtgcctgccttggactaaatgcatccgtctaggcattctggatgccagcatgaatcagacacccacacttccctcaaggagctgaccgttgccttgctgggtaggggaactataggagaggaagggtctttcagctcagtctaggcaggggatgggaggagggggcctaggggcagggaatccaggataggaggctggaaaagcgagtaacagtttgctgataaacctgaggggaaggtggtgtggtcagaagaacagtctatgcctaggggctgaggccggaagcagtttgctttcgcgcttggtgctgtctgttgggaccacagtgtggagaagagaccaaggcgatccagccaaatcctggggaccgccctgcacatgagctgaggagcttggctggatcctcctggcccccgggaacccccgtggcaaaggtttaagctctgcagagtggcata

SEQ ID NO: 25520 - DNA, 1033 bp, Homo sapiens
cagagacgtccctgcctccaggaacagcaagaccaggggcccagacagtgactacaacgctttatccctctgtcttcatctctgagctcttcgttctcaggcaggctcacccacatggcgggaagacagcagctggcagcccctgactcacatcgaccatgttagcatccttccatcgcatcgataaaaaggttccagggaggcctctgattggctctgcctggtcacgtgctcaccacttgcctggggtgagggttgaggtcagcacaggcacaacgaaaaccttttgacaagcgtttcccaccgggaaggaggggaaggcatctaggtagagcagaacaaccagagtccactagaggaaaaggagaatgcaagcagagggagggagaaggacctgctacagaaatggtcagatatttttcagccattcagacagagaacttgagacggagaagaaggggcccttagggtgagaatattgggatcgtgtttggtggagtgaggatttaggtttgtgggccgtgacagttttggttttggaagaggataattatgtgcaagcccttgttgaggagagactgtggggtggcaggggggccagcagtcctcaatctgaagatggagaggaggcttgggtggtcatctcgggggtgctgatgaggctggggttggtgaggaagtgggggcggcagtggggacagtgtggtgcaggggagcagtcctgaggcttcaggagatggtggagatgtagctctttggtctgagaaggggctgagtgagcgggggttggggttacggatgcaggcagcactgacttgcgctgcccatgggctggacgcagcgggaatgatgtgtttggaggattaaacatttcgtgagggtggggggtggagagggaggtaccagtgttgtagctggtgatggaactctgtgtgggtgtgaggagctgatgatggttattctgtgggacgtgatgatttcatagaacaacagaggtggaaaggcctcagctacactcttatttatagagaag

SEQ ID NO: 25521 - DNA, 1033 bp, Homo sapiens
ttatctgtgggccagggtcaccccagaggcacaaacatcgatcatggcgctggctctgagatgtgtgtttagcatgctcattcatgaccaagaactgccacatttgcgaagggttctgagttacacggacctggatttataatcctgccctggggctttctagctgtgctaccctagagaggtattaaacctctttaagcctccatgtcttctataaaatggggataacaataggacctgcttcataggattgttttgaggattgaggatagtgcatgttccttagcacagtgcttggcacatggtaggtgctcaggaaatagctgcatgaatgaatgagtgaatgaccactgcattgggcagggcattgaatactgtgattagcatgctccagtgccctccttccccgctcccactgcagacaagcctgaccaggagagagagactgactggaaactttgttttctggccagtccgtgcccaaagttaatatagatctgcagcagtcacatgctgattgtgagagagggagtggagagctgtgagcttctgagtggggtggacctggactgtgcctggctccaccccttacccactgtgtgaccttgggcagttttattaatctctccatacctcattattctcatctggaaaatggggataaaaatagtacccacttcaaagggttggggtgaggtgtgaggattaatgagatgttgacattgtaaagctctgctcacggggcctggcatgtcggaggagcttaagtacaagctcctgcctgagcgaaggccacttagaggaactccagggatttcaagaaaggagagaaatctgcgggctggttgaatctgagagtaatcatcgttaagatttattgagtactttctctgtgccaggcgctcttggaagcatttttagggcattccattttaattttcacagcagcgctgtgaggtggaaagttctttctcccactcgacagctgagaaaactgaggcacagtttcgcctcaggccacacagctggtaag

SEQ ID NO: 25522 - DNA, 1050 bp, Homo sapiens
tgcataattgtgctgcatggtaattaggtgtaaatggtaagcagttcacataaatgtttttgtaattggtattaattttgcagaggcaaaccaagtttatgtggtttttctcttcttgctctgttagttttctagtacaggcatttccaagcttttggaggaattctattgcaaatgtttgtttatagggcaatgttttgtgttttctctcagaacaatgttatgaatggttatgaggttcccaagctggtttccaaatgcctctttggcccatacagtaggtgaaatgtgcaacgcgtgtgcctgtgtcggaaggcccgcccagcatcctctggctccaggtgccccagcgtgtgcagcatgaggggggctgtgtgcgtgtgtgaacctgtgcgcctgggtcatctctgcatttgtctaggtatatctctgtgtgtgcatctatgtgtgtttgtatctgtgtgtctgtgtgtgtgtgtgtgtgtgtgtgtgtgtgtgtgtgtgtggggtctgcatgactgtgagagactcctgaggccacagtggcaggtagacattctctggtaaatacattccccattctagtggcacggggcctgggctggagacttaggggcatcagctgggagggggagcctggcacagcagccgttcctaggagtgagcacaagccactctgaagtgtggtctgaagccagagtctaggtttcctaagaacatatggcttgcctttctttctgatcaagcacataataatttttaaatgatcatttattgagtacctgccacgtgccaggccctatgttaaacacttgactcagattccctcctatcttaaaatagacttatgaaatagggactctttctcaccccgctttacaacttgggaaactgaggcccgaatctctcagtgacagagccagggtttgaggcagggactgctggaggcagggcccatggttctgagatgtgctgctcagaaccctgggctcttctccctccctcggccccctccacaaatggtttgtttttgttgggacagacgatgag

SEQ ID NO: 25523 - DNA, 1033 bp, Homo sapiens
agtgctgaaggcctgcctggctcaggagggatgacaggggagagggggtgttgcaggcacctaacccccacagccagagcctggacaccaagatgctttccccaggatgcaaataccatcttccacacgaaacaacatccaggcccagatgggctgcttcaggctaccggaagctccatctcctatgggcattgaattcttttcagagggaaaatgattactagagaacctagtaattcgatgttacttacaggtctccccagttaaagtagcagatcccagggactctggtgccttctctgcacttaaccttacttgagaagccaggactctgtaggtagtgggcttggagtctctcctgcctcctgcacaggcgcgtctgcaaacaggtggaggacactggctccgtcttccctctgcttcctacttccaaggggggacagctggggtaggaccatggcataaaagaaatgggcatcaaatcctttcaccagttccaaaaagcaatatgagtctactagttctgtgacagtttgaatgggttgtgactgctttcatgttgaaaatttaaaatctctaagggaggtcatgagaactagaacttgctgggaatggagttgggaggcaggtgttgaagacaaaaacaccaggtagccatccttgtatttctgaagtaaatggagcctgtcattgctaaaggtggagattcagaagggacttataggctagaggtgggactgttgtttattcaggcagatgcttcacgggcaccaactgtgtgctgggcacgaagccccttcctcaggccttcaggcctcactggctccagggtcttagagcttaaggttggaatctggtctgggttcgaaactgtatagtgaagggtgggcttggaggaacgggctgccctatgaacacgtcagactcaggacagtgggtgcaaagtgaggccaccctggggaggaaaaggctgtggttccctactcagtgtctgttctaggtgctgagaaggatgggtccttgggctcagggg

SEQ ID NO: 25524 - DNA, 1045 bp, Homo sapiens
tgatggtattcttcaaagcacaaaagttttacttttgataatattcaatgtatctagtttttctttcatagcttgggcttttgatgtcatatctaaaaagtcattgcctaggccaggcgcggtggctcacacctgtaatcccagcactttgggaggccgaggcaggtggatcacgaggtcaggagatcgagaccatcctggctaacatggtgaaaccctgtctctacgaaaaatacaaaaaattagccgggagtggtgacgggcacctgtagtcccagctagtcaagaggctgaggcaggagaatggtgtgaacccgggaggcggagcttgtggtgagccgagattgcaccactgcactccagcctgggcaacagagcaagactccgtctcaaaaaaaaaaaaaaaaaaagtcattacctaatccaagattataaagccttccccctatgttttctctaagaatgttataatttcagctcctatgtttaagttattgactaattctgaattgatttgttcatatgttttttaatgatatcttttgaaaagcagaagtttggtcgggctcagtggctcacacctgtaatcctagcactttgggaggccgaggcgggtggatcacctgaggtcaggagtttgaagccagcctggccaagatggcgaaaccccatctctactaaaaatataagaaaagccaggcatggtggcacacacgcacctgtaatcccatctactttggaggctgaggcaggagaattggttgaacccaggggacggaggttgcactgagccaaaatcgcaccacttcactccagcctgggtgaaagagtgaaactccatctcaaaaaaaaaaaagagaagacgaaaagaaaaagaaaagaaaaagtttaaaatttcaatgaaagccagtttatctgtttggttttgtttttacatatcatggtttgggtgttttcttagagaaattttatagttttagcccttatagttactatgatccattttagttttagctcttatagttactatgatccattttgattt

SEQ ID NO: 25525 - DNA, 1032 bp, Homo sapiens
gggattacaggcatgagccaccgggcccggcccatttttgttctttaagtggatttaatttccatcttgagttcctacgctgtctgaactggtcacttaatctaggcatttccaggcaaactcgaaaccagccctcagagattcttatcctgcttcctgtgccctgagatttgcctattctggacattttatataaatgggatcatacgatatgtggtcttctgtgactggcttctgtgactggcttcttgcacgtagcatactgttttctttcttttttttttttttttttgagacagagtctctttctgtcatccaggctggagtgcagtggcgctatctcagctcactgcagcctctgcctcccagattcaagcaattcttctcccttggcctcctgaattgatggacatttgaattgtttttactttttggctatgtcgaataacgctgctatgaacatttgggttcagatttttgtgtggacatgttttcatgtctcatggatatatacctaggaatggaattgctgccagtctgtccaaagcagctgcactattttacttttttttgggtgggggaggtgggggtgtgggggtggtatttggtctttattccgtagatggcttaaagaaattcagttatctaaaatctcaggacaaatttatcccttttatcttatattcaattcagaaattgttgagattttcctagaatcacagtctgcaaatacatgacagtgaaggattggaaggtggtaataggaaaagtagctggggagacaaaacagtgcccagactgaggttttaatgttaggaaaaaagaacattaatgatactgcagaatggtcacaagagctatccctagcaccagtctttttttttttttttttttttttagttccttttattaatttcaataggttttgggggaacatggcgggaggggcagatttggttacatggataagttctttagtgatttctgaggttttggtgcccccgtcacccaagcagtgtacactgtacccaa

SEQ ID NO: 25526 - DNA, 1034 bp, Homo sapiens
cggaatgaataagatttggaagagaggtgagttataaaatgatggagcccacttaggaaaaatgaaccgtaagctggaggtccagacacaaagggcataagataggaggtgtggtactaaggacaggaatgtagatgggatctagagccgcactcgccgatagaaatgcaggccacgcacataatcaaaacatttctaacagcctcattgaaaaaccaaaaagtaataggcgtcattaattttaatagtatatcttacttaacctgatattttcaaaatattgtcctttcaacatgtaatcagtattaaaacatgatccagatactttgctgtttcctgcactaagtctttgaattccagtgtgtatgttacaattgccgtgcatctcagttcagcctagccctgtttcaggggctcggtagtcacgcgtggctagcggctgctgtgatagacagcgtaggtctcgattgcacaggcaagggtcagtgatgctagaaagtctgttgagatcattatgggatgatgaaatgaacatagctttgttttgagcggcagtttaaagttcgtagaacactctcatatttattaccttatatgatcctcagaatattgttgctgttactagtccccttttagaagagagaaaactgaggctaagtgacttgtctaaggttgcatatttggtaaatactggtgctgatactcaactttgaggccattgacttctatttcactgctttttcctcaccataaaagatgaaagagccaggtgcggtggctcacgactgtaatcccagcactttgggaggctgaggcaggtggatcacttgaggtcaggagttcgagaccagcctggccaacatggtgaaactccatctctactaaaaatacaaaaattaactgggcatggtggcgatgcctgtaatcccagctatttaggaggctgaggcaggagaatcacttgaactggggaagcggaggttgcagttgagacaagatggcaccactgcactccagcctgggcgacagagtga

SEQ ID NO: 25527 - DNA, 1119 bp, Homo sapiens
caacattttgctgtatctagtcatcttgtcctgacccattatgctatgtaggactgtctggtctctccttaaaaaaaaaaaaaaattaatgccatttaacggcacagagagcagacagcacaccattatgtactgaaaggtagaagccaggatgtggagacccgacctaaggtaacaggcatagatagaagcaacatagctgtctactggggcatcggggacagagggaaggaaggggcagggaaggattaagggaagtcagcacaggacctgcattaggaggttgcaaggagttcccttttcctcctgcctgagtggaacggagtaaataaagtattctggctgtaattttcctttcttggagatttttcaggtccttgagaagagtatttttatgactttttccaccacaaaggattgctttgttgaggaaatgtcaggtgaagcagtattgagaaggtgtccatttcacctcttggccatttggaagcaatcaaaacaagattggtagaggaggcactgctagagttgaaaagttgtaatagggaaagagggagcgtgagtgagaagcactgtgcagcccctttccgttcacccatcctctctagagagatcctgcaggagattcagcgtctccgcctggaacacgagcaggcctcccagcccacccctgagaaggcacagcagaaccccacgctgctggcagagctgcggctgctgaggtgagtagggacactctaccacttgccacatgtaatctactatggatggaacttatctgaggaaaccaaaggagtggggtagaatctgttgttcagtataaacaatcctgtgagcgcagaccactgaagagttcacccattctgttgctgcttcagatgtctgggttccattagagatcactctaagaatgtcagccattatcacagaacttggtaaataccagtctcccagctccaggaccagcagggcactgtttatacttctgtgattgctttaagaagaccactgtgctgcagtctgtctcttaacttgctaatttgtctgactttagagacacttggcgggaagaatgctttgcctttgctgtgagtatattctcctggcactttacagtca

SEQ ID NO: 25528 - DNA, 1041 bp, Homo sapiens
caaaaatgtgcaggagttgttctacaatgacccagttctgtctgttttgacaagaactctgattcttagagcagcgcatcgaccttggatgcacattgaaatcacccgagaagtttttgaaactactgctgcctaagcccagttccagacatcaatttaattggtcttggatgatacaacctgagcactgggggtttaaaaatccctctaggtgactggagtgcatggccaagtttgataaccactgaccaagagaaacgtttctggactagggataagccagagtcacctgccatgttagatgtgacccttagttgaaaaccattagttttggatagagtgcacaaggcaataattttagtttctctgttaatctatcagattcctctctgtaatctgcctcttggcaaaggaccagtactttactctttcaggccatgttttgcactttattaggccctaattagctcaacgttgaactagaaaagactagatgttgttgacactttaggcgaacttgccaaatatgagccaaatctctgggcttattaaaagttcaaaaatctgaaccctgaagttttcttgttttttgaaacctgtttggtctggaataagttaagaggaaaaaaaaaatctgtttagggaaaagttgaaaaggtgcatgtcatcatcttcctagccagaatgcagattaaataccatctctatcctaactttctaggaaaccttcttttcatttcacaacttaggaatgcctatgatgcctgagtgtctttgaaaaaaaaaatttctggttcttccttaggattcaggtttccctgattgaaaacaaccctggctttgaatttgatacagatttggaacttttcagtttgtaagtttttgttaagaccctgttaagtgttttgtttattacttcagaggtgatcaagaaacttcttgaaagagcaaattctgcttaatggcatgagagctccatgaaggaatttattagatacaccctgattctccactgccctaacacacgatactgagttgcta

SEQ ID NO: 25529 - DNA, 1026 bp, Homo sapiens
ctgtttctagaaatggaaatattgaagagagacgaggaaactttctgacttgatagaaatattccacatttcaataggggtgtgggttgcaggagtgtacatttgtcaaaacggattaaatgaaatacttttttttttttttttttttgagatggaatcttgctctgtcgcccaggttggagtgcaatgtggcacgatctcagctcactgcaagctctgcctcctgggttcacaccattctcctgcctcagcctcctgagtagctgggactacaggtgcccgccaccacgcccggctaattttttgtatttttagtagagatggggtttcaccgtgttagccaggatggtctcgatctcctgacctcatgatccgcctgcctcggcctcccaaagtgctgggattacaggcgtgagccaccgcgcccgtcaatggaatacttaagatctaagtattatatctcaattaaaacaaaaaggaaccaagaatgttgaataagggtttgattgaaataggaagtggctccccagggatttgcagtgtgtttcctgcaattttgaaatattcataataaaatgttttctcttttccttctcctttttcaattctttactttctttgaggagttatgttcacattaatattcacccacccccaaccagccacacacactcattttattcattcagcaaatacttcttttgttgctgtactgtgccagattggatactatggtggacaaatgattcctgccctcatggaactaacagtgtagtgacagagacaaacattaaacaaataatcacactactaaacataactacaaattattatgtgcagtggaggaaaaatgcagggagctgtggaagtgtagagcaggtgcctgatctattctggagagtaagggatagcttctgtgagaaagtgttacttgagttgggatctgaaaataagtagaagagaattcaatttcctaggaattgaaaagtaactgaaaaccaaagcaggccaagagctactgttgct

SEQ ID NO: 25530 - DNA, 1031 bp, Homo sapiens
ttgagcttcagaaaggtgactggggccgggcgcagtggctcacacctgtaatcccagcactttgagaagctgaggcagggagatcacttgaggtcaggagttcaagaccagcctggccaacagaggcgaaaacccgtctctactaaaaatacaaaaattagctggtggtgcacgcctgtaatcccagctacttgggaggctgagacaggagaatcgcttgaacccaggaggcagaggttgcagtgacccgagatcatgccattgcactctagcctgggagacaaagcgagactctgtctcaaaaaaacaaaaaaacaaaaacaaaaaaaaacccagaaatgtatcagtcacatacaaacataaaagaaacctaccagccatttgcaaagtggggactttgtttggatcttgactttaattgtaaatggacattttttaagatttgaggaaattggcagatggactgggatactaaaatatttttgtctgtgtttttaggtgtgataatggtgttaggttgtgtgaaatgtttttactatctgatagatgtacaggctcaagtattcccaggtgaaataattgcctggggtttgcttttagccactcgtccctgcacaaaatgttggaggaatgaaaattcgattagataacattgacaaaatgttgacattcattcaagttttgctatgggtacctgaggggtagtcattagattactctattttatgcaagttttaatatttctgtagtaaaaagttagaagaccatgtgcttaaggacctttcatgtatctataagagagagcctcactcagagtatatagtgttgccttataattaggcgcagttctaatgagtttgggatgggtaccagttttatgggagaaatagactgatgctaaaggcagtatccttatagaaataaaaatgtttaactggcaacatgaagtaacactgaaaattcttagatgtacacaaaagcttataaaagcatagcgctagggggtcatgtagtgatatttagtagattgg

SEQ ID NO: 25531 - DNA, 1056 bp, Homo sapiens
tacaatatatttgtcctatgacataacccagcacatgtctttttttgtttttgtggggggtgggggggcttttatcccttcagtgacttccccttacacttaaaagccgaagtctatacaatggtctacaaggccccataaaatctggttcctggcaacctctctaactttatttcctgccactttcccattgctctatcctcctttgttattctggttttgttccttgcaaataccaagtgtgcgtccacctcagggcctttgcaactactggttcctttgcctgatgtgcccctcatcctcatactcacatggcttatttgtttatgttattcagatctctccttaaatgttagcttctcagagatactttctgtaacttttttatctaaaatagcaccatcagtcactctgtttcctcttaccttgtttcagtttctgcatgacacttgccattatatgacattttaaaaattcatttttgtatttgtttataatctctaccctattagactgtaagttctttgaaagcaaggctttttttttttttttccccaccaaactcattttactgccagagacaaggactttattttacttcctgctctatctccctatctggcgtgggtctggcagatagtagatcttaaatacttacagaatgcataactgcatgtgtatctatatgtgttcatgacttactaatagtagtgatattcatgaggcattcaggttattaaatgatatcagtgtgtcagaatgaggcaggctttatttcttgtggggttttttttttttttttggttgttttgttttgttttttctttgagatggagttttgctctgtcacccaggctggatgaagtgcagtggtgtgatctcgggttactgcaacctccacctcctgggttcaagcagttctcctgcctcagccttccaagtagctaggactacggacacccgcagccatgcccagctaatttttttgtatttttagtagagacggggtttcaccatgttggccggctagtttcaaactgccgaccccaagtgatc

SEQ ID NO: 25532 - DNA, 1041 bp, Homo sapiens
caccactgcactccagcctgcagcctgggcgacagagtgagactccgtctcaaaaaaagaaaaaagaaaaaaaaagaatagcaaatttggaagactcacacttcctgattttaagacttacttcaaagcaatagtaatcaagacggtgatactggcatgaagatagaattgagactccagaaataaacccttgtatttgttgttgtcgatttttcaatgagggtgatgaccatccaatggaggaaagaatagtcttttcaaaatatggtgctgagacaacaactggatattcacaggcaaaagaatgaatttggatccctgccttataccatatgaaacacgaattcaaaatggattatagaccccttaatgtaagagctacaactataaaactcttagaaaaagagattagatgtaagtctttatgaccttgagttagtgccttcttaaatatactaccaaaagctcaagcaacaaaagaaaaatagacaaattggacttcaacaaaattaaagattttggtgcttcaaagggtgccatcaagaaagtaaaaagataacccactgagtagaaaatatttacaaatcatgtatctgataagggacttgtatccagaattataaagaactcttaaaactcagcaacaacaaaaacaacaccccaactaacccagttttaaaatgggtaaagggcaaaatagaatggtcgttatcagttgggaggagaaaatgggaaattattgtttcatcagtatagagtttcagatttgcacgatgaaaaagttatggcaacgtgaacatacttaacactactactgtactatacacttaaaaatggttaaggtggtaaattttatgttgtgtgattttaccagtgaaatatgtagattaggctgggcatggtggctcatgcctgtaatcccagcacttcgggaggctgaggcagatggattgcttgactccaggagtttgagaccagcctgcccaacacagtgaaaccccatctctacacaaaatacaaaaattagccaggtgtggtggt

SEQ ID NO: 25533 - DNA, 1073 bp, Homo sapiens
aatttatttctatgtatggtataatgaaaagatacaatttttttttcaatttggatgaccagtttttcagcactctaactttttttattatagtaaaatacacataacataaaaataacaattttaaccattgtaagtgtacagttctgtagcatgaaatacattcacattgttgcacagccatcaccactgtctccagagctttttcatcatccccaactgaaactctgtaccccttaaacaccagctccccattcttccctcagcgcctggcaaccaccattctactttctgtctctatgaattcgactactctaggtacctcatatgaatggaatcattacaatatttgcccttttgtatctggctgatttcacttagtataatgtccttaaagttcattcatattgtagcatgtgtgaaaatttcctttttaaggctgaataatattccatggtatgaatataccacattttgtttattcattcattgatggacatttgggttgtttccccgttttggccattacaaggagtgctgctatgaacattggtatctgtatgtctgtttaagtctctgtttccatttcttttgtgtatgtactcaagtgcaattgtcagtaatacagtttttaaaacaatatacataatggaataaaaatagattaacacaattttgaccaatgtggctgaatagtatggagtttccatatacccactctttcccatatggtttctcctattattaacatcttgcattagtatgctacatttattataattgataaactaatattgatacattgttgttaaagttcatgatttagagttcactctttgtattgtatagttctatgggttttgacaagtgcgtaatgtcatgtatcatttacatggcatgactgcatgctacaaccctgcaaggggctcacttgtaaaatactcaacagtacagacagaataaatgtcattacatggctatagttttaccttttccagagttggaaatgtcatagatttggaatcatgtagtatggagcctactcagattggcttcttttgcttagcagtatg

SEQ ID NO: 25534 - DNA, 1488 bp, Homo sapiens
aagactagcctagccaacatggtgaaaccccatctctactaaaaatacaaaagttagccagacgtggtgacccacacctgtaatcccagctactcgggtggcagacgcacaagaatcacttgaacccaggagactgaggttgcagtgagccgagatcacaccactacactccagcctgggagacagagcaagaccctatctaaaaaaaaaaaaaaagacttcctagggtcttgggggttctgatttgtaattttttgggataggacccagagcatatatattttaaaattgcgcaagtaaatataataccagccagagatgagaatggctggcaaacattatgtacatactcctttatgtgtatgggcatggtgggggctcctatagatcacacattgtcttccttccagtgctgtctagaagcctgtgtaatttgagataatccagcccaagtgtgtgtgtgtgtgtgtgtgtgtgtgtgtgtgtgtgtgtgtgtggaacagagaagagcaagtattttcccctggaccttggtagtaaagctaagaactaaaagacagtagtggtatgggtggctggcttgcttgcttttctcttctttctcaaacataaatacactttttaaaaatgcaaataccatagaaaactttgtatcataataagcacttgtaatagtggcattaggagggagttgagataggaaaagaggtgtggggatttggggtgagagtggaagcagtcgtctttggcaccaatagaaaaagtggatgcaaggaccctagagacaaactagtattgctgtctccaaggtttggcctctcggccatagaccacccatgtttgtcacaggtactgtagtgttcatctgtttttaaaatgtgagggctaatgaagttttgttattcttacaaatgaaaactaagctctgttgtttttttcccctctacttctttcagatcccggtctccagaatctcccccatgccgtttcatccatcgcaggtctctcccagggctcgttttccagtctccatcactagtcctaacagaacaggagccagaactcttgcagacatcaaagcaaaagcccaactggtcaaagcacagagggcagcagctgccgctgccgccgcagctgctgcagccgcctcagttggagggaccattccaggacctggcccagggggtggacaaggtccaggagagggtggtgaagggcagactgctagaggaggcagtccaggctcagacagagtcagtgaaactggaaagggccccacactggaactggcaggaactggaagcaggggaggtacgagagagcttttaccctgtggtccagagactcagccccagtctgagaccaagaccaccccaagccaggcacagcctcatagtgtctctggagcacaactacagcaaacccccccagtgcctccaacacctgccgtcagtggagcatgcacaagtgtcccatcaccagcccaca

SEQ ID NO: 25535 - DNA, 1028 bp, Homo sapiens
ggctcacgcctgttatcctagcactttgggaggccaaagagggcagatcacgaggtcaggagttcaagaacagcctggccgatatggcaaaaccccgtctctactaaaaataaatagctgggcatggtggcacgcgcctgtagtcccagctgctcgggaggctgaagcagaagaatcgcttgaacccaggaggcggaggctgcgtgagccgagatagtgccactgcactccagcctaggcaacagagcaatgactctgtctcaaaaaaaaaaaaaaaagccaggtgtgtacctgtagtcccagctacttaggagacagggggataccttgagcccaggaattcaaggctgggtgacagagtgagaccctgtgtcttaaaaaaaaaaaaaaaagaatttgagattgtaaataaatagatgtaaataaaattaatatgtaataatcagccaccatgtacataaataataatgaaaaagaatatatttgcggtaacaacatcaacaacaaaaaaattctgagcatcactgttttttttcttttcttttctttttgagacagttttgctctcgttgcccaggctggagtgcagtagcaccatcacggctcactgcaacctctgcctctcgggttcaaacgattctcctcctgcgacctcccaaagtgttgggattacaggcgtgagccaccgtgcctggccaagcattacttttttaagatatgtgcaaaatgttgaaacaactcaatacccaaaaagataaaattgcattcatttctcacactccaggacaaattccaaagaaattaaagttataataaatgtaaaatatgaaaccaagtactacaggaaaacatgggtgaattaatttcttttctttttttttttttttttggagatggagtgcagtggcatgatctcggctcactgtaagctcctccttctgggttcacaccattctcctgcctcagcttcccaagtagctgggactacaggcgtccgccaccacctcaggctattttgtatttttagt

SEQ ID NO: 25536 - DNA, 1022 bp, Homo sapiens
gatctcggctcactgcaacctccgccttctgggttcaaaggattctcctgccttggcctcccgagtagctgggattacaggcgcccgccaccacacccaactaatttttgtatttttagtagaggtggggtttcaccatgttggccaggctggtcttgaactcctgacctcgtgatccacccgccttggcctcccaaagtgctgggattacaggtgtgagccactgcgcccatccagcccgccgcacctgtcttgtctttgtattttcttggcagtttctttctcagatcagaaatgtttaatgaagtctagtgtatcacattttttcttttgtgaactgtgtctttggtcttgtatctaaaagtcatcataaaacccctagattttcttcaatgttatgttatgttctgggagttttagaaattttcatttttgtttaggtctgtgatccattttgagttaattttttgtgaagcgtgtgagacctgtatctggatttcttttctttttgacatgtggagttctagttaggaatttaattttgattttattttaactttaaatagccacatgaggatagtggctaccacaccagacaacattctaggttttacctggatttgttcttaaggtcttaagtcatccatagccttttaggatgcttttattttacttgcctaaactttgagcacttaatgctctaacaaccctccttaggaaaagaatgcttttcatttctactagcaaacactgaatttagtctgctggtctttgctcttattccgtttggtgtctacttcataactcacctgaaaagctttcgttagggaataatgtctgttgctgcagcttccctggaatggattttccagttaaggatatgaattattgcctaattactgctaattattctgtagcttcttgtcagagtctattcaaagagggcaaatcttgtttatcccaatatttataatttagctgtacatggcaaggcaaattttaaaccaactcttgatgattcc

SEQ ID NO: 25537 - DNA, 1033 bp, Homo sapiens
tacctttagactcccagtcagtgctaaatcccctcacatctgatttcttccctccgcattaagtggaatccgaatttacaaagctaattaaacatccctttgttgacaaatacaggggatacatttctgttgttatctcagcttctaggcagcatttgacattgttgaccacctaaaccttagaatacttttgtcttttctgaaacagcagtgttttctggttttcttctcatctctctggtcatttagtttatttcctagtttttcttctctggctcttaaacgttgatatattgttctatagcagaagccctcatctcttctcactctatattggctgatctgatttactggtatggcacaagttaccctaattaaagcttttgggcagtaaatgagccttttaacactgatagaactttatatatagatcactgtgttacttatttggacatttaaaatgtagcagtcatatagattatacaaaattcagactctgcacatctgtatatctggaatgaactcataatgtaatagtaattgaaatattcccgttatttaggctagaatcaaacttgaatcttagaggcaactcagttattctcgagtgttagaaaatataatttttaaatcctttttattaactgaattgggaatctacaagctaagaagtaaatatattaagcaccctttaaaaatctagctttaaatctatgtagtgttgattttagttattctgagtggttattcatattgtcataaagtagtttctaaaaattgtactttaaagtttccatgagcagttcagtggaatgaggtttgtttgataaacactgccctcctgtggttaacgtaagctaacagttttgcaaaactactgtagtcatttccgcttgtggaagataatgtaatggttcatacagcatgtttgctcagtaatatatgtggccaagaaagggtttttttccctcattctctccctcttggttttttcctagtgtgtctgcacattcttctcatttctatccatgca

SEQ ID NO: 25538 - DNA, 1047 bp, Homo sapiens
tttgccatatgctgtacttgccttttatcattagatgtggaagcactgaggagcacctactaggttaagctacaaattgctgtcaccttcagagccaccgaagtggttggctcttctttttgaggaattataacagggttctgagagttggattctgctgatgacaagttggacaactcagcagcagcagtggctcttttcattaattagctgacaaaaccttaggcaagttatttaatttctctgcacttcagttttcacatctgaaaaaaaatgggctgatagtatctacctcataggtttattgtaaaggttaaataagctaatatatctaaatcacttagaatagtgcttggcagttaaatgctagataagtattaactgttagtgttattaactctaaagagtttgaagagagtttggttgagagctttttttcttgaactagggagtgtgtataacctccagactttttggataattaaaagaatccaagctaggaaagactaaacccaagtgacttgatagagctgttcagaattgagggacccctaggtaaactatgcccatgagcttacaatgtcagcttctgtaatcttctctgtatatctgtaggtgcctctctgtataggtttcgtatttaagtattctcagctacttttacactcaagtttctgcgcccaaatctgtaaatttatttgcattttccctcaccttttatccttttttaaaaagaggcatttttactagtgtctgaagctaatcttgccacatatgttcctaattccatcagccaaccattaagtgttttagatctgtcatataataggcactagtaatactagatgaataaggctgggcatggtggttcacacttgtagtcctagctacttgggaggctgaggcaggaggattgcttgagcccaggagttcgaggctgcagtgagctatgatcatgtactccagctataaaactgcatgccaccttgggcgacagagtgagtccctgtctcaaaaacaaaaaaacggtgcactgtgataagcagt

SEQ ID NO: 25539 - DNA, 1029 bp, Homo sapiens
cctcatctagataattaggctgaccagttcatagggttgtaatggattaaatgtaaggaataagtggtaaatgtattgaagagcaggtagataatgagcagccaaaaattacagatatcacttgttgtaccttatagctaaagtgagagggagaaagcaaaactataaattaatgaattagacttctttcaccacagttctgttgggaagactatgtaactgttagctcaatgaggggtttctctgaaaccttagcacgcatcagaatcaccaggagggattattaaaacaaatctgggccccacccatggagtttctgattcagtagggctgggctaggcctgagaatgtgcaggcctaacgctcccaggtgatgacagtgcttgttgggtccgggtactacacttggagaactgctggtttaatgagtcttaagtgcatctgactgttgaggagtgttagttaaacctagtatcctggtggtgagacccatctgtgtaaaatgcaaatacttctctgacagcccaacacattaattcttctgcctgccccacccccgcccaaaaaaactggatcctcttatctaaaccatcagtatcattaatataagtggaaccttcatccgtcgttccccaataaatctagtttggcctcgagctgtggttttggcactgattgttgggaggatcagatgtctgtagtgaaaaaccttagaagcaaatggaagaggaggattccaatgtgctctccctaaacatactaaacttttatcaaagacccatggaaccaaaccactcagctatgtcaagcagtattcctatatcacagccacctttctttctagtgttttcctagcagagaaggaatgctctcaggttcctcacccgcattctccgatctgttggcttttggttccccttgccaggtgattggcatgcactacttctctcccgtggacaagatgcagctgctggagattatcacgaccgagaaaacttccaaagacaccagtgcttcagctgtagcagt

SEQ ID NO: 25540 - DNA, 1049 bp, Homo sapiens
tgaaacctcgtctcaactaaaaatacaaaaactaaccgggtgtggtggcacgcgcctgtagtcccagctactcaggttattgaggcaggagaatcgcttgagcctgggaggtggggttacggtgaaccgagattgtgtcactgcgctccagcctgggcgacagagcaagactccgtctcaaaaacaaaaccaaaaaaacccttcatacttgtaaaacttagttaattgtggaaagccataaaatgtgacttcagtgcaagctaataatagtttataaactgcacttattgtttatcagttcagatataagcaaactcaaaatgacatgattgattcttaaaattgttttctacctctgatattttctttaaaagcactttttaaaacagtaacttttaattttgtgaaagcagttacaatttgctgcttctctgcataaggttgtaacaagtttgaatcaattataaattcatctgataatttataagctgaagcataacccagaaattggtttatactttgacatgttactggctgtgtaatctcagacaacttacttcacttagccccagtactctttttcaaaaagagggtatttgggccgggcgccgtggctcacgcctataatcccagcactttggaaggccgagtcgggcggatcacgaggtcaggagatcgagaccatcctggctaacacggtgaaaccccgtctctactaaaaatataaaaacaaaattagccgggcgtggtggcgggtacctgtagtcccagctactcggaaggctgaggcaggagaatggtgtgaacccgggaggcggagcttgcagtgagccgagatcgcgccactgcactccagtctgggtgacacagcgaggctctgtctcaaaaaaataaaaaaaaaaaagatcatttgatcctaagatctaattcgatccattagaacctattaggtactacgatcctattcatctctgaaattcagtgaaactgtatatcatataacttctctgagattaagtcatctcatctgggaaatcttgtcttaccta

SEQ ID NO: 25541 - DNA, 1028 bp, Homo sapiens
actgcactccaacctgggcaacaagagctaaactccgtctcaaaaaacccaaaacaacaacaacaacaaaaaacaaaattgaatgttcactggctgagggttagggtgggtggagagaaaatgccagttgtgtggatctgttgatgtaaaacaaaggcctagagggtggtaaactggaagcagttcaatgggacagtgcttgatgggactttggaggtgatgaggtttgatatagtttggatttttgtccctgcccaagtctcatgttgaattgtaatccccagcgctggcagttgggcctggtgggaagtgtttggatcatggtggtggatccctcatggtggatcccagttctcatgagatctggtcatttaaaagtgtgtggcacctccccaccacctctctctctcgctcgcttgctcgctcctgcttttaccatgtgatgtgcctgctccccctttgccttccgccatgattgtaagcttcctgaggcttccctagaagcagatgtcagcattatgcttcctatacagtctgcagaactgtgagccaattaaacttcttttcttataaattacccagtctagatgtttctttatagcaatgcaacaatagcctcttatgagtttggaaagggatctgagcccatatgccaaggaacttgcctgccaaatctggactttatccttcaggccctgggagaccagtgagagggtggcataatccactcttttggaagggtaaatgtggctgtgtgaagtgttggtaggggaaggcagggggtgggagatgagcatatcttgctgcctccttctacctgtcctccagcccccttaggcctgaccatggctgactttgcatccggtagctctgagatacagtgcctttgccaaggaccatatttgaactgatcattaatcaattcattttgcagatcattggtttaggtgtactcaggagaccaacaacaatatcttctctttgtttgacccctcctgtgtcacatgtatgatcacagaagagaccat

SEQ ID NO: 25542 - DNA, 1033 bp, Homo sapiens
ctgctggccaccttccagtcagccgtggccatcctgggtgtgccgtcagagatctaccgatttgggacccaatattggttcctgggctgctgctactttctggggctgctgatacctgcacacatcttcatccccgttttctaccgcctgcatctcaccagtgcctatgaggtgagcagggacagaagggagaagtgcgtgggacacgggttggggtggagaggagggacaggcacataggaaggacctgggaccctagacctcctccacctaatgagagggacagaaaactcattgtgtgtttataattctttctcagtgatgttaggtataggggcaggattggagaggagggtgctatgccgagtaggactcagagtgggtatgggttggatattccctcatgttcctgagcatcttgagggaatttgtctgtgagttgtcggggtgaagtcaggagaaaaatctttttttctgtatacccagtacctggagcttcgattcaataaaactgtgcgagtgtgtggaactgtgaccttcatctttcagatggtaagcagaatgaggatagaaaccgagcctagggcatgttgggggacctgaacgcaagcatgctgagggaattggagtctcccctgctctcagattggcaggattgaaattcctgctagaggttagcatctgtgaggaccccagaggcatcctgctgcccatgccttccaattccagcacagatactgtggtggcagcaagccagaatttgagaggagaaggaagagggaagtgagcctaggtgaggggaagccatgggcatattggcgctgaggcccatctttcttcctctctcttcccaccattctccggcccccatcacattttttccacatgcaacaggtgatctacatgggagttgtgctctatgctccgtcattggctctcaatgcaggtgaggagtcacacagcccctggctttcagccgtggtaggttaggaaagcacctttgggagaggcagatggaggagcgtatgtggaa

SEQ ID NO: 25543 - DNA, 1898 bp, Homo sapiens
ctcaccccactgccaggccgaggctcagccccagactctcagcatctgctgccctgatcacagagacgggaccgagccaggtccataccccttcctctctccctcctaccacctgccagtttccccagcctcagccccagccccagccccagtgggcaagaccaaagtgtggcggggagtggggtgggagtcaggggaatagatgtgactagttcaggggcggggactcccaggcctcagtgtggcagggtgtgttgaaggcctgtggtgccatctccccatggttcatgtggagccacgaacatcctttccctgcagtccatttgtctgtgtggcaggctggctggctgggggcatctgcctgtctatgtgctgttggtgtgcctatgcctgggggaggtcagtaggggccccctccccacatggccctcgctctgtctatgcaggggccccaaagcccgcactttgtccgtgtgtcttagccctgtggttttgtctgtgtgtgtgtgtgtgtgtgtgtgtgtgtgtgtgtgtgtgttcttggtgctgtggcctgtgtgtctctgtgcctatgtggctgtgctatggtttctatgagtctgctccatccatgtgtctgtttgggggtctatctctccatccctctgttggtgctgtgcccttggctatccctgaaagagggaggactccgctgcagctccaccaataaacttgtgtctcactgcatctttcagcctgtgtgctgactcctcaggagggggaagtcaaataggtcacttgagaacaacagaatccctcctgtcccttcccagcctctggagtgacctcccacagacctcctgtcccttcccagcccctccaccctcagatggagggtaaaagccaccagtctctttactccccttcccctggctcacagcatgcctgggtccttggctcagggacagtcccatgtgccctgggcttggttgcaggagaatgctggaaggtaaggagccaaggaatccctgggagtcagtcgttctcagaggtccctgcatgccagtgggcctcaggctggctggagggaggctgggtccctttgagggagaatggctagaccatagcactgatgtgggcttggttctcaggccatctaaggtgtccagcggtagggacccctcaaccctgatagcagccaaccctgagtccaggtttaggctgtgaacaccaaggacctcttttacacctattccccctttgtcttaagaactgcatattttgacacattaagtcttaaaatcaggctcattaagggattgttgattttctctttaaaaaaaatcaaactcaagctggacatagtggcctgtgcctgtaatctcagccctttggaggctgaggcaggaggattgtttgagcccaggagttcaagaccagcctgggcaacctagggaaacccctgtctctacaaataatttaaaaattagctgggtgtggtggtgcatacctgtagtcccagctattcaggaggctgaggcaggaggattgcctgagcccaggaggtcaaggcagcagtcagccatgatcatgccactgcacttcagcctgggcaacagagcaagaccttgtctcaaaaaaaaaaaaaaatcaaactcactgggtttggtggctcatgtctgtcatcccagcactttgagaggctgaggcaggaggatcgcttgaggccaggagttcaagaccagcctggtcaacatagtgacaccctgtctctacaaaaaaaattaaaaataaaaataaattagctacgtgtggtggtgtatgtctgtggttccagctactcaggaggctgaggtgggaggatcacttgagcccaggaggttgaggctgcaatgaactatgatcatgcaactgcactc

SEQ ID NO: 25544 - DNA, 1046 bp, Homo sapiens
ggcaacttaagaattcttcagaccctttctcagagtcgtcctgctgtttgggacagtacatttgacgttttccctttattttctgagcacctaccagtagcttgcttagctgcatggtgaggggatgggataacaaaggtatctaggattctatccttggccctgggaggtcatgcctcgcagtgttctgggaagacccccaccactttgggagtttcagggagagacgaggcaggactgggggtgcccagagctgctccatggccagtagccgaggtgagccacgggtttccatccccaaccccagctctcagccatacccagctgccactgactaggctgctcaggggcagggccggccgggcagagggtgtggaggaagaacgcaacagtgagtgtgcagccagcatggacgtcagagccagttctgggccaaggaatggggcagaaggatgtgtttgtccagtgctaattgagggcacagggacagtgtgactgtgggtctggaggggggctctcattactcggtgagatagacaggtgagctggaaatcacacggtcactcccaagtggcctggtaagtgtgtatttgctagaaaccatcacaccaccataatggactgggggctctgtaaacagtgatgatttctttcatcgtttctgggtgtgggtgtctaaatagggctgcttggagctgggtatctgtgcagttggggcaagggaagcaggtgcagagtcctggaagggaaatgaccactatatccattgccaactcaatctaaggttgtgaatgggggaaatcttggtttagctgattgtgctaagaggtggccaagactctttgttgtggggactcttatcagctcaaccagtcatcttcctgcttatgaccatttgagcactcttgttttattactttttttttctttttgagatagggtcttgttctgtcgcccaggcagcagtgtaatggcgtgatcactgcagcctggacctcctgggctcaaacagtcctcctacttcagcctcctgagtagctgggact

SEQ ID NO: 25545 - DNA, 1034 bp, Homo sapiens
gggcaggaagtggtcccaaattgatctgctcagaggcaggctcccttccccctggccgctggatctgttcgggagtgacggcatgagaactggcacctacccaggggcatgatgtcacacctgcgccagcatctgctcgctgggctccacgcccagcctgtcattgggcatcactgcccagcagcccctagccctgccccatcaggcctctggccattatgtgtctgcaggcctccagtcccaactccctagaaacaagtccaaggggagggggcccagagcactggagagtccagaccaaccaaatatatccaggagatctcccagaggctggggtggtttgggtctatttgggctctgggttgggaaatgtgggatgaggaatctgaatgtctgggtccttcctgcccaaagggtcacttgggctggaaaagcaggcttgctctatgcttgctccaaagccttataccaccttggagttgctgcaggcacagggggcctgatcatctgtgggcaaaggaatccctgggcaccactcttctgaaatgaaccgtcagggactgcagatctacataccacctactcacccctactgctgccctgtcacttggtagtccctcaggcttgatgggcacagtctgggggacttgaatccatctttctccaaggctgcaggcttccagaactatggggctagaagtcagggacttggcttttcattccagctctgcctctagcttgttgtgtgactgttggcaagtcatgaagagtgaaaacacacacttctctgtttctttcccaggaatattgctgtctgccatccccacgaggtgacaaggagcagaatgatggaatttgggggagtaaagacagagaggaagtgcattagtctagggaatgtcctttgatatgcaggccctttggggcctcacttgggcaggaacacccagcaggggagcagccacaggggcctcctggtgccactgacctctgagcccatctcagcccatgccaggaataccctggcctccttg

SEQ ID NO: 25546 - DNA, 1050 bp, Homo sapiens
tttcttaattcctaaacttgattgagtgcctctaccagtccatttatcttagtctcccctccaattgctgaattatttatattgcatggctataattcatcgtcaacaaactttttcaagaaaggttcataggtgctgcattcattccctgagtggctcagccttctgagtagctgagactacaggcatgcgccaccacaccaggctattttattttttttgagacagggtctgtggggtccaggctggagtgcagtggcatgatcttggctcactgcaacctctatctcccgagttcaagcagttctcccacctcagcctcctgagtagcagggattacaggtgcataccaccaaaggccagctaatttttgtatttttagtagagatgagatttcaccatattgttcaggctggtctcaaactctggacctcaggtgatatgtccaccctggcctcctaaagtgctgagattacaggcatgagccatcgtgcctggcctttttttattttttagaggtggggtctcactatattgcccaggctggtctcaaactcttgggtgcaagtgttcttcctgcctttacctcccaaagtgctaggattacaggcatgagccattgcacctagcaacattgtgttgcttttgactttttgcctgttctctttgtcttggggcagagttagcgaacattttcttttttttttctttttttttgaggtggagtctcgttctgtctcccaggctggagtgcactggcgtgatctcggcttactgcaacctctgcttcctgggttcaagtgattctcatgtctcaccctcccaagtagctgggattacaggtgtacaccaccacactggctaatttttttttgtatttttagtagagatgggggttttaccatgttggccaggctggtcttgaactcctgacctcaagtgatccacccgcattggcctcccaaagtgttgagattacaagtgtgagccactgcgcctggcttcctagagtttttatgcttttttttttttttttttgagacggagtct

SEQ ID NO: 25547 - DNA, 1031 bp, Homo sapiens
tgggcgtggtggtgcgcaccttgatcccagctactcaggaggctgaggcaggagaattgcttgaacccaggaggtggaggttgtagtgagctgagattgccccattacactccagcctgggcaacgagagtgaaactccgtctttaaaaaaaaaaaaaaatggaagctttatttgtttacttgtttattgtctgcttcaccaaaatgtaagttccatgagggcagggaccttgtctgtcttgtttattgtcatatcaccagtttccttttttgtttttaatttttttattttattttattttgctagagaaggggtcttgctgtgttgcccaggctagcctcaaactcctaagctcaagctgccttcctgcctcagcctccctaagtgctgggattacaggtgtgagccaccgcacctggctcatattaccagtttccagaacagtcctgacatatagaaggtgcttagtaaatattgttgaataagtgaataatcagggaacttggttatgagtgtgagaatgagggagaaaagatggggaaataaaaatctgagctagtacaaatagtttttgtcctctactcatttgtgtgtctctgtatgcaggggcagccattttggggggtgctgatggatacctgcggggtcggctatgttgccctgggggaggccggccccgtggggaacatgactgtggtagactctcctggacaagaggtgctaaatcagcttgatgtcaagacctcttcagaaatgaccagtgcagaggcttccgtagagatgtcattacctacccctttgcctggatttgaggattctcctgatcagaggaggctccctccagagcaggaaagcctctccagactggaacagccaggtatgtaccttgtcctcttatctttttattccccatgccaagcttaagatgaaagagcagattgagctcataggatcttacaaacctgggtacagtgtaatcttttccatagaggtttgagttctggtcccatctcacagacccatattcttc

SEQ ID NO: 25548 - DNA, 1028 bp, Homo sapiens
actgcactccagcctgggcaacgatagtgaaactccatctcaaaaaaaaaaaaaaaggaaaagctttcttaacataataggatgttccttaattgtcccatagtctacccaccacccccatccaggtgaaatattgatagcagggcaccagagaactctttgactcattcttttttttaaagacagagtctcactctgtcacccaggctggagtacggtggcatgatctcggctcgctgcaacctccaccccacgggttcaattgattctcttgcctccgcctcctgagtagctgggattacaggcgcctgccaccatgcccagctaatttttgtatttttagtggagatggggtttcaccatgttggccaggctggtctcgaactcctgacctcaggcaatacgcctgcctcagcctttcaaagtgctgggattacaggtgtgagccaccgtgcctggccaactcattctttttaaaaaataaattcatttatttatttacttgagacggtgttgctttgttgcccaggctggagtgcagtggtgtgattacagctcactgcagcctcgacctcctgggctcaaggagcctcccaagtcttcagcctcccaagtagctgagactacaggtgtgcaccaccatgtttttttgtagcaaaggagtctcactctgttgcccaggatggtcttgaattcctggactcaagccatccttctgccttgtcctctcaaagtgctggaattacaggcatgagctatcgtgcctggccagaaaattatttttaaatgtttttatttaaaataccatacccaggctggagtatggtaacaccatcatagctcactgtaacctcgaactcctaggctcaagcaatcctcctgtctcagccttccaagtagctgggactacaggtgcgcaccaccatgcccggctaacttttaaaattttttgtagagatgaggtctccctatgttgcccagactggtcttgaactcctggcctcaagcagtccttcttccttggcctc

SEQ ID NO: 25549 - DNA, 1064 bp, Homo sapiens
gtgcctcagtctcctgagtagctgggatcacaggcttgtgccaccatgcccagctaatttttgtatttttactagagatggggtttcgctatgttggccaggctggtctcaaattcctggcctcaagcaatctgcttgcttcggcctcccaacatactgggaatacaggcatgagcctgtacctggtcctattctttcttttaatggatgagtttaaatgatatgtgtttattgttatgatacatgttttcggtttttttgtttgttttttgttttttgagacagagtctcaactccaggctggagtgcaggaacgcgatctctgctcactgcagcctccacctcccaggctcaagtgatcttctcacttccaattcctgagtggctgggactacaggtccctgctgcccaccatgcccagctagttttttttttttttttccctcagacggagtcctgctctgtcgcccaggctggagtgcaatggcactatcttggctcactgcaacctctgcctcccgggttcaagcagttctcctgcgtcagcctcccaagtagctgggattaaggcacgcggcaccacacccagctaatgtttgtattcttagtagagacagggtttcaccatgttggccaggtggtctcaaactcttgacctcgtgattggcccgtccgggcctcctaaagtgctgggattacaggcgtgagccactgcacctggccctgttttggtatttttctgtagagacagggttttgccatgttgcccaggctggtctcaaactcctgggctcaagggatcctcccacctctgcctccctaagtgcagggattacaggcatgagccactgggtcctgccctaaactcacccttttataatgacactgatctgactggtcagggtggagcccttgtggcctaatcatctcttaaagatcccacctcttaatactgttacaaatgggaattaaatttcaacatgagttttggaggggatgttcaaaccctagctcttggatttcacaatccatttgatgtttttgaaagtgcaggaattttttgt

SEQ ID NO: 25550 - DNA, 1034 bp, Homo sapiens
gtgcaagagaagattgtgctagcagctcaggcaatttcacgctttgcttaccagaagatcagtaatggagatgtgatcctggtatatggatggtatggtccagaccttgtgactgagcagattgggagttggaatgatctgaagaagggactacccacttgcctttgggaataagttagtcatcagttactgacatttataactgaatcctcctcttcattcactctagctcatctctggtatcacgaattcttcaggaggcttggacagagggccggcggtttcgggtggtagtggtggacagccggccatggctggaaggaaggcacacactacgttctctagtccatgctggtgtcccagcctcctacctgctgattcctgcagcctcctatgtgctcccagaggtaagtacagaggaaaaggactccaaagttggcggtgaaaaggtgtagtagtatagacataatctcaccttcccaaagttacagttttgtttttgttttgagataaggatggagtgcagcgacgtgatcacagctcactgcagtcttgacctcctgggctcaggtgatcttcccacctccgcctctgagtagctgggactactggtgtgtgccaccatgcccagctagttttttatttttcttgtagagatgggatatcgctacattgcccaggctggaactcctgggctcaagcagttccccctgtctcggcctcccaaagtactgggatcataggcatgagccactgtgcccagccacaattatttaaaaatattagaattatatagccctggcttggtgccatggctcaatgcctgcaatctcagcactaaggcaggaggatcacttgagcccaggagttcaagaccagcctgctcaacataatgagaccctgtacacacacacacacacacacacacacacacacacacacacacacaccccaccccacccccaccccgggcatggtggcatgcgcatgtagttccagctacttaggctgaggtgagaggactgcttgagtgc

SEQ ID NO: 25551 - DNA, 1026 bp, Homo sapiens
ataaataaaaataaaaaattagctgggtgtggtggcacgcacctgtactcccagctactcgggaggctgaggcaggagaattgcttgaacccgggagatggaggttgcggggagccaagattgcgccactgcactccagcctggcgacagagtgagactctttctcagaaaaaaatatgataattaaaagttgagacgttcttcgccgagagtggtcggggtttcctgcttcaacagtgcttggacggaacccggcgctcgtcctgcaccccggccggccgcccatagccagccctccgtcacctcttcaccatgccctcggactgccccaaggcccccgccgcagctccagcgccgcgtagccaccactgccgctgccgccgcctctccttagtcgccggcatgacgaccgcgtctacctcgcaggtgcgccagaactaccaccaagactcagaggccgccatcaaccgccagatcaacctggagctctacgcctcctccatttacctgtgcgtggcttactactttgacagcgatgatgtggctttgaagaactttgccaaatactttcttcaccaatctcatgaggagagggaacatgctgagaaattgatgaagctgtagaaccaacgaggtggccgaatcttccttcaggatatcaagaaaccagactgtgcggggagaatgcgatgggagagcgggctgaatgcgatggattacatttggaaaaaattgtgcattttgcattacatttggaaaaaaatgtgaatcagtcactactggaactgcacaaactggccactgacaaaaatgacccccatttgtgtgacttcattgagacacattacctgaatgaacaagtgaaggccatcaaagaattgggtgaccacgtgaccaacatgcacgagatgggagcgcccgaatctggcgtggcagaatacctctttgacaagcacaccctgggagacagtgataatgaaagctaagcctcaggctaatttccccatagccatagggtgacttacc

SEQ ID NO: 25552 - DNA, 1049 bp, Homo sapiens
ctctgaccacccaggctggaatggagtggcgcgatcttggttcactgcaacctctgcctcctgagttcaagctatcctgcttcagcctcccgagtagctgggacccaggtgtgtgccaccactcccagctaattttttatttttagtagagaccgggtttcaccatgttggccaggctggtcttgaactactgacctcaggtgatctgcctgcctcagcctcccaaagtgctgggattacagtcatgagccactacaccctgattctttttgctggctttctttctttttttttctttttttttttgagacggagtctcgctctgttgccaggctggagtgcagtggcatgatctcggctcactgcaacctctgcctcccgggttcaagccattctcctgcctcagcctcccgagtagctaggactataggcacatgccaccatgcgcagctaatttttgtatttttagtagagacggggtttcaccatgttggccaggatagtctcgatctcttgacctcgtgatccgtccgcctgggcctcccaaagtgctaggattacagacgtgagccaccacactcagcctctttttgctttcttgatggtgtcttttgaaacaaaagtttttacttttgataaagtccaatttgtctattttgtttgtttgtttttgttaagaagctttgcctaacccaaagtcacgagaattttctcttaggttttcttctaagagttttatagttttagctgtttctgtgatccattttgagtgaatttttgtgaatggtatgagggagtgatccaacttcattcttttgtgtgtggatatcaagttgtcccagcactatttgtttaaaccactgttcttttcccccattgaattatcttggcatcattgtcagagataaattgaccgtaaatgtgagggttttatttctgaactctcaagtccatttcattggtctacatgtccctatgccagtaatacactatcttggttactgtagctttttagtacgttttgaaatgtttttaaaatttgtttttca

SEQ ID NO: 25553 - DNA, 1053 bp, Homo sapiens
gaggtgaggaagagtccctttccgcagcacgaggcaatgcagtagaggataacaatgagagaacccaaagcaggaagtggaggcaagttcaccagatccttctttctgggctccaaacagcatcatcaccttgaaggggaagagaacagtttactttcccattttcattccagtgtgacacagatatcgcccttcaccccagatatataaagtgagtctctagctgtgttccagtcagcgtgattcttcatgaataatgctaacatagttatgatataaaattgctttgcattgcagaaatgtgaggcccttttggattccactgtttggggctggtctttctttttaaatggtagaatgtatgagacacccatactcatcttttcttctctattattacaaggttgtatcgcaggctctccaccatcccagccaaggtttgttctttcctcattcaagctgctttaagtctgttgctctgaccttttgtatctacctcccatcaactacagattgctgaggagctctatactaagggagatcggacaaaagatgccatagacatgtacacccaggctggtcgttgggaacaagcccacaaggtagggatgggtggagttcatgataagagaactctgccttagtggcattgtggcctcattccttgatacctgtttctcctcttcgcttggctccctgaaagctgacaaagagtaccaaaaaacagtctgagccactttgatccctagccatagggaaaggaagggatgaagagaggcccttgtttccagacctatctatcattctgaaggagcagatgggcttgggagctggggaatctgaactaccactcctaatgcctctggtcacattgatgactttgttcttgcgcctacacttcagagtccagtggttaccgtggtaatgggagtgtatgccccagccaaggcatcgcagaccttcccaccttagcagaatatagttcttcctctgcttcttatggacttggaattccccaacctcactagtagagtggcaatacccaaactcctg

SEQ ID NO: 25554 - DNA, 1077 bp, Homo sapiens
ctgtagtcccagctactcaggaggctgaggcgggagaaaaaaaaaatacggctttatcattttcctttttttttttttttttttgagacagagtcttgctctgtcatccaggctggagtgaagtggcgcgatctcagctcactgcaagctctgcctcccgggttcacgccattctcccgcctcagcctcccgagtagctgggactacaggtgccagccaccacgcccagctaattttttttgtatttttagtagagacagggtttcaccatgttggccaggctggtctccaactcctgacctcaggtgatctgcccaccttggcttcccaaagtgctgagattacaggcatgagccaccatgccctgccgattttactttttaattaaaggaagattgttttttaaattggtcttcacaattatggacaccagtggacatttggtctttagcttaagcatatataacaaagtggggcccattgttcattaataatggatatcactaaaacttataaataggctttgatcaagagaccccctgaaaccatcccagccaaccctaattggtctgctctaaatgtgatagtttctgataatgtctagaagattcaaaccaaactaaaatattcatcctctgcagtgaccagcctaactttagtcagaggtttgtctgttgccttccccaccatccacccttgcagtgctcttacacagtaggcattcaaatatacgggtgacttcttagagcatatgaccatcaaggtcattgattcatcagccttgtctcactgctgtattgtatcaggcttatctttaatgtgctcagtgctgccttcgaggggattctgtgagtaggagaagccacttgctcaatagttctagtctgctctgaggtaactccataagccccagagagtgatgacatttctgtgggtctggaccttttgagttaacaacatagttaaacaaaacctctacaattctaaaagagacctagcttcctaggcatcctagcaaaattatgtgtgttggccatactatgtatatgtgtggaatctctcttcttaaccctgtct

SEQ ID NO: 25555 - DNA, 1044 bp, Homo sapiens
ttaaaatccaaggataactgctgtgacatagacttgcaaagcactgtgagaatagagaaagggagatgcactggtgaagtgacggacggtggggacttatgctgtacttaaaaatgaatatgagtctgccagggatgtgcaaggttggcagagcatttctggcagagttcacagctgaaagtgtcaattgtggaaatgtacagcattctcaagaaactgagtagtataatgttgttagaacaaaggtagtcatttcacccaggaagctcctcctttgtgcttccagtaccccaggtccatatacctctagaacagtacttaccatgtttcatattgaaatattctgcttctgtttctcttcctcacttcagggcaaggatctcacattatcagtctttgaccgacacagaatgcctggcatttgataaatgtttgttgaacttgaagagacatatggacaatgaatctgcaaaggtgagttgaaaccagattgtgaattttgttgaatggtaagccaaggaattctgactttttccaataggcaatgggaagccatttgatttaagttttaaaaagagtaagtctagcagcagtgtagagaatagatgacatacaaagagagattggaggaagggataccagttagaaggcagcagaaatctctcacgttctatatgtcaaaagttgaaagcataatgccatttagattaatggttcataaatttttccaccaggatcatgcctaagacacacagagtaagaaccacttcttattatctttaaccctactagtttttctcctattgatccagcacagatgtatcaagataccttatcatgccttgcttattgttcaggattgagcgtgatggtagttctggtaatgagttagtgagtgagatgggaaatagggatactagagctccagatgctgttgtagctattggtccactaatgacccaaattctaccctgtggttcagtgtagtaggaattgtcatagtatgacaataaccagcatctaacagttacatttctcttaatt

SEQ ID NO: 25556 - DNA, 1534 bp, Homo sapiens
actttttagattgatacagataaaaagttcaataacttagggagagtatggagatacaggtattctttttttttttttttttttttttgagacggagtcttgcactgtcacccaggctggagtgcagtggcgcatcttggctcactgcaatctctgcctcccaggttcacgcctttctcctgcctcagtctcccgagtagctgggactacaggcatgtgccacaacacctggctaattttttgtattttttttagtagagacagggtttcaccgtgttagccaggatggtctcaatcacctgacctcatgatctgcccgcctcggcctcccaaagtgctgggattacaggcgggagccactgcgaccggcctgagatacaggtattctaatacattgctggttggcatataagttgacaccacttacgtggaggacaatgtaatattatgtgaataaattcacataccccttgagccagcaattccatttttaggactttatcctgtagagatatactggcttgatacaaagacttaggtataagaattttcattgcagtattgtttatattagcatatgactagaaacaagctaaatgttcatcgtagccatacagtgaatataatgcctgttaaaaaagaatgcagtacatctagaagcactgaaatgacattggtaagtaagaaggaaggtacaggacagtgtgtataatacaccacagtgtgtattaaaaacacagagagatacttggcatgcttgtataggcagtgactatcatgggaaaggtaaatagctggtaatgtggttgcctctgaagagggagggagattaattggagatcagggataggagatcagacttgtaacattgaactatttgaattatttttttcacatacatgtagtacctttgcaaaatacatttttgacactttttaataaactgattaatattatgaaatatcaaattattttttacttaagttggatcacaaggacgagtcataagttttgaggtacgaaaagaccaccatgatctggctaagaagaattacaaacactggcgtgattcatggaaattaagtcatgtagaagagtggccagacaatgtggattttattcataaggacatttcaggagcaaccgaagacataaaatctttaacatttgacgcagtaagttttctaacgtgggtcctgtgttattactttgactataaagaagataggggtcaggcttcttttgtatgggcaaaggtcttccttcgtttgcttcatgtctatctctagggattgaaagaatattttcgtttcatgccttttaatctcatggtgggatttgggacagagagacatactgagttaccgagttgggtgctgaagttgtcattgaatgtggggtaatgactgaaagctaggaccaaagactagttgagcatcatgaacctcagcatttctaggatgaatcatactttggaagcagcattggaagcatattgaacccggcacctaacctgaactgtgagatttggggg

SEQ ID NO: 25557 - DNA, 1054 bp, Homo sapiens
ttctttccactgcagagaaaccattgtatatccctggaaacatttatttctatttaaatgtgctttaaaatgcaactaagtaaaaagacagaactttttaagaagaaagcttaatataaatctagccagactagatttatattcaaagtcactttttggttcaaattaacttctactcagtggttttcaaactgtgtttggagacagagatgctcccacagttgattcagtcacagctactcactcttgttggttttatacattgggattccccttaggacttcacttaacaaaatgttctatttcaactaaacagcttgaaaattccacttttacaccaacagcgagttccccaggagtcagaaggaaatggtgtattggatgttacggtaacaacatttttctgattgtgaggaaacatcttagaaattggcatgtaacttttttttaaagtggtttttcaatgaaaatgtaaaagatgcaaaaattttggatatagtaagagggactcctttttgggaaattaataggaattcatggacatatatcaaattttacttctgtgaaatttcagtactccagagctaattaggtatactgaacagaaatattaacaattcctttcaggtaagctggagcgtgcatttcaatgccactggtgccatgtgcctctgagttcggaagctggttcggtagctggaacagcccaccccagtggaaattctacacagggcaaaatctgcacttgtttcgatgggaaaaagggaaaagtccctttaaagaaagttggtcctatgggaatgataatttataacagctgataattaatctagacatcaccatattttatcttgatgtttatatttcttctaatcctgctttgaattgtatcattccttaagtaagcaagtaaatgttagtaaataaaattgtgatcattgatcattagcttaatacatagtttccctttttttaaaaaaaaaaaaaaacaatttattggaccatgtgctcaatgtctacaggcccaatcctccacagctaggaacagccatgg

SEQ ID NO: 25558 - DNA, 1029 bp, Homo sapiens
atggatgtatgatttataagttttaaactgcgtgctgttctgagtagtgtggtctaatccggctccgtcctgccctatcctgcatggggcatgaatcatcctttgtccaagctgtacacactacctgcccattactgtacaggaagacacatggtgtatatagggttcagtactatccatggtttcaggcatccacttggggtcttgtaatgtatcccccatgaatgggggggattactgtgtacacaatcctactgaccaccattaccaatgatagtcatttaggaggacgcactttaaatatagacatttaagacaccaccaagttattggaagagaaaaacacacaaaaaaattttaatgcctaaaaacagaaacaaaaaacccaccaagcaccaagcagattatatgaactaatatattatgatgtccaaaagatgttattaattgggaaatgcaagctatgtagaattctatacaaggtctgatccaatttttgtaaaataagatcatatgtatttatatatgtacagacatctgaaatattccctttctacactgtcctggttttcataaacgtattttacaatggatatgtttaacattagcaattagaaaactggtaaagataaatgttattgccacaagcatttttaatttcagtttgtcctcggctgttacagagaattgatacaaaaaatgatcatgtgaagaatttgcatcttctgcagaactaccggtatcagtcagcagtaggagattgtaagtagcagaaatccagcttgaaggagctgaaacataagaaggaaatttattggcccctatcactgaagaacaggaagggtggttggatctggccttgggaaacttataagcagcaaagactggctggctctgtctctacttctcttgctctttgtaggttgaccccttgtactccatgtttacgtccttgtgggttcctgactggaaagtcttatccctgtaagctcaagtcgagagagtcccagagaaggattctgtttggct

SEQ ID NO: 25559 - DNA, 1040 bp, Homo sapiens
atgtccatgttttaaagagattggctttagagggatgtctcataataactcctgctgatctttcaatcacacttagcgtttacacagttgttctcaaaattctatttgatttgatgctgacggcattccagtggagtgtttttatgacatttgtttgacataagagcaaatcaggcctccgcgagcttaagcaggtttcccaaggatacagctagctggttactgcggacttgggcctgctgactgtgaagctaaattcttcctgtttcctttcccccatgttattgccatgattcagtagcagtcatgagaagtgctctcttcctccttgagtctacatggtccccaccctgaggggaatccaggcttcctgggagtgaacagcagtaggcagaggggcaggtgcagagaaggtggtggagtagggctagtgtgaaagaagtcttacctcagtccaggggcctttccaaggaaacgtgggaggagacaggtaggtgacaggtaaaggtggctggggacaggggaatgagagcagggtgcaggacacacatgtgatacgaaggccctgtaatacctgtatccttgttcccttcccctgaacacccagcctgcttccccatggctcctcacatgggcagccacatgcttgggctcgacttcagaagcatcagccagaccagaatacctacacatgaggagctgccttttctaccagtgacaggcccagtgggatgcaggaagcagcctgccctcgctgtggtcagttagggggtacattatctgtagaaaatttaagagcaatgataacactcacagtcattctgcttttgaatgtcaccatgcactggcaattttaaccaatggcagtggtaaaattccctccctccccacttggtatgccaccacttccttctcagggcagaagcactacttcaagcctgctggggtacagtcccggggagaaatacactcaccacagccgcctctgctaactccatcccacccacctctctgagggcccatagcagcagccaaccagg

SEQ ID NO: 25560 - DNA, 1049 bp, Homo sapiens
gctggcccgggagctagagcctgatatgagaacttggcctgaaagcattttcatcctcagggtggggacattggatcttccactggggagttcgttctgaagtgaggcaggaacagtgagaagcaggagctagtcttaggggagaaggagctgatagggcctggaaaaggactctgtccttcatccccagactcactgctgggtttccagactgagcaccagtgtgggctgcacagacttgagcagaacagcaagactagcagattaactccacacctaggtcaggggacccgggctcagagaggttaggggacttgtccagggtcacacagctagtccatgcttggctgaaatgcaaaatcaatttttcagattgtgggtccatatattttattttattctgtcacaaacataaaacttcttattatgtctaaagttcactgagttagagaaagtgtgtgtgtgtgtgcatacgtgtgtgtgtgtgtgtgtgtgtgtgtgtgtttgacttgtgatttggggaaagagaagaggtgatagatgaggattctgggtttcctaattaagatggtttgattattatattttagctttgcccagaggtactaaaatactacatttcagccatataattcaataaatagtgtcatctggtgttctgccatctgggccaaatgcctgtgggcaggtaacccaagaagaaccttgtgtggcttcgaaaggtaccaagtggtctttgttctggggacagatttcccttctccctccctaagtttgcctcctacatttcacattacctggggaatgaggcaggggaaagagatgtggaaagagatgtagagacattttcaatgcccaggatggaaaactgatttggattaaatatttgccaggaataattcattcaacaaattattgagtctaagactattaagtatagatcagtaaaaacaacaacaacaacaaaaaaaacagactgaaagtgtgccctcatggaacttgaatgcccccagtgaataaatccctcaggtggacaagtgggagctacc

SEQ ID NO: 25561 - DNA, 1028 bp, Homo sapiens
aggaagctgcaaaccatgctaaacacattcctcgtgagtgtgactgttggaccggccattccagcccatggagccaaagtcctgggaggcatggagaagtcccttcgggactaagttcagacgaggagaagggaccagaagtcaagcaggaagctctgaagtccaggttcctcggagtatggggtctcaggcaggtccaggcttctaatctcacccaagtctctctccagaatcaccctgcacagcttctgtgctggctccagcccccactctccacgtgcataaaaagcaagttagcacaaagctcaatttctagccttctaagctgataataaccttatgtattacgcttcttaaaatagttttcttgtcttatcatttgcatggcactgtgctcaaactcgtgtgagatggagctttgggtagaaaacacctgctgagtcccaggaagcattcacattgataatgaccaattctcacagacggacagtgaggtgaggcacccggtcatctgtggatgctgtcagagaccccatttctgccacagggaagggagaagcagctaaacttaaattgactgactgtaaattgcgttttccctccattagcattcagtcaccaaaagaaataatagtaaccacagctatgttgtaatgataatatgttgtgtatgcattatgttttaccaagcaatttttcatgtctcatctcacttctgaagcctaattcgggctatgaagctgggtgagggtgaagattagtattgtccttgggaggaggaggaaactgaccacgaggttctgaaactgaccagaaaggatatgtttagctgagccaagctcaggacccagctttctggaattagaggagtcatccctggggctgcgcttccctttttagcccatctccactccccacccccacacacacaacacagaagctcttggggctgcatttctgtccagctaaaattgggttgaaaacaacaaaggatcccttgaaggagaaaaatcacaaatgcataatgt

SEQ ID NO: 25562 - DNA, 1058 bp, Homo sapiens
tcacttgaaggcaaaagaagctcccaaagaggccctggatttctaaagcgcctgccgccggtgctgtcctgtgcagtggaggctgattgaggctggagttgctctcccacctccctgaggatatgtccctcctgggtcagtggtgagctgagggcaggagctagagtgccaggctgctgcagtgggaaggggtgtcttggctgagcagaggaaggatgctctggtgtcccgcaggaggccaggcttccgtggggagcaggccgctgctctttgaaaaagtgtcctgagtgcgggtggtatcagccctggaaaatgcccagcttctcactctgttgtttgacctctagggtatgccctagtgacccctaggatgtgacctctctgctgtcatccacccagctgtaagggtcacatatgtttctgccaggtgaaggttctgtgctttgtagagcggggacaccaaggctcacagaagtacagggagacaaggacttggtgccatgtggagtgctgaggctgcagcttagatctctggacccctaggtcagcttagagtccacgggagggggtagggggcagtgtcctgggtgctacttctgactttgctgccaaggacattcaggtgaagggatgcctcaggattatcagcctcttccagcaggatggtcccgtggagcgccatcgggtagctcagcactcagtggggtatctccttggcaggtggcacattttggtcaccactgaggaaatgctgtcagcccagggctcacacaactgggcaggaagttgagcaacatgtttttaagttgaaaatgagagttgggtgggcggaggggagggggaaatgtccaccaagctatttccgaaatctttgtcatttgctgtcacttttgagtacaaggaaagacatcctctaagacagtcaatgtgaaggctttattttggtgattgagcaaggaagcggtggaagccccagtaaatggtgtcccagtccctgaacccacagaggcagtcacagcagggcagcagagaaggggcctctgatccctgcccatgat

SEQ ID NO: 25563 - DNA, 1057 bp, Homo sapiens
tgagagattgatcacattatatatactttgcatcttctctttacttaagtatatattctagaaatcctactggtcagctagctcattattttttttttttttttttttttttgagacggagtctcgctctgtcgcccaggctggagtgcagtggcgcgatctcggctcactgcaagctccgcctcccgggttcacgccattctcctgcctcagcctcccgagtagctgggactacaggcgcccgctaccacgcccggctaattttttgtatttttagtagagacggggtttcaccttgttagccaggatggtctcgatctcctgacctcgtgatccgcccgcctcggcctcccaaagtgctgggattacaggcgtgagccaccgcgcccggcctagctcattatttttaatgactgcataatattctgcagtgtggatgtaacttattttattcagctatttccatttgatgggtatacactttatctctcatctcttgttgctacagacagagctgaaataatctatgtacacatattcttacatgttagagcttttgcttctgaagtataacttttgaggagtgggaattctgagtcaaaaggagtctgtaatttttatattatgtatattttaagattgctttgtaaaacaatctacattttcgttagcaaagtacgagagtactctttccccagcatcctctttggtataaatgtcgtcattttcgttttgccaacctaaagagtatgaaacgggatccaattgtaattttatattcctctgattaccagagaggttgagtatgttctcatatgtttattgcatgtaaggatcttgcccttctatgaggggtctattcatatcctctccctatttttctactgtacggtttatctttttgttgccaagtaaaagagctctttgcatgttattgatagttctttattagtcatatatgttgcagatttttttctgattaatttgttaatactgttgactttatggtatatattgccatataactttttggctttgaaaaatacagtcgaatatg

SEQ ID NO: 25564 - DNA, 1030 bp, Homo sapiens
atccccatgtatccctgtaaagattctcttcttcccctcagcctcactttccactttgactcaaaagagaaaagacagctatccattttgcatttcctcccaccatgaataattggtggaactaagaccggacgtaggatgctagagccctggcaggagtgccactggggcagttggcaagcaggaaagatgggtgaactccttggaggtttccccctttgagtgcctgtcaagcatggggagacagagcgggcaaaatcacctgccccaggtcactggatcaagtttgtccgaacatccggcaaacccatatggggtgctgctgtgtgggaagccctgtgtaggaagcgggggtgaattctgagggagtgtggagtgtgtagcagtggctctctgctggcccctccctcaccacttctgattcccgaacactgtgttcctcttagatgtattgctgtattactggaaagatacaactgtgtctctggggatgctgtttaatggtggaaggaactgcaaaatggatagctgtcttttctcttttgagtcaaagtggaatgtgaggccaaggggaagaagagaatctttgccggggtacatggggatacaagtttgagacaattgcttttaaatttaccaggcgttgttctgcatggttgaatttcctgtcctgatcatgtcactcttccgttagctcagaaaactgtggttgaagtttaatctcatccttaaagctgtttcactaaaataggaaactgttattccacagggctgcttattagaagaagaaggatttagggaggtcttttaaagtcattttagtgatttttttgaaagaagcatttgccgcaatccacttgtccccaaagcatctgctgtttcaaagcataacactagtggaagcataacaggaagggaaagccagcatcaggatagggaataggctgagcaacccacttttatttagtcagttgaggacacctgtcgtgggttctatacgttttgggcaccatggaccaggtagcctatg

SEQ ID NO: 25565 - DNA, 1109 bp, Homo sapiens
ttttttgttgcttttgtctgcgtttcttacttgcagctttgataacatgtttttaaaattggaaatactggtttttatgttttctaagaatcgatgtgggaaatgtgtatcagttttcttgtttcttttcctgtgtaaaaattgtgatttagtgtctcaagtatattttttatttatttggtttttgaggtggaacatagatgaaactgaaggaagcttatagctctatttatagagtcactctaagattagcacacacaagcattttcccataagaacaacagatcatttaaagaatatatttaattagttaccctgggttcagtgcggtggcttacgcctgtaatctgagcactttgggaggccgaggtgggcagatcacctgaggagttcaagaccagcctggccaacatgacaaaaccctgtctctactaaaaatacaaaaattagccaggtgttgtggcatgcgcctgtaatcccagctactcgggaggctgaggcaggaaaatcacttgaacctgggaggcagagtttgcagtgaatcaaaatcatgccactgtactccagcctgggcaacagtgtgagactctgtctcaaaaaaataataataattagttatcctggttataaagtaacatctttaaacatatcttgctctctatattatatgtatctatatatctatgtatatagatatatattggtgtagatagagtccctttaattaccttgttgtaccttcaggttctgctatgttctcttgaatatatggcaggacatttcttgacctttgaggttgtatttgttagaaatggtcaaagatcagctgtgtgattagattggataataaggtttaagggaggaatatgttagttataaagaattaagttgcctttctcctgggacatacgtgctttaaaatgtccctaccccaaagcgccacagtggcacattggaataagcttacagtctaagtaactgttaatatcacttatactatcgaaaattaatcttgttgctttttagacatgttatatccaaataactacctaatttattactaaattcatagttacttgacatctcaaatatctcagtatggtaaattg

SEQ ID NO: 25566 - DNA, 1029 bp, Homo sapiens
taatgtttttggcatcagaattatgatatagtttatataggtttaactttgtgtgtgtgtgtgtgtgtgtgtgtgtgttttgagacagagtcttgctctgtcgcccaggctggagtgcagtggcacaatctcgggtcactgcaacctctgcttcccaggttcaagcgattctcctgtctcagcctcccatgtagctgggattataggcatgtgccaccatgactggctaatttttgtatttttagtggaaatagggtttcaccatgttggccaggctggtctcaaactcctgacctcaggtgacccacctgcctcggcctcccaaagtgctgggattataggcatgagccactgtacctggcccatcttaggtttaacttttaagtttgtatttctctgagcttatataccaagtgtcggtggagagtgttgacctggaagtcctgtgattggcaggggacaaccaacttagcattacaaactgattgtggaccaatctgagagtggctaattgatgtgcaagcaattcaaagttgattgcacatgtatatgtctatgtttcagatatatatatatgtgtgtgtgtgtgtgtgtgtatatatggaatattgataatgtttgtgaaggagtcgaatattctgaaggaaagtttttttatagaattaaattttgatgctgccactgtaaaatttctatgttacccactgattgctgtcattttccagatgacttttacttttaacagatgtttatctgattactcttggtgcttttacactatacctgttttgttaaaatgtgaaataaaaacaaaaacaaaaacacagaataaccagttaagtccctagttaaaccaccatttgcatttctcccacagagtatgaatccagtttatttaatataaagtgttttaactgaataagaaaataatataattggtgtatgtataattagctagaatcaataatttatttccccgacttggtgagttaaagttgctctatattaatgagttgtaaatacattatt

SEQ ID NO: 25567 - DNA, 1018 bp, Homo sapiens
tatgtattagtgactgaaattactaagtgccattgctagtgacttgattttccaaaatggtgaacaattcttagtaaacttgtaaacaaaaccagtacagtcttccctcactttacatgatagttttattcctgggaaactcattgtatattaaaatcaatgcaaaacttatttctgtttgtatatgaagtggaattaatgtatagataattaaggctgtagatattctgtagtcttatggatggagaacagtctttgtgtatgaaactgtcttgtgtcagcatccctggaatcccactgagtcccaatagcatcttcaaattattgtgacagccaaaaagcgtgcatcattttccattagcctccttggatgaacagctgttcattggccttaccctgctgtatttttattctaggtatttattactgcatgacttactcatttgttgatttgtcttggggttatctccctcactggattacgtaagcttcatgagaacagggactttgtccatttcccatcctagtgcctgtcagtgggcacacaatatatacagttgttgaatgagtgctggataaatggatggggagggtggtgagaagtgaaacttgaagactccagaacagctatcttgaaggatcttacatagggaagtgataaagttggttttgtatttgaatagatcatatggctgcagtgtagcaaatgggttggaaggaggctggaagagataacgtgtagaccagttaggtagtccagatgagaaactatggtaatttagacagtgggtagggtgatggtggtagaagagagggacagaaatgtatatattcagtacatttaggagacaaattgatgatgggacttggaggtggattgagcttggggggtcaaggaaatgtcaaggatgactcctaaatttttggctatgctgctggttcgatggttgcattatttatttaggccataaggaccaaaatgtttttggtgggggtggggcaggaagataataaattc

SEQ ID NO: 25568 - DNA, 1054 bp, Homo sapiens
tactcactaatacagggaatataagagggacagatttaaggaaaaagatgagttcagtcttatacatgggttttgtgttatgtttagaactgcactttttgatactgtagccaccagtcacatgtatttattgagtatttgaagtgtggttatacaacttgaaatatactgtaagtgtaaaatatacactggattttgaacatgtagtatgaaaagaacaaaaatatctcagaaatctatcttgattatattataaaatgatactgccagattgtgtttaataaaatatcttaaaattaattttacctgtttattttttaaatatggctataataaattttaaaattacatatatggcctgcattatatttttattggacagtactggtttagaacatgaaggtaggtctggatggagataaacattttgaaattattggtgtatgaggagtggatgggaagaaaggatgttaatgccattgtttagagagtcaatctccagagagagtataaggagtaggaacaaagggggagttagatcagatggacataccagcattaagtggaagaggagataaagcagagccagtagagttctgcttagagagaactgagaatgagcaatatcacagagaggatgagctttatttagcaaagagggaggaagagtatcaaatgctgcacagaggtgaattaagaaccttgcaagagcagtttcagtggaatcagcttagaatctaaattggaatgaagaggcaaaaaccaaatgtgaaaaattattctctactagtttgagtatgacagaaaggagcaatgtttaaatgttaactgatttggtagatgacgagatccagggaaacacagtcacaggaggagtttttaaagatggaaactatgagattacttcagaatttccagtaacattaatccctaatttgaggtattggagagatttgacttaagattatatcagctatatgattctcgtttctcctcggtttaacctttcttgtgttacattttattcatttaggaaagaatctctaaggaggaa

SEQ ID NO: 25569 - DNA, 1065 bp, Homo sapiens
ctatgatgatgacaactatttacttcaaattagatgccttctgtatgtatattgaccagaatacattgctcaagtgatttttaaatatttgtataatttttaaaaattaccatgagacgatttgagctgttgcaactaaaatatttattcagtgtagtagctatatgtagtgtggatttagctacttaatcgaaacattctttagagtccttcaaatatttatagtcagtttttcagttactaaatatgaggtggctactaaagagtaacaaaaagtagatggcatttactgccattggctctctgtgcatttttgcattctcattaaatcccatgccgatccagtattttaaagtatttcaaacatttcctctttttttccttcagaagcagtttttaaaaagtgaaagttacatagaaaatggtccatatgaacaagatagcaatttaaagtatagacttttcacttactgttaagtctgggttgaccaacttcagccatttggaacagcaactctttacttggaattaagcagaaaagacttttgagtagcaaacgactatcatgtagtatatgcgtttttctctgaacctgggagtagcagtagattatgtcccagtttcagggcttactgatagtagccaaaactaacagctatttccagaagcagggaaaagagaatgtattagtgtaaacctaaagcagttcaggttcaaagaattgaggtgtatactaccttgatttcctccaagaatattgttcttatagtgagagtgagtcagaatattcttgtctaaggtgttcatttgtttcagaaagattttggacagctttgtcaaaataactttgaaatagaagtaaaaatttagtatcaaatgaattgaatcgataaattattataactgcactttagatttggcactgagcagccttctcacagccacctggcaatgagaaaaatagtgtcaggctgggtgtggtggctcacgcctgtaatcccagcactttgggaggccaaggcaggtggatcactttaggtcaggagtttgagaccagcctggcca

SEQ ID NO: 25570 - DNA, 1047 bp, Homo sapiens
aataggataggattaaaataggtgaggaagagtttaatggtcttttataatcacagaaggatttggcagatgactgtagccttgataagtacttgaaaagaattgaattggtgctcttctgatgggcttgtttttattttttgagatgttattatacctggtagtaaaatagctttttttacctaaagaggtagtatatatttctgtagtttaaatggatatttttagtattctgtatgactcatatttttaatcgtacccttgtaccctttaaacatttaatttatggattttaagaattcatcaataataattacatatgttatccttaccactattaatacatattccactttctaatgccaacacatttggaaaactttcatttaagcatcttaaatgacattttttttttttctgttttctttaagccataaggatgagtttaccattattcctgtactggttggagctctgagtgagtcaaaagaacaggaattcggaaaactcttcagtaaatatctagcggatcctagtaatctctttgtggtttcttctgatttctgccattggggtaagttctagattttaacatatcatggtagatgttatatacttctggttaaaggtatcttttcattctaagctctgattttcagttttttatcactttccttggaaagttttacttctggcagcagtgtttaaaagtgaataaaaaatcttttgatcctttaaaaaggatcagattacaatagtggattatgggtacatttccaaaggcgactggtataattggattcacactgtgaaggcatccttgtttagacacttatttagtgggagttaagatcttttaacctcatttccaagtaggtgtgtatggtagattctctgaagttagttttggtggataaatccaatgttctttagagtatagaagagcactgtgtgctgtgccagtccttttccacatttccttttttgtaattagtcttttttttttttcccctttggtgcttagtttttactcacaattgccatcag

SEQ ID NO: 25571 - DNA, 1045 bp, Homo sapiens
tgaaacatttggattaggaggtcttctcttttgtaggtttctctaatttttaaaaccatttcctatatatggacttaatatttcatatttagtttggcagttctaagtatggtaagatgattccttctggatttgttcattatattagtaaagtacatgatgctctgtacgctctcagtaaatattaattaaatgtactaataaagtctaagataacattatattttttatgttgatgtagcttactgttggcaaatgtacttgtgatcagccaaagcccaaggccttttcataatattcagatggattattttctgttctcagacttttgtgtggttatttcttttttaccctaaatatgtatgtcttctcaattattgctgtttagtttttcttgtttagttcattatcgcagtctttttggattgttttccactctaattctgtattcaaagtattatttacttttctcaatcttttgtctgcttctgctcacaatgataaccatgaggaattatataaatctgaagaattttcaaaaaatcagtgtgatactacattataagcaatataattttagggtttttaatacatcctaattcttcagaaatgtgaaaccatatatattacttcttgaattgttgttgtaatcagaactttctcttcttcaaccggaaaagacaattgaatattgttattcactgagatgtttgcatattttgtcatgagaaaatataatttagacttaataaatactaatactttgggtgcagtggtgcttgtctgtaattccagcactttgggaggcggaggtgggcacatggcttgagcccagaagttcaagactagcctgggcaatgtggcaaaactctgtctctactaaaaatagaaaaattagcggtgtgtggtgtcgggtgcttgttgtcccagctacttgggaggctggggtgggatgattgcttgagcctgggtggttgagactgcagtgagccgagattatggcactgcactccagcctaggtgacagagtgagaacctgtctcaa

SEQ ID NO: 25572 - DNA, 1041 bp, Homo sapiens
catatcatatattttcttctcatagttttggctttatgagtctgtaagttttgtatgtgatgtgggaaggttggttcatatgaattttggagaacagagaaaattgatagttttggaattcagattgtagggcaggtttgggtatttgacagaatgagaggaaattaacattactcttgatgtcaagataaagagattgtaaagatttaagctacactttagctcagttcttttctttagactacagtgcaaataacacataatctagtttctttgtttttgagaatgacttctacttgaatgggaatagagaaagcttattatatagaattcttttcaacaagatgcctttttcaccctaccatggaagaaatatggaaatagctttatcagaatgcttttttataatggatattttgtatagatatttagaattttatgctattatgcatttttattaaaatcatggtggatcttagaaggttattttagaatgtgttagaattttgaaattttagtagcttaaatgcataaaatccatttaataaaatacagcttctgaatacctgttgcatccttgtcattgagagtatagagattattttatgcatagtgggttggtttactgtattaattgataactggtatttccaagtattgaatatgattctcttaaaggccatccaacaaagacagaaataaggaattgaacttaactgaggagcaagtcattattaggtgtattagtttgctagggctgtcataacaaaataccacagattaggtggtttaaacaacacaaatttattttttaacaattctggaagcttgaaattcaatatcaagtttctgtcagggttgggccccttctgacatgatcatatctctgtgcaggcatacttctggtgtctctttttcctataaggacaccagactcattggatgaggtccccactctaatggcctcatttgaacttaatcgcctctttgaagaccttatctctaaatagcactacagtctgtgctactggggattggttc

SEQ ID NO: 25573 - DNA, 1115 bp, Homo sapiens
tttttttttttttttcccttttgagacaggatcttgctctgtcacccagtctggagtcagtggcatgatcatagctcacgcagcgttgaattcccaggctcaagtgatcctcctattccagccttctgagtagctaggactgccagcctgtgccagcatgcctggctattttttaaaaatttatttttgtagagatgtggtctcactatgttgctcaggctggtcttgaactcctggcctcaagctgtcctcccacctcagcctcccaaagtgctgagattacaggcatgaaccaccgtgcctgacttccattcactttggggaaatcttctgccagctacctaaattggaatagccgtaatttatctacagttgtcttttgaagtaaaaattttgttccatgaggaaaatgtctggttcagcttacaactcaaaactacacaactgctttttcctgaaacatacttccatatgcagcagaaatgttttatcaccacagattgaatgcattttgtcatatagaatattaaaaagatacctactcgagagtcaagatttaatgaaattaggaactcccttttaaacttagtgtgagtaaggttaaaaaataggactgctagtgcatgttgatgatactgctttgatctttgttctaatgggccagtggttttacgctcccctcacctttgcaccataagtgcaaatgaaaaaagtaaataacttccttgcattcttatgaaaatagttttaattttatggactgctgcatagggtcttgaggaaaaccagaattccagagttcacagtttgagaactattgtggtagaccttaagagggtgacttgatttaaattgtgggaaaggtattggggaaagtatctccgggaacagattttttttttttttttttttttttgagacggagtcttgctctgtcccccaggctggagtgcagtggcacaatctcagctcactgcaacctctgcctcccgggttcaaacgattctcctgcctcagcctcctgagtagctgggattacaggcgtgtgccaccacgcctggctaattttttgtatttttagtagagatggggtttcaccatgttagccagatggt

SEQ ID NO: 25574 - DNA, 1073 bp, Homo sapiens
gggaatcacttgaatccgggaggtggaggttgcagtgagccaagatcgcgccaccgcactccagcttggcaacagagcaagactgcgtttcaaaaaaaatatatatatattttataagcttctttcatttgacttgggcctataaaccagctataataaaagttagtttatataacagccttttctttttgaaaccttcctctatttggcagaagttttattgataaaactcctgtgctgatgggacaccccagagttaaattaggtttaggaatttgtagaggggtatagatagagtttatgttcatagaagtggaaagcatgtgttaaataggttaatggaaagtgagaaagaaggcaaaaggaaagaggaaaaaatggaagagcgccaaggactaagaagaggaagatttaagaagatgagtagaaagagaggcaaatgatggctgatgtgatcgaattattttattctaattaattaattaagtatttttgagacacagtctggctctgtcacccatgctggagtgcagtggtgcagtcttggctcactgcaacttctgcccccaggttcagtcagttctcctgcctcatcctcccaggtagctaggactacaggtgcacgccaccacactgagttaattttttgtatttttagtggagacacgctttcgcctggctttggccaggctggtttcaaattcctgactgcgggtgatccgcccacctcggcctcccaaagtgctgggattacaggcatgagccactgtgcccagcccgatcaaattattttttgtaattagtatataataactgaattctgaatgaataaattttaaggtctaagtgtaaaattaataattgacagtcacagttgaattctcttgaaagaggcactctctgggaattatagtgtctttagagtgctttgagaaagtagaggaagaacatccttagagaaaggttaaattctatactaccactttctattcttaccttccacattaatccatttttgttctatatttcagccaggatcatcttttgaaaatgtaaatgataccctgtcactt

SEQ ID NO: 25575 - DNA, 1041 bp, Homo sapiens
caacttgataggctcctttaccagaggtatagggctagagtgactacgattaattaaggccttcactgatttcagtgaacttagtgtatgttccatattattgagctcccaattaaacgccactactatcttgtattgctgtagtagacagctgtgagtctcattttctccattcatatcttaagctacttcagattaggaccatttttaaaaaagagccttgttgtgatatgattggcataccaatgtgtacatttaaagcacacaatttgatgtttgacctatgtatgaggataaaactatcacaatcaagaaaacgaacatattcatcaccctcaaaagtttccttgtgttcgcttataattcttcctttctgtacctgtacctctttttcccctctcttcccctttctatatatatatatatatatatatatatatataaattttttttttttttttttttttttttttttttaaagaggtggtatctcgctctgtcatccaggctggtgtgtgggcgtgatcatagctcactgtaatatagaacttggcttaagcaatcctcctgcctcagcctcttcagtagctgggactacaggcatgtgccaccatgcctcgctattttctagaattttatttaaatggaaccatacagaataagctatttttgtttgactttcttccattcagtatatttatttttacccccttaaaaaaaagtatagttattttgagtgtcagtagttcacttctttttattgctgaagagtattccattgtatggatatatctctattttttcatataccttttgagaccaggaaacagtcattctgtgcgtgataagagaattgactgaattcggagaccagaggatgaaagggaaaaatagtatggagagaaaacgagaataattatctttgtcttcgaaggaagtgagttgttataatagttgtagggtatttgttttggtctgacttgacttcctgttggtttatcatttttctgtaatagtctgctaatgctactgaagaggagt

SEQ ID NO: 25576 - DNA, 1044 bp, Homo sapiens
gtaaaacagagaaataggatagtatctatatggtaaggaggatttttatttcatttgtgagattttaaagtgtttgtatatgaagtgagtcagtaggggaagaaaaattgatgcagggataagaggggacatttacctaagagggatccttgattaggtgagaaacaatggattaataataatttctttatagtaactcacgagagacattctcatttcatcaatttgctggtatttgactattatggtatgctacctttccagttaaaacttgttctaaatttgggagctgagttgaatcaacatataattaagttgagtttagtattcataaaaaagtagccagacttgtttcctttttgtaattaattttaaattggaataattgggagtgacctgggaaatggaatgttttagcctaaattacaaatatgttgatttccaagttaccccagattttaaaatggatatttgaaaatagttttggctttggtgtgtttctgtgacatgctgactttgtatataacgtataataaatgttataataaacatataaacatataaaaacataaatataaacatacaataaacatatataaatgtgcattcataggcaatttctatttcgttaacataggaagactttataagtatagccaagttttatcttatatggtttccagaagtaattattttcctttccaaggctatcttttttttttttttgaggtagaaaacaaatctttcattgttactgggtgcagtggctcatgcttgtaatcccagcactttcggagcctgaggtgggaagatgcttgagctcaggagtttgagactagcctgtgcaacatggcgaaaccccctctacaaaaaatacaaaaattagctgggtgtggtggcatgagcctgcagccccagctactccagaagctgagatgagaggatcacttgagcccgggaggttggggctgcactgagctgagattgcaccactgcaccccagcctgggtaatgggagtgagaccctgtctcaaaaaaaaaaaa

SEQ ID NO: 25577 - DNA, 1021 bp, Homo sapiens
gataaggggatgaaggaagtattgaggcttaaggtgaaaagagaaggtatgagttaattctctatcttaaagataggagagcagattcactacgttaatgtgatgggatttctgagcattttaggggtctgctgaaatttatggttattattttaaagtttatatggttgtatttctctttagtctcattcagctattcaggtaaaagtactgagttaagtggaaagttggttttaaactatgttttgactgtgatggagggagagaggagcagaggagtgaggccacagcaaggaaatgactgtgatgatggatttttgagtctcagactaggtaagaagtagagacgaaggacagtggaaaaatttgtagggtctgttggagttaacaggtttctggtagtgaactggaaaaattagtatattgagtaaagaagctgagatgcttgaaactgagatttttaaggtagcgtagttactggttatcgatatttcattatgagaataggggactggagtgggatggaagaaaagatcattgggtgtggaagtgattaccttctgtggatgtcatttcagtgattaatctgtagagcagattttggtgctctataacatattcaattatttcctcttcatacactgagagtttctgcttcctgttttattttgtttaaatattgcctcaacttgtaaatcacattgtgttgctctgaaatgaagacagctgtaaataagtaaatcgataaaagcaaattttgtttagtcagaatttggccttatcatatggcttgttagagactgtgtagttggtaaattcaaacattaacatcccaactgatgatcctattgcgcattaagctagtttagtcccacataagttcagtgagggctttatgccacatatgtttatctgtagtacattgctttgctgactctaattttgtctttgtctttttataggaccgcagctgaatgcacagctagaaggttggctttcacaagtacagtctacaaaaaga

SEQ ID NO: 25578 - DNA, 1035 bp, Homo sapiens
tcaacttcaagcatttgtgtcacttgaggtggttgctttttatggtccagatttatatttccctcactagagtactggacccttttgtcagacggtaaacatggtgtttttgaagccttcatttaaattggaaataggagcatggaggaatattggggcgttttgaaataaacgtggatggccgagcatggtggctcacgcctgtactaccagcgctttgggaggctgaggctagtggatcacctgaggtcaggagtttgagacaagcctgaccaacatggtaaaaccctgtctttactgaaaatacaaaattagttgggcctagtggtgcatgcctataatctcagctactggggaggctgaggcaggagaatcacttgaaccctggaggtggaggttgcagtgagccgagatcgccccattgcactccagcctgggcaagaagagcaaaactctgtcacaaaaaaagaaaaaaaaagaaataaacatggatagttttcaattagactagaacattctcatgaatttttggactaaaacagaagattttaaaagataattttgagtttaagtatcacctagggtctaagagtctgagttttattttcttcccttatcagtgttatttggaaaagctggagaggaattaattgaagtgagtctaagaaacaagggggttacttaaggcttcaaagtagcttggaggtaaaattaatgtgtttatttattgctaatttatagattatatgatttctcaattacactgaaaaatctcaggtataaaccttccaggagtctgttagctgcattcactgagaatatagcatgtgcaaataaactcctttaaggcagtgggcctcacgtttgtttgtttgttttttgtttttttttttgagacagggtctcactgcagatttgacctcctggactcaagcgatcttcctgcctcagccctggagtagtactacaggcatgcgccaccacacccggctaatttttgtatttttttgtggagatggggtttcaccatgttgc

SEQ ID NO: 25579 - DNA, 1025 bp, Homo sapiens
gggagctctaactactttactctaactactcctgctgtggttctcaactagaggctgtagtaagaactgtctgtggggccctccttcagatctgttcagtcagtcagtcttctttagtaatggggattgtctgttttcttctaaaactctgtatatgattctgataaacacttcttctctactattttgacattaggttattcaaggtcagtttcttctgaattggtgtacgattgactatttaaactgtgtgagggagatgggaaagagttggacactgattagtttatctagtcaccacgtttaatttgtatagaactcttgctgctgagactaccgtattggctgctggctcttcctgatttagtcatctgttgctagatggaagggtcctgtgatattatgccttatattaccatgcttggtactacttgcctctgcatttggctgtggtcaacaagtaatgcagaagtgactagaagttactatagatatgggtttagaggtggcttttctgtgcaggtagaagttaaattgaaatcccaaacgccgtgacgttctcagtgggagagttttccttttagagggaatgtatggctgaaatacagtgaaaaatgttggagaaggaggctaaaactgtatcctatatcatcttatataggattggtaaaatagtttgtgttttattctaattatgataggaagccatgtgaaatgacagagttcaagtaatttgactcatgcatttaaaaatgttataatggagcaatcattgaatgaagaacaatgacttaaaaataaaaaaaatctaaaaattatatatttatttttatagacagggtctcattctgtcacctagttgctgcagtgcagtggtgtgatcgtagctcattgcagcctccaactcctgggttcaagcagtcctcctgtcttggccttccaagtagctgggaatgcaggtgtttgtcaccacgcccagctaattttaaaattttctgtagagttgggggtcttgctttattgtc

SEQ ID NO: 25580 - DNA, 1696 bp, Homo sapiens
tttggaagagggaggagtattttatttaattttttgagacaaagtcttgctctgtcgtccatgctggagtgcagtggcatgctcatggctcattgcaaccttgacctcctgggctcaagcgatccttcctactcactttcctagtagctgggactataggtgtataccaccatgcccggttaatttctgtattttttgtagagacagggtttcaccatgttgcccaagctggtcttgatctcctgggtacaagtgatcttgtctacttcggcctcccaaattgctgggattacaggtgtgagccaccacacccggccaaaattatttaatagactttccagatacttatggatagccatatttaacgctatactgaaactctacatgcggtagttccttttttaaaaaaaatcattttattgagatatagttgataagttacatatatttaatatatctatgaaagtcaacacaatcaagatgtaccttttgaaggtaatttcttaaagattaattgcagtgtagaatttgaaaccatctcagtaaagttttcatattgtgttttcattaagatctatgaatctagttggtttatcctccactttggttgtatcttttttccttgcaggaattttcaaacatcatgcattagtcagttggaaaatatttgtttattgagttacgcagatcttctaaatgtttacacatttcattatttgttgtcaaagaatcacacctgttaatatcgtcaccattctctttagaaaagtgtttttgacttgggaagttgttaagcccatagtggtagaaactatgttttgcaaaattcgaattttttcgaagcttaaatattgttggttactttccctgatgtgacaagcccactagtcattttctttctttctttctttttttttttttttgagacagagttttgctcttgttgcccaggctggagtgcaatggcgcgatcttggctcaccgcagcctttggctcggctcaccgcaacctctgcctcctgggttcaagcgattcccctgcctcagcctcctgagtagctgggattccaggcacataccaccatgcctggctaattttgtatttttggtagagacggggtttctccatgttggtcaggctggtctcaaactcccgaactcaggtgatctgcctgccttggcctctcaaagtgctgggattacaggcgtgagccaccatgcctggctgcccactattcattttcaaggaaataactttcagatacccaagagtaagtaactagttgttctttcaagagaaatggtggtctataaaaaagcacagttcagcttgcaactctcataagatgctttttcttgagacagccatctttctacccatttaagtgcacagaatattaagaagttgtatacttaagggcaaagatttaatgtgtaatatttgcagctatatcaaggacattcttaagtgaaactggctttaaaaaatttggtgagtgtttggtaatgaagaatgtagtgactactactgtagttcggtgctactgctaatgagacaacagcagttttatccaatgttactttttaaattttttttatttttttcgagacagagtcttgctttgtcgcccaggctggagtgcagtgccccatcttggctcactgcaacctctgcctcctgggttcaagggattct

SEQ ID NO: 25581 - DNA, 1048 bp, Homo sapiens
agcagtggctcatgcctgtagtaatcccagcacttgaagacgccaaggtgggaagataacttgaggccaggagtttgacactaacctagacaacatactgagacctagtctctacaaaagaattttctaaatattagccaggcatggtagcatacacctgtaggcccagctattccggagacttaaacaggaggatccttcaagcccaggggtttgaggttacagtaagccctgatcacaccactgcactccagcctaggcctcagagaccttatctcaaaaaagaaaaaaaaagaagaaactttgcagtggtgtaagaaaggataaattagaaggggaaaaaactcaagttatgaaaatcctattaacaatttcaattatatataataattgttatgctaatggaaaaataatcactatcattaaataagattattttaattcttaaaaggtccgagtgaagctgaagaattccagcttgaggtgagtgggctactaggggagatgaactgcccgtatctttcactgacatctggggatgtgaccaagcgccttctcattcagaagaactgcctcctcttgctcagtaagttcatggctactagaatatagctattactttctgtttatgttttccatgactaataaactgaccatggttttttgtttgtttatttcattatgaatgtaattcaaaattcattttaaaataaaactttcttaaatttccaatttaggagctgagggtagacgtgtgcactggtagcattattgtttttgtaactgatactctttcaatatttcagcctcagtggtactcaggccgttgtgcttctcctaatgtgatcactggtagttttggagtgttgctcaagtgtgtgatcattaaacttacattttagactagaagcacatttttaagtatattaggaagatagtatggaaataatggagattttgtttagaaattcatttctttgaggagagtaagcatttataatagtagatacagttaatggttaatgtaatttaaagtattttgtcttgt

SEQ ID NO: 25582 - DNA, 1033 bp, Homo sapiens
atgtcttggctgtagggccatcaccttgctggcacattcctccagttcttctccagcacactcattttttatgtgtagctaaatttccatcacaatttttttttttttgacggagtctcactctgttgcccaggctggagtacagtggcttactacaacctctgcctcctgggttcaagcgattctcccacctcaaactcccgagtagctgggattacaggcatgagccaccagtcccggctaatttttgtattttcagtagagacagggtttcgctgtgttggccaggctggtctcgaactcctgacctcaggtaattcacctcccagagtgctgggattacaggtgtgagccactgcacctggcagtgatgatgcactgaaacactcagtaaaatttggtgcactgaaaccctcagtaaaaatgctagcctttggtttaatatactgagagtattggaatctcaacacggagttaactttttaatgagtgtagtgacctgctagacatgatatgttgtcaggagactgtgtattcctgtgaatactggagaacctttaaaagatattttagttcttggcttttaaaatacggtcttggctaacttacctttcttggggtctcctgtgtacatcctggtattgtaaagtgaagatgtcttgactaagaagtgtgagcacgagtggtgggacaggtagggaggcagaaaagggttgagaattacttgaaatggaaaatcacagtgttaagcttttttaaatctgatgagaaacatatccaaattatctaagtttcagggcctggctgtttaagttccttatcaaataataatgtaaactcatgccagatcttcttgcgtgctctatatttcattaagtgtaattatgtgattattgagaatatagtgcagtaggcctgtcactattttacatagtattgttaatgttttgttaaaaggattttcttacatatgtgatcagaaaagcctactgttattattttctagtaaaatgtagaattctggctgtatttc

SEQ ID NO: 25583 - DNA, 1064 bp, Homo sapiens
aatattttgtaccctagaagtcctctattaatccctgtaagaatctcctggaaacctggatgaaagagtttaatgccaaatattggctaaaaagttctgtctttctctctccctattcctcccccattgtttaattgagatatacatgttttaatgggcagtggatcagtattgtttctggggaaatccacaccttaaaaggccaggcttccccagcccaacttacctgtgacccacctacatgtgttcaccttttgggattctgaagaccctgctatctagacctagtctcctgtcataaagacattatttctatagtggtttatgtctctcttactctttgtcccaaatgacagagaccaatctagaaattggaaataaattattaacgtccaactttccaccaaaaaacatataaataggctcttagattttaaaaatattaaatctatagatattttaaccaattaaaacaatttctacatattccattccccacattttccatcgtcataacaatgatgcttctcatgatacgtacatctactccttgaaaaagtattctggtggtggtgtggctaatgattgacaaatatttctgtaaaatttctgcctgtttgcctctagaattctgcattatacaggcaaattttctttaaagctagagacttgtgctaaatttgcctgattttcatacagatatgctgtagtaatacagctaccttttcatttcatctttgtgctttggttaacaagcaggctcaagagactgctttgtgtaattaaatgaattgacctaaacatgagctgtcaggtgaatacttaatatttccatgcagatacagaattccatattgtgttcagtaaatttcttttggttcttcacagtgaagaaagaatgtttctaacctaacatttgtagaaggatactggaaaattccttccaggaaggaaggaaggaagatgccattacttggtgtatttatgatggatgaccacaaagctattgttctaccagttattaattaccttctaagatcttcagttactgctttattaatgtc

SEQ ID NO: 25584 - DNA, 1019 bp, Homo sapiens
agtctcttcccaaaagctcccagatctgataaaacaacttcagcaaatttctggatataaaatcaatgtatgaaaatcagtaccatttatacacaccaataatgcccaagctgagtaccaaatcaagaatgcagtctcatttacagtagtcacaaaaaagataaaataactaggaatatagctaaccatggaggtgaaagatctctacactgagaattacaaaacactgctcaaagaaatcagagatgacacaaagaaatggaaaaacattccatgctcatggatagaaagaatctattgttaaaatggccgtactgcccaaagcaatttacaaattcaatgctattcctatcaaactaccaatgacattctaacagaattagaaaaaatgtttaaaattcatatggaaacccgaagagccaaggcaatcctaagcaaaaagaacaaagctggaggcatcacattacctgacttcaaactatactacagggctgtagtaaccaaaacatcatggtactggtacaaaaacagaagcatagaccaatgaaacagaatagagagcccagaaataaagctgcacacttataaccgtctaatcttcgacaaagttgacaaaagcaatggggaaaggactccctattcaataaatgatgctgggataaatggctagccatatgcagaagattgaaactggaccccttccttataccatatataaaaatcaattcagacggattaaagacttaaatgcaaaacctaaaactaaaaaaagttgaagaaaacctagggaataccattctagacatatgccctggcaaagatttcatgatgaagacaccaaaagcaattgcaacaatgaccaaaaaaaaaaatgacaaatgggacctaatttaactgaagagcttctgcacacattagaacgatcaacagcgtaaatagacaacccacagaatgagagaaaatatttgcaaactatgaatctgacaaaggaccaatatccagaatctgtaaggaaccta

SEQ ID NO: 25585 - DNA, 1049 bp, Homo sapiens
acagtctcttcagtatgaaggatagacatattatccttattggaaaggcaaggaaataaaagtaccatttgctgatatcctactatgtgcatgattgtgtcctggggtgttttttaaattgtagaatcctatttaatcctgtgattatttggtgttattcccatttttctgttttgttttaaacggagtaatctgaagttcagaaagattaaataatttgcttaaagttagccaattagtgacagaactggaaattgagttcagaaatttatctcttcaaagctcatgctttttctcttgaatgaagctgtctttccctttagtcaaatagattatgacagggctaaaaatactgtaacatgatattattactaaacaagaatcttgtttcttgatgccatgaaagtataattggtgttaagtaagctttcttacgtatcgtgtagttgagaatggtatattcccataatgtttgtatttttaaagacaattttatgacatatgtttaattatactgtttactgacacttagaatggtaaagtcatctctctctgatttaggagcacttctcttgatgtagaacctatctatacattcagagcccataagtaagtatatgttttttctttattttaaaccgatatctctgtaaaatagcctggttaggatattttattttctttcacttactaggtattctttgtatttaggagtgtttttttaatgtaaaagaatttgacagataatataatgctaaaacgaagttcatcattgccaagtagggatttgtgcttaaattagattttatttacatggtgtttaagtgaggtacgtatttatatctttaaactagagccaactaggtttaaatattagaaattccagctttttttcctcatataatttggattaaaatattcaagtgcctcctttggtagtagataccctacaattggaaagatacagagattagcaaggcctcagtacaaggatgacacagattcacgaagggttccatatttttctttttcttttctttttttttttg

SEQ ID NO: 25586 - DNA, 2073 bp, Homo sapiens
ttgctagatggtagattgggaggtgctgtaagcatagaagtatttcttgattttaggaaaatatcccaaatagttaaacaaattattctagcatcattaaataatcctttgatttctcctatccaattgtgttttttttttttttagacggagtcttgctctgtcgcccaggctggagtgcagtggcgcgatcttggctcactgcaagctctgcctcccaggttcacgccattcttctgcctcagcctcccgagtagctgggactacaggtgcctgccaccatgcctggctaattttttgtctttttagtagagacagggtttcaccgtgttagccaggatggtctcgatctcctgacctcttgatccacccacctcggcctcccaaagtgctgggattacaggcatgagccaccgggcccggccactcctttacagtttttatatgtatcaggacagttaaggctagataggagttgtttatgatgccacctttgttctgttggtagtggcttcttggagtgctgtactgagaaggatttctgaggctgtatcttgtttttgaagaagaatgctgtgattgatgaatgataccaattaacagcatgggaacagggccatacaagtcacgtgtttgtcatctttggggtctacttctcaactctctagtctatcctattggtctgtctgtaaaacttttataattttaagccactcacaatagcccagcgataacatttgatcctatcatgttatttctgttttgcatgaagtgagtaagctgaagtctagagaaactgagatattgaaatcttattcaaagaaaatgcaaacctagcatcctaatttctttaggcccatgttggtaaaggtgactgagatggagacagttcataaagagcttaggcatgtagatcacaaaaattgtccctgcatgtattcagcttaagttttagcccttcaattggatttgtgattccagagttatttctaaatatagaaaaatgaaccatagcaacctttaccaatttgttgttaaatctaagttagatgtactctgaaagatcaacattttagggaaaaaaataaatacatggagagctactagagaaaactgatgcaaggttaggacagtagaaataattatgggaaccttgtaaatcgtatatctgtcatttcagtacatgtcttatatttcagtatgtggttccgttagtttacttaaaacaagccataataccgttgagcaaagtttaaattactgctttaaaatttataatgtacatattttttaaaactatgtgattttcactgagttaggtagtacagttatttaacacaacaaacgtatactttctgaagaaaataattgaattttcttattcagtggtaaagggaaactatctcctttatttaatttagcatgttttttcattagattgttaggaaaaaagcattgcctgacagcggtgaagatcgagatacaaaagaagctctaaaggagtttgacttcttggttacatcagaggaaggagacaatgaatctagaagtgcaggcgatggaacagactggggtaaggaagcatactggatccaaccagagatgttaagtaaataaaagaaattaatattttaccaggagggcaacatcttaactataatgttgaaatattgagcattctgtgaacttattactactagcaccctttatccagggtgaatgtgtgtgtatgtttaaggaacattgtataactacctcatttaaaaagaaaaaaaaacaacaacaatacagtatgaaaagaatttgaattactatacagaatattctctgttttctgtttagacagtggaacttgcaaatctagatttttgtggaaattgattatgagactttagttggaggatttttggagatctcattgctgacatcttacatgcgaaaagaagtatgagttaaaaaattgtagtcagtcatttatcataaagatttgacagttcgtaaaaggcatagaatttttcttctcaaaatgttctaaaaaatcaaatattttaaacacctaataagagttgaaac

SEQ ID NO: 25587 - DNA, 1942 bp, Homo sapiens
gttaattcagtgtagtagtgtattaatgcatttcctcagctgaatattaaatgcttgagatctagagcaatgccagttgatcagtgctgtgtttttttcctttgttttttaatattctgtcttttacttgagtgtctgttcttgtgacctgagatgtgcttaaatttcaaaataaatttttaaaaaatctaggctatttgttaaaaactgttctaaaactatattaactgactcaaaggagtgattttaattagtgttgtatttaaaagttttcataagttttggatatcaatttaggagaatagaagcctagatgcaatatattttttaaatgtttgtaagtaaacatggctggctgcagtggctaatgcctgtaatcccactttgggaggccaaggtgggaggattgcttaaggctaggagtttgagaccagtctgggcaatgtagcaagaccctgtctctgccaaaaaattaaaaaattagctggggatggtggcacatgtctgtagtcctagctactggggaggctgaggtgaaaggatcacttgggctcaggagtttgaggttaggttatagtgtgctaagatagtgccactgcactctagcctgagtgacagagtgagatcctgtctcttaaaaaaaaaaatcatcaagtttataagtaaacagcgcagctcagtagaaggggcttgcgctttaaaagcaggtagatgtaagtttgactctgccccaacattttaaatttccgtgatcctacttaatttctctatggttactccattcctgatctgtaaactaggaaatactctgggaatacttcctaactcaaatgtttattttcttagtgtacaatacctagttattctcagtatgtaatagttagtacctagtatcatttcatgtatctttccaaccatccattcatcttataaatatgatatatataatgtttttcagacctagtaccaaatccagtgaataagacaacaatgccctgttggatttttatagggaagatagacagttaaagaagtgattacaatgacatatgacatgtataatggataaataataagtgctattgagcgcagtagcacaaacctagtcaagtggtcaagaaaggcttcttggaggaagtgatgtttaattttgacatctgaaggacaagtaggaattaaccagggcaagtaaactgactatttgttgaatgggaggtgggagaaaggcagagtattagcagcagagcttctgaggtaagactggcacatttgagaaatgggatacctggatagtagtgggagagagggaaggaatgtttccagatgtagatagagagttagctggggggtaaaatagttacaagggccttgtgaaacatgttaagtagttcacgcttaggaatataataagcatttgaaggatcttaattaggggtttatgatgagatttactcttggattacgtgggctgtagtgtggaagatggattagagaggagcaacgttggagatggggcaactggttagaggattgttgcagaaacctgggcaaatgagtaaggtttccttgacaagggtgtgttcaggaaatatttaggaagtaaaatatgcaggaactagttctttttatatatacataaatttgattttatgctgatcttctctgtattattctaattttagtatatgtgctgccaaggcaagcacaggaactacttcttgattggatgtagggggtgaaaaaaggatgagtcagaagtgactcccacatttgtaatttaaacaactagaccagaagtagatttggaaaatggtgggttcacttttggatttatttcttaggtaaccaagtgaagatggccagtagacagttgagtatatgggtcttgagcttaagccagaagtatggatgtgttagagacataaatttgagaggcatcaac

SEQ ID NO: 25588 - DNA, 1542 bp, Homo sapiens
atcattgactagaaactatcaacttttttacaaaaaagaaacagttttagttcttatttggaattgagttaaatttagatttttagaaactgtctaaattttacgttagaagaaatgatttatttaaaataaaaatacatgtatatacaaaaacacaggatatacagagacatatgaagtagaaagtaccctagcctctctccattcctttttacaaacctactgtttagagagaaattctattaacaatttagtgtataccacattttctgtatacacacacacacgtgggatttttattgagcttgcgcttaccttggtaataattgggatgtttacatttcaagtcttctcaaacaagatttttcttaattccttaagtagagatatcctatacttaaatacctaggaataaagtaaataatttgtaggttttattactagtgtgagtgggatcttttttccattttatctcttaactggttatttccaacacatgggaaagctctgctgctgtgtgcaaagtcatttggtcaccttgcagaaatactttattatttctctcttttatttttctttctcatatttggatgttttaggtagaaaaaaatcaactggaaatatttctggtatttatacctctctttttctagtattttccagtatttatactggaaaaaatcaactggaaatatttaggtagaaaaaaatcaactggaaatatttccggtatttatacctctctttttctagtattttccagtatttatacctctctttttctagtattttccagtatttatacctgtctttttctagtattggctattaactctagagctttgtatcatgatggtcatgctacagggtttttccttaaaaaaaaagtttattttaaagttacatgaaaactgtataactgttaagtgtagtatttatcattgctttctaagaattactatgtggcatgttaaaaatgtttctagttttctaagagatgttaaaactagtagatgttgaatttcgtgaattgattttttgcgtctaagataatatgttgttttttctcatttaactaactaatgaaatcaagttggtcctgtagtatttctcttttgatacactgctgtatttgttttgttaatattttatttaggatttttacttctgcattcttttttttttctgagacagtcttgcactgtcgcccgggctggagtgcagtgttgcgatcttggctcactgcaactctgcctcttggttcaagcgattctcttgcctcagcctcctgagtagctgggattacagatgcatgccaccacacccagctaattttttgtatttttagttgagacggagtttcactacgttagccaggctggtctcaaactcctgacctcatgatccgcctgccgcggcctcccaaagtgctgggattacaggcgcgagccaccatgcctgacctctgcattcttaaatataaagtcattatgtatttttgataatgttattttgaactcaggtacagagaattaagttctc

SEQ ID NO: 25589 - DNA, 1033 bp, Homo sapiens
ctaaggacattaaaggagaagcttatattattgacgttttaatgaacctgctagaaactagtttgtctagaaagtaagattttttattttacaatgtcagagtctaaacttgattctcaagcctgctacacgtcagaaattttaaaaagcagaaacattcttgaagaccaggtgcggtggctcacgcctgtaatcccagcacttagggaggccaaggcaggcagatcaggaggtcaggagttcgagaccagcctgtagtgaaaccccatctctactaaaaatacaaaaaaaatagccaggtgtggtggcatgcgcctgtaatcccagctacttgggaggctgaggcaggagaatcacttgaacccaggaggtggagtgagttgagattgtgccattgcaccactccagcctgggcaacagtgtgagactccgtctcaaaaaaaaaaaaaaaaaaaaaaaaggaaacattcttggattccagtactgtcttcctgaatctgagtctccagataggtggctccaagatctgtatatttaaaatgttcttcaggtttttcttgtgtctagccatatttagccacttgtgttctaccaaagcactgaaatggttttcttccactgtgtcccatatattggtgggacttccctccctctcttccttctttccttccttcatttttttaaaaaagtgttaatctgaagcctttctaatacaaagtggagccagtaagactttattttctaggtctggaaaccttacattgttaacagtcatttccagggaatcaagtggttttgagatatctaagcaatgtatttttatagctttgtttcagatcattcaaatatttaaccttccttagtaaatatatttggttaaaatgggagggacaattgtacattaaaggaagaattaaaaacagaagtgggaataactgatttctaacttatttcacagtattaaaatatgggaattggccgggcatggtggctcacacctgtaatcccagcactttgggaggccaaagcgggc

SEQ ID NO: 25590 - DNA, 1032 bp, Homo sapiens
tggcacatgtatacatatgtagcaaacctgcacattgtgcacatgtaccctagaacttgaagtataaaaaaaaaacaatgcatggattcacttgtaattgtcaactagacgtttctgttttctcttaaatcctctacaactggggatttacttccactccactgaaacagcacttgtccagccattactgatgacagattgcccagaacagtggtcagtattctgtcttatttgatccatctccatcttttcaccttgaaacacttaaaacgtctttaattttgttctgaaattgataaatacaagagtgtataaaacaggaagcataatatgaatatctgtacaccctccacccaaattaaacaataagattgttatcattgctttgcacagtttgtgtgaagttttcttcctgttcgtggcttcccaagacgctgttaggttttggttcctctcccacttcactaactactacttcttgttcttttttaactcttcctcagttcagggcatttttttttttttaatctgtacatattccttcagtgatatcatctaattgtatgatttttactatcatctataaaataatgattcccaggataatgtttactccacctctttcttatctaagtggcatctcagagttaacatacccaaaccaaattcttgatttctcctcccaaacctgccctttcccccatgttctctatctcaggaaatgaccatttcatccttctagttgctcaagggaaaaccatagagtcatttttgacttccctctttttctcaaatttcatgttgtattcaccagcaaatcctatggtttcatccacaaacaaatccagagtttatttatcatctctatggttaccgctattatctctcatctggattattgcatctgcttcctatttggtcatgatgctttccatttatggaccatatagagtattcttagaagtcagagtgagcctgttaaaaacatttagatcacgaccctcctctgcttcaaactcttactcagagtaa

SEQ ID NO: 25591 - DNA, 1034 bp, Homo sapiens
taaaaagggtctttaatatttgtaattttataactttttcctatgtcaacaagtcatttttaaacactttttaaatacgtacagaaaacacataaaacaaatgtacagcttaatacatttctgtgagtcaaacattcttgtaaccatgtggtaccctccaaaatgactcccagtcattcttgctgtgtggttttctacatccttagtgtagtctccttccacagtgaacaggattaacctgtgtaaccaacaggattttgtggagatgatggagttgattttttggtcataactgcagctcttaggtcattctaactttgaagttagatgactcacttgaaggaagtcagtggtcacataataaggatactcaagaagctctatggagaaggtcacacgattggaactgagtcctcctattaaaagccagcacaaactcatgagccacaggagtgagctaccttggaaatggattctcttgctccagtcaggccttcaaatgactcagcctgggctggcatcttcactgcaacttcttaagaaagtccatgctaaactaagctaagctgctaacaaattcctgacccatagaaactgtgagataacaaatgattacagttatcttaagctgctacatttggggataatttgttatgtagcaaaagttatcaggaagtagaaccttatcaggcacctgggagccctctttgtcccctatccagttgcaactctcttttggttctaagaatagtcactattctgttttttatggcaatcatttccttcattttctcgatagttttgtcatccacgtgtgcatctttaaacattacagtttagtttacctatttttattataagttaaaaacgtgcactattatatacagcatttatggtaattcacccgcttcctctaaacctcagattcttcattggtaataacagcatttttacacataatggtttaacacttacccagtatatcacacatttttatcacatttaaccaccactaacaactctacaaggtagga

SEQ ID NO: 25592 - DNA, 1111 bp, Homo sapiens
tctttttttaaaaaaacaatatctggttttgattaatgaggctatattcaaaagaaacactaaatgatgtggccagttagtgagaatgtagccttatctttactgacctcattttaatattcctactctggctgggcatggtggctcacgcctataatcccagcactctgggaggccgagacgggtggatcacctgaggtcaggggttcgagaccagcctggccaacatggtgaaaccccatctctactaaaaatacaaaaattagctgggtgtggtggtaggcgcctgtaatcccagctactcgggagtccgtggcaggagaatcgcttgaacccaggaggtggaggttgcagtgagctgagatcacgccattgcactccagcctgggtgacaagagcaaaactcagtctcaaaaaaaaaaaagaaaaaaaaagatatatatattcctactcttattaaatgaatatagcatttcttagcaacttcttttgatttgtgagtatatattttcttggcctcaaaattaaagtaaaaagtatcctcttactcagaggaggacaggggcaagagcctgggaccttatttgctaattaaaatgcacacacacacacacacacacagaaattttgagagccattttaatataattgcctccctagaaacataccttttagggaatttttatcactaaaccacatgttatttaaatacgtacatgtttaacataaatacatacataaaattcacatgcatacttaacacttatgttaaatatattcaatgtatatacatatgtacacaatatatgcatatatacatgtgggtatgtggtatgtgtgcatgtgtgtgtatggccagctacataatttgtgggactaagggcaaaatgaaactgtacggccctcgttcaaaaattaggtgtggggtgcttctaagcacagtcttgtgcaactgcacaggttgcatgtccatgaagccatcctgtgtgtgtgcacatatgtgtatgaatatgtattttatataatacatatatatgcatgtatgtatctgagaagaaatgtttaaaaggctacatacaagcttttccaggtctctactatctgttaacta

SEQ ID NO: 25593 - DNA, 1117 bp, Homo sapiens
gtcctcaaggcagaaagcaatggcagaaccttgtgatggcttttacatgttctgctcagcagtggcatacatcactaaacatcattgcccagagcaaaatgcatggcccagctcaaggcaatgagggtggagaagagtaatcctctcactaggaggccagtgcagcattgggggcaatcatacaacctacctcagagccacttttatactgttcaaaatctatatatatatatatatagagagagagagagagagatttattatgatatatatatatatatatatatatatatatatattttttttttttttttttgagacagggtcttgcttttcacccaggctggagtacagtggcacaatcatagctcaccactgcgcagcctcgacctccttggctcaggtgatcctcctgcctcagccccctcagtagcaggactacaggctcaaaccaccaacacctggctaatttttttttgtattttttgtagagactgggtttcaccatgttgcctaggctggtctcgaattcctgggcttaagcgatccacctgtcttgacctcccaaagtactaggattacaggaatgagccacggcgcctggtcatattgtttatatttttgaagctttctccagaatctgtattgcattttgctattaaaatgagattccatgcttgaacccgggaggtggaggttgcagtgagctgagatcgcgccattgcactgcagcctggtcaacaggaatgagactccatctgaagaaaaaaaaaaaaaaagaaaagaaattccatatctctaatttgttattagtgtagccgttaattttaaaaatatatctctttatttttaattgtggtaaaatatacaaacataaaatttaccaccttcaccatttttaagtgtatagtttagtggcgttaaatgtgttcacattgttgtgctttcatcaccaccatacatccacagattacttttcattttgcaaaactgaaactttacacccgttaaagaactcctattctcctctccctacagcccaatcaactaccattctactttctgtctgtatatttgactattctagatgcctcatgtaagtggaatcgtacggtat

SEQ ID NO: 25594 - DNA, 1064 bp, Homo sapiens
gagtagctgggactacaggcgcccgccaccacgcccggctaattttttgtatttttagtagagacgggatttcaccgtgttagccaggatggtcttgatctcctgacctcgtgatccacccgcctcggcctcccaaagtgctgggattacatgcgtgagccaccgcgcccggcctcttctttttttttttttgagacagagtcttactctatcgctcatgcgggagcacaatggcgtgatctcagcttactgcaatctctgccttctgggttcaaatgattctcgtgcctcatcctcccgagtagctgagactacaggtgccgcgccaccacacccagctaatttttgtgtttttagtagagatggggtttcgccatgctgcccaggctggtctcaaactcctgagctcaagcaatccgccagtctcggcctcccaaggtgctaggattataggcgtgagccaccgtgcccagcccagctcatattttataaattagctaaacaaataaagctctggacatccgggaacttatgattgaaataaaaaatggcctattatattttgattcaaatttgtttattatatttagatttctattttgtgacatgttttggggttctttttttttctttttttttttttttttgtgagacggaatctcgctctgtcacccaggctggagtgcagtggcgtgatctcggctcactgcaagctccgcctaccgggttcacgccattctcttgcctcagcctccccggagtagctgggactacaggcgcccgccaccacgcctggctaattttttgtatttttagtagagacggggtttcaccgtggtctcgatctcctgacctcgtgatccgcccgcctcggcctcccaaagtgtttttggggttcttaagaagataaggtataagcttttaaaaagttatgaaaaactttaaaaagttataaaaaattttttataaatttatatttattgttacttttaacatactgtgaattttatacccaggtcaaagactaagtgccttttcatccaaatggaattctgtgataaagg

SEQ ID NO: 25595 - DNA, 1028 bp, Homo sapiens
acagagtcttgctcttttgcccaggctggagtgcagtggtgcaatcttggctcactgcaacctccgcctcctggattcaagcgattctcctgcctcagcctcccaagtagctgggattacagacatgcgccactgtgcccagctaaattttttgtatttttagtagagatggggtttcaccatgttggtcaggctggtcttgaactcctgacctcgtgatccgcccaccttcgcctcccaaagtgctgggattacaggcctgagccaccgcgcccggccactgccttttattttatcttgagagtgagaactgctatgttttttttcagtatgttcactttttccttttgaatgtcctggcttccattctaaaactatgtgagaaccacagcaatggtttaataagggaatgtagacagttgtctattacatgaggtgttttgtggttgttatgagggatgtacactgacactgccatgttccctgttccttttaactaggaaggcggagcgtgaagtaaaagcattggcaaaacttgatcatgtaaatattgttcactacaatggctgttgggatggatttgattatgatcctgagaccagtgatgattctcttgagagcagtgattatgatcctgagaacagcaaaaatagttcaaggtaactaaaaataaattctcatagccataataggatggaaggaaattgttatttactatgtatgggccactggataaggctattaatcatcacgattaattatcacaattccctctgagagacactgttatctctccattccgaaggtaaggagaaagtgaaaatctcttccttgctcctcctcttgctgcagacttgctctcacaaccctctgttacatcctcagctgtctgcaaaatctcaggttcagctttcctgactccattgtttcatggagagccttgttcacgtgccggcttcagcgcaggctgtttaagtgtagtcttgtgaagagagttttaacatatagatgctgcatctgggggctcc

SEQ ID NO: 25596 - DNA, 1052 bp, Homo sapiens
ggattacaggcactcgccaccacacctggctaatttttgtatttttagtagagacggggtttcaccatgttggccaggctggtcttgaactcctgacttcaggtgatccacctgccttggcctcctgaagtgctggtattacgggcatgagccatggcacctggacttatcatgacttttgaaaagccaggagttgactgtgactgcctggggtgatatgttacgttagacttgccctgggaggagtgagaggactactctttgtgagtcaagagtttctgccaagtggatctttcttattcagaaggagagaatcaaatttgttttattgtccatttcacaagtgacattaaagggaaaggagtggggaggcgggggggtgggggttgagcatgaaatgtcaaaataacagtggtttttatctttaaggtttggcatggattttaaagaaatagaattaattggctcaggtggatttggccaagttttcaaagcaaaacacagaattgacggaaagacttacgttattaaacgtgttaaatataataacgagtaagtagtaaatgtttacatttttttgaatggcaaggtacgctgaatctgcactattcttttttatgcttctctcttctttattagggtatcatttatttctttctgatcctcattaaacatttcattctaccaagaggagtttggcttactccgagatgatctcactttactgtggttatttcaataaaaatggatataccattgatcatccttttggtgctatcttcagaactgaagctatagagtcatttgctttaaagtgacatgcaaattcatgaaatgctccgtattttaaaaaccgtggcaccagatagaacctatcattacccacaaaataggtgatctttgagatgttctagtcttaccttcttattttatagatgaggaaactaagatccagagatgtgaagtgattttgtctaagataaaagctagatggtaattgttctctggttgtctgttattgtataaggcactgctccaaaatgcagtgctta

SEQ ID NO: 25597 - DNA, 1032 bp, Homo sapiens
cttcctttttcttacttggattcatagacataatttgaattaagtttttaaatccccgctccacttttcagggaaactatattcagtattcaggggacccactgcaggatttcactctaatgagatttttggatcgatttgtataccgaaatccaaagccccataaaggcaaaggtatgcttctatttagtgaattatttggctttcatttttaatacataataaacaatatgagcttataactaggttttgcattatactgtcataattttacatttcagaaaacacagatagtgttgtgatgcagccgaaaagaaaacattttattaaggatattcgtcatcttcctggtaagtataaaccttagacagttgaaactgaaaagacaatataagacaaagatgcataaattgtattattctttgttctaatttatcagaataaaacctgagcatcaaagacattatccatcttttttcccaagaataggtattcttaaatctactgtatctgactgggcctttttttttttttttttaactttattacagcaaatttgaaacatatccaaaataaacaaaatagtatgatgaaccccctccccattaccatcacccagctttgacagttgtcaccattttatcatccgtagcttcatccacaacccctatgtatataattattattgcttacaattcagaccatcttaaagctctctaatatcagcttagcagcacaaaaacccacagctggttttgtcacagagcatcattttaaacttaataacctacttctatatttgctagccatcttctggatctgagtctgttgttgtattcaaagcagacatttctttgcataccagatctcatctcccttttgttcagagaccaggattaaattagaccttatagatcatttaatttccagtgacttacttcacagaggtccagagatgtaaaaggacttacccacagttagtaagttagaattaaaagccaaatctccttttactcaggatgagtcagcaat

SEQ ID NO: 25598 - DNA, 1035 bp, Homo sapiens
tggtgctcccaaacacttctctttaaccaccttacaggcatagttatctgtgatatggtccatgcttaccttctagcctcatctcccactactccctacacaaacctagttgtttactcttctgaactgttttctgcaatttgcttgggactgtttttcccttgtctacaatccttcctattaaaattcgaggaccccttaatttgtggctcatctataaagttccctgactactcctctacactgcagaatttacttaggctaaaaaacatttgggcttttttattatctttttttatttttattgagacggggtctccctctgtcacccaggctgaagtgtgcacaaacacagctcactgcagcctcgacttcctgggctcaagtgatcctcccacctcagcctcctgactaggtgggatgatgggtatgcaccatgggccacccacacctggctaatttttaaattttttgtagagatggggtcccactatgttgcccaggctggtgtcaaactcttgcactcaattgatcttcccaacttgacctcccaaagtgctgggattacaggcatgagccactgcacccagccccatttttttcttaagtattcattcttttcataattgacttttctaatcttcagaacaagactgtgagctccgtgaatgaatacctagctccggttccttatacctagaatgaactttataatcaccagacacactgcagtttgttttcctctctcctgtggacctctgctgggaagctgcatacatctctttttcctgcctagtgaaggcttttgaatttgcaactcctggttctgtacccgtcaagaataagttggctggccctctttagtctgctgatactgataggaaggacaagtacactacttaaaacattatttaactgccccatagaagttaatagaaccagtgctggggaatacccccatctggatttaaccagcccatgtaataggtagatcttttttgtttttccaaaagtactaggcctaatcataggatt

SEQ ID NO: 25599 - DNA, 1821 bp, Homo sapiens
agacacagagcagctaagtgacttgtgtgaagtcagagagcaaattagtaagagatagtggaattaaacccagatctcattattaataaatcagtgattttttttcctaatacagtgtacctctcaagggcaaaggcagtagatccaggaaaaaagaaataactcccttgtacatttcatagtatttgaaatgacttccatctgtaggttgtaatcttattatttagttttttctgtaacttctctgatcttctgtaaattaatggcaaaatcaaggccttgtcttggtactgtgatcataatattttgctaagttaagacaccagagtaaaagcttttgaaatcctttcacaaaaattccatcttctcttactgcttagccctagtgtgagatttttaaaggataaaaagagtgctgcggcataaaggactgaaaatgaggggttggtataaacctacagaagagcctggaaaagattagtaggaaaaagttagtgcatcttatacactgaactgcacagagaacttacctaggaatgaggacagtagaatagaggtatgtcaagagccccacaaatgatgctgttacgccacctatgcccagttgagtattactagattaggaaatagcagaaggacagagcaagtggataaggtgttacatttttcattagtttatattttatcttgaacatgaaagctccttagggaagtataagaagtgcagttacatgtctgaattggttagattgttcagggtatttttaaacaagtagaacttgtagcatggaagggctttcagggtttactttagtcagttcaagcatagtctcaaaaagaagaactttattttccaactgtttgggtttttctaccaggtgaacaaaaagcaaaattaaagaaggcatgaattaaaaatttttgtaacctgaggggtaagtagattttggtaactatgaccctttctatatgaagggaataatcaaactaaattatagatcacccagttcaatgtggctcatttcattcattcaacacacattcaccgattattgtatgccaggccctgttatatactagggacacaaaattgaataaaacataatccaaatactcaagcacaaaatcctaatacccaactaccatctagctatatgaacagattttgctgtacctgcttgcatcctcactgccagaactgatgtcctgagatctttcagctgccttctataactagtcatgtttgtaattcagagaagttgggtaattctacattaatatgttcaaccaagggaaggaaaagaagtcagaaaaaaacaagagacagagaagtgcaagggagaagtaaggggaggagaaaaaagaaaaaaaagggaagaaaaggaaaagaaaaggacaaaacaactggttggagaagagcactataaaatgcctcagattgatagtgtaggcaggtatttttctttttctttttctttttctttttttttttttttttttttttttttttttttttttgagatggagtttcgctcttgttgcccaggctggagtccaatggcatgatctcggcttaccggaacctccacctcctgggttcaagcgattcttctgcgtcagcctcccgagtagctgggattacaggcatgcacccccacgcctggctaattttgtatttttagtagagacggggtttctccatgttggtcaggctggtcttgaactcctgacctcaggtgatccgcccacctcggcctcccaaagtgttaggattacaggcgtgagccaccacgcctggccagaagaccaggcagaaaacca

SEQ ID NO: 25600 - DNA, 1060 bp, Homo sapiens
catttttcatctaaagtcaacaagtttgataatacactataaaaacgtggcaaaacaagtacatactcaatatattacttgcagaagtataaattggtttgaccgccataaagagcaatttggcagtatctacaaatttcaaatatgcgttttctttgagccagcaaatctcctagaaagttatctcatattcagactcaaaaagtgggaaaagatatgtacataggattactcattgggtattgctcatactcacaagagattggaatagctaaggtgtatttagcttatgacgagttctaatctcttttatttctatttttctggataaataatagttgtacatatttatgaggtacatgtgatattttgatacaagcatacaatgcataatgatcaaatgagggtaattgggatatccatcaccttaaatatttatcatttctttgtgttaggaacagtccaattctactcttctagttattttgaaatatacaataaattgttgttaactgtagtctacctatcatgctaccaaacactggatcttattttttctatctaactgtagttttgtaatcattaaccaacccttttattccccccacccactacccttcagagcctctggtagtcatcattctactctctatctccatgaggtcattttttttttaaatttttcacatacaagtgagaacatgcaatacttgtctttctgtgcctggcttatttcaccaactgaaatgttattctctacttctgtccatgttgttgcaaattataggatttcattctttttatggctgaataatattccaccatgtatgtgtatcacattttctgtatccatttatccattgatggacacttaggttgattccctgttgtggctattgtgaattttgctgcagtaaccatgggatcgcggatatctttttgatatcttggtttctttcgggtagataccctgtagcgagattgctggatcctgtggtggttttatttttggcaacctccgtgctgtttttcatagtgactgtactgatttacattccca

SEQ ID NO: 25601 - DNA, 1031 bp, Homo sapiens
tattactaggtataataaaatgatatttagtgggaagacattcatcaaagtagaagtagttaatttgggccaggtgcagtggctcacgcctgtaatcccagcactttgggaggccgagatgggcggatcacttgaggtcaggagttccagaccagcctggccaacatgatgaaaccccgtctctactaaaaatccaaaaatgagccaggtatggtgatgtgcacctgtaatcccagctactggggcggctgaggcacaagaatcgcttgaacccgggaggcggaggctgcaatcagtcaagatcgcgccactgtactccagcctaggcaacagagcaagtctctgtctcaaaaaaaaaaaaaaaaaaaaaaaaaagtcgttaacttgcatacagttttattcatagatattttactactttattttggtagttcatcttataaaaactacttaagtcagatacgttgtggagctcattacctcgtgagacaacctgttccattgttaggttgttggatatggaataatgtggtagaaagaacttgggctttggagtcagggaaactagtttgaatctcatttctatcacttactagctatagtcacaggcaaacaacagcttctctaaaattcttgtttcttttctggaaaatagagttaaacctcctagagttgttgcaaggatttaataaagtatcatatctcactttatgtgtttagcataaagtaaaggcttagttgttaattccttcaactaattgctgtgaaaattgctaaaacttactgagcacttactgttagccaggtgttgttacagatagtttgtaccccgtagctcaatccttgcaacctgtgaggttaagtaagaagtgctctcatcttcatttttcgtctaccctctgcagtgatactgaataaaatcaattctcctattaacacttattcaagtatttgaaaaccacttattctgtttggttttgttaagcacatttttatcacatgacattatttttacctttgcgtgcatgatt

SEQ ID NO: 25602 - DNA, 1082 bp, Homo sapiens
cctctcaggaaaaacttgagataatgtgcttatgagatattttcattttaatgtaggaaaaaaaatttttccatttctgtggttagtttattgtggcagtatgtgagaaattgctcattggctgctaaccaatcagatttcttagctactactggtgcagagactaacatctgtcaagctcaacatggattcatattgcattgccagactggcagtccataatcttattactggataaacttttcagttcctgagcagagcagatatggtgtgctctctcagtactctctgacagtggaaggactgagattcaactgtcactggtccagatgagcagaattttagaggaaacaatttagcaaatgctaagctcttaggaaaagtatgttaatctaaagtaataggtatttttgaaaatatataaatcattgtcgggattgctacaagatatgatttttttaaaaaccaacgacgtagacacttgagtttttaaatacaacatacaatataaaagcaagaacaattactaagcaaagtcaaacctatgtcaaaacatggacatggactttaggacgctggtcagaattgcattgaaaaaggccacatacttttacgtggtaaaagaatactaatattaatacatgtcaagaggcgtggacacaaccctccacgtcattagcatttctagtacacaaaacttaagttgaacctggaaaactctttactgggaggaattcatgttataataaatattgttattccaataggaaaagcattttatctcttcactttagcctttgctgagtattgtacaaaaagaatgatgctgcactaaataatgaacttctttttgaagaatttaataactagatgcattttgccttcctggaatccttttgtctgtctctttgcatcgttgactcttgcttatccagagatctcagcttaaatatttccttaaaggtacctttcctgagattccagctggaattgagtccccttagtatactctgccatatcacctcttgcagtttataattacccagctgtttgtatgaatgttatgtctgtgtctcacatca

SEQ ID NO: 25603 - DNA, 1434 bp, Homo sapiens
gctgcatatagggtatggaattgcacatccatctcataggaattgtaaatggtttgaataagaggaaagtaatttttgttgcattataaaatgtctagtagcatcataagtttttttgagagaagcatctttttatttcccatattcctggttattttcatcattgctttgaattgaatttttatatctatttttatatgtaactctttttttacctcatgtttttgtttgttttgcacatttctcataccacaggtattgaagcccctgggtgataatttgatggaggaaaacataaggcagtctgtaacaaactctatcaaagcaggcctgactgaccaggtgtctcatcatgccagattaaagacagactgacagttcatctcctcacggactccactctctttttttttcatgcttgctgtacaatgagaactcaaataaaaataaaccaaagtttacaatcaactgtagaagtagtttagtgtaactggcttcacagatggctgccacagagtgtgaagattgtttgttagttttaagcattcttttaatggctcctaagacatgcagatggactgaggagcattggttaatcatgcacctttgtgccatgtttaactcttttatttctttttacttaatctaatgttagtgaatttgtcttatgtaaaaggatatttcagggaaatattttcagaaatctatttagagtctctttaacacagtgtcccattgaaattttaatttttagagaatttatgaatcactgtttcaagaaccagattggaaagacaatgaagcctttattgagccactacattaaaagtatatattgctttactgccttcaataccagtattacatcaatgcatgtatcagaaacttcacagaaattacatggcaactcttgtagctaagaaagtaattctgaggtgtacatttgtcttgcctttttaaatttataaacttgccctaaaaggagatgcatatctgggaaactgaactgtctttttgcagtttagccttcatgtatataaaatatgccattaattttattggggaagaaattccatccaaaaatgttgcctacagctatgagttaagagtgtctgtacagtgtgtagcttttattttctaaaatcacagatagggcatgtatatgacttataaatatataaatacgattttgtattaaaagttttgtagtttatggcaaaatctggtcctgtggtaggctaaataagtactgtccctgtgaaaggaatgtttgtggctcatgtcagtgtgtgaatgcatagacaatttgaagtttttgatatatttgtgatatttatcttgagcactgcaatctcaccccccccccgcccaccaagggaattcaatgggaatgtttattgtgactttgtcctctgttgcattttaaagttattt

SEQ ID NO: 25604 - DNA, 1022 bp, Homo sapiens
caggaccagcttgaagctgaaattgaagaaacctatgcaaattttataaagcacaatgatggcaaaaatatcttctatgctgctcgtaccccagccacactgtttgcggtcatgtttgctatgtatataatctcaggactgactggcttcattggcctaaactctatagctgtcttgtgtaaccttgtcatggggttagcactgatatttctttgtacttgggcatatgttaaatactctggggagttcagagaaattggaacagtgattgatcagattgctgaaacactatgggaacaggttggtatctatcttttggttttttagtgactaatcttattttcctgtgactttccatcctttgcagtatttgtactccgactttgccttcatgtgaggaatgtcaaaaggatgtcttctgttttgttcagatgtagaatctttatgaattgaagattttttctttaaagttataattttaatgtactttggttagcctaaatctgtactatcctctggatagattcttagttgtaggcctgattgtatcagacggtgggcagggtcagagtctgtaatgatttttttctttgaggaaagaaaatataaacaatgaatgattttcaaggtaaggaaaagaagtttggaagtggtgctttcggaaagcaaaagaagtttcttcctaatattggcaagcagcaatgcaggagaaatgctggatggtagacaggtcttcattgccttccatgaagatggtagtgatttcctgatgtactatgaggaacaatcccgtagggatttcttaccaaggaaactttgacctttgtgttttggaaatattaattagtaaagcaaagcgccatgaacagagaaccatgctccgtcgtaatcttttacctcgaaccagaattcaaagccccaggctgtgaactcttgcctgcaagtatctgctaaggaaagccattttgtgtatctgcctccggtgtgctggaattacctgtggaccgcttatggatgtcatt

SEQ ID NO: 25605 - DNA, 1028 bp, Homo sapiens
tggccaccatccctgggacttcactgggtcagacctgaaggcagcacagcaatgggtcttgcccaaggcccattgtgactattgtgtggttattgcctgtggtcagtcaaggcccagaggttctacaatcagcaggtggcaaatctagcaagttccctctggccttgggtgggtccagagatgctctctggtgatccgcctgccttggcctcccaaattgctgggattacaggtgtgagccatcacacctggcctttgtctcctttactcaagcaggagactctcctcatagccacaacatctgggaatgtgctgggtcacacctgaagccagcacatttctgaatctcacccaaggcccatagtgagtactgcctggctaccactactgcttattcagagcccagaggctcttgagtcagcacgtgatgaaccctgccaggacttggtcatacccctcaagacagtgggttcccttccagcccagggtgtgtttagaaatcttgtctgggaactggggactgaaattggggccttagggctctgccttatgccgcattctactttggctgagctggtatccaaattgcaagacaaagtcctctttactctcccctctcctctcctcacgcagaaggaaagactctctctcagagctgtgaactacactgcctgagcttgtgtagggggagtgacactagcagtcccttggctgccccagctggagtcttactatatcatatgcaccccaggtccactggctctgagcccagcccagcaccaggacctgcccaggaattgcagtccttgtggcctagatggcctttcaagtttattcaggacctcagagcactgtagcccatggtggcaggactggctgcctagggctggtctaaattcttcctccatgggtgctggctgagttctttccactgtggcagggcagcgctgagtttcaatgcaaaaattccacagtcactgctttcgacttccctaagcacatagattgtctctccacaccatgtggtt

SEQ ID NO: 25606 - DNA, 1049 bp, Homo sapiens
gttttgtttcagatcttaaaggaaaggctttcaattttttcccagttcagtaagatactagctgtgggtctgttgtatacagcttttattatgttgagatctgtttcttctgtaccttttgaggatttttaccatgaagggatgttgaattttatccagtgctttttcagcatcaattgaaatggtcatatggtttttgttcttcattctggtgataacgatgtatcacactcattgactgactgattgattgattgattggtgtatgttgaactgtccttgcatccctgcctgaccctaggtgatgatgaatgatctttttaatgtgttgttgaattcagtttgctagtattttgttgaggatttttgcaacagtgttcatcagggatattggcctgtaattttttgctgagtctttgtctggttttggtatcagggtaatactggccttgtagtattggtttggaaatattccctcctcctctggtttttggaatagttgagtaggattggtattagttctttaaatgtttgataaaattcagcaatgaagccattagctttcgggcttttctttgttgggagactttttattatggctttgatctcgttacttgttattggtctgtacgggttttagatttattcatggatcaatcttggtaggttgtatatgtctaggaattgatacatttcttctaggctttcccatttattggcatatagttgttcatggtagcctctaatgatcctttggatttctgtggtatcagttgcaatgtctcctttttcatctctgattttatttatttgggtcatctctttttttcttagtgtggctaaaggtttgttgactttgtttatctttttaaaaaatcaactttttgcttcattgatcttttgtattgtttttatttcaatttcgctaacttcttctaattttgggtttagtttgctcttccttttctgtttttttaagatgtatggttaggttgtttatttgaagtgtttcctcttttttgatgtaggcacttattaccatatagttt

SEQ ID NO: 25607 - DNA, 1033 bp, Homo sapiens
catcctccgcctcccgggttcaagcgattttcctgcctcagcctcccgagtagctgagattacaggcatgcaccaccatgcttggctaatttttttgtatttttagtagagactgggtatctccatgttggtcaggctggtctcaaactcccagcctcaggtgatccgcccgcctcggcttcccaaagtgctgggattacaggcgtgagccaccttaccggcccacttggatcttaatttcattctttttattccttttactcccagttgtgatgatttatggcttttgtatgaacctttattcttccagcctatccattgtgaaagggagtcagcttgccagcagtcaggagcgggtgtgctctgatacatgtaggcctggcaggacaaccaaccctttgatcacttgagcccaggatgtcgaggacagtgagctatgatcgtgccattgctctccagcttgggtgatagagcaagaccctgtctgtgtctgtctgtctcgttttctttctctctgtctaactaactaaataaatggttacatagttgtttcactttgttgctagggagtatacctttcctttggtaaaatatgaatttgtttcttactgtttagaataggtaaggtttcttaattgctgataattatattatgtagaacgtctttttggcaagggctgtatttattcactatttgattatacttaaacttcaggctgggcatggtggctcatgcttgtaatcccagcactttgagaggctgaggtgctgaggtgggaggattgcttgagctcaagagttcaagaccggcctgggcaacatagcaagtgagaccccatctcaaaaaaaaaaaaaaaaaaaaaaaaaacttctggtgatttcagattgccttttgcagttgagttttattctataaatacttctttttttcctatttactttatatgtctggtggaataggattacttttgcatttctgagttttgaggcttttgtctccatagtagtaaatagtatcagattagtgtttttg

SEQ ID NO: 25608 - DNA, 1047 bp, Homo sapiens
aaagcttcatcaaatgttaccaaagctagaggaatcagaaataaacgagatggaagtgtttacaatattgtttgaagtccttattgcagcattttaggagagactttcttggttacgttcctgaacctgttgcctgaaaatactctgtcctttgcagcttttccagctttaagtcccaaatgtatgtattgcctcttttgcagtatcataaatattatggcacccctatcatcacatatttccattttggatttgagagaacataaattacagatcttttttcattccaaactctttgttccagtaggttacattaactgtttctaaagtaactggttttatttaggctatttattgaaaaatacctcaagcaacaaactgttactcataaacactgactactcaaccaccagttttagaacatttagggagttaagccatcttgtataatataagttccttttgtgttaatactaactgtttttggaggagactttttttttaaggtaattaactccctacctccttccctcactctgccaggacaattttgctatttagcttgtacattttttaaaaaattattttaacttttttagagatatcgtctcgctctgttgcccaggctggagtgaagaggcacaatcacagctcactgaagcctcaaactcctgggctcaggtgatcgaccctgaagggcctcactttttagcccagcttggtctcgaactcctgggctcaagcagtcctcctgttttggcttcccaaagtgctgggattgtaggtgtaagccactgtgcgtggcccagcttataaattttagttcagaatttcttttctttctctttttctttttcttttcagatcaagtctcactctgttgcccaggctgtccttgaactcctggtctcaagcaatcctcctgcctcagcctcccaagtagctgggacttacaagacatgtgccattgagcctggcttcagaatttctttgttctcacaaatttctttcctttaataggatacattttgtatagattggagaatg

SEQ ID NO: 25609 - DNA, 1045 bp, Homo sapiens
taccaaccatgcctgttaaaaaaatagacaaaaaccagaactatatctttttttttttttttttttttttttttttaatttaagtggtctcactctgttacccaggatggagtgcagtggtgtgatcacggctcactgcagcctcaacctcccaatctcaagcaatcctcccacctcagcctcccgagaagctaggactacaggcgtgtgccaccatgcccaactcttaaaaaaacttttttttttttttttgtagctatgggggtctcactttgttgtccaggctgacagaactgcatttttaattctatagaaatataattctttataggacttcctggtcaatacagtaatgtaagtttgagctcttgattcttcatcgccataattcccttctgcatatactgcatatggaaacatataattgagcatctgtgttccaggcattgtggctctaacccaagttgtctgagtatatcctagaagtctctgaagtactgtttatcttctttccctttttgttacttcttcacactttccttttggccacctttacagtgagtaaagtaggtggatagagacctttgaaaaagtatatctgtgttcctcaaacaagtcagttttagtgactattacctttggagataaagtccagttccttagagtggcttctgcagccatccatgatctctgaatctcatctcttgcccttcatatgtcaaataaactatagtttttgctgttccttgagtatgccatgttttttcctcaaatattatggtattcttggctcatcttttcatgggggccttccctgacatctaggactatattacatcctcttcctaactcatggtacaggttgtatgttttattgatattactttagttgcttatttttttctggctactttaatctctgtcatgggtgggccctctgttgattatcaagcacctggcacaagaactgggtcttaggagatacttacattttaattgatgaatctctttcccttctatacattttcactttgagatggtacca

SEQ ID NO: 25610 - DNA, 1044 bp, Homo sapiens
ttttttcttaaacttctaaaaaaccaactaatgctttctttacaataagagcaaaactattgtttgttttagcaaaatcaccaacctccacacttggtcattgtgatattttagcagttattacttttgagttcttttttaaagtgttttacttggttcataatttttttttttttgagatggagtttcgctcttgttgcccaggctggagtgcaatggcgcaatcttggctcaccgcaacctccgtttcctgggttcaagcaattctcctccctcagcctcctgagtatctgggattacaggcaagcaacaccactcctggctaattttgtatttttagtagagatggggtttctccatgttggtcaggctggccttaaactcctgactttaggtgatccgccctcctcagcctcccaaattgttgggattacaggcgtgagccaccgcgcctagccaagcttcataatttttatggaatttttgtgttacgtatacttaatactcttgagttgtcggaggtatttccccaagctatttgattatcatatttgcttataaactaggtaagggcagggccaggcatagtggctcatgcctgtaatcctagtactttgggaggctgagatgggtggatcacctgaggtcaggagtttgagtccagcctggccaacatggggaaaccttgtctctactaaaaatacaaaaattagcttggcgaggcattgggcatctgttgttccagctactctggaggctgagacaggagaatggcttgaacccaggaggcagaggttgcagtgagtcgagatctcaccactgcactccagcctgggtgacagagcgctctgccttaaaaaaaaaaaaaaaaaaaaggtaagggcagatgtaagactcctgagtaaaatgcttaaatttcattcattcaggaaatatttacaaggaacctgctaggctaggtgtcaggcactgttgtaggtgctggtagagaatggttaacagggtgattgggatccttactttagtggcacactcattctgtgg

SEQ ID NO: 25611 - DNA, 1050 bp, Homo sapiens
ctcactgcaagctccgccttccgggttcatggtattctcctgcctcagcctctgtagtaactgggactacaggcgcccgccaccatgcccggctaatttttttttgtatttttaatagagacggggtttcaccgtgttagccaggatgttctcgatctcctgacctcgtgatctgcccgccttggcctcccaaagtgctgagattataggcatgagccaccgcgcccggccttaaattgttaatcatatattgattgtttattcgtatctctttttattgtcggagagtgggcatctgtttcagtgcctagtagcgtggtagaagaaaagcaagcttagaagctaggttcagatctctacaaataagttttagtttcttaaaacctaaaaaaaaacctacctgaaaagttctaagattaaaagataatgtcttggctgtgtgcggtggctcgtgcctttaatcccagcactttgggaggctgaggctgcaggatggagctgagcctgggcgacatagtgagactctgttgctaaaaaaaataataatagtaataaagataatgtcttaaagtgtttggcatgtactaagtgcacaaagttatcatctcttctcttgagggtaggacatgaaggggctggggttagttttcttttgggactagaggccggaatgggacaggcaaatagaggaccatacttagacaaataattagcttttttcccttgatagttttagttgacatactgtgtacctaccttataaaagggcttttgagctgcttatagtgaatacctacaaaaaataatgtagacagatgcttgttctaagctttcacgtagatcatagagactttatgcatatttgtgagttaagtttatcgttaagcttatatgttctgaagtagaaattgccgtgtgctagagttgttgaggaatacttcatggaagagggaggctttgtcgtgctttgaagaatgggtagatcttagagagcaaagtgtaggctatgccactggtttgaagataaaaaagataggcagtattttggta

SEQ ID NO: 25612 - DNA, 1050 bp, Homo sapiens
cctgaccaacatggagaaaccccctctctactaaaaatgcaaaattagctgggtgtggtggcgcatggctgtaatcccagctatttaggaggctgaggcaggagaatcgcttgaacctgggaggtggaggttgccgtgagccgagatcatgccattgcactccagcctgggcaacaagagcgaaactctgtctcccccataaaaaggatagcaggaagaaagtaccaacctgaaaatatgatggcaataggataatacttggtagatattatagaaagaagtagaacaattagtaaaggaagtagaacaattctgtttgttatggtcatggagaagcatgaagtattcagaagtgcaaagccaaaataacttttacagatgattttccaagttatggaacgtgtctctgtgtgcttgggtatatacacatattgctaaacttggatacagttttttaaaaatgtgtgtatttaagtagccaccttcactacctactctgagacaaatggctgtgtggtgtatggtcggatgatagttactagaaacaacttttaagtcataaaagactaacatcctctgttttcccaaggagataatatgtacttttgattgaccttggatttggtcttcggaccagtacaagtagaatgtaggggattcccttgctaagctactagcttaataaaaagtattcatacaactcctgttcatacaactttatgattggtccccaaacaaccacttagaggctagctggatatcctgctggccagtaactctaataacttgttggagaagtatgtaactggtgaagaatacttatctaggttctctagtaacattttatcttttattgcaaagatgctctgattgtggcggcaatgcttctttaatcatagggaggataatgtagtgggaaaagaatgaggaatcaaatgagtgatttcacttaagctctcagagcctggagccctcatataaggtagtgataatccgtaacaaggctgtcgtgggaaacagatgatagggtgcaagtgttttgtagtactt

SEQ ID NO: 25613 - DNA, 1016 bp, Homo sapiens
agcaatacaactaccttataaatcaaggaaataatgtttagaatgctttcaagagttgttcgccattttggaaaattatatcatcaacatattattgggattgccattataatacacaagggtcagttttcatttgtagctgtcacattcatctctgtcttctgttgtagccgtacctgagtatttatgtattacaacgtacattttatcgtaaattttatttctcccttaacaattaagagttttatttggtttttctttaagttgtgtgtgtctgtgtgtaggtaggtattatctaggaattttatttcagcagagtaaaaggatatcagattgggtggggaaccattgctgtaaacaaggtaataatctgattctgtgttgaacaggtaacctaggttgatccaaagagaatgacacctaggatttgttgaagaatggatgaggaagtgctctcgctaaggggtgtggtctgcctgtgtaaggttaggcctgggactgttatagccattttgctgtcttgagggaaactacctagtagagaaaaatggaatacacagtggaaaccaccttgagcataggctagtttggtatttcgtgcaaaatacacccatcttcagagttctcttttgagtttgaaaacacaacctatgtattttaagggtctccatttgcctaaatctcatctttagcagtttaatctacaaacagcacaatcaaatgaaagcactgacaattgtttgacaaaaggcccaatttttttttttttttttttttttttttgagacagagtctcactgttgctcaggctggagtgcagtggtgtgatctccactcactgcaagctccgcctcctgggttcacaccattctcctgcctcagcctcccgagtagttgggactacaggcgcccaccaccacgcccggctaatttttttgtatttttagtagagacggggtttcaccatgttagccaggatggtcttgatctcctgaccttgtgatctgcccacctcg

SEQ ID NO: 25614 - DNA, 1034 bp, Homo sapiens
ctcccaggttcatgcagttctcctgcctcagcctcctgagtagctgggactacaggcgtgcaccaccacacccagctaatttttgtatttttagtagaggcggggtttcacttcattagccaggctggtctcgaactcctgacttcaggtgagccaccgcatctggccaattttacttctttatattcctgctttatattcaccatatttcttatatttagtataaaaaggtgaagtaatttactctgatacttcaaggtgatcttgaaagtttgatgaagtgaaatattaactgttttttactttttacagatggttccaatccctatacattgaagctttgcttttctacatcatcccatttataagaagagaagagcatgttagaatttatgttcacctttattacaatttcaaagctacacttcattaaaaaaaaatctaaaatggttgatctcatgttgccttgcttactttaagatcctgttctgtaataaacatattttgccttgagtaaatttgttgtaagcttaaatattgaattgttttcattttaagatagaatatcataatgtagactatctacagcttcattgtagattatacagatatatgatttctaaccttattactggaatttttcttccacagtaaaaatatatttgcattcttaatgctaattatctgcaagtattttttcattgtgtaagagattaatgcaggtgaaagtattgcattttaatatagaattcctattatatgtttagatgtttaagtatgttgcagttactcatattaaacataacttgtatatttattattttaatgaagtttgagaataacgttacatatgttgaattttaagtactacagatttaactgattttatatttctgaaaggctaacagacatggatacacgtgtacagtatgcattcaaacttatttaaattggtgtatttttttttaagtcactgtccatttgtattgacatgcctctgtttctagtccagtttggagattttataaagttat

SEQ ID NO: 25615 - DNA, 1006 bp, Homo sapiens
gttgaagcacaatactattaaaactggcagaaaatagaaattgctatattgtagtcttgggattggtcaccgaaaagcacctggtattgcctattgtcctaaatggttcaaattgcctacatacttactttaatgaccattcttagctgtgagttttagcttactttctagtgtttttcttttgaactgtagtagtgtgtttgtgttgtgtatgtgtgtgtgtgtgtcttcaaggttccatagtctatatggcagaaaagattgaaaccatctctgttttgtcaaaacagtaagtgtggtatagaatgaaaatctcattacagctggtttagtgaatgtgtaccttgattatttttcttagttattcctgtaacagagtaaacattaaacatggttgtatgggtagttctgatcctgcagtaaaaaacattgggtgttttttgcactttgataatggagggttacaaaaaatttgccattacaagtttgtagtatagttgtagagtcatggcagtcagctgaaggctaaaaactggttaaatattttgccaaagtggattagaaaaatctgtgaaagaataaatgaaggacaaggaactctgctgtagtagtgtggaaacagatttttttcttagtgtaagtctgccttcctttataaaatattttaccgaaaaatagtataaacaaaagctgttatataccctgccaaaattttttatttttaaaaagcctattgtgaaattctttgatagttgtggtgggattatgtaggggggtatccattctgagctatgtccattaagatatttaatctgaggttaatttgttccacttttctagggaagtaagcagaattggggtataggaggaaagagagcgaataaagaggcagagaagagaagtaagatgagtaataggggaaaaagcaaagatgggggatgtgtgctagtgatattgagcctttttacaaatattgcaaatcacaaatgtatcccttcagatcagc

SEQ ID NO: 25616 - DNA, 1072 bp, Homo sapiens
tgttgacagtagactacccctgtctctataaggaccttctaatgattatataagtggcacattgtcctatggaattataaagaggtgggtgtctgtggtttatttttcctctcttcttgtgtatttagggctttaaaatttattttcttaggcagatgtcagaaaacaagttgatgagcaaatataaatggaaactttgggaagcagtgactattttgatgttaattagtaccatgacatgaaggttaggaattaaagaaatagaactattttaagttagtaatttgaattactcctggtgacctttgcatttttagactctaaaattttgatttgatacttagtctctggtaaagtctaccgtatgtgaatgtcattcagttaatttgcgtcattttgccctcaagattggtagttatgtggatagaaaattctgaaataattggaacaaattagtgtgtaattaagagcttaattggcataaataggtgtaataggagtttcagttgtatgaaatgaacttgcatgagaggtggctgctattaaggctgaaagaaccttgaacagcttccaatagaaattttgcttcaaaatgttacaatttggaaactttccctttatttaatggaatgtgtgggattataaacagtatagaaactgcttatattaaaatggtgaatcaccaagttcagtatgtagtaagcttatatataaaaactagatgcataggtaagaagctcagaagaaaatataacaagatattaaaaatggttgtgttgtgtcaggataaaattgcttgtattttttaacttttgttatttttctatactgtatgcattataatcaagagtataagagtatttaaaatacatgttgtatttctttttccccttctctcccattaaaggagatattaggaaatgattagttttacaatacaacatttgggaggacacagtttgtgcactaaatctgttgtcttctcctatgtttttatttagaaattggtaaagatttttaaattgatggagttaaaagcattgatcctaccatgtcccttagcttttttgtt

SEQ ID NO: 25617 - DNA, 1050 bp, Homo sapiens
ctggattacaggcatgagccaccacgtctggcccagcatttggttgctgtgtctcttagtctccatatagaatcttccctccactggtttttgatactaactttttgaagagttcaggccaatacagttttctgtcgtccttttattttacctttgccacctgatttctaagaatgaactgaaatgattctcttaattgtatcttgcagtttattattttctaattattttgagagtaaaacttgttatactttaaatacatgctgtgtttggcaggtaggtattatttagagctcttcctgctttattcatttccagttatatttaagaatgtaatgatgatacatgcacatttgcttgttgaatttcatctagacagagtctgattgttaatgttgcttaagaaagtgttgatttacttagggtatagtcagaatgattcatttcaaacttagtggcatgtaagggatatctgtttaaccataggaaagacggagcataagcaattcaaataaattccaaggatagaattagtattggcaaaggactgagtttattttttggatttgacagtagcgtgagtagttctgtggttactttatatatttaaatcagttcctttctttcagttgtgacataaatttttactggcagggcactccatttgttatattttcctaacagtctttataataaagaaaaattggtgagtcatttaaaatagccttaaagaaatttaattttcttaaaacaattgttaaattttaatggtaaaatagcgctttcagattagtcttgttataggagaaaaaaactttaaaaaatttctttttgtatagacagggatgtacacggtggaagtcatttctgaagttacgatgcaagagaagtgcctgatggcatttgtaaatacagatctttgtcttaatggaacttgaataagtaaatgaaagctatttgcattttcaaagtaattcgtacagatactacgtttaaaaataaactttaagaccatattcttacattttgaaacatcctgcctggcatact

SEQ ID NO: 25618 - DNA, 1037 bp, Homo sapiens
agtcgccttgattcagaatgtcacgagccttatgatatcatgctgaggcgccttgcaaatccgacaattaagatcctcctagaccttgaggtgatcagcataagaggccagatcccctcgagtcatctacacctagcttcaccttattctttaaagggcagaaaatttgagacggtgatcgccgtaacagtaaatttggcttacaattggggcccccctccggtttagaaagaggaacaccagattgaccacattcccaactagaaaaatcttcttgcgtcaatcaagcctcacctggctcatttggctgtcagtttgatcgtcgttagattgaagaaaacatctagatgcagcgatcggctatagatacttctagatcgtctagatctactagaccatgggccaaagagggtcgacctgcaaacttgcaaggtttattttaaatacacattacagtgttttatattatgtaatgctaagttgtaattcagcttttaacaaatctttttttaggtagtaaaaaaaaaaatactcaacaactaataggcccagagtttatttccaaatgagacactaaatttaaatagttttgagatttgatttcagcagaggcacacaaactcttaaaaacgagttattgtctgacattttgttttttctctaacttgaaaaataggtcacggtctagatcacattctcgatccagaggaaggcgatactctcgctcacgcagcaggagcaggggacgaaggtgagatcttgtttaactgaagtctttctgtattattattaaattcactggtagtccaacacagaaaaagctcattattttttttggagacagggtcttgctctgtcacccgggctggagtacaggggcataaccacgactcactgctgccttgatgatctcttgggtttaagcagttctcctacctcagcctcccgagtagctgggactgtaggcactgccaccatacccagctaatttttatttttgtagaaatggtcttgcactgtttcccaggctggtctca

SEQ ID NO: 25619 - DNA, 1029 bp, Homo sapiens
ccgacgccgctgccgctgcgggcccgcgcgctcccggtgcgcccggggctgccgggactcatgggtggggccgggccaggttccgccccacgcctcggtgtatcctaccacgcgtttctgcttgtgttcgggagggtcaccccgcattatttagaacgttaagaattttgtcaaaagtctagtttctcagggatttgcggactttcaccagttttacgactaagttttgtcttggatagagggcattaaatgtgctttacccaatcttgaggatggcccgttttaaggcaaataagtaattgaaacttgggccagattttgcgtaacgtgcattcttctatttgcgtttttaaacagaaaccaaggtgtatgttggtaacctgggaactggcgctggcaaaggagagttagaaagggctttcagttattatggtcctttaagaactgtatggattgcgagaaatcctccaggatttgcctttgtggaattcgaagatcctagagatgcagaagatgcagtacgaggactggatggaaagtaagtaagatgttatgaatcttctgttcattaaaatatactgtggctagataatgaacttagtgctaaatttggattctgaagtctggaagagaccttaaatagctggtcatagtgttaaatgctaaaggcacacgaaggttaaagaagatagcggagatggagttagggcttggtaaagaccgccaaagtttgttgggggggaaggagtggttggaaagagtgagtggttggaaagagttctttttaaatctataagtcctgaatatatttttaactttagaattttgttaatttgcttttattagggtgatttgtggctcccgagtgagggttgaactatcgacaggcatgcctcggagatcacgttttgatagaccacctgcccgacgtccctttgatccaaatgatagatgctatgagtgtggcgaaaagggacattatgcttatgattgtcatcgttacagccggcgaagaagaagcaggtattt

SEQ ID NO: 25620 - DNA, 1022 bp, Homo sapiens
gttttaatgaatttatacttgctgattctgctgagagcattaaaaaattaatgaattaatacttgcaaagtgcttagaactgtgcttggcacataatgcatgctctcaaatgttagcagttattggctgggtgtggtagctcacacctgtaatcccagcactttgggaggccgaggcgagcagatcacctgagggcgggagttcaagaccagcttggccaatatggtgaaaccctgtctctactacgaatacaaaagttagctgggcatggtggtgcatgcctgtaatgccagccaatctggaggctgaggcaggagaatcgcttgaacctggaaggcagaggttgcagtgagctgagaccacgccattgcactccagcctgggcggcagagtaaaactctgtctcaaaaaaaaaaaaaaaaaagttagctattattatcatcatcatcattgtactcgcatagagtttgcagtatagcctgagtgttaagatatctgtataaacaattgtaagtgctaggtagaaaatgttaatgtgtattgcatataaacagatctctcttctttgaaagccctactttctcttcttagtctctgatcttgaggattccgcaagattttccttgcactgtttcttctcactattaactctcccttggctaccttagactcatgtgatttcagctgtcatccctgtgccgagaactcccagattagtatcttcattcctgacctctgagctctagaatgaaacacccctaatatctgacagcttaaatacaagtcagaatttttctccttctctgttccttccttctctaataagcccccctcctaattccatattcatttaatggtactatattctcaaggtaaaaacccaaaaccagtggctctcaaattttaatgtgcaataaggatacttagggagcttattagaattattattttctgggccctatcccactaccattgaatatgagtttctgaggaaatcatctttcaactagtttacctgtctt

SEQ ID NO: 25621 - DNA, 1033 bp, Homo sapiens
aaaattattttctgtagctttctgcttattaaagcaccaccattaatgttggcatcagctacttattgagcacctactatgcagtcttctagaggtggaaaggaatttaaaaatatatgccatagttcctgcccttgaggggacttgcattcttactgggaagacacaacaaacacataaagagataaacaagttacaccacaagaagtcacaaaaagatgaagacacttaaactgggtcttaagatcggcagagaggaaggaactagagaaagggcatgaagcaagagtgagcctggggaaggtgcacagctgactgggaaacggtaaaaacccagtttacttgaggtaagtcagtccacctaggactctgaaaaatatgagatggtagccagaaagaaagaaagccttactggagagagcaagccttggatgtcacatcaagaagtttggaatttcactgtagacaagtaaaaacagaagagtttcacataaagcaatatttgggaataccgtattagagacatgcaggatagatgggagcaaagagtacttggagacagttagaaacctcaggaaaacttcaggtatcaagtgatgggaactcacctggagagtaggcaagtacgtagcagcgttaattattactagtttcataagctagtttcataaaatacaactcaattattttggagttatgctacagatgtagcatcaagatttttcagaggatgctgccaaaataaaattggtgaagtgtgtgatagtttttaaacctttctactaactgatcaattttagtgataaacagaagatgaaagggaaaagaattttattatgttaacattttatttaatagattgtgacttctgtagtatttcactttccacgtccagtcgatttggcgttgtgcttgcaagcactgccggccacataataagagaaaaatctaatttcaaatgaattcataaacttctgggaaacaaaaatcttggcttaaacttagatcctggaaactcaaaaaacttggcagt

SEQ ID NO: 25622 - DNA, 1047 bp, Homo sapiens
ttagtaaattccatgccttattttccatttttgacaccgtaaagtgcattttctgtcgactgtgagcaaatttcccttttgcctttaatgaaaatagtgcattaagtagccaattgctgcagaattataaagcaaattagctaacagtgggtcacattggactaccactcaaagaaacaagatgcataacagatgatggaaggtacatgtggtgtggcttagggagagcgcacctgtgccagatgcatgccactttcagtagctgccaaatgtgcctttaattaagaacatctctaatttttttcttcagatcaagtcagcatttggggtcgggatttgggcagggaactttggggtgcaaatatctggtgaaaccaccagagaatttgtttgtcaaagtgacatgtataattttagttgagacgtgtttgtgtatatatgtgtatttgcctttgtttagtagcacggttatttgctaaaataattgtcaaaaaattgctctgtcggtcggtctttgatgtaagaacaaagtgtggtctatacatctaatatggcctttgtacctaaccatgttcataggtaatctttgtactctgtgtgcagcagtatttggtttgcatttaaagtgaaaataacggctgttatttttctggcattactaagataaactgaaaaataataaagaaaaatgccttacatagcccacaagtgtattatttttgcatgtatttattttagagggcagtatttttgaaatcattagtgattctcatttagctcatatatgccatatagaaatattttgcatttttattgtggtctttctttggaggcacttttttcctgtatcaagttataaaaggataaaagaagttccacatttcctctgtgtcaaatctgctgattgattgtagtgagtgggaggcctctgggatgaaaactagtaatttaaagtgaccttgagtgtcacctggatgaagtttcagagtgctaaggcatttgtattccataaaagaagttttgagatatcacgttccctgacaggca

SEQ ID NO: 25623 - DNA, 1084 bp, Homo sapiens
caaagacagggcagagaagtggccacgtacttagtgctgccacacatacattcaaagccctgctccacaccttgccctggccaggtccacctttgaggtgatgacgacagttgctgagaaaagagaaaagaccactggctcactacttgtttctgctgctataatagagaggagaaaatgatgaaatgctctttttaccttcctgtttgaagattgcctggtcataaaagggagtcagaggtctgacttctccatttccatcccttaggggactctttaacaacaaaaagaatgtattacaagtatgtcaagctgataacgcaaggcttttcctcctggaagattgctgtaggtgatgagtttctaatcccaaatatatttgcatttaccaggcttttgtgagtttaagaagttatctatcatatctttttttttttttctatagaaaaatgcttgtttctatcaagaatgactcctttataaactggggagtatctttaagagtggtttcaaccctgactgtatagtatcatctgttgaggagcttaaaaaaaatatgtaggcccagcccacactagactggcattggtacctggtatcagtattttttaaaaacttcccataggattctaatgtacagccaagattgaggaccatttgtctgtcatctgggattatgcttaataaattaatactgttttttaaattaattagatttcacttctaagtcattatcagtaaatttactcagtatctaactgacaagaatttctagcatatatttcttgattagtgcatgtaaaattctaaaagaatttctatagtattttccaggcaataagacaactagtgccccaaatttaccaaatgcatgagtctaagcctgtgctatatataaatatactcaaagccaagtttacatctgtgtacacaagtgtgcatgcatatgtacaattaaagactatagttgtaacagtcatgagcttgtgttttgattttactcctattcctgtattgtattaagtgtactatcatgttcttgaggcatatctccaggagatatgtttatttcttttccaggaaa

SEQ ID NO: 25624 - DNA, 1099 bp, Homo sapiens
tctcaaacttctggcctcaaacaaacctcctgccttaaccttccaaagtgctggggttatagatgagccactgtgccccgccatggagtcatgtgatacacatagtaagctgtcagatatttttgataagttcaaatagacaccaagtaaaaaaagattcccatttattctccccagcttgccaaccccctaaattaagtaatgaaatgaaaccagcaccttttcagtatatctgacttaaaatcattatttattctgacccatttaactgtttgcaggattttttccctagagcagacagctataggcctgtatcattaaggattctcaaataagtgaactattgaaaccacataaaagccatcagttgcaaattctacttctctttgtttaagtagctaaaaatgaaagtggtggaaaaaacaggagataagcatattaagttctctactagtgctgaatctttaaatgactagctaagcagcgaagaagaaatcattctagaatgcagtgctctggatcctgctttgttataaacagttataatagcattaagttaacagtatttcacttaaacagctggacaggtggagaaaacattgtttcaggagttaggctttgtaatcttagacttgagggttttctcaatttctctttgtttatgataaagaaaaaccctattactactccctttgtttttggttaaaaactgaaaataactgattttgaaatcaaataaaccagtgtaatataaagccatccatgtgttctgctaatcccttaaaacctatcagttgcttttgtgtattaaaggtcttctccacatgcttttgtcttcacttttgcctaactaacagatgtgcgagtgccagaggatcacccagagcctccaacttgctacccactgttttgccaccagagtgaatacctatttccttgtttccctcagggcctggcagaaaagaactgccttgactgcagtcatatgtcatcccaacatattccactcaaagcagtacaaagttccattgtttaagtttttcaaaaggcagagtttgactagaatttttttttatcagttataatactatactattct

SEQ ID NO: 25625 - DNA, 1205 bp, Homo sapiens
tgttatttttttgtatgtgtgaacttgtagttaagtcaaatgccatttcaaaagataatattataaaaatataagacaaattctaaactccaccaacttgaaatttctaaaaaatctgctggaacagccctctttaaatttattatacgttaatgaaaggcctagtggtaaaattggcagcttaaatttcatttgagcttttcaaatgcattcctcttatccagaggagacaaagatcagtcttaaaatctgcaagtaattttagtcccatgtttcaaatgctgcctggctccaaaattattatacaggctgaatatccctcatccaaaaacccaaaatccaaaatgttctaaaacccaaaactttttgagtgtcaacataatgctcaaaggaaatgctcattggaagttttgagatttttcagttagggatgctaaaccagtaagtatgatgtaatattctgaagtccagaacacttttggtcccaagcatttcagataaaggatacttaacatgtatttgaatactagtcagggtacaccatctactctccaccaaattctttagtagcttttaattttgcaatgtatcagatttaagcccttttcgtctacccagtggtcccctgatggtatataatggctgctaatacactatctgtgcttttcagtgcagcgaaacaaatctcacagactgcacactactgcttatccatctcttatttctagaccagcactgtcctatagaaatatgtgagccacatgtataacttcaattgtctagttagcctcattaggaaaagcaaaaataactttaatacattttatttaacccagtatatcagaaatattgtcatttcaacatgaaatcaatataaaaatttatgattgagatattttacattccttttgttctaaatctttaaaatccagcgtgcattttacacttacagcacatctcagttcagacaagccacagtcagatgctcaataatcacatgtggctagtggttgccggactgtacagctcaccttttgaaaggctaccttttcaatctagatcaccaataattttttaaattaatttcatgtgaaactttaaagctcttctaagaaccctttttcatttgttcgttattaaatcaaaacttcaatccagtcacctttaactctttcatgaccatttccacatgcccttaccgttgg

SEQ ID NO: 25626 - DNA, 1057 bp, Homo sapiens
acctcatgggctcaagcagtcatcccgcctcaatcccccaagtaggaggaactacaggcacaaaccactatgcctggctaatttttttattttttgtagatacagggtttcaccaggttgcccaggctggtctcgaactcctgagctcaagagatccacctgccttggcctcccaaagttctaggattacaggtgtgagccaccgtacccagcctgaccctctacattcttgataaaaatattgagttcattgattttctcttcctggaaaaatattaaagcctatatgtttttgcttaaagatattaccagttcgtttaagaggaactggaaaggctctggatatatctgacggtatgtcattcaatctgtcaacgtatatttcttgaatacctactaagtaccaggactacgtcaggtgcttagaaaagtgaaaaatacacagtcagtctgctcacctagcttatagtcatgctactcatgatatcccatggtctccggtacacagacatgaaaagaaacctcaggacccattcactgactcactatttggcccctgctcctgtaacatcctaatggttggtatttatttatacaaactgaaactgtccaaagtcctctctcagatctttataaacttaactgatcttcataacatgttctctttttttttaagacagtttcacttttgttgcccaggctggagtgtaatggcacgatctcggctcactgcaacctctgcctcccgggttcagcagttctcctgcctcagcctcccaagtagctggtattacaggcacccaccaccacacccggctaatttttgtatttttactagagacaaggtttcaccatgttggccaggctggccaggctggtctcaaactcctgacctcaggtgatccacctgcctcagcctcccaaagtgctgggattacaggcgtgagccactgcgcctggccataacatgttcttaagtgaaaggaggaagtttcagacccactttagagtatgatttcataaggtgttttaaggtgagctgtgtgatttattgagt

SEQ ID NO: 25627 - DNA, 1071 bp, Homo sapiens
attatatgtatttaaattacttttatcagtaacccactctagcctcagaaggtataaagctaacggagaaggggacatttaaaaccaatgtatttttattctgtaaatctttaacttaaaatagtattttgaattcaaggttgtctgatatttaaatcagttattatctcgatgaccacatatcaatagattggaagtatatttctgttttgtgataaatccatgaatttgctttttggggaaaaagctattataaacatgttattttaaggctaaacctaggatgggtcttagtgagaatcagcctaaatgaaaattttccaaacaaatacattctgcttttgctaaatcctatgctaataaaagacattgtgcttcttataaaactttgacccacattatgtagcctaacagaaataaaggcatctgctaccctctatgaatttactattggagtctaccagtccctaatacaaataggaaaagaatgctcccaataaaagactcaagttactgaactttcccctccttaaaaaaaaaaaaaaaaaaaaaaaagatttacaattaaatgtgggccttgataaaatttgagttatagaagtgagtgatttctcccccctattatgggagatgtctttccccctctttatgcagaagacaacagcccaagtctcttgtgctggtgagagcagcctttctccacaacttaggataatactgttaaggagagacgggagtaggtcaggcctaggggagtgatcacactcagcctcttgttttacttcatggagatgtgaatgaaaagtaggtcctttcatggaagggattggagactcctatatttatgattgacctctcattgtgactacttgaaataaaggcaattaaaggttggaataggaccaaaccaacatattctatcacatttaatagttttaatagcttataagtatttgtaagcatctttaagtagttgtgagatttttagcaaataatttaaaaactgtatttaactttagctactactttataagttccaatttccagttgcatgctctgttaacatgattt

SEQ ID NO: 25628 - DNA, 1028 bp, Homo sapiens
ttagctttgggtcttgtccatttaaactcttctaaataatttattttaatctttcagattacttttttttactgtattgggctactttttattagttgtcattctaaatatttagtagccaagatagaaataatcattttgtagttacatttaaggagaattttgtcagcaatcattgtgctttttagaacactgaaaaaaatttctaggttgctttaattttcaaaattgtgtaattttgtaattctaatctatttggggaattagtgaataccttctcagtgagacttgtaaaaatctacttttacactttcccttacttacatgagctctaggttttctgtcatctatgtactaataatgtctttttctttattccagtgaatctgcatgtcggttttatagtcagcaaatgaaggggaaacaactagcaatcaagaagatgaacgagattcagaagaatattgatggttgggagggaaaagacattggacagtgttgtaatgaatttataatggaaggaactcttacacgtgtaggagccaaacatgagagacacatatttctctttgatggcttaatgatttgctgtaaatcaaatcatgggcagccaagacttcctggtgctagcaatgcagaatatcgtcttaaagaaaagttttttatgcgaaaggtacaaattaatgataaagatgacaccaatgaatacaagcatgcttttgaaataattttaaaagatgaaaatagtgttatattttctgccaagtcagctgaagagaaaaacaattggatggcagcattgatatctttacagtaccggagtacactggaaaggatgcttgatgtaacaatgctacaggaagagaaagaggagcagatgaggctgcctagtgctgatgtttatagatttgcagagcctgactctgaagagaatattatatttgaagagaacatgcagcccaaggctggaattccaattatcaaagcaggaactgttattaaacttatagagaggcttacgtaccata

SEQ ID NO: 25629 - DNA, 1048 bp, Homo sapiens
gctgggattaattaaaggtgtgtgccaccacagccgactaattttgtatttttagtagagacagggtttcaccatgtaggccaggctggtctcgaactcttgacctcaggtgatccgcccacctcagcctcccaaaagtgctaggatttcaggtgtgagtcatcatgcccagagtgagttccttcctttctttacatacatctctttagagaacttgttccatttttattgtctgccttatcattcaactgtttgctctgtgaagaatggagccctattatctttgaattctcatacctattacagtgtctggcatttaggctttcaataaatgcttgttaaaaaatgagtggcaaaaaatatatatacattttcctttaaattcttatgtcttatattttaaagaaagtttaactgtaaattttatataattacctttattttggaaacttaggtagaatgccttaaactttacaaagtcaaaagataagtttagctattaatagtataagactgttgaacacaaagaaacaataaaatggtggttaccagaggctggagggtaggggagtagggagatactggtcaaatgacacaaaatttcagttaggaggtgtaaattcaagagatctatcgtacatcatggtaactacagttaataacaatacattgcatatttgaaaactgctaagaaagtagatattgtgttctcaccacgaaaaaaagtatgtgttaatgcacatgttttaagtagcttgatgtagccattccagattatatacatctatcaaaagatcctattatataccataaacatatgatttttacttgttgattaaaaaataaattaaaaatagtgtgactttaatgctgctgacactgaaaaaatactctttccttcagcagttaaagatagcagtcaagtcttcactctttaacttgaaaagttaaagttaatttttttatgaagtaaaaaaacttcctttgtgcccttttgaaaaccatattgcttcaataatgtgatttttgtatgtgaagtttaatttac

SEQ ID NO: 25630 - DNA, 1030 bp, Homo sapiens
agctcatgctagaatctagagcaccattttcataatagttttatacaagatagaagagtagcgactctatttctcctgctaaaatcaagatacctactctctttttccccagaaatcttcaaaaccagtagattctggtctttttaactgagccattagaatttagtttattgattggtgatattaatgatggcaaaattttgggcagttcggattttgtttaattgttttgtgaaattatcacaatgaattttagatgacatgaactgttacttctggtttatagaatacgaaagtacatgtccaccactgagaactataaaaacatgtctggcttcagtattctaaatgtttataccttacctagttgtacatatctatattctttgttgttgtcaagttaagatttgttttctagaaccaaaagtctgcccactcttatggccatgtttgttgataatactctactggaaacctttaatgagagctgttataacatataaggattttattattcatcagaaagaactgatttactctcttacttgagaatattgggatctcttctattaaaattataattagtagtcatataatttttgcttagagactttcaaagacatacataattgtgctcgcatagtcgtgccccataattaaatctttctgtgtttgtaatggtaaattatttatgttttaccttctttattttctaaggaactggcatttgatccatatgaatcgtatgctcgagatattttgcgacctggttttcatgatcgtttccttagtcagttatcaaagcctggggcagcactttatttgcaggtatagtaatttttaaatgaagatgtacaatgtctgaaaagtaaacttaaaaaaaaaattaaatcacttttttttccagtcaataggcgaaggtttcaaagaagctgttcaatatgttttacccaggctgcttctggcccctgtttaccactgtctccattactttgaacttttgaaggtaagaaaactctttattgttatt

SEQ ID NO: 25631 - DNA, 1085 bp, Homo sapiens
aaatccaactacattagtaactcagtatatataaactgatgaaactcagcctatttaaagagagtaattatatttgatttttaaaaattcactttaggcctggcgcaatggctcatgcctgtaattccagcactttgggaggctgaggtgggtggatcacaaggtcaggagtttgagaccagcctggccaacatggtgaaacccggtctctactaaaaaaaaaatacaaaaattagctgggcatggtggtgtgcacctgtaatcccagatacacaggagtctaaggcaggagaatttcttgaagccaggaggcggagttgcggtgagcctagatcatgccactgcactccagcctgggcgacagagcaagactccgtctcaaaaaaatgaataataaataaaaataaaatccactttatgcagcttataaaagattttcttaaaacagaaccacagaaatattttaagataaagggatgaaatatcataacataaaaactaatcaaacctgtataacaatattaattcaaattaactgataaaattacacaaagtaagcactgaggaggaaaaaagagaaacacttcctaatagtaaaagggatactatcatgaagatacaacagccattaatgtgtatgcacctgattataaagcctcaaaatataagaagtagaaactgacagaattataagaaatgaaaaaaattgctatcataggaaattttaacaggtctccatcagaaattaaaagatcaaacaaaaaagattaggccacagaagattagactaacacatttgattttacacacacacacacacacacacacacacactctctctctctctctctctctctctctctccctctctctctcattccctcacactcaattagccctccatatccatggcttccacctctgtggattcaaccgactgtggattgaaaatatttttggggaaaaataagcataattgtatctgtactaacataatgttgagcacattacaatacattacatcagggtacattacaataccctaaacaataaagtataacaactctttacataacgtacattat

SEQ ID NO: 25632 - DNA, 1048 bp, Homo sapiens
accagtaatgggtgaaaattcacatttctttatgtctttaccaatacttgatattcttagattttagaatttttgtcaaaatagtaggtgtaaaataatgtcttatggtttttatttgtatttacttgaatacaaataaatacaaggctgaggcttgagattgagattgagattgaggctgagcacctttctaatatttatggggcagttgtgtttccccttccatgaaatgtctgtacatgacttttgcccattttagaaaactgaggatttgtttttattaaaactttgttattatttatcctggatatttcctttataggttatatgtgtcccagtgtgtgacttatctttccactttttgtgatatgttgattaagcagtagttcttaatgaaattgaattagaatttttcttcattttatacttcttgtgtctttctaaataaattctttcctaactcaggttataaagatatcctgctatgcttttactaaaagtttctgaatcttttgcttatcaccgttatgtacttgatccatcttcagttggtttttatatatggtatgtgatagggaataatttgccaatgtcctagcactatatattggatgatccatcctttcctcatgaatctatactactggctcttgttttatattattttcatacaagatctgtatacaagctctccattacggtggtctttctgtttctgcactaatatcttagtatcttaatcactgtagcgtaatcatgtctttatctggcaggaaaaatagttttttgcctgatttttctttaggagtgccttagttgttcttggctcttctaaatttaggatcagcatctcaatttttcagaaaattgtttcaattttaataggaattataatgtttagagtataggacaattgacatcttgagatattatggtacttccttaatactatttaaggtcttctaaatgtcattcattaaagtttaaaaatttttcttcataaaggattttctttcttttttttttttttggagaaggagtctcactc

SEQ ID NO: 25633 - DNA, 1049 bp, Homo sapiens
aaacaaacaaaaaaaaaattagcagagagtggcattgtttagtattttttgcaaatctcttaatagtacgatctggattctcattttctgtttctacattcaaccggtttgtgatatgctgttttagttgaaatatatgaagaaaaactcagcctcctacattcaatatttgaagagagttaaggtatgtaacagctttttcagatattatcaatactgtatttttctttaatgtcaaaccccacaagtggtagtttcttttaggttaattgcaacatggaatctgaaactatagcaatgaacttttggttccttccagtaaaagtagcaatgtatccttttaaagagactggaaaggccttccatttggctttccatgattgccactccatcacattcaaaagtcaaagtcgttaagtgatctggcctcctactatctctctgatctcatctccagctctgctggctctgctgactctgctgtagtcacactggtctccttgctgtttgctcctctaaacaatctcgtgtctctgggcttctgtgcttgtcattccctctcatttcttaacaaatagattagatattgtgttaaataatcttaatttagtgaagacctaccagaatatatttgttgagtgtgaaaattatctctgaacagaactgcttatatacttggcaatggcattgtaatcagaaagactcaacacctttatgtcggactctgaccctcttatgtcttggtggaagtgaaagtgtaagtggtaccaagtcatttggattgccagtactttgctatagagtacacaaatgtgcctcattgcaataacactagaagttgtttactactgtagtttactaagaactaaccacatagatgatcatgcatttcaggaaaatatgatagaaataggaaagattctaacccaggtcttaattattcacatacggaagaatggcctgtatatcttcattatatgtgtaggggaaaatagtgcctatctttcaagatcattggaaggttagagatccttttgttaaatcatgtt

SEQ ID NO: 25634 - DNA, 1012 bp, Homo sapiens
agccaccgcacccggccaaattttttatatattctgaatgtaagttccttatcaaatatatgaatcgcaagtattttttcccattatgtgaagtgaagtcttcttatagatatagtattgtgattaataacaaatagttaatttaggagagtagagtacaagctgtagcagtgggagttttgtcagcacacgcttttagaaggtttcttccactgtatgaccgtgtattgatgaaaggaatgtgcctgaaactgtaaccaaaggagacatgcttccagaaaaatctcaaggaaaagtattgtaagcaacagtagatgttggatcagactctaaagtaaagggtggagagttaaccagttaacatgtaagttggagatagagttctcccagaatatgtaggcaccaaagtagttctagacaacaaggattacttctcatttaaagatggtgacattcttgcaaactatatagactgaaataaatcatattgaaatggcatcaacatgaagctgcccattctgtaattctgaaatcttctatcatgtaaaataattttcatgtctttcttttgtaataaactaatgatatctaaactaatgatgcccagtgtttctaaaatttagttttgctgtattgatataaacatttcctaataaaaatatgtaaatttaaaaatagttaatttaaagcttatatagattccaagaaataataatgttcagcacttaaactgttttaatcaagggttaagaattaacttcactgggcaaagtggctcacacctgtaatcccagcactttgggaggccaaggcacgtggattgcttgagctcaggagttcaagacatgcctgggcaacatggtgaaactccatccctaccaaaaatgcaaaaaattagctgggcatgatggtgcatgcctgtaatcccagctactggggaggctgggatgggagaatcacttgagcccaagcctgggaggcagaggttgcaatgagctgagatggcgctgct

SEQ ID NO: 25635 - DNA, 1024 bp, Homo sapiens
tcaaaagtttatctttttagtttcttgataatgtcctctgatgaacgaaagtttttaattttgacgaagtcagatttatctgttttttctttcattgtcttgtgctttttgtgtcagatcttaagaattcattgccaaatccaaggtcatgaggatttgcccctatgttttcttctaagagatttatggttttagctcttatatttaggtcattgatatattttcagttaatttttgtgtttggtatgagttaggagtccaacgtcattcttttgcttgtggaaatccagttgtcccagcaccatttgttgagcagggtcttatttctccattgaatggacttggcacaaatcagttggtcatagatgtatcagtttattttggtatgctcagttttatgctgttggtctatatgtctatgctttttcagtaccatattattttgattactgtagcattgtagtaagttctgaagtcagaaagtgtgagtgttccaacttttttttttcttgattgttttggcttttcagtgtcccttgcagctctgtgaatttgagggtcagcatttccgtttctgcaagaaaagattttggaattttgatagagattgcatcgaatctgtacattgctctaggtagtattgatgtcaacaatattaagtcttcctactcaataactcagaatggcttttaatttattttggttattttaaattttctgcagcagcgtattgtagttttcagggtaaaactcacctccttggttaaatctctttctaggtactcttttagatgttattgttcttttcaatgttaaatggaattgcattcctaatttctttttcagattattcattgcatatgcatagaaacacaactacttaaattttttttttaagttatttatttttttgagacagggtctcgccctgtcacccagactggagtgcagtggcgtgatcacagctaactgtagcctcaacttcctgggctccagcaatcttcccatctcagcctcctgagta

SEQ ID NO: 25636 - DNA, 1035 bp, Homo sapiens
agctttatacttgtagctttcatagactctgtggtccatttcaagttaattgttgtgttgtgatacaaggtaggaattgaaatacatttatttttaatgctgatatctagttatttcagaactatccgttgaagaaaccctcttcttttttttttttttattgctccttgcagagcagggctgtgccataggcagtatgcctagagtagtagcctgttgaagagattttcttttctctattggattgtgttgatatttttatgaaaattacatgattcgtgtgtatgtatatatgcagtcagtcctctgcatctgtgcattcaaacaactgtggatcaaaagtatctgcgggaggaggatggggggaaattgcatctatactaaatttgtacagatttttttggtcattactccttaaacaatacagtacaactatttacatagtattagttattattagtaatctggagatgatttaaggtatgtgggaggatgtgcacaggttgtatgcaaatgctacaccatttcctgtaggattactgagcatctgcagattctggtatctgagggaggtcctggaaccaatcccccatggataccgagggatgactatatacatacatgcacatacacacacacacacacacacacacacacacacacacacacgcacacacacacaactgtatctgtatctctgtcagtttatttctaggctctccattctccatttatctaattgttgatttctctacttatagtaagttttgacgttaggtagtgtaatactccaattttgttcttttaaaagctatgttttagtatttctagatctttttgaatgttaatctttcattgctgtgttaatgaaccatggcagatagtattttattgagttcctgctatgtgccagtatcctaggcaatattgtgtacatgcttatctctgttgtacccattgacttttgaaagtggtaatgtcccagttgtacagctgaggaaatagattttatgaggacaaactgcacaagatgtt

SEQ ID NO: 25637 - DNA, 1024 bp, Homo sapiens
tgcgtttcggagtcccaactacgcggagcgggcgccgcggccggagcgtccctccacacgtcctcccccagccgccagctccgccgcggggccagaccgggcccgggagtgcagccccggcgggcgggcggcggccgcggcagagggcagcccggggcggcgccggcgggccggggaggggcggggggcctggccccggggcggtggtgcgggatgccgccgcctccgggccgcgtccgttctccacggctggtacctgtgtcgggtgggtggccaggcgcgggcctcgccccccagccccctcgccagggctagcccggctgcgcggcgcccggagggggccgggccgtccggtggggccgcggccctgttccgcgctgcgagctcgccctctcgcggctccctggcccggccgccgccgcccctctccccgcccagaggcgccccgggggcaccatgcaggcgcagcagctgccctacgagtttttcagcgaagagaacgcgcccaagtggcggggactactggtgcctgcgctgaaaaaggtgaggagcacgcgggaccccgcttcccggccgcagccccccagcgcgggcgctggggaagggctggggaggcggggcgcgcgcagggccgtctttcttcccggtctcgccgcgtctccaaaaggacggcgcacacggagaggcccccctcatacggctggctctcggtgttgacatccaccgggtgtgtgggaatgccgcagggagccggggggagtttatccggataatccaacccctgagaggtgaatgctttgccctttgattccaggacaacaacagttggaggagcctcagttttcagcggaggtcaaagcaggccacttttccgtcttcttggtcttagcccggagctgctgtcagcctaccgttttaggtgtccagtacgctggttttagtggcttgagaatgccctggccgtaaggcttgctcaaaggaattgcgagctcgcctgccagtaggaacgtggcctgctctgctc

SEQ ID NO: 25638 - DNA, 1057 bp, Homo sapiens
ccctggccccctagccagtctttcactgaataccagtgtctgggtacgttattcatccattgtgcagcgtgggtctctgggtcagaccctggcaatttagcttctggttcttgaactgcaaatcgtttttagaacttgtaataagaattaagttcccccaaataatttctaatataggtttctccccacttctgactcttagaagaacactggcctagaggtgggaggtagtggacagcaaaattacttcccagagctagaactggccctgtaatcacagtgatagcaaatgatttctgcccacgatcaaatgagcagcatttatagaggcacatattggagaagcaatggaaaatttgggagctaacattaattttcaggaataactttgttttgttatatgttttttattactttcagggtcgtggttttggaaagtaggccaactgataaccccacagcaaatagcaatttgtacatcctggcgggtcatgaaaacagttactgagaattgttgtgctttgacagttaactctagaaagaaagaacactaccactgcaacattaatggatgcttgaagctgtacaaaagctgcagtaacctgtcttcagttactttgtaatttattgtggcatgagataagatggggaaaattttgttttaagtggtatggatatatttagcatattgaaccacacaagtgcttaattcattgttatgtaatctttgtacatataggcagtattttttctgtgaaacttcatattgctgaagacatacactaagaatttatgtagataatgtacttttatgagatgtacaagtaagtgtcttatctgtacagatgtaaatgttgatgaaaatgcaattggggttaatattttaagaattctttagtatattcttgggtgtggctatattacaaaatgggatgctggcaatgaaacaatacatttaacactattgtatttttattatatgtaatttagtaatatgaatataaatcttgtaacttttaaaattgtaatggaggctgtaatcattttataatctttt

SEQ ID NO: 25639 - DNA, 1013 bp, Homo sapiens
aagatcattttttgctgatggtatgattatgtacatagaatataaaaccctattaataagttactagagttagtaagagaattcagagttgctggatatgagtaacaccaaagaatagctttcctaaataatcagtgaaaaacttaattggaaaaaagatccctttcacaaaggcaataaagtaacatacataagaataaatgaaatccaaacatttttaagatcattatctaggaacctccaaattatttttttttaagacataaaagattcagcaagtgaagaactacatcatgtccatgggtagaaagacttaaatgagaaagatgccagttcttcagttaatccacaggttcagtggatctgcagtaagaatcccaacatgatgttttgtgccacttgataagctgctcttaaaattcatatggaatggccaggcgcggcggctcatgcctgtaatcccaacactgtaggaggctgaggcaggagaattgcttgagcccaggatttcaagaccagcctggacaacattgggagaccccatctctacaaataattttttaaagtaaaaaataaatttatatggaagagccaaagaccaagaataagaaaataaatgttgacaaatcgttttctacccaatattgaaacttactataaagccatagtgattaaggtagtgtggtaacaacacaggaataaataggtagaagagtgagacagaagaaaaggcccagaaatagacccacatgtaaatggaaattcgtggcattatgtattagtggggaagaaatgggccattcaacaaatgatgctggtacaattgcttacctgcagaaaacaaaataagatttattcctccctgaatacatgccaaaaagtatattaaaaatataaatataaaaagcaaaactaaatcttgttctgtttatgccctgtgcttcagtaattctatctatgggtgtctaccctcaagaaagatttgtacatgtattcaagatgtacaaaaatgt

SEQ ID NO: 25640 - DNA, 1034 bp, Homo sapiens
gagtatagtagtagtaaatgccagatggcttttcctataagctacatgactttgagaaatttacctctattattgctagtaaaatggataatataatagtacctgcctcatagggtgctaaggatgaaatggaataattgctataaagcatttagcacatttaggacttagtaaatacttattagttgcctttatttatggtagttattcagtaaataattgttgattgtatgaacaagtagtaatgtgagtgaataaaactgctgtttaattttagagaaatagggtttttgtttgtttgcttgttggtttgaaatgtaatcagagcagtacttacagattgggggcagttagacaatttttaaagatgttaataaccgcagcactgattctttagctaatgcaaatatgctgagtattttggtggtcattttagacctctgccatatctgtttgtacattgtttcatttttaaccttttcgtcaacatttcttactcattttagattgtcttagaattcagcatctgaaagcattgtttttgttttgttttgttatttactttataaaacttccataagagaagaattcaagtggactagtgaatagtgacattgtttattgtgtaacattcaatcttggtgaataaatcagtatcacattttctccagtgctctcaagatgcaatatttactgtaaacagactttttagcaaatttagccatatttcattttctcttttataaagcctaaaaagtaaatcatgcatcctacttttcattaagaccgtattaattctgtaatttcattaataaaatatgttaacacacaatggggatttataggtaaatgaattaaaatatacatatgaatccctgagccatgggctatctgctttttcatattcacttattcaaccattctcttattgttagagaactcccagaaagattctttttaaaaaagtggaatgctggctgggtgtgatggctcacggcttatacctgtaatcccaacactgggaagccaaggcg

SEQ ID NO: 25641 - DNA, 1050 bp, Homo sapiens
aggatactcaagtgtacttgattcatccttgtagaatggatctagacaagtctgatgttgcacatacaaataagaatatgttactaattgtgtttaatttcatatgtatttagccaaagaagtgccctttctagtacaaataataatttatgttgtggataataaaaatattttttcacctaatagtttgagctgctattgtggtttgcttttttaaaaaaaaaaaatttgcaaagtgctgttttgctttcatttttacttaaaatgaagtattttttcctatttgggtaattttgtggaccaaactatgacttgattatcaaatgctgcatatcattgattttgttcttttctagcctcttgttgctgtaccacatagaattcactcaacaagtagaaacgtgagagaagaaaaaacacgctcagagataacctgtaagtatatactatacacagtttatgatttaatgatagaaaataagttataatttagttacagttatttttgttttatttccttctgaatagtttttcttactaaacactgttaaaggtaaagtttaattagggcagtaagaatttcattttccttattcttgtggaatttttggtggcaggatgggatgtatttatgttgttactgtttgggaggataagttaattcctggaataagcagggtagaagtaattaaggcagtgccgtaaatgcctgtgtgcatgtaactcacctagagagcttgttaaatgcagtttcagattcagtagacctgggatgggatctgaggttctactaacaagctcccacgtcattcatgcactcatgatccaagggtaacagagaaatagaggtctgcaaactgccctagcatctgagtaacctggaaacttttaaaaagggattctcaggcaccacttttccatagagtccaattcagtaggtcttggattggcccagaaaccttttaaaataggcctccagttatttcttaggggcagccaagttatgggcccactaagacaagccattcattcacatgggatccaatactg

SEQ ID NO: 25642 - DNA, 1022 bp, Homo sapiens
gtggtgtgatctcggctcaccgcaccttccacctcccgggttcaagtgattcccctgcctcagcctcctgagtacctgggactgcagccacgtggcaccacgcccagctaattttttgtgttttagtagatggggtttcatcatgttggccacgatggtcttgatctcctgacctcgtgatctgcctgcctcagcctcccatagtgccgggattacaggcgtgagcctccgcacctggcctaatttttgtattttttatagagacggggatctcactatgttgcccaggctggtctcaaattcctgagctcaaatgatccaaaatgctgaaattacaggtgtgagtcatcctgcctggccttccctatgtattaaaaaaactcttcagtttttcttcagcatactttagcaacatccaacatactgtaacttattgcaggttcccattttcatatgatccaggtacaaaacactttttctcttctcttttgggcacaacagaaaagactagggtattctgccctgtcatctttctagcttttgaaaaaccaactggacctgctgttcatggttgtaaccactcttgtacagctttgattgccccaccttggttaaggtagaggtgtgggagtttttttgttttttttttgtttgtttgtttgagacagagtctcactctgttgcccaggctggagtgcagtggcatgatctcagctcagtgcaacctcccggactggagtgcagtggcgtgatatcggctcactgcaacctccacttcccgggttcaagagattctcctgcctcagcttcccaagtagctaggacgataggcacacgccaccacacacagctaaattatttatttatttatttattttttgagatggaatctcagtctgtcacccaggctggagtgcagtggcgcgatctcagctcactgcaagctccacctcccgggttcaagccattctcctgcctcaccttccgagtagctgggactacaggctcctgccaccacaccc

SEQ ID NO: 25643 - DNA, 1300 bp, Homo sapiens
cttgtgaaagaggatttgaccttatatgcatgtgtttattttgggttttcttttctctattccgttggtctatatgtctgtctttatgccagtgccatattgtttgattgctgtagctttgtaatatgttttgaaaccaggagtgtgagacctccagcttttattcttttttctcaagattgttttggctatttggcgttctttgtggttctatctaaattttaggattgttttttctatttctgaaagaaaaaagttgctgtttgttctccagattacattgaatttgtagatcgcattgggtagtacgaacattttaacaatgctctttcagtccataaacatggcatgtctttacatttatttttctaattaaacgttttgtaattttcagagtacaggtcttcctcctccttggttaagtctattactaggtattctttttgatgctgttgcaattgggattattttcttaatttccttttcagattgttgttagtgtatataaatgcatttgactttgtatcctgcaactttgctgaatttgtttattagtgctaacagtttttttgtggaatctttagagctttctatatgcaatgtcatgtcatcttccagcaaatataatgttactttttccttttcactttggatgtcttttatttctttttcttgtttctggccaaaggacatttaacatgatccaggataaagaatcagaaggatgagaattattccagatgtatcaattctaaataagagctacttatttcaaaataatatctagtagaaaactgttccttcatgtttatttttttcaggtgaatttaagtataattttttcaggattcaactggcatttttattggaattacattaatacagttattaattcataaggtacttgctgtctttaccatagtaagttcttctattcagaagggaagtgtcttttgtttttttcaggtcttttatctcacagaatactttgttttcttattttccttttgtcatctttatttctgtcttctacatgtttaacatcttcatgactctcataagctaacatggttttccagaagcatcttgacagatgtcattataatgaaataattacttgcagtatcaaacagctatttaacatgaaaactaacaacagagcagattctgttttaaatgataatttaataatattaaattaaatatttaatatttaaataaaatgtagtttaaataatgtttaaataatcattttaaagattttaaaagcaagtttaaactttgtatggagcctatgggt

SEQ ID NO: 25644 - DNA, 1045 bp, Homo sapiens
gatttggcttcaaggatgtttatttagtacttaatttagttagaaggaagatacggagatatggttcctgccttccagtaacttgttatccaatgtgaaaactagaatgtttatgtaagtagcagcctaactacggagaacccattgagcagagtgtgtgtgcatatgtaggtggtggtgctggcagtaaggaacggtgatggctgtgactagaaagacttaattcatgggtcactgaagatccgcctttgactatttactccgaaatactctgggttgggaatatctaggtaggatgctgtgtgaaagaatacacatagtgcagagtggctgatgtagcctaacttatatttggtgggttccatagaagctgtgagttccacttcccttgggataaggaagtaaaacttcagatgagccttcaagactggctaggattttgctagtagaataagagaatggagggtattccacatgaggatagtataaaagcaaaggtagtatgaaagtactaggcctgtttggaagtagtagtttgatttgtctagagtagtatgctctatgtgagcatggtgggaaataagaagtggaaaactgatgatagtttatggaaagccttaaatactagcccaaagcagccaggcccagtagctcacgcctgtaatcccagcactttgggaggccgaggcgggcagatcagctgaggtcaggagttcacgatcagcctggcttggtggctcgcacctgtattcccagctacttgagaggctgaggcaggagaatcacttgaacctgggagacggaggttgcagtgagccaagatcacaccactgcactctagcctgggtgacagagcaaaactgcatctcaaaaaaaacaaaaaaaaaaactagcccaaaggtttagattttaccctgtaaaacagtgggatttcgtttgtttttacaggttagtaacatggtcagagtataactgtaggcagattcagtgtacacaggcagatgggagagaagccctgctggtgagaagacatgttactgttgtg

SEQ ID NO: 25645 - DNA, 1024 bp, Homo sapiens
aaatggaatttctttcttgatttctttttcagattgttcacttttggcatacaaaaatgatactactttttgaatatttattttgtgtcctgcagctttactgaatttatcagtttaatagttttttggtggagtctttagatttttccaaatataagatcatataatctgcaaacaaggataatttgactgcttcctttgcaatttggatgctcgtttatttcttgctcttgtctgaatgctctacaaaaatttaatatataaatatatgtaatatatattatatgtataaagggatcaattcagcaagaggatgtatatagatagatgtgtgtgtatgtatacgtatatatatacatatatatatatagagagagaggatatatatgtagtgaccttcttagctcttcttaacagtttctattttgaaatcttttttttctgatatagctactcctgttcttttcttgtttccattggcgtggaatatctttttccatccctttattttagtctgtgtatcttcataggtgaaatgtgtttcttgtaggcaacagatcattgggccttattttcttatccattcagccactctgttttttgattgcagaatttagttcatttgcatcacatcagtgctcaaaaagttgtggattttggagcattgtgtatatcagatttttgaattagggaaattcaacgtgtattggcaagagttaaacattccactctttcctggagaacctaagtcactttgacatagagaagcagtcttgatttacatcccagatggcagagcttcaggtaagagacagtgttcacatccatcgtaactttgttgcttataaggacaaagaaccttgggttcattttataatccaatcctgaagtctgcccctttacatacagctctcctttgctctaagcctatcaaaacaccacttcatttaaatttcacctcacttccattttattcaaaatattacaaaaactcttatcttttcttttggtgagatgccctaag

SEQ ID NO: 25646 - DNA, 1090 bp, Homo sapiens
cttgttgtagcatcatgtaatatattctttggtgacttgatagatatctctagagaactgagtagactccggttttatttggggtatggaggagggaactacttcacgagtggtgttacgctcacatttttctaaggtagaggggtgtgtgtgtgtttaagagacagtgtcactgtagcccaggctggagtgcagtggtaggatcgtggctcactgcagtcttgatctcctgggctcatggtatacttctacctcagtctcccaagtagctaggactgcaggcgtatgacatgacacccagctaatttttattttttgtagagacagggtctcactatattgcccagtttgctcttgaatacctggtctcaagagacctctcacctcggccttccaaactgctaggattacaagcatgagccactatgtctggcctaaattagagtttttgatggctagtcttccattttttggaaacaaaaattaagtctgaaatagtctagtgcaacatgttggattttaagaatttctgtctagagtttgttcctttttcctttttttacagctgataagcaatttgaacctgaagcaaaataaaaacttacgcagaccttttgaccaaattgtttaaatgtgaagttactccaaggtgtctgactgttgcttctcatcttaattatgcagctttaaatttaaaaaatttaaaaaattttgtttaatttttttttaatttgtgatggagtcttgctctgttgcccaggctggagtgcagtggcccgatctcagcttactgcaacctctgcctcccaggttcaagtgattctcctgcctcagctgcccgagtagctgggattacaggggtgcaccaccacgcccggctaatttttgtatttttagtagagacggggtttcactgtgttgggcaggctggtattgaattcctgacctcaggtgatccacccgcctctgcctcccaaagtgctgggttaacaagcgtgaaccaccgaacctggcctaatttatttttaattttaatttttattttttattgttttgagatagagtctcgctctgtcacccaggcagtggt

SEQ ID NO: 25647 - DNA, 1043 bp, Homo sapiens
aagcatatgtatgtcgttctcatttcactgattttaatgaaagatatacaactgacccttgaacaacacaggcttgaacttgaactacacatgtccacatatgcagattttttttaaccaaactcagtatttgtgtaatgtgaaacccatatatatatggctgacttttcatatacacaggttctgcaggggctgctatgggacttgagcaagtgtggattttggtacactcaagggtcctggaaccagtctcctgcatataccaaaggtcaagtgcagatccagccctcaaataataggcacaaattctagaaattggttcattcaccccagatttaaacataagtgatcttaaaaaatgaagtttgttgctcgctttgggagcacatatactaaaattggaatgatacagagaagattagcatgggccctgcgcaaaaaatattttaaaaaattaaaattttaaaaaatgaagtttgctatacatagctttttttaaaaaatggatggattgtaatgacttcaggtaaaaacgggattctgaaatggataggttctaagttttatgactgatacgtttgaaaagtatattctcttgtaaaatggaaattatcttaagtaaaaggcttctaaggagatagattttattgggtagaatatgttgtgtttttataatgtacttaatctggactaccatcagctgtgtaaacattctgtttattttacacatttgccaccagtttgtacatttttgtgtttcattctctacattcacaggtgaagtcctcagtaatttaatgaaaacattttctaatgagctcacttaatcagtttctccaactcaaaacaaattggaggtagggatgctgtacacacagtcagtaagaaataaccactaacagcctgatgagagagaaggagaaaaccaaaatgcctcaaattaagtaagcagaacagtccagatttacttagagaagtggttcttaaccttatggacacctggcttagtcccctttattctgttataatggaatacctgagac

SEQ ID NO: 25648 - DNA, 1026 bp, Homo sapiens
gaattaaaatgtagagaatatttctataaggtaatactgcttttatagaaaataatataaaaaggtgaaatttaaataaactgctttataagattttagacaatgtatttttaaaatataatttaacttattttggtgggctttagaagaaaaatctgtaaactaaacttattttgtctggcagtaaagggatctagtttttttttaacactattgtttgcagaaagtattcacttattaatacatgataaaattagttgttttggatgagaaatacctttttgttaaacttatctttttaagttcatactatttaaaacattatttaaaatatttcacttactatataagatttttaaaaaataaactttattttagaatatttttggatttacaaaaagtcacaaagactcctaacccagtttcgttttttgttaacatgttaccatggtacatttggcacaactgaggaccagtatcagaacatgactgttaactaagctccaccgtctatttggatttcactagtttttctctaatgcctctttctgtctcaggattccatccaggataccatattctagttactatgtccccttaagcagaattttctggtgtgtgacagcttcacagacgttttgataactttgatagttttaaggagtgctggtcaatgttttgtagagtgtttctaaatttaaggttttttgtttttttttttctcatggttagattgcggttatagattctagggagaatgaagtatgtatgctgttgacataatttatcactggcaatattaactttgatcaccggcagtgttaactttgatcaccggcaatgttaactttgatcacctggctttttagttaaccaggtttctgcactgtaaaactacttttccccacttttccattttgttctgtttggaagcaagtcactaaacacagcgccacactcaagaggtaagaagttaaacttcacctctttgaggaagggagtagcttcgtaaattacttgaaattc

SEQ ID NO: 25649 - DNA, 1033 bp, Homo sapiens
acagtctccctgccagggagaggcaaggggaaaaccaccagttgtatgggaatctgagcttgaatgtagtcagcccctttttctgagaaaagaggtgcccccaaattcccagctgctcattgtccatttaatccactctgagcacccagggtcattcgtggaaaccctcctcctttcaaaatcattcccaagagaggatttcttctgtcagcaaacacaacaagaaaccattgaattaagaggtaagactgccacccaattattttgggtccttgattccactggacagaaacacataaacaggttgaattatgtgggctggagtgtttgttcctagtaatcagagagaggtatgtctagaacccagtgttaacctaggttcttaccaagacccgagatgagacgaaggtttttttggagataatttattttgggagctggggactggaaggagtaaaagagaaatagggaaaaaggtaatccaaggatgcactgttgagctgatcaccactgtgagaagctgggatctgatcctgtagggcccctctgaagacctgtataggatgcaacccagaattgtctgcttaaggagcaaaagaggagaatatccaccagctcctgtctcccattggtcaagagtaggatgactttcaactccctcccaatttaagacttccatcgcatagtttaaaccctaacttacagaatatcagatggaactagaggaggaatggaagccacccagaaatcatgttcttgacatggatgtgttacccttgtcagaaggggagaggatgagcaggtttttctgtcaagtataattgcatattttacatgcgaatattggttggttggaggaagtttaaatatcaaattaagaacagatattgatgttgggcatccaaagggtacatcaaagtggtgaattatcgtattttccaatgtttgagtcccacctctccaaggcagaaaccagaacaccagcttttccgacctatattataggtagaatgggggccagacactgacatat

SEQ ID NO: 25650 - DNA, 1044 bp, Homo sapiens
gggtcaaaggttatgtacatttcatatttttgatacatgattgctaaactgttgccccaaaaagttacttcagtttctgtcttcaagagtactcattttcccatccacttcttccttgctcagtagaagaggcttccctcttcctgcaagggtttatcctctcagttccttcctcctcaaggatcacactctgcccacttctcatttttatcttctgcctactcatctgccggttctttccaggagattcatttatcccttccccagacacgtttggaagtctttgcatctcccatgcacttgcatgtacttggccccggggattacagcagtgaatacgacaggcaaggtctctgaccattcattgtgagaagacagatggttaatcagtaaacaaactggataatgtcagatcatgactggtactgtgatggacataaaacaaaatgttttgctttagagtgagagaaaagtagtggctaccctagctaggtagtcaggaaaggcctctctgggaaagtgatatttgactgtggggcgtgagtgataagaatgagtgataaacgcagggtgaacagcaattccaaatgtcctaaggtgagaagcagcttggtgagtttgagcagctgaaggaaggtcagtaagcaaagaaagcaggcagtgacatcaaaaaggtaggtaagggtcagattgtgtaggagccttggatgccagagtaagggggttagaatgtatttgaagtacagtgcaagcaactgaggagttagcaaagaatttacatttgtcttctgtgtggaaacggaagacagagtgggaggggcgacaagaatggaaacaagacctgtctaccagattgttgctgtggtccaggcaaactatgaatgaagtagacaaatatgtgatacaatttagagacagaattgtctagctttgctgatggattagactagggaaagctacctaagcttcttagatttttgctgggcatgaggcagattccccttaactcttggtcctttagctgccactgtttcttttcctgta

SEQ ID NO: 25651 - DNA, 1034 bp, Homo sapiens
cagctgtttttagatacttggttatgatttcattctagatagaaaaaaacagattgtatatataaataaattttcaggtaagaaacatgagaatgaaatattccaaatgccttatttctctgagtgttgtattaaatatgaacagttacaagcagtaaagaaaaagagaattagtagcttcagcagtttttgaagtcataagcaccaaaattcattctccctactattttaaggtatcatacctatcttcacaaagagtgaactgtttaagtgcattcacagataggattatttgattctcacagtgagtactattttacaatctattaaactacagtaagtcctcatttaatgtcatccgtaggttcctggaaactgtgacttcaagcaaaaggatgtataattaaatcatttttaccataggctaattgaaataaacaagagttcctatagcatatttctggtcacaaaaatttcacaaacttctaaataggttatttagaacacttctgatagtaaacgctgaaataacacttctaatgttaaacattgaaataaatgtaatctatacatacatttaagaaagattgataaaaacaagtaagataattatttatccaactgttccagttaagttattccagggttttcactggccagatcctatcttggcagctcagggcacaaggcgggaactagccctgcataggatgccatcccattgcctggcacactcacacacacccacatttacttgcactgggaccacgtaaacataccagttacctaacaggcacactctgggatgtcagaggaaactggggtactcagagaaaacctatgcagacatggttcacccagacagtagccctggctgggaattggtattttttcttatcaatatcataatgaaaccatgttgaacgaaacagtgttattcaaggacctgctgtacttctgataatatgcttattctacaagaaatgtaggccttatgataattcgtagaataatgttgctgcttttggttttga

SEQ ID NO: 25652 - DNA, 1023 bp, Homo sapiens
gaagaaagccatatggaaagatttttatcttgcaagaaaaaacaattatgaaactcttttaacataaacacactgaaactgtatcaaagcaattgtccaaattgtatttatacccaagaatttctttaactaagagagcataaggcatatgtttggaaaaccaccctctttatctttgaccgacttgcagataaatatatctctccattttaaaccaagaagggcaatcatgttggtgatccagatcactgagaaagcccagtgtatcccatcttttatctttgttggcaatggaacttttctatggcccacactttacaattctttgtcattctaacccatccttcccatccttattttttttttttttgagaattgctaaatggaaagctagcctagaagcaccaagtaaatatattcaaggaatataagttgtttaaacattagaaaaatttttgcactcattttttagctgtattaggaatgtcaataatcctgtagcaaattttcacagagaactttaagaaattcttgcattggtcgatttcaatttgaaagctttttggtttgtttgctttttaaattttcatgttctaggaaactatgattctggttgttcaggattgttattattatagttgtgtaaaattattttattttgtgtgtattgtgcacagcttggggggggggcgggaaatgcactaattgtgctcttccttataaatggtacatattactgacacagacaaataaagtttctaattgtttctgatttaatcactagtgatacagcatattctgtatgaaatgttttctcctttctcattgtcatctacttcattttttgttttcatgttttgaagaaataaaaaccaaaatggtattattgtgcaactggtatcatcatccaaagaaaaaaacagacaccaagtattcaaactcttgcaaacgtcaacccttcggtcatgcaatgttctctttttaatgtcccaggagaacacagtgtcagaatatttgtctgtc

SEQ ID NO: 25653 - DNA, 1030 bp, Homo sapiens
aactcaactttggaagaatgaaaataactacaacatcatgactcgcacctgctgccaccccactttcacaacagctgttgtgaggccacagcttccatctttagaaagacaaacaaaacgtgaacaacttcctgctgtggtctagctggagaatctgactaacctgaataagagtttgattctaagacattgggtggggtgaaataacttgactatattttctttgtgatatttttattcatttattattttaataacaatttatgataaaaatactatatttggaactataataaagcacagtgaaggaaaaaaaatgacctgtaagccaattgctcagagataacttctattaatatcttgatgggattttttgacttgttctaaaggagtgagttccagggcatagcttagacaatccaatggttaaggcatttactaaattaatgtgtttttcttttcttattattgtgatctgtgtttttctgcttttcctccttatgatgatgacaaacctattaatactgaatgctatattttgcctaaaataattctgtggccctgctcaggggagctatgcattgggtgaaatctctgatctttcatacctatctgatacccattcttgaagaaaaaactcacagtacagaagtttctcgattactgtttgtctgaaagtgcagctggttaaccttgctttcctcttctctatgttccttctcttctctttcctcttccccttgttcgtcaatttctattctctgtttcagcaaaacaatatcagtcaaggtaattgatgatgaggagtatgagaaaaacaagaccttcttccttgagattggagagccccgcctggtggagatgagtgagaagaaaggtgggggagctgctccagggctgagcccaacagcttctgctggcctgtgccacccctggatgcctgcactcttcagaacatgacttacaatgcacacatccctccacctatgtaacagggcacagatctcatgctgagccacagtaggcaggc

SEQ ID NO: 25654 - DNA, 1053 bp, Homo sapiens
ccatgtaaaaagcctccaaggtcaaacaagagctgtgcttctccacttttcctttttccttgttctcaatggtttctcctctatgaacacacacctctaaagattaatctccatgacccaactccgctccagcatcccaattgaaaggggcacaaaacttgggttccccaagattaggagaatcctacatgtagtcttccctgcttaacttctccaacaaagatctttatgattatggagattatatcagaccaagaaataggatttgactttgagtgttacagagggaaagcccagtttcctgtgaagcactagctaatattgctttctaagtcaaaactttagtgtaagttaaaaaaagcactcaggggtaactccctgccacaaacgttgggcacacagccagggcactgtgctattagcctcggggtgagcccagattcccagaacatgcaagtcagcatttttcatccaacgatagaggtgtcctgctgaaatctaaaatagaagaaacaggtctaccaatctctgcaagcaaggatgttaattagttttttttttttcccccagaagaatgttttcatctttcataaagcattatggtcactagataaatgtaatcatttataatcataaagtacataagctaaggtctatatgcctccttttttttccctttgctttatatacagaaaattccatatacgataatattaggttggtgcaaaattaattgcagattttgccattaaaaatgggccatattaaaagtaatggcaaaatagtaaaagtagcggcaaaatgttaaaaagtaattgtaaaaaccacaattaattttgtaccaatcaaatatgtaatggtaattttaacctacttggtcatatcaaattttttgttatttagaaacagtctttctagctgcctagttttattcaaaaattctgtgcctaatttattgccactcccttcttcacaatacagtaattacatgcaatttgtaatgagtttatcaaaggaaagcacagctagcaacaggaaatgggacatttttat

SEQ ID NO: 25655 - DNA, 1027 bp, Homo sapiens
cctgaagaaagtgaggtctggaaaacccagaatccccctcgtattgaaaggaggacagtggctcagtcttgtgggaaatcaccaaggattcctccgagtccatttttatagcaaattatacatctggattgtacctaaaactttatttcggcttataactaggccttgcaagtcaactgattgccatgtgtttttctcttcccctggcacctttaggagcacacaggaacatatgcaatcagatacctagaggttccccaaatttgagatggtccaagaaagacaaagtcaagttagtggagtattttgtctttaacatgggctgtacttgccagaactcagtgtgttgtgcccgggtagtgcattttgtagcaaagctatcaatgggtgcctaaaatatatctcttccttccactttccccagccagtgctggccccctgagaactctagccaccaatcaggctcagaatgtgatgaatgtgtgtgcaactaagcgggtaataactcttgaagtaaaatctcctcctctttgggaaagcttctttcctgctacaggggtgtggcaaggcagggtgagggacttcaaaacctagaatggctcaaggtttttaaattgaatgaacatagcagcgtatggtcagctgagaattgtacttctggaaatcatcacttatccaaaatgaatcagattttggcagtgtgtagtaactgtatacagattcaattcattttgctagtgcttacagtctacaagaaaggaagaattgaaaatgtctcattggttttccctcttctaaatgtttagatctccatgggctcccagggcttgcttgacagacttacaagatcctgtggcctagttttagaatgttatggataaggccattcttgcaggagtaaggtggtatcacattgtggtttggaagggaacacttcttcactgctggggggaatgtatgagtacaaccactgtggaaaacagtgtggagattccttaaataactaaaagtggaactaccatttgat

SEQ ID NO: 25656 - DNA, 1063 bp, Homo sapiens
catttaaaccttttactctgaaatatgttgttcagtgaaggaaaagacaggctagactgaaagaaaatactggcaaatagtatatctaacaaaatatttatatcagaatatttaattaatgctcaaaatttaacaattaagaaaacacagcaaaaaattggtcaaatatttgagcagatatttcactaaagaaaatatatgttaacaaataagcacatggaaatatgctcaacatcatttactcactagggaaatgtaaattaaccccaatgaaatagtaatgcacactgaatagagtagctacaattaaaaattgaccatatccaggtactgtgactcacgcctgtaatcccaacattttgggaggccgaggtgggaggttcgcttgaacccagcagttcaagaccagtctgggcaatataggaagaacctgtctcattaaaaaaaaattgaccacaccaaatatttataaatacatggaggaacccaaactcaactacactgctggttggaatgtaaaatggtacgactaccttaggagaccgtttttttaaaagttaaacatacacttatcatataatccagccattctacaccttggtatctacccaacagaaaagaaagcatatagctatacaaagacttgtacaactcaaaacaacctagatatctattagcaagtgaataagtaatcaaattataccatttccatacacagcaatactactcagcaataaaaaggaatgaactatttatatatcacacaacatggatgactcttaaaataattaggctgagtgaaagcctgactctcctccttcccctccccaaagtacataatggattattctatttgtgtaaaattattggagattcatactaatccacagtgacaataaaattattgattacttggagagggaatagctagagaagagaactttggggggtaatggatacgtttattaccttgattatggcaaaggtacatatatatgtgtgtgtgtgtatatacgtagtatatgcagcatatgtatacatatattttatacacacatataca

SEQ ID NO: 25657 - DNA, 1155 bp, Homo sapiens
ggcattgggacagataatcattgagttgcagctgtttgggtcatatgcttctttatagtgctactctgttaattttgcattatgctgtttcctggtacttgaattttgccagacaaatatttacggaatgagtgttaatagaaatttaaattggggattgaaaaaagaagttaggatgggcaagtaagtcagaatccagatttgttttatgttgaatagattaatcactcagttatttttagctaaggaaattgaccttttttaaaaaccaggtgaagaaataatttgagattcagacatgacaattctatttgcaagacctgtgagctttttatggacagtaatagtgtcttaaagtcttaagttacatccatttgtatatcaaattatgaaagggaaatattgacagaatccaggatgattatttatcaaggaaacactgcaatggatgtcagtcttcacagccatttaagaaaaattattatcaatcttgtaatttttctatgataaagacactggaagctcgagaacaaaagcattatagttgcctatgtgatgttgctttacaaataagaatatttctgtaaatgctcctaccttctgtcagtaatctctgtccatcattagtttaagtgttatataatccttcaattttaaattataaaaattattgaactaaaattttagcaaaaatgaaatggaatatgcctcttcttttctgaacaacgctaaatatgtctctatttatctttaaatatgaattataaaacctaccagagagagttgctctaaggattaaatgagattctgtgtgtggggtgtgtgtggtgtgtgtgtgtgtgtgtgtgtgtgtgtgttacccaataaatggtggtaggcactatataagtggcatttattataatcatcttatttcttattaaattggtagtgttcaaacttggttttatagatacttgtgaaggcattattatttttgttattatcattatcattatttttagagatagggtcttggtctgtcacccaggctgaaatgcagtgatgtcatcacagctccctgcagcatcagactcctgagctcaagtgaccctcctgcctcggactcctgacttgctggtactaaaggtgtgcaccaccatgcccatctaattt

SEQ ID NO: 25658 - DNA, 1042 bp, Homo sapiens
cactacaattgatgctgaggaaatgaagattaaggaattagtcttcacacttaaggagcagagataccctcaaggagggaggcaggcatgtaggaatataagggtaatgtttgatatctgtggaaggaactgtttaactgggggtgggtaggacacataatccagactgagaggaggtgaagctcagtaaggcttcctggaggaagaggcatctcagctccattttgtggagagtgtggcagagcattcagaaagaacagcatgtgcgtaaccatcagtgactctacctctagctctcggtaggtgcttggcatgtcgtaggttcaatccatgtttgtgcctgaaggggccaaggggcaaagcagagcatcaacctttccagcaaatcccacttaatggggtttgtagaacaccccaggaaatgttaataattgagtgacattgacagatcaggatttctgttgttgtaaaatggcacataataccagagaaagcaaatgccaaagaaacagaactcttgggaccactggtgagtttatactgacattcgaatgatgacctggagcagtggaccagtgtttgttacgtgcatggactacaaattaaagcgagctggattttgactggcttagtgacctggcctcagggtaaaccactccctagatgggtcagtgtgtggtaatcagtaagagtgtgggctcaacatctgtacacagaatgaggattcatgtcaaggtctctattatattttataatagaaaacccctgatctttctcaggatatttagcttggcatgatagaagtgctgtctctcccacccctccaacagtgcccttgaaatggaccaagaaagccactggctgagctaacaggaagacctgtcttctgcagggcatccctccttataggtcaaagtaaaaatggaaagtgaccttttagagtaccccactttacagatgagtgacctgagcactgagaggctttgtgactgagaatatcatgcatgttgttgtcagaatcaaaaaatcatcggaatcacct

SEQ ID NO: 25659 - DNA, 1207 bp, Homo sapiens
attggctgtcaggcccaaccacagatgattcctcaattggctctggccaatggctcaacaatttaactggaaagacatttacaagatctgctaaagaaaatccagtttacttgccagaatgttgctccctgcgtactccatggtattggtactaacaagtattgaaatggctgatagacatagatggacaggacattagagctggctaatccacaacccaataagcattatttaaacaactaagatttgactggagtacagtaaaacatccacagacaactggtggatgaaaaacagacagaactcttaacattagcaatgctaaatctattcattttctcttagagtggaattcttgaagttcatgcatgttaacaagagagattctgtgctgatacttgtttccaacttaatgctttatgtattccgctaatggttttcatatccctgaacactgaggttgcagacacactagaaacaaccagctcagatgatgacgaggtgaaagtggtaagaaatgcaataatagtttgcaaaaattttctcctattctgtaggttgtctctttactctgttgacagtttcttttgccttgcagaagctctttagtttaattagatcccatttgtcaatttttgcttttgttgcaattcttttggcatctttgtcattatatctttgccccagcctgtgtccttaatgttattgcctaggtcgtctcctaaagtttttatagtttggggttttacatttaagtctttaatccatcttgagttagtttctttgtatggtgaaagaaaggggtccagtttcaatctcctgcatacagctagccagttatcccagcacaattgattgagtaaggaattattttctcactgctgtttttgtcaggtttgtcaaagggcagatggttgtgggtgtgtggtcttatttctgggttctctattctgttttattggtctttatgtctatttttgtaccagtaccatgttgttttggttactgtcaccctgtagtatggtttgaagtcaggcacatagaggggaacaacacatattgggcgggaggaaagagaggatcagaaaaaaatgactaacgggtactaggcttaacctgggttttcaaataatctgtacaacaaacccccatgacacaagtttacctgtgtaacaaacctacacttgtaccacttgaacttaaaagt

SEQ ID NO: 25660 - DNA, 1035 bp, Homo sapiens
tggagggagagaaattcagctgtaatctcctagtttgccaccagccagaacaattggattttcttcaaataggagattagagcttccagaaagtatttctagttccatatgctgctttcttttaaaaggacacttattcctatttattcaaatccctttatgtcccacgaacatcactttccctttctgagtagcaaataaactgcttttcttcaaagtctttctcccagaatggaattacttaattatttgtgagtgtgcatatgtacacacacacatacacacagacatatgtgtgtgtgtaatatatatacacacacgcatctacatatatatttatatatatatatattttaaggagaatagaatgctcaacaggaaggattagtagagaagcatactttaagagcaatatttttcaagttagaaaaaatccaaaggtaataaaagcaactttcataaaatggttgatcttgtcagtaatctttctagaaacatctccacagcatgttaaactgcctccaaatatatccacaaagagccatgcggtagctcccatatttattgtttgccctttcaggcaatttgctacctgagaatagaaatgccaaaataagataaaatgtctatcaaattgggtacacagatcttttaaaaaaatttactctacattttcttaagctcacttggagtgattggacaaaagtgttcagattgaaatggatgcagtcccctgatgttaaaatgttgctgggacaaaagttacatatcgggttgttaaaaaaaacatggcagaagcctctgtggactatgtgtatgtgaaaatggcacatttcaacagcatgatctgtctataggataagatggtggttcctcaagttgagggggcatcagaataacctggaggtttgttaaaatacagattgctgaacttcatcctcagagtttatgacttagtagacctagatggtatgcaagaattgacattctagtaaattctcaggtatttctgaaattggtggtccagggactcta

SEQ ID NO: 25661 - DNA, 1343 bp, Homo sapiens
gtagggcctgagtattgtcacatttatgaaactatacatatgtggttctgatatgcagctagcattcagaagactgatctggaacggtcaggctcggcaaatgtatgtggatacatagtaatgataacatgaaaactttcaagtgcgtagatggtttcacacccacaatcagttgacagtgcttcttgtgttgattacccacctgtgaaaatggatttgcagcaattcctcttccctagtcctcactgtgagcaatggaaaacttagttgagatgagctttgactatggaatgagacaagccaattattccatgttggaactgcctctgaattttattatctataatgcttgtttttatcaacttagaaaactgacctgaaagtcataagctaaaccatcaatgggcacattagctcatgacatgtatacactagcagctgacagtggaatacaattcagaaagagagaaaaggaaggggtggagtcagacaccttcttggatatctactatgtgccaggaattactttaaacactgtgtatctgttctcattcaatccctacaacaatacttcaccttttttctgttcaataaaattaactgatccacggatccactctttgcacagagcactgaaatattctcatcagcaactttcagttaagcaatatttagacattacttttccagggccatggaaattgcagatttaaaccctgaaacctgtcaaaccttgtgcaaaatgacaaagcccacctcccctaacaccgtcctgaacagtggatccctgtggactagctagaagaccaacccaaaaagtcaggtcattatcactggaataattgtcattgatacagcaactacagtttctcttgctggtttgcttctttaacttctcttgtttttttttttttttttttttttttttttagttattagagatgatggaggttaaaaggatgctgcttaacaaagataaaagctcacttagactagtaatctttttttctttttaaagaaacataggattacagaaatatttaatgaattaataaggtacttctcaacacatttttttcattgccaactagtttttccaggttatgtacataattgaaaaagtgttgtgttgcgtgttatgctttgatgcagtcttgttttgtaatccattgctttcaaatttctatcatcatcttctaattatcttaaatttgcactgtgctactagaatagaatgatggtattattactattattactggcagcagaattgaaacctggagtataagtggtttgcagaccattcatagattcatgtaaccgtagagattcatggttgagta

SEQ ID NO: 25662 - DNA, 2003 bp, Homo sapiens
tgtgatgcctaacacggttatatgtgtgtccctgcatttgtgagtgaataaatgcaaactggttagtagttacagtcaccagtgaagatccacaggatagaaaagtcacctcagaagagactgaacaggaggctggctccttgtaaagagagttggccagaaaagcaaatgcaactcctcttgaccatctcctttacctgaagggtccttccaagaaaaggttaggaaggtcaagtatttaaaatatattcactgaatattcacaaagtgccaggaagttggggacataagggtaaacaagatagaggatgtctttttggaaagaaattgacagtttatgcagcacagcaatcaaaatgcagtgcaccaagagctgtgggagctccaatatagagctgtgatattctttcaggacagaggacctgttggtgtggaaggaaaggctgttcactgaggtggaggattaaaaattcataaaatgaaaatggaaaaatggacacaggcaaaaggcaggaagacagaaaactaccaataaaaaagaaaccactgacgtttgaagaagtgaaggaagtatagatagcatctaataaatcatctcatttttacagacaaggaaccagtccatgaggaatctggtgggtcaggtgtggtggcttatgcctgtagtcccagcactgtgggaggccgaggcgggcagatcactggaggtcaggagttccagaccagcctggccaacatggtgaaaccctgtctctactaaaaatagaaaaattagccatgcccggtggtgggcacctgtaatcccagatactcaggaggctgagcaggagaatctgttgaacctaggaggcagaggttgcagtgagctgggatcgcaccactgtactccagcctggatgacagagtgagactccctctcacacacacccacacacaaatctgctgagtgacatactaagatcacacagttagaaaggggcagatctgggcctagaacctggtaagcctagtcctcagtccactctttgcattgtcatcatgaagtaaaaaaaactgtggagaaggaattgagaacacaacacagaggattgccttgttactgtgctatgtatatgcatgtgacgtagatagggggaatgcatatcatatacggtttcaatccaaagtggcaagtttgagaagttaggtccctctgcagatgtctctgagcattgcttttacgtgaaacaaatggggtgagctgacaatggttagattgtaggcttagatcgaaatgcaggaccatgttgcttcctccatggctgacctctcagcactgcacacacagccttgagtaacagagggccttgggttcccacagctctgccacactgatcttatcagtccacctgggaagatattcccctcttctagcttactaatataccgtctgcccttagccttcaccttagatcgtgtgatggcccattttcctaccctcacttgtctgatagtgaaaagctgcagactttgatagctcaataacccatttagaagttttgaaattttctgacgtttatttattatacatccattatacaataaataagtaatcatgtttattatatatttaataatagaactattaaaatggcctggggaatcttctagcatcttggaaaaataactctgcattcatgaagaattacaaagtctaggaatccacaaagctccaagaacagtgatacattctattatttttacactgcctaacaaaaagaaaatgttctatagggagatcatattttgcataatctttggcatatatgtttaaatttttgagaaaatgcggaatttaaaacgcggagcctgtgtccatgtgcatttgaatgtgtgtatattttataaaggtgactgacaacaaatgaatccaatattaactgcatttttccactagtggaaacaatttgggagttcagtgctatagaaagaggatgttgtatgtatagaatacagtgatggaa

SEQ ID NO: 25663 - DNA, 1017 bp, Homo sapiens
tgtctgttttggtaaaatgtgtagaaacctaaaactcttaagtcatttactggttagagatagtgactatcaaaaaagaaaccaaaaaacccccaccaaaaccgtgcctaagttttctatttctttaattattaatacattattagacactaattcttctacttttggtaaatcatttttagtagtaattcaatgtttgttattaaagatatacaacttccatatataattttggagttctcaccccttttcattgtaaggactatgttttaccttcagaaaagacttttgggctcagagtctctatctctaacaacaaatcctctagccaaggggattttctacaaattaaaaaaaaatgttttttaagtttcactcctggcttcaagagatcttccggcctgggccttgggcctgagccaccatgatggccaaataaatatttaagtttttactatttcattgtattcttattctagtctggagtatatacattagaaccaagcttctggctgggagtgggggctcatgcctgtaattccagcactttgggaggctgagacaagcagatcacttgaggtcaggagttcaagaccagcttgaccaacatggtgaaaccctgtctctactgaaaatacaaaaattagccaggcatggtggtgcacgcttgtagtcccagctacctgggaggttgaggcatgagaatcacttgaacccaggaggcagaggctgcaagtgagctgagattatgtcactgcactccagcctgggagacagagcaagactctgcaaaagggaaaagggaaggggaaggggaaggagaaggggaagggaaagggaaaggggaagggaaaggggaatgggaagggaaaggggaaggggagaaaggaagaaagatccattaggccttacagaatcccataatgattacaactatggtaactggcataagcacagatatatatacatatttatggaacagaattcaaagtccagagaaaatctcatacatctttg

SEQ ID NO: 25664 - DNA, 1226 bp, Homo sapiens
ggcgacagagcaaaagccaatctctaaagaatttttaaaaaaaagtactctggagataaatgggcaaagtacatgaatagatagctcataaaaaaaggaaatataatttaactttaaaaagaataaaacatttttttaaaaaagatattcaacatcactaattataataaaaagctaatttcctttttttttttgagacagggtctcactccgtcgcccagactggagtgcagtggctcgatactggctcactgtagtcttgacctcctgggctcaagtgatccacctcaccctcctaagtagtgggacaataggcgctgttgcagtaagcttttgggagagacgaggtcttgctgctgtgttgcccaggctggtcttgaactcctggcctcaagcaatcctcctgctgtagcctcccaaagtgttgggattacagatgtgagccacttgcctggcccagagtacttattgataatgctaaatgtattggtctattgggctgacttcctcaggaatagtctctagtgactcctgagccaaacctcttctgattgcaagctccagaaattcattaaatccagctgatacacaaagggagatttttcagaacctgagcgaagctgggcctcacaaggactgccttcgagtccaaggtacctgtcctttctgtcactctcttgattatgcagctgtttaattctgtctctgcagaccagctttctctgtttctcattggatttggaaggaaattgttgtccagctgctggcaacatgcccttaattccaggagagagagaatgttattgtcccatttgggtgaggtgtcctccactgggccagtcagctgtttggtgccaggctgtgggggcagatgcagggaaggagtgcaggctgccctattcttggatgttaattgacggtgcagaatctttcgctttattctcagagttaggattatgccttctaagcacgttactctgaacccttgccaggttggtttgtttactcagaggaagaccctcctccctctcaccggctcgtctcttctcagtgctgtctggatgagatgctgttaatacagggtccttccctctactcacctcctccaggccatgcagttaggccacggtgctgagtaagtgcggtcctactcttcacaacagtgctctgggttcacatgaccccgggggtatgaagacttcatggggtacccacacaaggatagt

SEQ ID NO: 25665 - DNA, 1030 bp, Homo sapiens
aaccagtaagcctgttccacattgaatatttctttattgtgtgtctggaaaagtttctgaagtctgctctggggttagacattccatgttactagattagctcatttagaagaaaaaaatggcagacagatccctcatgaaagctaatgacaagttcgtaacagattataaatgttttactggttgctaagaagatagacacaccaggtatttctggaagctcagattgggcctttgttggcgtccccctgaccctcacacgccccctgcaatcgtaatggcaaggggttcttgacagggtttgctctgggaaagttggagagactttcttgctctctcgtagttgaatggctgcctccactattccagacagcctcctcagacatactttcaacttgccattttcctttttttctctacagggattaaagcctgtggtttccacagaagcaccacctatcatatttgccacaccaactaaactgacctccgattccacagtgtatgattatgctgggaaaaacaaagttccagagctacaaaagtttttccaggtgagggaagatactctacaacagaaaagcctgtgaaataaataggcttaaaaaatcccttatgaaactaaatcttaatctagtttactacccaccctccttctttttctttaagtagtattctcttgattttagtttgagccataaacgaatagaactttatataggtagatactgataaaagaggggagggtggttaatttcctcattagtatttaagggtgtgagggttttgaaatggcatgaatagctcttgatcatttattgcatggaagaagcaatagcctcaataactgagtagcctgtataactgaatgacccaatatatatatttgacttcgtgacacatgtaatgacttggcagtgggtttttttctcattgttttttgcttgcttgatattaaaattcactgagctattgctgaaagtagaggaggtgcttacgggtttgcacatgagtagagaatccagaatca

SEQ ID NO: 25666 - DNA, 1097 bp, Homo sapiens
aatgtaatgtaggagcaataaaaatgctgacacttgtttaaaactagatatgctgattctaatattcctatggaaaaataaacaagaatggcaagaataaaattgaaaaaagtaaatcaatgaaggggaactggacataccagatcttaaaacacttagccctcaaaaatgaaaacagttgagcattgatgaatgaatagacatatcaataaaacagaacagaaaatcaaaaagattaaaatgcatgagaaaatatctatatatgttaagagaactatctcaaatcagtgaataaaggatagactactcaataaattgtattgaaacagtcagaaagttatctggaaaaagcaattggcacccgcaaagcatacaccagaaaaactcccagtggttaaaggttaaagataaatgtacaacataaagccataaaagtactagaaggaaacataggagaattccttcttaactgtggcataacgaagtagtctttccaaccttgactgtacagttttgcattgcagaaagaaagaaagaagcaaagtcaaaagacaaatgaaaagcttaggaaaaagaaaaacaacttggaactacatcctaaaggaccaggccccctaatttatataaaagcttaaaaaaatgttttttaaaaactaaaagagcttatgatcaataatcaataaaacaagaatcaacaaccaaataggaaaatgagcaaagcatatgaacagttttacatagaaaatataaagtctctagaaaatataaagtcccctacttgcatgaaaatatactcaacatctttcagaataagagaaaagcaatttcaatctagactaaggtgccatttttcacctatcaagttgtcaaaaattcaaaagtttaataatatactccataggtaaagctttggggaaaacagtggatgggattataaattgtttcaacctctctagaattcaatttgacaatttttgtcagaattgcaaatgcgtgtatcccttgatcaagcagtaccacttctgataatgtataccacagatatacccacacatgtatgaactgacatacatataaggttattcattgtgcattgt

SEQ ID NO: 25667 - DNA, 1140 bp, Homo sapiens
tttatggtcctcacaaaagttttctaaggggtagctgggatgatagatggataccttctttttattccctgttctagctgttttctgctttgccctcactgtatttgcgactcacactgtattctgtttaatcccacacaagtgagtgttaagcatgtcttcaccatgccaagaggcaattgagtggccagagaaggaaataagggtagttcctgggtacatgactaccttgaccagtcagtgttattggcagtgtggctctgtagacaagctttagtctatctagcaagagtttttagggaagtttaaaaatggaactaaataaatatggggtggtcctaacaatgccttttttaaaaaagatgagacataattcgtatgccatacaatttgttatcttaaaatgtacagttctgtggtttttaatatatttatagagctgtataaccatcaccactatctaactccagaacattttcatgtaccctgtgcccattagcagtcactacccatttccactccactcatcccctggcaaccactaatctactttctgtctctgtggatttgcctattctggacatttcatataaatggaatcatatgatatgtggctggccttttgtgtctggcttctttcacctagtgtcatgttttcaaagttcatccatgttgtagcatgtatcagtacatcattcctttttacgactgaataatatttccttgtatgggtagattgcattttatttatccatgcatcagttgatggacacttgtttctactttttgactgttatgtataatgctgctatgacattcatgtacaaattatcatgtggacatagggtttctttttctgttggatataaacctaggaatggaattgccaggttagatgctaatgtttaactttttgaggagctgccaaactgttttccaaagcagctgagcaatttgattcccaccagcaatgtgtgaaggttccggtttctccacatcctccccaactcttgtcattttcctttttaaaaataatagccgtcacagtgggtatgaaatggttatctccctgtgattatgacttgcatttccctaatgacaatgctgttggtcatcttttcatctattctttggagaaat

SEQ ID NO: 25668 - DNA, 1047 bp, Homo sapiens
tcaaggaacccttttacctcagcctcccaggttgctgggagtacaggcgcgtgcccccatgcttggctaattttttttttttttctgtattttgcagagatggagtttcgtcacgttgcccaaactggtcttgaactcctgggctcaagcagtctgcctttcttggcctcccaaagtgttgggattacgggcatgagctaccgcacttggccactagtcaattctctttggcttagtctcctcatttgtaggtggggatcataacaaaacctattgcatacagttgtgagaattaagtgaattagtatgtaaatgtatagaaagatgtttggaacttgaataagtgttcaattatgtgttttaatttattattgatctaggttggaagataaagaggtatgaatggtatatattttttctctgtaagataattaaagtgtgtaagaaaaaaatcatgtttttttcctctcaaaaaaaccctacttttttcctatttaaccaattgttgtggagaaaactcttataaggacatgaaagactctaggtaatgaagtggctgttgatgtgcagtttgctggaaatttttattgtgccttgtgttgttacattgtacatgcctgttagaaatgtgattggaaatgctttgtacatttaaatctgaaggcttggagtaagaaggtaacttttccttttgtggcactcctggggttgttaaggctgatttaagctgctgatgacttgattatggtgattgctcttctagttgggcatactgtttactttcttttaaaatgtttttaagttgggcttgaactgaactccttttgtaaatagaaggctctgagctcagagatggtttgcagtaataataatggtcacaaatctttttttgtttgttttttgaggctggtctcactcttgcttaggctggaatatatggtgcgatcatggcccactgcagccctgggctcaggtgctcctcctcagcctcctcagtaactgggactgcaggcatgcaccatcatgcctggctaatttttgtatttt

SEQ ID NO: 25669 - DNA, 1044 bp, Homo sapiens
atcaagattcatccatgtggtattttattccttttatgattggataataatctattgtatggttatgcaacatgttgtttacccattcatcagttgaacatttgtattgtttttactttttgattattatgactgctataaacatttgtgtccaaatttttgtgtgaatatatatatatatatacacacacacacacacacacacacacacacttttttgagacagtctcactctgttgcccaggctggagttcagtggcacgatcatagctcactgcagccttgaagccctaggctcaagtgatcctctaccctcagctttccaagtagctggtgctacaggcatttaccaccacgcctggctaatttaaacattttttgtagagttaggatctcactgtgttgcccaggctggtctcgatcctcaagtgatccttccacttttgcctcccaaagtgctgggattacaggtgtgagagccacgccacctggccccccacttctttttttttgagacaaggtcttgctctgttgtccaggctggagtgcagtgatgtgaccatggctcactgcagcctcagcctcccatgtcagcctcctgagtacctgggactacagacatatgccaccacgtctggctaatttttgtacttttttgtagagacaggttcccactgtgttgcccaggccagtttcaaactcctgggctcaagctatctgcctgcctcagcctcccaaagtgctgggattacagttgtgagccaccgtgcttgatcctgacttttctttttctaaatggttgattatacatcctaggtactgattgtgtattgcaaatatcttgtcttatttatttattttaaaatatttgtagaaacagggtcttactatgttgcacaggctggtcttgaactcctgcattcctcctgtacggacctcgaagtgtctggagtacaggcgtgagctacaatgcctgactgcaaatatctttctgactgtggctggtatttttactttgtttatggtgttttggggcttatagaa

SEQ ID NO: 25670 - DNA, 1016 bp, Homo sapiens
ttaagtgctgggattacaggctgagccactgtgcttggcccgattttattaattttatactgaattttgtaatattcatgttttgatcaattgcatcctattaatacttggagtggtaacttgatgaaaaaatttgacacaatttacagtcacaggaatttttttttttttttttttaaagagacagagtctcagaccgggcgcagcagctcatgcctgtaatcacagaactttgggaggctgaggtgggcagatcagttgaggccaggagttcgagaccagcttggccaacatggcgaaatcccgtgtctacaaaaaaataaaagaattagccaggtgtaatgatgtgcacctcttatcccagctatccgggaggctgaggcacgagaatcacttgaacctgggagaaagaggttgcagtgagccaagatcgcaccactgtactcctccagcctgggcgacagagcgagactctatctcaaaaaaaaaaaaaaaaaaaagagacagaggcttgttctgtcactcaggctggagtacagtggtgtgatcataactcactgaagcaccaaattcctggctcaggctatcctcctgcctcagcctctcaagtagctgggactacactgcacccagtagcacaggaaattttaaacagttaaattgtaagcctattttttgttgttgcagagaaaggtaatgggtgtttacaaaatttcaagtatcaaaatatattacagtaggtccttttaaacctttgttatagaagtttgttcagcaaatatactgaacacctgtgtactgtgtgctaaggacacaatgatgagaagacaggaaataaggtagcttccttgcccttgtgtagcctggtctaattatgattagtttgcagaagtcgtgtacattgggtcagctgccactggagtaaggcaggctggctcctcccaaacctattgctttcaaaggattcatcagaacaaaagaattcccctttatgtgttctctttaatttgtccata

SEQ ID NO: 25671 - DNA, 1044 bp, Homo sapiens
caaaactaagcctttctccattcttccagccattcagttcttttccctagatgtaaccaaagttactagtttttggtttgtcatttcagagacattttatatatttgtaagtacattatatatatttacaaaagccagaaatacagtgtaatacacagtcctgaaacttgctttttaactaacagtgtgtcatgtagatcattccatgtgagtccaagagctccctgattctgcagcttcgtagtattctactgtagagatggcccatagtcactatacatttatgtcgtttcttgtctgtagtaaacgctgcagtgattatcctgttcatatatattttacttcttttatgcaggtatatccataggatacattcctgagagttaaatcattgggtcaaaggagatatgcacttgtaattttcacagataattccaaactactctccaaaaagattgtactgtatcaatttatgcttccaccagcaatataggagagagcgtgtttctgcatactctgcaaagtatttgatctttactatgctgaaaagtgaaaaatggtatccagtagttttgttttattttgagcaagattttgcatctttacatatattgaggagtcattcatcttgcttttaaaaatgagatatttatacctttttctggttttgtcaatgactttcttagtttgaagattaaaaataatattaaggttgcagtgagctgagctcacgccactgcattccagcctgagtgacagagcaagactccatctcaaaaaaaaaaaaaaagaaagaaaaaaaaaagaaattagctctttttatgatattagttgcaaatactttgttttctaatttaggaccccattaaaagacaactacaattgcctaaaacatagtagctgcactttcactatctatttgttgagcaaaaatgcataatgattaaaaaaaattgtgaattcttttttttttttttttttgagacagagtcttgctctgtcacccaggctggagtgcagtggcacgatctcagctcactgcaa

SEQ ID NO: 25672 - DNA, 1062 bp, Homo sapiens
tctctcactgcctctctctctctctctttcacacacacactcacacacacacacacacacacacacacacacacacatttcagaggttgtagacatgagcataggcctttgtgctccctccctgacgcagaaggcgatggctctgctccgagtgaagtctgtggaggctacatggtcccaagcaattttatgatctgaattcactttcagagttggaggttcccccactcactggcagcttcctgagggtctgcagttttcccctcgctaggaattcctgaaccttcagccagtcacacccttggaagccaaaagggagagagttgtttgggagtgagggttgggtggagagagggattcaaacaaggctgactttctttcattccacatttattaaatgcctgttatgtttcaggctttagtgggagagtaggatagagttgctaccttaaagaatgtatagtttgttaaagagatggacaagttaatcaacaattgccacaatcatgtgataaagtatcagatagaaaagctataggaagctatagaaggataaaggaggaacccactctgaaagggaagtcaaggaaggcttcctggaggaggtgacatgcacattgcattttaaagctagtgtaggagtttgtaaaagaaagaaagggaggtggagagagcattctaggtgagggagaagcatgagcatgagctgtttcaggcttgaaacagcctggcactgggagcagccgaagttggccagaggcggggcttgggggtgggggtacaagtgtgactggtggactgtggagcagcaggcagggcccaggtcctggtaggtctgctgggctaggcaaggtgggaggacttgtcctaaagacaacagccctccaccaaagtattgaagcaggggagtgacaggccagagtggtgtttctgtaccacgtgtgggaacaaggctgggagggcaagagtggtgcagggagacctgtgttcacttgtgctttacggcttgccactggcacatcccatgggctttgaatgagtcaatctgtgcagggatgctca

SEQ ID NO: 25673 - DNA, 1059 bp, Homo sapiens
gcttattccaccagttctactgtgacatactcgagtataaagacatgtagcaataacggggagtggggggggagtctcacagtgcctttggaagggcccgaacttgccttaaatcttcctcaaccaaataagtattttattagtgcttgagagaatctgaatgtaggatgggttcaactgcacaaaaggaaaagatttttaccactttttttatatagatataaagtgaagcaaccgccttagtgctgaaatatgtagtacatgaatatgccttgtttaattacagaaaattccaaaacttgtactatttttttttccatgtagaaaggcaggaatgtctcctaagctttcctggacagcagatgaatgagcggtagctttagtttgtacgtaggtacagttggagcactatatgtactctctggactactttggacagaagtaggtttttgaatgtaacaagataagtcaacttgagttgtaatatattttggggaatcagctcactacaaattgtgactgtaaacattgtactgtaaatgttttgtagttttcccccaataaaatttttgggaaaaaaaggtattaacatgtaagagctttctttttaaacaggaatgtcttagctttctagcttcccagctaaccatgtctgccattccccaggtcttggcatggtgggggaggacttggagagctggcagagccagagttcagaagagcctgcgtcctctcagcccgtatatattttataagcaagttcttctaatgaaagaaagtaattatttggactgtcaagggcattagttagctagttgttccctttggtaataagatgcatcccagagttagctggctgggagcagagcctggccgggaggcctgaaggggtgtggcctgcctgtgagtcactgagtggatcatgtggctgcggtagcagctgagggtccgattttttgctgggaaacacaactgcttgggtggggaaggggaggaggatctttctgcagccggtggcctgccaggcctgagtgctgagctggaggtggagagtgaggc

SEQ ID NO: 25674 - DNA, 1041 bp, Homo sapiens
tgaaatagttttcaaggttggcacctggaagacatccactttgacatctttctttcattcagtagttgaaagcaacctcaaagtctgtgacttacctgtctacctgcctagaaattaataatcacttcccctagtggggggaatcagaggctgagatttgtagtggaggcaacacactgtgtgaggcctgggtcttcacctccagccctgttggggggcgggggatgggggtggaggcgctcatcgtggaggcagagaagaagcaccagggagtatcagcacataacagggtttctgatagctaggcatctgccttggatggggagccctgatgtggctggggcagtagcaagatgaaggctatactgcagcagccctgaaggctctggtttgcttccctcctctgcagtcccagtgagttatcccttcacaaggatggaaggcaccagattaaccaattctaaatgctgatccatcacatttccaacatgattccaaatgaccacatgttaatcccacttgtgtaggcctaccacagacatgaatgtgtaccagctaaccccacccatttgaagcactccaggaagattctagggcatatttcttcttgccctagcagtgtagccggtgggaggaagagcctcggagatcatttattccccacattgacgtcttcctcccaccaacccccagctcccacagctcttggcatgtgaaccactccactgagcacctgatgtccctgctgttgcctgggtgtttgtcttaccttcccacctagacctcctgcttcttcattcccttttgtggctgattactattccattgtatgaatttataacagcattttatttatccatttattagctgatggacatttgggttatttccacatcttggctcttatgaacaaggctgctatgaacatttatgtacaagtttttgtgtggatgtgtcttttttctctctcttagatacactcctaggagtgcagtttttgggtcataggtttaatcttttgaggagaactgcaagactgtt

SEQ ID NO: 25675 - DNA, 1024 bp, Homo sapiens
aaaagcttttgatgataggagtattgatggcagagattaaccaaagacagagcaaaccactttgggatgtttaggaaacagatcattaaaaattcactgtagagtgtgtcagaggtagtctttgctgacatggctatttcagggcagttggccacctgggaagcataatcaaaaggaaagggcactggcctaaaatcagggcatctggctcccatcccaagtcactagaggccctctggttagtcattgcatcactctgcctcagtctcccaaaggtattatgggggaaataagaagtcagtgggagccttttgaaaggtagacctcttgttgatacaattgattatcatgtaacatctagagacatctccctgagtatttatttctcttttttgtgtgcggatttggcttacacagatactgaaaattctccactgcatggaccctggtgagtggcttccccagacggagcactgtgtccatctgaccccaaaggagttcttgatctggacgatggatattgcttccaatgaaaggtttgcccccaaaacctcctgtgcaaccttggtaagatgtatggtcccatcagtcattatgtaatgaacttgcacacaatcctgccctcaggtctcaggtcctgtatttcattctaaacctcagcctaagagttctaaactcaagcaatagaatgatgtcagtgatttgcattaataaccaaaaggtaattgcttccggaggcatttttgtaaccaggaggtagagattttcagtattcacctctgcatggattacagactatctgcaaaaaccggtgtatgaaatatgtctgattgtaattttgtgttgtttttttgtttgtttatttttctagatctgaaattcagagtgtagctctgagacttgcttccaaagtcatttcccaccacatgcagacatgtgtggaggtaaggctggttctgatcttgttccgggacctaggattttttgttctcatttactcagaagatgtcagtaaaagtgaaca

SEQ ID NO: 25676 - DNA, 1031 bp, Homo sapiens
attgctactgtatagagctacaattgatatttgtatattgatcttttatcctgcaacattactgaacaaacttattagctctaataggttctattgtggactccttttttcttgactaattgctctggctagaacctccaatacagtgttgaatagaagtggcaagagcagacatcttgtctcattcctgatcctaggggatcttaaagcattcactcttttaccattaagtatgatgttagctgtgggttttttatagatgccttttgtcaggttggagaagtttttttccatttctagtttgttgagtgcttttaccacaaaagaatgttgaattttggcaaatgaccttgctgtgcctgttgagatgatattgtaattttatccttcattctgtcaatatggtgtgagttgtgacattttattgctgagtagtattccattgtgtgtatggcttgtttatactaatttactagttgatggtcattagggtcgtttccactttttggagatcgtgaataatgctgctctgaacattcacatagaagtgttcggtcatatgttttcatttctcttgggtaaaaacctaggaaaggggttactggatcatatgataaggattgtttaatgttacaagaaactaccaaaatgtttaccactttgcattcccaccttgcattcatgagaagcatggctgataatgttgagcatcttttcatgtgtcatgtttgactatgtatgtcttttttggtaaagtgcctattcacatcttttatacattgctttttaaattcgagttgtttgtcttactgggttgtaagagttttttctaaatacaagccctttatacaggtaaatgttttgcacagtttttacctggctgtggcttgccttttcattttcttaacattgtcttttgaagagcagacatttttaattttgataaggtcaaatttatccatttttttgtgtgttttagactttttatgccctagtgaagaaatccttgcctattccaaggtcacaaagat

SEQ ID NO: 25677 - DNA, 1024 bp, Homo sapiens
ccatgctcttccactttcccatgaggctggattcttagcactaatctagccttcctgcctccaccatcagatgaggcatccactgggatgaggagtacggcgtgattcagctctccgttccactccagacacagaagtcggcactacgatagctcacaaaacccaagggaatgtgtcctaaaggagtgaatataggaagaagcaccaaacaccaacatcgtttttatttggcaaatgcttgttgaattcctacagtgcatcagacttgttggagggggaggtcaagcatacaaacaaaagtgatgacgatgctgccatgcaggttgtaaatcatgaccaggcagagtcaggaaagctattgatttttcatgtctccatgactagaatgtaagctacaggaaagcaaggaactatctggtctctgctgcagccccttggacagtgcctggtaataagagttgtttaataaatatttgttgacaatgtttgccaatttaggacacataaaatgacactgaacttctgagttctcatgtgtgttggcagttaatcatcctccttggttctggcagctttggtttctctgtgcttggttcagtacaggcctgggtctgactgctttcttagcctcagaattctttgggaccagaactttaggaaagtgaggaagaaagagttgccttgctacttgccatcctttaagagctggtggacaaattgcccttcttgggagctgccggagctcctgagtctgaccttgatcaaatcttagtttcaaagggcctggccttatacctggacctcatgccaaaggatggtctcatttttcttgaacccaacacactaaatgtctatgaggttagttgtgtattcaaatatttttattttcttaaagaaaaatatctcaaaaacactaacctgtttcatacaattgcttataaaactttctttcctttctctttcccctgtcttctcttctccctctccttccctgccccatttttttccatgacttctctgaccc

SEQ ID NO: 25678 - DNA, 1032 bp, Homo sapiens
ctcagagtatcagtcaggggcaagtgaaacttagagatttgccatttgatgtgtcctcaggtgtttgtaactgttcaggatcagagtaggggaattaatagcaaaaagaggaaaaatatatatttttttcagtgagagatagagtgtgtgtgtatgtgatgtatgtgtgtgagtgtgatgtaccagtcactgagttcctacagagcctcttctggaggataggtgttattcccatcctactggtgagaaaactgaaaacaagaggggttgtgcgatttcactaaagttatgcaagattaaatggtaaaaagcaaaactgagattcaagcccaggatcgtttgaagcttttgagcttgtgcagttagccactgtagtatactgcttctctggatgaggaaaaggaatattgtcaggggagaaggattctatctggggccttcgggttgtgggtaaaatgggatttgatgtcatctatttattcattcgacaactgctaattgaacaccagctacgtgccaggcactgttctgggtgcttggactatatcagagaacagaagagacacatccttgccctccaagattactgctctcagtgtacttatattccagcagcagggagacagtaagaaatgttcaagaaataaacattcaataaaacatatcagaacttattatagtaaatataataggtaaattagatagtttgttagaaggtaatcgttgctgcggacaaaggaacaagtagagtaggctaaggggaatcaggaatagataggagaggagggcagttggcatgtcagaatagtcgtcattggaaacgtttgagcaaaattctatcacaagacatgggaaaactttcttattttttgaataaaggtaaagggtagacatattttcttctgaaactgtgctggctgcagacatttgtaagcaggtataccaactgcatgtttgagactatctttacccataggaaagtgccaacagagtgggcagtagtggataaacaaggccaggaaggatgccatt

SEQ ID NO: 25679 - DNA, 1043 bp, Homo sapiens
aatattaggaatataggaaaaggctgtgttgtgtgcatgtgattgggttgtagagctcaattgaagtcattgaatcgatgactgtcaagttttttttttaaattattttatgaacacaaatctgtctttttagcctcacactagccagttaggtaatgattttgaattatctagtttgaacattgtaaacgttggtttcatgccaagaatatttaagccttattgtgttttcgtttgtacattaggtgcgaaattcatccacacttctctttagtgccttgatcacaagaatttttggagttaaaagggcaaaggatgaacattccaaaacaaataggtaagctccatttaaggctaactttactttttttaaaaaatacaatattgtcctggccaaaaacaaattttgaaattgtgcctactgttatagattcatctagagcataaaactataaaaatactgtaatgaattaacctatgctgccaagttataaacccttgggcaaaaatatcaactgtttaataagtggacctttcaaagcaacaaaaatttagcaaggtagcaaggggtgaaatgtagagcttgtttctccatgcaaaagctagtgttttttttgtttttttttttttaattgcatcttctttaagtagtcctgaaatgtcttaactttacttgtatatattatcctagcttgtataatatctttaattttataggtggaagtttaaatgtttatgatcctctcattagaacatctctcacattacctttgcattaaactcttgtactaagaggagcacctatatgtgttaaccacaagaaataaacagtgctttttacttttggtctttagttttatgtttaacctctaatttgtttttgtctttaaaaaacagcttttttgttatgcctgaaaagaaacctgtggaaccattttgattttgggtagtttttagataaaaatgcacaagatctgtttgtttttaaagaagaaaagctttgaatagttgttttttagcacttaagaggatttaatggtaat

SEQ ID NO: 25680 - DNA, 1050 bp, Homo sapiens
taaaggaagatgcaaaactatctctattttctgatgacatgatcttaaatatagaaaaatcctaaggaatccacacacatgcaaattaaagcttgtctattagcaaggtttcaggacaaaaggtcatcatacagaaattgtacactagcagtgaaaaatctaaatgaaattaagaaaacagtttcatttatgatagcatcaaaaagaataaaatacttaggaataaatttagcaaaggaactgcaagagttgttcactgaaaattatcaaacattttttgaagaaattataggcctaaataaatggaaagatctcctgtgttcatcactggaagacttaactattgttaagatgacgtattccccaaattaattaatctatagattcagcacaacctctgttaaatcccttctagcttttttttttttttttttttgcagatcttaaaatacatatggaaatgtgagggacccataatagccaaaacaatcttgaaaaagaacaaagttggaggccccacaggtcccaatttcaaaacttaatgcaaagcaacagtaaattagagcttgtggcattgacataaggttaggcacataaatcagcagattaggattgattgtacagaaataaacccccacatttaataaaggtgccaagacaattcagtagagaaagaatagccttcaacaaatggtacggggacaactggatatccacatgcaaaagaatgaatgtgatccccatctcataccatattcagatgactcaaaatgtcttaaaaacctaaatgtaaaagctaaaactataaaacttgtagaagaggacctgggtaaatttttgtaccttggattagataacatttagttagatatgacacctaaggtacaagcaatacaaaaattgataaattagactgggaatgaaaaaaactgataaattagactcgatcaaaattaaaaatgtctggctgggcatagtgacatgcacctgtagtcccagctactcggaaggctgcagctggaggattgtttgagcccaggaattcaaggc

SEQ ID NO: 25681 - DNA, 1035 bp, Homo sapiens
cgactagattttcagctttaaccattttaggttcaatagctgaagtttttcatgtcccagaaggtaagtgtttaataatgttaggggaagtaatttttgttttctttcaaaacatacttattctacattttgctttatttgaagtttcagttttgttgcctttctttgaggtttcattcttaccttataattcttgcttgtacataatgaaatttgctagtaaaggacagaagaggaagaaactatctcccttttcattgatcattatttgccaaccccaaagtataattttcatggattatgcttattatggaaagagttccagctattacctcactaatttgtttgttgctgttttaagatagtatccaatctgttctttaagttttaaaatttgaaataataatagcttctattatatttaatatttctcagtgagtctctgtggttaaaatgtggtttcctttacatgccgtctgtttcatgtgcctcagtctggtttcggaaagacaatatgaggatgtaatttccaagtattctgatttaataataccctttgtttttccttctgtgtggttctcaagagggtcaaatttcagttccctctttgaatcttttttttttgtttcattttttcctttttgacaagaaatgattcctttttttttattttgagacagagtctagctctgttgcccaggctggagtgtggtggcgtgatctcggctcactgcaacctccgcctgctgggttcaagcgattctcctgcctcagcctcccgagtagctgggacttcaggcgcatgccgctacacctggctaattttttgtatttttagtagagatggggtttcaccatgttaagtcaggatggtctcgatctcctgacctcgtgatctgcccgcctcggcctcccaaagtggtgagattacaggcgtgagccaccgtgtcctgctgaaatgattcttttttccctgtatatgtgtgtatatgtgttagaatgtgggatttcttgcttgtgctgtcttcgttgact

SEQ ID NO: 25682 - DNA, 1057 bp, Homo sapiens
tgggacccctagcatataatattcaaattctttatatttttccttatgttttggatgtaaaacaattttcttaaaattctgtcttcagactatgttccacctattgctatggtttataattaaaaaattttgtagaatgcacaacaaaggcaaagttaactcactgttaaatcattgaaaatttttttttgtatatgttatatagcttttgctgatgtggaagggaaaaatctagcttctttgctgttacattgtgtgcaactcacggatggagtgtcacaaatccattatattaaacaggtaagtctgaattgatattcatggatgcatctttaagagtatcatgctattaaggatttaaaaaaaatcactgacagtttttggtccctaattattgcatatcagtttatcattagcaaataagtatttttttttttctgtttattgtataatatccttgtattcaaagcagcaatagaagccatattcagacttctatcataattgaactgtaaacagataaggtagaagataatgtgcatacctcttttgtggagataaattttaaaatatatgaatcttcaaaactttttagcagacacatttaaaagttaatttaaaatataaagattatacttattagtatttcagtattaggatttaccatttgagcacacatagtttttttttttggaaagcaagtaaatgtattactggttttttaatagtgctacagctgttctttactgtaagccattaacaggtctgtgattctctgtggaggtgggtctggagggtaaagagggaggtggggacatgagtttaaaaagttaataaatagtgaaataggtgtttaaatcagtatccttgacagtggagtatggaaaacatttcacgtaattgacactttgttttatttatttttttgagatagggtctcactctcttacccaggctggagtgcactggtgtgatcttggctcaaccacagcctcaacctcctgggctcaagcaatcctcctgcctcagccccctgagtagctgggactacaggcat

SEQ ID NO: 25683 - DNA, 1016 bp, Homo sapiens
agcaatgtgtttcctctcattgtagtttcaggactttgtcagtacaagctctgccctaggcttgttactttatactcatatcctgaaaagatgtgatttcatctatgaaggggtaaaatattggtttgtatttaattgtttgaaataaaagtgatccctatattgaatctcatgcctgttaatatctacactgtaagtagtgacttcaaaaaaattctaagataggtagtcaggagagtttgccattataaaaggtgtcttaataatatggaatattgacctaactggagatgaggtaattaattaccgaaatgttgaaaatgttttgagaactctccccattttggggtattccttgttcatttgaatttggtgactccctactgttccagtttcagtgccaacttgggtcacactgttcacatcaggggagaccttgccttggggacgtaggcgggcctcttgcaacttgtgctgttgaccttctgtcttgtggaactctctctcctgcatctgctacctgcccgcagatggtgtgagggagggttgatggcgggaagccaggaagtagatgtcatcatggtattggccaggcttttacttcaactctttttgtggcgttagatttaaggaagcagggggcatggccaacgttgagtcttggcccagtggacatagtgcggctttcccttgagcactgcccagatgcaggacctgcacatgttacaggtttgccaaaagcatctttttttttttttttttttttgagatagtcttgctctgttgcttaagccagagtgcagtggcgcaatctcagctcactgcaacctccgcctcctgggttcaagtgattcttgtgcctcagcctcccacgtagctgagattacaggcttgcaccaccatgttcagctaatttttgtatggtaaagacggagtttcaccatgttggccaggttggtctcgaactcctggccccaagtgatcctccccctgcgctcgcttcagcctcccaaagt

SEQ ID NO: 25684 - DNA, 1061 bp, Homo sapiens
ggctttcaaattgatatggagccacaaattaattctaatttgtgcagttactttatttacactgtaaaaggggtgggtgggtatgtaatagaaccaagtccttttgaaaaaattttttaaaaaaaaatttctgtgggtacatagtaggtatatcacattctactttgatgtttaactgtaagtataaaattaaatttctcttagatcggattttacctcttgtatacgagaaactacattcttagtttatttgggttctttatgaagtttcaaaccacatgccaactgtgatgcttgttttatttgaaacatttaggctgtgtccagtttgggaggtctacgttttcctgaatttctacacccttcccctagatatacctacacttttaaaaaatttgcttcattgcatctgtgactcatgtatttatttactaccaacaacttttagaaaatatttaattgccccttctttcctttcagagaggctgtgtttttatacgtgtgattaaaaagtataaggaatctgaaaagcacttgtcagtccacctgtgggactgtgccaagtccctgttgccttgtccaggagatgggacgggaaatgcacggcaatatgtctgcttagaacatcccacccaggacagtttaaaatagaagaagccctgggaggatgcaggtccaggtgtggattgactgaataaacatgctatagaaaggagttaggatttttaagatgcctgttaacagtgttccattgcttgacagtagaatagttaagccagattttgctcctcttggtgagatgggaagagggcatagatgtttatatatccatcatgggtttatccagtaacgttggagtagggcgggaaatactcagcagatattcattacggcatagcagttctgtattcactcgctacaggaaataaagccatagccgagtctgcatattcctggaagaaataagtaaaaatttcagtgagattctggaaatgctcttttttgtatgtcaagtgtgtaacacttcagaatgttttaactgaattctttacaatttcatc

SEQ ID NO: 25685 - DNA, 1070 bp, Homo sapiens
acagtattcatttttagttagagaattatgtttaatataataatttcaacacaatattgactgattggatttagtatgccatatggtaacagtaaagtatccattatagattaccttaaccaaaaagatagtcatagagataatttttaccataacttgctaaataagaccatgtaactgatttttttcaatgtaaagtgtgaagatactttttcctgagatttttagtataaactgagtattttccaaatgtataatacctgacaaaaagaaattgaggcgaccataagttagagacatgcatatatgccttttgaaacatcatcagtatctttaagaatcctgagatgttaaatactatttttatgcagtagtgacaagttgtggatcataaagccaaaattgtagcatttatacaagttttcattttatatccaaagagtggcaaaaattaagttaaatatttaagatacagaattttaaaagttatcttcattaattctcctgtatatagttgtttgatcttgtctgtagagcattgttaaaacaagcaactatttgaactgctgtgaagcaaaataaacaaccactgcagcacgaaccagctagtgaatgtttttgctacttaaatgtgattcagggtttcagttgcctagtgtttatttggttaagtgtaaatgtatttcatttttttcctaaagtattagcatgagtggatataaaagtaagttcttagactaaactgcctgtaatattaacataaaagcaaatttttaagtaatttattttgcttttaacagtaataacatagatgccgcaatagaaaacattgaaaatatgcttacttcagagaataaagtcattgaaccccaatacttcggcttggcatacttattcagaaaagtaatagaggagcagttggaaccagcagttgaaaagagtaagttagttgtttgtgctaaagaacacacaagcacattttctctctagtgagactagaccaaatttctttggtaggtgagttataccactgttctaatgaaagatttttcttacctgtcatttttcca

SEQ ID NO: 25686 - DNA, 1025 bp, Homo sapiens
gctgtggcaggaggattgcttgagtccaggagttcaagaccagcctgggcagtgtagcgagaccttgtctctacaaaaaatttttaaatagccaggcatggtaatgtgcacctgtagttctagctactcaggaggcagaggtgggagaattgcttaagcccaggaggttgaggctgccatgagccatgatggtgccactgcactcagcctgggcaagaacaaaacccttctcccggcccccccaaaaaagactttatgtcctattagtattttatgtaataaaatgataaacaattttaaaacaatgaaaagttaaacttgctcgccatataaataagctcattgtcataaatagcttttgtttctgtagacatggagataagaacaaaacacttttctaatttcagggggttcatttttcagctgaacctgacccagatttcttcagctggattggtaccctttatttttatgttaggtgccctgtgtaagctacaggaaaggacatggtataatttctcatctactcttctgagctgttcagctcaattggaggttgcctgagagcaggagcctcgagcgcactgttcctgcactacctcccccacccccaccccacccccctccctgagcacatcaccacaaacctgttgttagagtaaaatgatcatcagtgaggacaggagtagtgtttgcactattcccatcttcttattttgctccatggctgatgagagctcttgatttttaaaaattcccttccgttgttctgcctttcttttaggtttccttttctcaaccccatctaaagcagaaagaaaaaataaagccgattaaattttactgttggtgaatattaatagctgatacgtggcacttgtacagtgtaattagtatcactagtgagtaattgagtaaatgttggaattaggtgacagtgggaaaggacctggggggagggatgtggatgggtaacatttttggtgtccctgaagtcattaactgtacagaaggcaagccttata

SEQ ID NO: 25687 - DNA, 1050 bp, Homo sapiens
ttttttttgtctgttttctctcataggggcatatgatattttcctgaatgcaaaagagcaaaacattgtgtttaatgctgaaacctacagcaatctcattaaattactgatgtcagaagattattttacacaagcaatggaagtgaaagcattgtaagtgttagtccatttattaaacctcttgtttaaaaaagaatattggctgccattagccaataattataatagtaatgtgctgtgtagtaaaattgcttgattggcctcagctacccataaaaatcatatgaaatggttaactaactttatcaggttttttcaccttcaaaaaaaaacacctttactggccatatacagtgcagtacattttgcttactaagttatattccatcacaattcatttaagatatccatgcacagaaaagtaattttattatattctgttccttgttcaacatctaaatccatgtaccttttgtggtgggagcagcctgagaaaacaaagacaccatggactttgaacttagaccaagatttgaatcttacttaaaagttctgtgaccttgggaaaattacctgctatctctgatccttagttcttcttccgtatgatgagtgtatgataatattacttaatattaaagatttcttctatgtgttgaagaaggtagagtgaagtagagaaaacataggtactgaacacatcttatttgtgtttccccctcctttcgtgttgtttttggattaaaaaaaagaaatctgactgggcgcggtggctcatgcccgtaatcccacaagtttgggaggctgaggtgggtggatcacctgaggtcaggagttcaagaccagcctggccaacatggtgaaaccctgtctctactaaaaatacaaacattagctgggcgtggtggcatgtgcctgtaatcccagctactcaaaaggctgaggcaggagtatcacttgaacccaggaggtggaggttgcgttgagctgagattgcgcaactgcactccagcctgggtgacaaagcgagaccctgtctcaaaaaaaaaa

SEQ ID NO: 25688 - DNA, 1106 bp, Homo sapiens
atataaaactgctttcattttctatggactcaatataacatgatctgttacaaaattttgtcctaattcaaacttcatttctatccttcccaatatattgtgacctttcattgtgacagtgttgcaaaattagcttctagaacctataacaaacattaattacatgaatgaaatgacttcctcacttgcttaaggaattttctattatttctatatgacaaacattttcttatgttctgaacacttctttacagatagaaagtagaaattagtttctttgtatagtagtctatccaagagtcaaactgccttacatttgtaattttgcaatacaattctttgaatctatttaaaaagtatgtataacctcagcatttattccgtctcagtaatgattcatatattatttcttcaagtatgtatagccatttacatttcttttcatattgtatggctttttcctcctccattattacacaagtgaaatggacatattctgattactaaagattcaaacaatgtaatactatactagctaactatgaaaatgtcattgtgtccaccaccaccccctaaccgcttatctcagacgtaactttgtgaattggccatcctttccatgtcttctctgtacattgccctctctctacctttatatccatgtattttttatgtatgtacctattattttgattcttttatatcctgttttgattgttttatactttacttgtttcacattctacatttctacattgtggcttctttttgttttacttaacaatatgaaataaattcacaagaaaaatacttgctttttctcccttttaatacgaatcttaactgctggtatccttaaaacctctgaagttgatgaatgacttttttaaaaaatgaatttatgggttcttaacatgtatttgtgttttattttagtccttatttgttttagtgttcacatctcgcccaggctggagtgcagtggcccgatctcagctcactgtaacctccacctcccaagttcaagcgattctcctgcctcagccaccccagtagttgggattataggcatgcaccaccacacctggctaatttttgtattttta

SEQ ID NO: 25689 - DNA, 2044 bp, Homo sapiens
atagaaatgtgtacaagacatttatttattcttattacgtgtgatttggacaggaaaggggtaaggccttgggcaggaccacttctgtcacagagtggtggaaaaaaaatagattgaagtaagattcagtactgaaaagctgtcactcggtctgaaaataattaatattcctttcactcaccagttagatatgtgctcccaaaccacataatctctatgcctcagtgatcattgttgccatttcagagcctctcatcagggtgacatctcacaccaaaatgatttcttataaattaatcttgataacatgacagtctcggtaattttagtggaatgctttctcttgtttttttccacagaagctgttggctattttctttataacttgattgacagcatgagtgactcagaggtacaggccaaggaggagcatttgagacaatacttccatcagctggagaagatggtaccatttcgttttttgctatataatgcctgtcctgcctgacatgtatctattagatttgaaattgctgcttttaagtacaaccagaccacttctcaatgacatgcaagagttggagacttaaattatgtctgagataatttctgttagacaaatttcagtttggttgtctaaaactcaggttttttcccccctcccttcccttctcacagaatgtaaaaattcctgaaaatatctacagaggcattcgtaatctcctggaaagctaccatgttcctgaattgattaaggtgtgtgtgaaatagcaatcaactggataaaatgcttaacttacatataacagcatgttaaaattttatttaaatatgatgcttttggtcagaaaaaaaatttgtttcaatgacagccattaaaacgaagcttttcattgattgttcataaatactatttatatattcataaatatatttataacgttaattacattgattaataaagtatgaagagaatgtctaaaattttggaaagatgaaaagtagtaatatgaggtgagacttacaaatttgcttttgatgtttgctgatgtatttttacgtgtgttttctaattctgggctaatttaaatttcaattttaggatgctcacttgttggttgagagtaagaatttagactttcaaaaagtaagtaggattttgactagattctacatgctataatacccatatttaatgagtattctggattgtgtacttataaaaccagtgattcctcacatttttatcatcttgtatacctctaagaagttggtaaaacctgttccccacctcagaaaaatcaacatatctaagaaatttgcatataatctcagaaggtttgtaaatccctggagtccatccatggattccccaattaatatccctgatagcatttatgacatttaggaaggtagaaaggaaagtcagtttaaagggaagagtgacaaaaggcatactatatttcctttttcaggaaatttttcttttcttttttcttttctgtagactgtgcaacttacatcatctgaattggagtccacacttgaaacactaaaagctgaaaatcaacctataagagatgtcctaaagcaactcatattagtgctttgttcagaagaggtaacatttgttttaatatttaaatattattaaggcaaaaaattcttggtaacaataagaaaaaccaaatataatatttatgatttttacaattgatcgttatatgtcaggcttgtaaagaatgcaattaaatgaaaggttaactaatttcagctacaccttgaatggcatgttttctggttgctgtagtttgtttacgataatctgcaaagtgaatgatagtaacagctgtgataggtttatcatacatgccaaatgtcctttcaagccatggctccggtctcttatatctagattgtcaagcaactgatacacgcagtagtcatttgcaagtcaaatattactaggttgttaatgcagggattgaaattccattttcctgctggaaaaaagctctttctgagataaagggtcccttgcctt

SEQ ID NO: 25690 - DNA, 1026 bp, Homo sapiens
taggctccttgttcaaggaatatagcagctgatctaaaacaattctccttatgtgtgtgggttaatttgttatttttggggagatgaacacttaaaatgggccatgacttttcccatgggatttttctttaatgaaaccaggtaccttaaccttcacttaaactgtatttattgtcttcagaatttgcttctactatgaattcctctctaatcccatcctttttgtattattcagtagccacattacatttatagtgaaaagattaactctattacttataacatggtcccattttagtacaattacagggaaaaacaaattcagggaatgcctactgtgatctcatcccttgctagtttggcaagggttatgtgaagagtcagtgtaaggtgtgattcttacacaatggcaaatcaggcttataatgtcagcattgaaacatacaaggttgtagactgttaaatgtcaaaatgagtagtagagcaaacaaatactcagaaaagtgaaagatcaatataagtcaattacataacggacgtatgacctattttattattactttaggtggttactcttgtgtgagtgcaggtcattgatcatagtggaaaatgaaatgagaaagtatgaatggttcaacagaacccaacacctctccgagaaaagaatttttcctctcatgtgctgtctttaaagaacaaaagtcttgtagggtattacagtctctctcttcatggtgccaccatgtccaacaacatacagcctcagtgtgtgtaccaggctgactctgattctgctggtatgttagtaattgccatttataggaaaggatatttataaattaattagttgtatatattcatgaaaattaaaaatacgttaaaagggtagcttatattgcagatatatattactgcattgtctaattttgtatgaaaacatttttattttttaaatacaatttccaaaatgaaaactaaaaggtattggtataaatatgttttcaatttgataatacagggttttta

SEQ ID NO: 25691 - DNA, 1023 bp, Homo sapiens
aagtggggagctttattatcatcattcctatattggcaacaaggagccactgaaaatcatcctttttggtggcagaacaaggacttaatcccagttctttctgattgcaggaaaaacatgtaggctttagcattttttgtagtgtaacaagcacctgccaggaattaagagacttggtttctttttttttttttttgagatggagtctcgctctgtcgcccaggctggagtgcagtggtgatgtcggctcactgcaagctctgcctcctgggttcacgccattctcctgcctcagcctcccaagtagctgggactacaggcgcccgccaccacgcccggctaatcttttgtatttttagtagagacggggtttcaccgtgttagccagaatggtctcgatctcctgaccttgtgatccacccgcctcggcctcccaaagtgctgggattacaggcgtgagcctctgcgcccggactgagacttggtttcttactcaagttatgcttgtgatcttggagaaattactttatacttttgttagaagattcattgactttctttaccccacttttaaaaattgacacaaactatatatattcaaggtgtacaatataatgattttatatacaggtacattgtgtcctgattaccatagtcaagttaattaacaaccataaaccttcaacacccatagttaaccatttgtgtgtatgcctgtgtgcatgagtgtggtgaggacacttagaatctgttcttttaccaatttcaagtcaacaatacagtattactaatagtagccaccatgctgtacattagaaccctagaacttactcatcttattaacagaaagttcgtgccctttgaccaatatctccctcaccctagtccctggcaactgctgtcctactttctgcttctgtgagttttcgactgttttttattctaatgtaagtgagacagtattgtctttctgtgtctagcttatttcacttgattagttgacttctaaaggcatttcagctt

SEQ ID NO: 25692 - DNA, 1026 bp, Homo sapiens
aaactcctgacctcacgtgatcacccgccacagcctcccaaaatgctgggattataggcgtgagccaccactcttggcggaacttacttttcaaagaggaagcagttgcctcctaataaagtgagtgccgtggctagagtgtaaaatcctgtggaatgaaacagtcatagttggtgaaagttgttcaggcaaatcatatatcattcctgatagttggtgagctgttataattctcattaaactttttaaatggagactttcctctagattgatcaactttctcatggctatattgaaatatttttattagattatttagtcttagtttagactttctgtgttcacagaggtttggaatctatttatatctaagttaatgtaagattattttaatctttttcttgtgaaaagaaatgtgaattgtattttttattagaatttgttcagatagatcagtctttccttcttattggtaagtgcttctatccccccatctgactatagttactgaacagaatatctttctttgtctgctctctcaggctgcctgagcgagtgattgagcagaaggtgggatcccaggttttcttgagcctgctttagtttcagttagaaagataatgtaagttaaaaatgccagcaaaatagataatgtaaatgagcagaacatactcctccttctgataaatgttactggaaaaatgaagaactaagagaatgaaacatatttgaggcttagaagatggggtgaagggtttcctgtaagaataagaatcttgtagctgcagtcaatttggtggccagttttcaaacactgaaaaatctatcatctgagaaacttttcaggattatgtattattacagtattttgatacagctgaaaaaaattaagttattattgctcctattaacatttatttaggctgggtgtggtggcttacacctgtaatcccaacactttgggaggctgaagtaggggcattagttgagcccaggattttgagactagccttgggaagttggcaa

SEQ ID NO: 25693 - DNA, 1057 bp, Homo sapiens
tatgaatacggtattctgtccacttttactttgtagacaatgtaattggcagtgaaataagattctttaaagtataggaacatttataagattagaccagttgtaaacatcataacaatgttcttgtgttgcaagatttttgggtagaaagaggatgcggggtttaaaatgctcatctcagaagtggtagaatatttgcagcaggtcaaacggtggggtgtttgccaatccagctaatgtggtgacttttttcccacagcctgtggagaagctaacagactactgtaagaagttaaaggaagtccagatgcactcctttcctctgcagttcaccctccattgtgctttactcgccaataaaactggtactacattcttaaagttaaagccaagtaaggaagttttgctgaggtagctttgtgatcttttatgatatctctttcagatttggcaaaagccttaatgaaggctgtgaaggaggaaggttttcctatcagacctcactatttctggccattgctagttggacgtcggaaggaaaaaaatgttcaaggttagattttgccttttaccgatttgtaatggttcccagagccagtatgacagtttgcacgcacatctaattggattctttggaaaagcatacttattcctgagtattatgagataatggaattgttttaagtcatcatgaagtattatgtgtaagcattttaaaaaacaaaacatgatggatttctttcatctgaatttcattaatttcatttcttatttcatctctgatcttgatattcaaacttaatgaacgtagtttttttaagttcttaaaaaaactctttagttcttgattttatatatagtgtttgaaatcagattgtctacctttaataaagataaagttgtatatacaattaggttcatgaaaacaaaaagtatggtcattttctttgtgggccaatctatttctttttaactgagcttagttagaataataggaaaggcaggaaaacttttattgtgaaatgagtactcatgacctgacagcctgctgattgaa

SEQ ID NO: 25694 - DNA, 1034 bp, Homo sapiens
ataatttcatttttatctaaaagaatcttatgaaactatgcttttaaaagggtaattagtagtgtaagacaaatcagataatcagatttttaaaaatctagtatttgtatcgatagtacttcaagactgttgatacattagagagtggggttttgtgggaaggggatcaaagggattagttctttctttgtggtttctaaaacaaatgtatattactattatattttaaaaacaaaagtaactcaaggcctaattctgtacatgttgtaaagagtgttcttataaatactttcaatgagtatcttcgtttttcctttgcagcaagattcttggatttatgaaaactaaggatctcccagttacagaggcagtattcagtgcccttgtgacagggcatgccagagctgggtaatgttcaacctaaggttttggttcttaagtgatagatggctgagatgctaaagtggtcattttactccttttttgtttgttaagtggggtttaaattagagaaaattattgtagacagttcttaaaatacatttgtctatcccttcaaaaaaaaatctgtagtatatgaggtagagcatactaatatttttataatgagcttttacatttgttccacaaatctttcttttatttgaatttttagaaattgggcttgaagccgggcgtggtggctcatgcctgtaatcccagcactttgggaggctgaggtgggcagatcacctgaggtcaggagttcaagaccagcttggccaacatggtgaaacccggtctctacaaaaatataaaaatttagccgggcatgatggcaggtgcctgtaatcccagctacttgggagtctgaggcaggagcgttgcttgaacccgggaggcagaggttgcagtgagccgagattacaccattgcactccagcctgggagacagagcaagactccatctcaaaaaaaaaaaagaaaaaagaaactgggcttgatctgatctgaagtaactgctctggaaaatatttttatttttgaagagtaat

SEQ ID NO: 25695 - DNA, 1032 bp, Homo sapiens
tacacacagtgaactctaatgtaaattatggactttggttgatggataatgtatcagcattggttcatcatttgtaacaaagatactacactacagcaaaatgttactaggggaaatgggagggagaagaaagtgggaactgttctttcagtacaatttttctataaacctaaaaacactaaaaaattgtgggtttttttctagtcagtctctgcttatcaaaaaattgtgtttattttttaaaaaaatggtacatgcttaaaagtagtggggagggtcccatggaagcctgcttagtaggataatctgatcccttatatcttttttttttttaatggacattcaactataagatcgttttctattgaagagttaaaaaaaaacccaccttaatttttttaaaaaaactgagagataataactttaaatggtagattttacaagaaaacatttatgggtaatttgagtattagtggtaggagctggagtctggaaggaacctgagacatttaactaggaaatgtaaaggagccagtatgatacttggatgagatgatacaataatttccccttatgtggttatatcaattttggtccttagcatttggaggcagtgagctccagcttgtgcaagcctggtgggtgtgatcttcttgtggggccccaccgtcacccctggacttgttctgttctttcttttctgtgacgacatacccattactccaggctgtgaaactcttgtttccagaatgtattagagtgaatttaaaaataagttctggaccatataactgaagagtgaagacttctttggttaaatatgtaatccttcctctatcccaatttattttataatagattcatgtttctacttaattaaatccaagcacacttatgagaaggagactcggctgcagtaaagacatgtatatgagaaaaatttgcctagaatattcagaacaatgtgctagtttataaacatgttttctgcctgaaatttgagttggtcttctcttacatttaaaaaatatc

SEQ ID NO: 25696 - DNA, 1041 bp, Homo sapiens
cctgacctcaggtgatccaccacctcagcctcccaaagtgctgggattaaaggcatgagccaccgcacctggcctgatgtttattattttcaaagtgtgtttgtaaacataacatcatacaaacatttcaacttccgtgggttattacaaattaggaaacagggttagaagtataatttattcaagacctcaagttgagattcaactccagataccgtgattcccgtttctgaaatgttttacatatgttgcaacatatgttacaagtgttttacatatgttacacatttgatcttgtcattttcctgtttacagttaactgccatggtagttatcattgggtgcagaatgaggtccagactgttgtgttttagatggtgaagggattacttatggacaaaaacattttttaaaaggcaatatatgatataaacttgggatttaaagactttcacaggtaagtaaacatagaagatctcagaatgtatctggaagggatcttcatagattctgaagagtgtccatgtcacattatcggtcccaatctggttaactgactttgcattacttcctccataggtgagacacaggagacatcccatttgactggaggatcctgggagatggaagggaaatctcgataggtggaaaggagtggattggtatttcaggccagaaggttgttataaagtgtagaagggtggctagtagcttttttagtctaaaattctgtgatttaccataaagcataaaactggggcagctaaatttgtcaaaagtttttggagaattcagttcttagagggagaaagttcattgtgacttagttttataaaagattttttaggccaggcccagtaatctccgcactttgagagtctgaggcaggaagatcacttgaagccaggagttcaagaccagcctgggcaacatagtgagactcctgtctctagaaaaaaagaaattagccagctgtggtggcatgcacctgtagtcctagctacttgggagctgaggctgaggtgggaggattgcttgagg

SEQ ID NO: 25697 - DNA, 1033 bp, Homo sapiens
cacacccataatcccagcactttgggaggccgaggcgggcagatcacttgaggtcaggagtttgagaccagcctggccaacatggtgaaattctgtctcttactaaaaatacaaaaacaaaattagcaatggtggcgggcgcctgtagtcccagctactcgggaggctgaggtgggagaatggcatgaacctgggaggcggagcttgtagtgagcagagatcaggccactgcactccagcctcagtgacagagtgagaccccatctcaaaaaaaaaaaaaaataaaagtatctatacataagttagccaggcgtggtggcccatgcctgtaatcccagctacttgggaggctgaggcaggagaattgcttgaacccgggaggtggaggttgcagtgagccgagatcacgccattgcactccagcctgggctacgaagcgagactccatctcaattaaaaaaaaaaaaaaaaagaacctgatgggtcctttggggttctgaaatctgtaacattcggcctctgctctgtgagtgtagatttatcaatcacagggctagacaggcacatgtacaactattagacgtgctgtccataagagaagaatataatattgtggtatttcagagagaggagcagtgccatttgttttatggcagggggacattgagttttagaggacacatggtagtggatattcagaatgttccaaaaatagagaagagcgtgaagagacttggaggccgtttatcccgtgtagctgtgtgggatgtggtggaagttgatttcttgaggctaccaagattgcttagaaggtaggttagttgatgattggaagccgttggaggattttaagtacagattttgacaaagtttatgtagattataggaacgtggggatggaacaacactggtattgcaaattagcagtaataggccttcaacgaggtagtaaagaactgacgaaaagatccgtttcttgagagaaagagaacagaagattggtgagagtgttagcagaattaagaaaagtaga

SEQ ID NO: 25698 - DNA, 1045 bp, Homo sapiens
ttagctgtatgaaaatgatctttataattacgtttttatagaccattgtgaagtatttttctatgtttatggccagaaaattaggtcaatttttgcctccatccttttattcttttcactgtcatgagatcttctgacaagaaaccctttgatttctcaagacttctggacatagagcacaacaaacactgggaaaggaagaatgtgatttccagaattgtcatactacttaaaatgtccggtttttaacaacaacaacaaatatacaaaacagtcaaagaaaacaggaaaatatggctcatataatggtggggggagtcaatagcaaatattgcttaggaagaccaaacattggacttactagacaaagattttaaaccagctaatattttgatattcaaagaaaaaacctgtgcctgaagaatttaaagtatatgaacagttatcaaatagataagagaaattatgaaaaaataaaactgttagagttaaaaagtacaatagctaaagtgagacgtttactagagggacttgacaaatttgaactagcaaaggaatcagaaaacttgaagactcaattgagagtatctggcctgagaaccagaaagaaaaagaagaatgaggccaggcactgtggctcccacctgtaatcccagtgctttgggatgccaaggcaggaagatgcttgagctcaggagttctaaaccagcctgggcaacatggtgagaccccatgtctacaaaaaaattaaaaatttagccaggcatggtggcatgcacctgtagtctcagctactcaagaagctgagatgggaaaattgagcacaggacatcaaggttgcagtgagccatgtttacaccactgcactccagcctgggcaacagagcaaaaccctgtctcaaaaaaaaaaaccagactctcagagacctgtgggatactatcatgcataccaacatatgcataatgggagtctcaaaaggagagaaggaagagaaatggtcagaaacaatatttaaaaaaaaaatagccaacaacttcccaaatt

SEQ ID NO: 25699 - DNA, 1052 bp, Homo sapiens
ttttaaatagagacagagtcttgctatgttgcccaggctggtctgaagctcttgggctcaagcaatcctcctgtctcagcttcccaaagtgctgggattacaggcatgagctgccactcatggccagtgagcatcttttcttacacttattgatcctatagtttttcttcttgaatgcctattcttgtcttttgaccttcttttaattgtctgtccttttcttactgattcataagatttctttacgtgtcctttgtcttttatatgtgctgtagatatcttctccatatttgttctattattatttttttcactttgtgatatcttttgttaaatatgtttttttcattttatgttttatgctgtctgaattttattcaactcagcaaatatttgttgaacacctgctatgcaccattctaggcactggagatataacactgaacaaaataaacaaaaatccctgcctttgtgaagcttaccatcctacttgagaaaggaaaagagaaagaataaagaattacatgaacaaggctaggtgcaatgggtcatgcctgtaatatactttgggaggctgaggtgggctcattgcttgagcccagaagttcaagaacagcctgggcaacatggcaaaaccctgtctctacaaacaatgcaaaaattagctgggcatggtggcgcctgtagtctcagctacttgagagctgagatcaaggatcaattgcttgagcccaggaggcagaggttgcaatgagccgagatcatgccactgcactccagctgaggtggacacaagcaagtcctcatctctcaaaaaaataaaaagaattacatgaatgaaatacaaagtgggtcaaaagcgatagttatggcgaagaagaaaagaaaaaaaagacggggaagatgtgaataggcagtgtggggatagggaggggtgttattttagtaaaatggttaggaaaggcctaacttagaagatgacatttgagcaatagctttaaggaggtatttgggcatagggcccaagttctaagaaactgatatgggagcaa

SEQ ID NO: 25700 - DNA, 1832 bp, Homo sapiens
ggaagtaggaagccttgtcagtaactcagatgagtgaagatgagagtctttacagggtgattgcttttttttgagacagtgtctcactctgtcacccagtctgtagtgcagtggcacagtctctgctcactgcaacctccacctcccaggctcaagtgattctcgtgccttagcctcctgagtaactggaattacaggcatgtgccaccacacccagctaatttttttatattttaagtagagacagggtttcgccatgttggctaggctggtctggaagcccagcctcaagcaatccacctgccttgccctctcaaagtgctgggattacaggcatgagccaccgcagctggccctgattacattttatttgagacatcttaatggaagactagagagcttgagtgataattcctcatctctttggattctaaaatccaaaagcctgttagaaaacaaatgattttttttaactgattggaggctgttgagaatgggcaaaacctgacctaaactgacacaaagctattatgatctttatcccaattagtagatgtttagctctaaaatgttactgcatttgattagagtgttgttcccctgtaaactgagataaggtacccagttaacattccaaaatctcaaaattctaaaacgtacctggtttatctttatgtttcagatggacttatttcacagtcatgtatgtaatcttactgatattcagatcttaagggtgaagaaggccgggcgtggcgcctcacgcctataatcctagcactttgggaggctgaggcgggtggattgcctgaggtcagaagttcaagaccagcctgaccaacatggcagaaccccattgctactgaaaatccaaaaattttagccgggcctggtggcgcatgcctgtaatcccagctactcgggacgctgaggaaggagaatcacttgaacccgggaggtggagattgcagtgatctgagatcgtgccactgcactccagcctggtgtgatgggagcgaggctccatctcaaaaaaaaaaaagagaggaggaaaggataaatataactcactagtaaagtggagatttcagtagcagttggatatatgagtctggaatttggggagagttgttacatgtagatagtagttgaagccataggagtcaaatcactatatttacctctctgctattactacatcattttaaacttttcctgtctccccattatattgggaggtccttaaagacaagaattttataatacacatcttgccagcacatagcataacgactgccacattgtagataagcaacgtgtttatagaatgaattaatagttaaattaatgcattttttcttttcatataaccataaattttattgctagaaaacataccccagaaatcatcccatctgagctctttctttaggtctttgatactttttttgttgttgttgttgttgagagagggcctcactctgttgctcaggctggagtgcagaggcacaaacatggcttactgcagcctcaacctcctgggctcgtgctgtcttcctgccttaccttgcaagtagctgggcccacaactatgcccagctaattttttgattttttgtgtgtgtggagacagggtctcactttgttgtgcgggcttgtctcaaactcctaagctcaagtaatcctcctgcctcagcctcccagagtgctggcattacatgtgtgacccaccatgcccagccctatgacccattttgagttcattttgtttatagtgcaagggattggggtacaactttattattttgcttgtggatatccattgtctgagc

SEQ ID NO: 25701 - DNA, 1032 bp, Homo sapiens
gtataacaaagttttccacttgatccattttaaagtatgcaattcagtggctttcaaagttcatctgtgttgtatgcatgtatcataacttcatttctttttatagttgaataatattcctttgtatgtataaaccacattttgtttatccattcctgtaattgatggacacttgggcagattcttctcattttagaaactatcttttcaatctaatttttctcagtttttctagtttttgttcaatttttgccgctatcttagctgatacctatttaggtgttgtgtgtgtctcttttgcttttaacattttatatgttagccccctagtcttcctagacttttactgtttatgttttagtctttgaaattcttttcctttttgtagtgtcttgccttagtttagtactttctttactcatttagaaattctttataacttctttttatttcatttttgtgttttttgtacatctttcctacttcagaaagataaaatttttaatttcacctattgaactaaattttggacctttaggttattttattttgcattgtgtttagaacattttgtcatgtcgtactttgtcttaacacttagtttataaatagtagacaggaattaccatcagagtaacagctgtgatattagctcacattctaaacagaaggttgactatttcttccctccatttgttcctgaagcaacttttccgttctcttttatagattcccactacctggaaactttaacctgactcaataactccaagtattaatagttcatttagtaattcctttacctgataaagtaatcctgctgtcacatgtcatgtatcaaccattccctctatgagaaatgatgtaatgtaaaagccatggtctttatcactgagacctggggaagctttataaagatgccccggcagctgtgaaaacacctgtagagaagaatgcacatttccttctttcagcaagcatccactgatttccaactctgtccacttttatagggtgtaataaagtagaaaa

SEQ ID NO: 25702 - DNA, 1034 bp, Homo sapiens
tataaaggaagtgactcttattccatttttatttagtggagatggtaaggattagcatgaccattcaggatcaaaataaagcccacagtggactggtatcctgttcattctgactactgctgctgctgttgatttgcctgatgaagatatttgtatgactgaatgagtgtctggttttctccatgcgtgataagtaggggatagttactaaagacgaccagtcttgttcatttgcctaggaaacacccattgtcctggcataatttttaatattgcctctttttattctcagagtgccccattttggatgataaatcatatggtcaactagtagtagtcactaagtagtgactgtgactatgtttcgtgatagttctacctggtggtttgctgttttcaaaatacatatccaactggtgtatgtagatctttttaatgcagtaggttccttaaaagttgcatatatcaacttttttgatatatacaactatttgcctagcaatttcatttctgaaatgcttttcctctgtttcttagtggtctttaactgatagtggatatatcttaatgttataactttaagttgatcttcctactcactcctcccaatattcttccaggttcataatctatagatcagtaatgaatgatgtgtacctgaagactcttactctgaagctcgagatacaagttcacacgaattctgtgggggaagaggccttctccctggtcacttcggatataggaacaagaaaagttgacagtgtaaagctgctctgttgacctggcagctaagctttcatggacacaataaggacttgacattgcactagattgcatagtttgtcccatccagcccaaacatggtggaggctggtataaggcctaagctataaaatgaggagccacatctcatttataactgcaaagtgtgcatggtgatgcattatattctattcctagtccctattctactagtaatccacagtgtgcctttgagctggtatctttacttctgcagacctccttttccc

SEQ ID NO: 25703 - DNA, 1060 bp, Homo sapiens
gacatttcttatattactttaaactatttaattgcagttagtatcaaggcaagatttgtttctttatcttaaaatattagctataccatgaagttgagatttgaaataaaaagattacttctagcttaattggagcaggtaggaagtggtggcatataaaaggtgaatattttcatatgcacagctgtgcatgtattcttagggctctgttggccaaaatctgttgtcctagtagtgctcaggtgcataattcagtcagttgaatcacagatgatccattttcaaagcactttagtagttgggtgtcaagggaaaaaagttgtaattttaagaacttcatccgcaaatcatgtaatggtatttttaattttagcttcccaaatctgtgtggacaaaaattattcagttataaataaaagatgtgtaaatccttattccagtggccttctttggggtgacagggaggagtattaggcgatgttacaggatattgttacagttttatattttgtttctctgtgttagacttttctatttgataatactttttcaaaaatgatgctataaaaacccattattatagagccattaaaaatacaggtctattatccagtgattaatatccatgacctttatttttggatcggcttcataaatatatacattttctatgtcagccattgtctggaatttcatttttgttctgctttccattacataccatgaattaaatgaaattaatttaatcgctactacaaacagaaattaaacgtgccctaatccagagttacgttgtttgcttttacaactgtaagtcataagtaattaattttccttggaaaattaattcacttagcattcccagtagcatcatatgttgacacagggttatagatagtttaatatttttcttcagcatgctggcctcaactttagaagaccttaaatgaaaacaaattaaaatttactcaactgtatgtaatttggggctatttaaaataagtgttgttgttattgatagcatccaggtgatgactcgaaaattatactcaaactttac

SEQ ID NO: 25704 - DNA, 1048 bp, Homo sapiens
catgaccagtcattcctggtgactttgtatctactttgaaactgcttccatagtggtgattagtaatgatcatggacagtcccagattgaggtagaaatttcattttaaaattggattgtaggcataacttcgttttaatggcattggttgggcctctcaaactttcagatgtcttcactagtagaattaaactatgtcctggacatttcaagagagttatctttgatactatgtaagccagcatttaaatttttaaaagagaatttgtgttcataatggttttgctactttttataaagttgagatttaagaagttattcttgggagttggttttgaaaagtctgttactcttcctttctctcttctaaatgcccaccacaaaccaatgcagaacataagttatttttaaaacatagataatagagaagccataatttcaagtgtatccttgctcttccctgccttcctcagcatttccttctgtgcctgcttgctatgtgcctgtttcctcgactcccttccaaccttctgtgagctgccttttgaagaggtggtttgttccctagttcctcattcagaacccccctcatatggtgtgaaatacaaccagccttttaaaaaagtgatccaaacctcttttacgatttgaaacctagtcggatatgtgttgacaaatttaagcaactttttttagtttttcaaaatacaaatttacgggcatgctaccagaattagcattaactgaacactgacccagtgatggcagcagaatgcagaagacatccagcccagtcagctagatgatcagggcatgattgtgaataaaatggaacatggaagttggcagtgagccaggacgtgttttcttgtggataaatttacaaacttaatgtttatcattaagtttgtaaaaggaaatttggactctagattagaatacttggttagtcataccttgggcacataactatgctcattgacctatgcccatccttgccgttgggttattcagggtgtgtttagtgaaaatttccctgagagataaa

SEQ ID NO: 25705 - DNA, 1043 bp, Homo sapiens
gaccttcgaatgtcaggaagctcaaggagcctcatcctgagaagataaattcctgccatgtacatgacacctggcatgatgtcccacatttcccacattatcaccggaggtggggaatagtaaacagaaacagcatacacagacagacagttagggactctgaaacgatctcactaccaagaatgattaaacatttgaggaaaacctatggtagacaaatgaggcaccaaacttaataaacaaaaagtaatagcgagtgagacaatgaataagtaacagagactttgaaataagtaaaagtaagattcatagagagaaaagagattattgcatttataaagaaatatgtattaaaatgaattcaaaccaatcaaatatcttagaatttaagaatgtaattatcaggattaaaatgcataattggactaaatagagtggacacggttaaaagcaaattaatgaattggaaggttgaattccttcagaatgcagttttgaactgaaaaaggtggaaagcatgaacaaaaagtcacatgatacagaggacgttctaaaccttcagcgttcatctgatgtaaaattgaaatagtatggagttataatcacagaagtaataggaaattttcctgaactgaagacagacaagtcttctgaaaacaccttatgaatgcagaagtaaagaataacaaaaggccaacactaaattcctgcttatgaaatttcagaatacgtgataaagaggaactgactaaaagtattcagagagcaaacagtttatctgcaaaggaaagaatgagattgacaacagtcctattattgataaaaaataaatgatagaagatagaatgcagtagttgtggagttgtgggaaaaaacattttgaactcataattctaaatcaggcaaaccatcaatttagtgtgagtggaaaataaaaacaattttgaaccttctctgattgtttcacaccttctttgaaagaattgatggaagtactcccttccaaaaagcaggggagtgtccaaagaagggaaagacataac

SEQ ID NO: 25706 - DNA, 1053 bp, Homo sapiens
attttaaaggcttctcatcatttttaaggatggccgaatagtatcttattgcatgtgcatattttatggtactttttcagaatgtggatttttgtgggggcaggggtaccattaagcacacagatcccacctttcaaaacagctccagctgctgcttatccctaatatttattttcgaaaagtaatagtgtactgtcatatatttttgtttacatgtttggaatgtctattttgtcccctttttaagagcaaaagattctcattttagcccttggtacaattcatatatttagtgttatatataaaattttgttttttaattaaacacagttcctggcactttgaaatgtgctaattagatctatccttttctttcctctgtgtttaaagtcaaggctgaatacttgactaggagtgttttgagagtggaagaaaaacataggtaacacagagggcaaggcaggggctgctgaagtagttatatctagggattccctttagagtgtgtctgtgggacttgtcatggagtgaatcagccaccatgcccagtgattatgaaaaggtgaatttatgacctgcctactgatgatagaaattgttgacagtggtctttctgtatagagataacttagaaatattacaacattgtacttaaatcatctttcaggtctttcttggctgctgattttctttcttcatgtaatctatttttgttttcataccttctctattaagacaacaatcaggtgagaaagaggaggagaaacagcatagtgatcagttaggggttgtcatggtggtagagtcactgcctccttaggaggtaatatagtgccaagtcaaggagcgtagactccagagttatacagtcttggatttgaacctcagctctgcttcttgctagctggctgactttgggcaagtttttgaatctttctgagcttcagttttctaaaatacccacatctcaggaatatgtgaattaaataagatatctacgctgtactgaatatagtatatagctcacaatatgggttaagaatatgggttctt

SEQ ID NO: 25707 - DNA, 1057 bp, Homo sapiens
gttaaagaggaggacactcccacttggtttgttttttagaccattttattttgcagtcacttaatttggttgactgtatactatgcatagcctacgtctgcatatcttattcccgtgactgtcatgatcattcatccatgtgtcatttttcacatctatctctgtcatcagttctacattgtcagttacaaagtgctatctattttgccatcttttattataacttgaatttttcctcccctttatctccgtggtgactgtcttaattcaggacatcatcattttttgtctggattactgaactagcgtcatagatgatcttggtcttctgtcttgtcttttccaatgcatattacaaatcgccctttcaaaattctcatctcacaatttcatgcttgtatacttctttcagctgatcttgtttgtctccaggatagaatccaagctcttgagaagaacatgcatgaccctttgtgatctgtttttttcttgcctctacttctgtctcgctgtttctttttactttagcatacgaaattacttgctgtttctatgatgagccatgagcctttacatatgctgtttccattgtccgggatattttctccctgcccactgtgcctacttttgtttgcatcccatgtgacattcaaatgtgcgtacactctctgtctttctcacatatacacatatttataaatatgggttttatatacagtagagagcagatagagaggtaatgtaggtatgataaacttacaagacttgcttcagaattgcttgtggtatcatattactgtgattagtgaaaatagactcaatataatttttgtatatttttctcttaagttatattgttataataaattatcctttgagaaataattgtacaaaatgaattctgctccttttctggaaagaaaatttgggtgaatgaaaaactttttcttttcttctatttctaaagagccaaactaacatcagatgcagagaaggaatcagtaatgatgtttggacggaaccttcgtcagctccttttaacaagccctgttccagg

SEQ ID NO: 25708 - DNA, 1027 bp, Homo sapiens
ctcacatggttgagaaagagagagaaagagcaagccctctgttatctcttcttatcagggcactgattccatcctgagagccccacccttatgacttcatctaaacctgattatcccccaaaagccccatcttcaaggtatggatatggggagggacacaattcagtctgtagcagtggtgtaataattttttggtgactttcttgtatcttaagattttggccattattaataatgctttggagaccctttactgaagaggaaattttttccttgttttatatctgaccatagatagttactaggatttttaaaataaaaactccagatgtcatagtaataattttcagataccacagcctttcctcacagattatgttactttggcttcaataaaggttttccccgcttctgtattccatctcccttctttttgggagcctttttatggccttatttattgttgcatcagttttagtgtgggcttttctgttttgcaggtggagaccacgtagctttgcaaggccagagttaatgaagatcttatataattcactgaatgattcctttaaacgccttatttatcctcttctctgtagagaattcaggtatatatcttgtcttgtttaattttgtgtactgattattgttatatgatactagtaccattacagtgtgtagctaatgtttgttgattgattaaccaatcgaaagaatttagtcagcatcacaaagtgttaaagttaaggcttgatttcaatctgtagatgcattcacatgcatagatcataaaaatagttcttaattatgatatgtttttcaaatcttgaccacttaatgtgtaccccttgaaatcctgcaatactagtcttgcagctggaggcagtttttagaggtaagagagccaaagaaagcataaggaaatcagtagggtacatgatgaatcaattactttgtttttaactccaaatgggagttatttggatgaaaaattatcagcaatgataaatattaggagattattaaa

SEQ ID NO: 25709 - DNA, 1090 bp, Homo sapiens
aaatattcataatactcagtatcagagtcagtcctcagtagttaaagaaaaaatatgcttttaacctatttattatctttagactaagtaaatgtcaaggaatttttttacagtgatttatttttccatggcttatttatattttatttagttctccaattgaaaaatttgtaatattatttagcctacaatgtaacatgttacatcattatggcatagtaatataattttcagtcaggtttggaagtttttctttttcttttttttcttttcttttttgagacagggtctcactctgtctgtcactcatgctggagtgcagtggcatgatcttggctcactgcagccttgacttcccagtttcaagctgtcctctcacctgagcctcctgagtagctgggactacaggtgcgcaccaccacacccagctaaatttttctttcttgtagagacaggggttttgccatatttcccaggctgttctcaaactcctgaactcaagtgatccaccaacttccgcctcccaaagtactgggatgaaccaccccaggcatgaaccaccatgcccggcctgaaactttttcttcatttagataattccaagagctgaaacacttttctaggacctaaaaaattattctcaaaagaacttttttttttcctttaagcacatgtgaatgactagaaatgcttacttgatgaatcttctagttcctttttttactctctttttccctatttcttcaccctcttctgtatgtacttatccattcaagttatgtgctagattttggagattcccctgtaaattagacagatatactgcttatccatgatgacagcgtagtttaatgagaacaacactgggaaaatcattacgagtatgttgagattatgaaggaaaagtgtagtaagaagaagaaaagtgcttgtaacagagccctgagtagtgtggacttgacagctaggtaggttggagatagaaggagaaggaagagaagtgacatggaatgaagattgagatgttgacacaggttagatcatacatagctttcaggtatgctaaagatttttttcttttaaggatggt

SEQ ID NO: 25710 - DNA, 1224 bp, Homo sapiens
taatattttaattaagagcatggacagattgatctgaagtttaaattctttttttgctacttgctagctttgtgatttgcaacaagttagtttcagaaaaattattatataaagtgaagataatacacacattactggtgactctaaggattacttgagataatatatttaaagtgcttagataggctctacaattagtaatgctcaatggatggtaacaatttgtagctactaaatattgcacctaggattttacatgtttgtatttatcttagcacaggttatcttttcaaattataaaaagtatacccttccaactccagataatcaaaaattttcaattagtagaatctgaaatgagatttttagatcatcaaagtctcttcttgtaaatgtgttagataggctttgtatctgcattttattttctaagagcatgttagggttttccttatgtgggaggtatgttacttgaaaaaagtgtaagtaaatgattattttaaaatgtattcttgtttaataaacgagtaaaaaattcatatagctgtcagctacatagtcgcctgatttgtttcatatattttgtggattattagtctttgccttatgtttgcactcagattctggcaattaaccgtggagaaaatttgaaggtactgacggttaaggtcaatatttctgatggagtgaaggatgaattctgtaggtggtgcatccaaaacaggtctgtttacagatatttacagaattttctttgtttcttttctaaaatatgataccgatatctatatgtactgatatgtaaagatgtctattacgtgaacatttttaaaaagccagtgacaggccgggcgcggtggctcacgcctgtaatcccagcactttcggaggctgaggggggtggatcgcgaggtcaggagttcaatatgagcctggccaagatggtgaaaccctgtctctactgaaaatacaaaaacaaaaaattagctgggcatggtggtgcacacctgtaatccccgctacttaggaggctgaggcagagaattgcttgaacccaagaggctgaggttgcagtgagccgagatcacaccactgcactccagcctgggcgacagagcaagactccatctcaagaaaacaaacaaacaaacaaaaaacccaccaataacagacaaggtatgtagtgtcctttttgaattaaaaaaaataataaaataagtatgt

SEQ ID NO: 25711 - DNA, 1053 bp, Homo sapiens
ataaggagtaatgcattctgtcactttctaactccttaagtgatgtgggtagaaaaaactttttttattcattcatgcaacaagtatttgttgaactcatgctgtgttccaggttctgtctagtgttgctaataaagtatcgaaaggagagagaaagtaaccaactaaatatgtaacataatacttacactagaatataagctccatgagagcatagagttttatatattgctttagagcaggatttttcaacctctgcactactgacattgtgtgcaagacaattctttgttgtgggggctatcttttttcttgtaggatttttagcagcatccttggcctctacccactggatgccaatagcttcctgctaagttataacaattaaaaatgtctctagacattgctagatatccccagttgagaatctctgctttagagtcatattaggtgctctgaagatatttgttaagtaaatgactggtaatatttatagtaataagtactataaagaaaaataaaacagggcaggggatagagagcatagtgagtggttgcagtcggggggcattttggatagagtagtcagaaagttattgcggaagatgtggcaagagatctagatgagatttgggggtgcagcttgcaaagatcttggggatgggtgttccaaatagagaaagcagcaagtgcaaagaccctgaggcaggaataagtttggtgtgttcagggaacagcaagaagaccagtgtggccagtctagagacatgaggcagagagtagtaagaaatgagattgtaatgagtaggatctggatctaataggcttagatccttctccttagtccctttaacttctcttctcaccaccctctaaatgttggaatccctcaaggcttaattctaagccctccccttcctccaccccccttcccctctcccctccctgttagtagctgatcttgtcttatggctcaatataaaaatctcaattttatacagtatctccaacttgatcttccctggtattagaattttatttgaagtgggttgg

SEQ ID NO: 25712 - DNA, 1048 bp, Homo sapiens
gtgattaatcattttatttaagtttaatgaacttttattataagggaatgattatcttgttttaagaataacctggctgcttactcagtcaatcagcatcatttatttcattgccaactttgtagagagacctctactttattcattaagaatatatagaataggctgggcacagtgactcatgcctgtaatcccagcactttgggaggccgaggtgggcggatcacctgaggtcgggagttcaagaccagcctgaccaacatggagaaatgctgtctctactaaaaaatacaaaattagccgggtgtgttggcgcatgcctgtaatcccagctactagggaggctgaggcaggagaatcgcttgaacccaggaggcggaggttgtggtgagccaatatcgtgccattgcactccagcttggacagcaagagcgaaactctgtctcaaaaaaaaaaaaaaaaaaagaataggaaaaaaatgtttctgtctttgagatatagtttaataaaggactttgtaaggggctgcctgatattattaccataaaataacacagaatacttaagcacacaattcttaaaaaatgaagcacacagttttcctacaggtgtcaccctgtaggagtttatattttttaaaagatggcccatactcttaagagttttaaaccattggaaggctgttagctactctttttttttcttttttttttttttttgagaccgagtctcactctgttgcccaggctggagtgcaattatgcaatctcagctctctgcaacctccacctcctgggttcaagtgattcttctgcctcagcctccccagtagctgggatttcaggtgcccacgaccacacctggctaatttttctatttttagtagagactgagtttcaccatgttggccaggctggtctcgaactcctgacttcaggtgatccgccctccttggcctcccaaagtgctgggattacaggcatgagccatggtgcccagccagctactcttttaattggcagctacatagcagaggaaactgatgttt

SEQ ID NO: 25713 - DNA, 1007 bp, Homo sapiens
tttaattcagttttctttactttgaactcaaaccattgtataacattcctgaggccaagcataagattatagtgatgtggattctgtaatgagctgtttcaagcatatttttatgtttaaaataatttcttcattaaatgactggaaaggcccactgaaaatatgtgatctcaatgtaaaagttttttaacttaatataaatcttaagtgattttaaataatggcaagtgatgaaagattaggcatctttatagttggaggaagcctttcttttgtagaaggcagcaaggggatatggttaaagagaatatggtagggtagctacccattatactgttggtcatctttgttgttgttttaatactttaaagtcatcttcttgcctctaccttatttgccttaaaatctcagcaagaaaacaaatatttgaatttcccataatccagataggctttttcaacttctagagaaagcttatagttgctgacaaaataaatatttggactacagaaaacctttgtattttataatttgattctttatctgctgtaactaaatagctaatcaataagtatttgttgttattactgtatgcatagcatatgttctgtgtaagtaagtacaacagatacttaaatacacccaggactggaatttaattatttaataatttagatttgaactgtgatttagatttaatatgctgtaactatttcatagaatatgtagctatgaggtttttcatctggaaaatgtcttgtcaaaacatggctagtatttcatgttataaaaaattagtggaaggttaagaaatattgttggttattctgagcacaggaaattgaccatgaggtttttaaactcacgttttattaatgggtaggcaggtaacatgatgattaggagttctggcatcagattactgggttgaaatcctggctttgtcacttgctagtgaggatgaaataataaaatccctctaaaatacctagctcagcacctgacac

SEQ ID NO: 25714 - DNA, 1029 bp, Homo sapiens
actgccctagcagaggttctctcccctgccgctgagagggcctctcccctgcagcaaacgtttgcctgggcattgaggcatttccatacatcttctgaaaactaggcggaggtttccaaatctcaattcttgacttctgtgcacctgcaggcttaacagcacatagaagctgccaaggcttggggcttccactctgaagccacagcccgagctgtatgttggcccctttcagccatggctggagtggctgggacacaagacaccaagtccctaggctgcacacacatgtcaggggctgccctgacatggcctggagacattttccccatggtgttggggattaacattaggctccttgctacttatgcaaatttctgcagctggcttgaatttctccccagaaaatgggtttttcttttctattgcatagtcaggctgcaaatttccaaacttttatgctttgcttcccttatttataagggaatgcctttaaaagcacccaagtcacctgttgaacactttgctgcttagaaatttcttccgctagttaacctaaatcatctctctcaagttcaaagttccacaaatccctatggaaggggcaaaatgctgccagtctctttgctaaaacataacaagagtcacctttactccagttcccaacaagttcctcatcttcatctgaggccacctcagcctggactttgttgtccatattgctatcagcatttggggcaaagccattcaacaagtctgtaggaagttccaaactttcccacattttcctgttttcttctgagccctccaaactgttccagcctctgcctgttacccagttccaaagtcacttccacattttgggtatttcttcagcaggtcccaatctactggtaccaatttactgtattagtccgttttcacgctgctgataaagacatacccgagactgggaagaaaaagtggtttaattggacttaaagttccacatggctggggaggcctcagaatcatggtgggaggcaaaagaca

SEQ ID NO: 25715 - DNA, 1024 bp, Homo sapiens
cctgcactccagcctgggtggcagagtgagaccctgtctcaaaaaaaaaaaaaagttttaaaggacatatttttaaattgatggcctgaaaatgttataacaaaattctaataataaagaggaaagaataccctaatcctgccagcataacagatggtctatttgacttttcctgctcctctcaaggccttgtctatctctgtgtaatccttgagtgtggtctgccactgctggtgtttgtttttctgagctggaggaagtttaagatcttgaacttttcagagtccttaagatttcagcatgatcccagtatctgtcaattggcctgaacctgactgttgatttttaggcatatcatggagcatctagaaggtgtcatcaacaaaccagaggcggagatgtcgccacaagaattgcagctccattacttcaaaatgcatgattatgatggcaataatttgcttgatggcttagaactctccacagccatcactcatgtccataaggaggtaggtctggcagtggcttgggggactgtatcacagaaaggcttccctttgttaatttggtccccagtcttgttgacttgtgttgtccttatgtgccaagagtgctgcttctccactgggcatgatggctcgcatctgtaatcccagcactttgggaggccaaagtggaaggatcacttgagccaggagttcaagaccagccttggcaatatagtgagaccctgtctctacaaaacaaacaaaacaaaaattaaaaaattagccaggcctggtagtgcatgcccgtagttctacgtactcaggaggctaaggtgggaggattgcttgagtccaggatgtcgaggctatagtgagccataatcatgccaccgcacttcagcctgggcaacagagtgaggccttgtctcaaaaagagaaaaaaagaaaagaaaaaaaaaggtgctgctgcttctttctcttctgtgttctgcctctttctgtccaacgatccttcccgcaaaggataacttgctgag

SEQ ID NO: 25716 - DNA, 1030 bp, Homo sapiens
ggcttttctccatatttcttcactctggggctcaagctagcaaagcagccactgtctaaaacattgacaattatcatggcagaaggagaagagatgatatggtgaaccatatgttgattcttaaaacttctgtctaggtgtgacacataacacttctgtacatattccactgaccagaggaagaaatatgactcagcctaataccaatgcccagagatgggcagtgaatctttgtgaataataatatagcatcccatatcttatttttctggctttttgcaattcaatctcagctcattaattttcaatctttcttatttttaagatacatgcatttaaggatatatatttctgtgttagctgtacccccgtgttagctataagcactgatacacagaaattttgttaacattcagttcaaaaatttttttacatttcctttatgatatcttatttgacctacatgttatttagaagagctatttatttctttatttatttatgtattttgagacagggtcgtgctctgttgcccaggctggagtgtagttgcgctatcatagctcactgcagccccaaacttctgggctcaagcaatcctgcctcagcctcccaagtagctagaactacaggtgtgtaccaccacagccaggtagtttttaaatttttcctatagacatggggtctggctatgttgaccaggctggtctcagaactgtgggcctcaagcagtcttcctaccttagcttcccaaagtgctaggattacatgcatgagccactgtacccagcctagaagtgtttttttgttttgttttgttttctttttttgggacagagtcccactctattgccccaggctggggtgcagtggtgcaatcttggctcactccaacctccaccttccaggttcaagcgattctcccacctcaacctaccaaacagctgagattacaggcacccaccaccacacccagctaatttttgtatttttagtagagacagagttttgccatgttggccaggctggt

SEQ ID NO: 25717 - DNA, 1457 bp, Homo sapiens
ggtaattctgaggaaagagaggaatggaaagagtactcagtaattgagtaaatgtgattttttttttttttttttttttttggtcttttgctattgactcattttttgtgtacttcttctttttcagagtttgtacaaatgatgacagcaaagtgaagaccttgtacagaatgtgttaaatttcttgtacaaaattgtttatttgccttttctttgtttgtaacttatctgtaaaaggtttctccctactgtcaaaaaaatatgcatgtatagtaattaggacttcattcctccatgttttcttcccttatcttactgtcattgtcctaaaaccttattttagaaaattgatcaagtaacatgttgcatgtggcttactctggatatatctaagcccttctgcacatctaaacttagatggagttggtcaaatgagggaacatctgggttatgccttttttaaagtagttttctttaggaactgtcagcatgttgttgttgaagtgtggagttgtaactctgcgtggactatggacagtcaacaatatgtacttaaaagttgcactattgcaaaacgggtgtattatccaggtactcgtacactatttttttgtactgctggtcctgtaccagaaacattttcttttattgttacttgctttttaaactttgtttagccacttaaaatctgcttatggcacaatttgcctcaaaatccattccaagttgtatatttgttttccaataaaaaaattacaatttacccaatggttgctctgcatctgagtcatttaactgttgaagtctaataattttgaaaataaaatatggcattggtttctgcttggtatagtctagataattttttctcgtgtggggaagcatatggagatgggtggcagaaatagtgaaggtgggaaaggaaggagaaaaggattggaaaagtgagaaaagagggagagaagcacagaaaataagaggaacaaaataaggggtgtaactaaggagagattgaagaggaaggccgaaaagatggggatctatgggggctggcttagtgtagtcaccttttgggggccaccatcatgcgtgcccacaacattcctccaccaccatgtgtgtcgtactgtgctactgtgttagatccaggatacctgtgagttgcctctgcccacagaacaagatggtggcagtcatgggaaaagaggggcaagttttttgttttgtttctttatccagattgtatttgacaacttcaaaaggccccaatgaaagactcaaaaacttaagtgtacctagtatgggaattggcataaagtaggtatttactgtttcctacctttatagttttcaactttggcatttgtccatgttgacttaagctgtgcagtgatgttttaaatgtttgcatgttcaaaaaaaaaccaaatctagttggggtgagcatccttatagtt

SEQ ID NO: 25718 - DNA, 1026 bp, Homo sapiens
gtagtcttatttttgttttgtgagtgtaggttaggtctgtaattttgaattatgttccacagagcagcttcagtgacagaggagccagtcatttggggatttggttcttttcctctgtaaacctaggataattttacttaggtcagcatgaaagtacagtggtatgattggtcaaagatatatttgaaatattatcataaggtatcataaagattggttaatctttaggagtcaaagtcacatttcaattgctacctccattggtatttttccgttaaaagtttttgggtttttctgagacgtggggtcttacagtttggccaggctgaagtgcagtggctgttcactggcacgatcccaccactgagtaggctttaagagttaatacgtttcatttaggttacattttattattaatctgtgtatttggattgtggtctttctttcaaacagaattcaaagaagctttttcactatttgacaaagatggtgatggaactataacaacaaaggaattgggaactgtaatgagatctcttgggcagaatcccacagaagcagagttacaggacatgattaatgaagtagatgctgatggtaagtcttcaattttgtggggctgggaggggttgaagaagtgatacttagatgtttccactaaacctttgctgtttgcttatatgtttccactaaagctttgatgtttccactaaaccatttcaggtaatggcacaattgacttccctgaatttctgacaatgatggcaagaaaaatgaaagacacagacagtgaagaagaaattagagaagcattccgtgtgtttgataaggtacgtcaaggactggatatgttaaattttgaggatgaaatgaagataccaggactcattatgaagacttgtgtttttttggttgtttttttttttttttttttttttttttttgatgatttaccaacatattttaattaccaagcaaaagctttttaagaattcagtatagactttctaatatatgtattgcgtt

SEQ ID NO: 25719 - DNA, 1028 bp, Homo sapiens
gacatcactaacaatttcattttgttgataactctgccatgatgtcattagttgttgctgtttgacttttggaagactgataggaaaaatgtacagtattttttccttaagaagtctgtacctaaactttcattaaattttcaaggtccaaatttgtttgagaaaaatattaatattactcaatgtatagcaacaactgcatgaagcgccaaaagagttccagtacatgatctttaagggattattaagttcagaattttgtgaagaaatagaagttaataaacagtcatttgatttgttttgtaattgtcttgtgataacctattttaataaaatttttaaaacatgttattttaataaaattatatgtttaggtaataaactaattagggaagggccttggggttgctaatgaacaaataaaacttgagtaatagatttttctgaaagtttcagtttggtcagctaaaatggattttggtaggttccttatatctatcaattatgtagaagatagctgttctgtggcattcaggacctgttctctttattgtgtgtttaggttttgactcttggatttaatttcaggtcattcctgggagttacagtttagaattatatgcttctatacataaagattacgctagttctgaagtacaggaaaactgtaaaggcaggtgaattaaaattttactttggggtttattattttgagtttttacaggtattttttactctttagtataaaaatacaagtaaaaatttggaataaaccttgacctttaaaagaaatgttatttgttcctttcttgaatgaataacaaatggtattagcatagatacggttttattttctgcattttacttattctagcaaacattttaagtgttattagatttttaaatttctcgaaagttatacatagtcttacactatgcatcttccagtatttagctttttgttaaatcatgtaatagaaaggtgattactgctaattaaacattgggaatttatgcacctaatggtg

SEQ ID NO: 25720 - DNA, 2046 bp, Homo sapiens
tcatgcatacttttgaatggcatgtaggaaatgtttgataggtacataatgtattcacttcaggtcactaatgtaatacggggtcgtgctccttagtgttgacagatcacctatggttctccaaaatgaacattctagtacaggaggtctagggaggaacctgagagtatactaatgcctaggaactttctctggagtggcaagagcagtgggaagaattatgtcaatagctacagaaataagggagtaagaacaagtcatctctctagtgaattcttcttcactttactgagataaacatacatgttaatgagcttgagttttcccaaaagtataattcttctggttcttctaagaaaatggcactccctggaaacaaggaagaaccaaatttattcgcctttgtagcagttgggaaagttagtgctaggaagtcttcttgatttatagtaggctttaatctggatattgctggtaaaagtttattctaaaacctgaactctggataagtaatacaaaaagcttctcaaccttccaagcaaaattgagagctttcaggttatgtgagtaatttggtctcttgggtgcttaattcattccttgaagctcatttttgtgatctcttccaagattgcatttgcttggaggtagggagttagacaagatggtatgaggtccctaaattttgactttccaagcaaaattggacagtggttcctaaattgctaacatcctcgtttcttcctaaggcttctcatgtttcatatatagtagccttcccaaagtcccatttcccaccccccccccccccccaacccatgtagagagaacgaacctgtctcccttcctgtacagagtacgggatccttcaactttcacacaggctgcagtgtctgccacacatttagctcaacttttttttagccttaaagtgatgtccgctgcatctgtcgctgggttgcaccttgtggatttagtttgcataaattttctcagcttaaacaaagttaacattgaatagagtaagcttaccataaagggcttaataaatgccatgcatgtctacattcggtgtggaaattgagctagtcaggttgatatttaacattgtaggttctttgttaatttatatgaaataatggttatcatttaactctttaggttagctttgtacatagcatctcactttgcacaacaaccctgcaaggtaagtattgttattcttgtgctacaaatgaagttgactgagaggaggagtaccacgtccaaggtcacacagctattaaatggcagggctgggatactggcctgtgactcagaacttgatgctttccccccacgccacgcatgccaggttgcccttcctttcagaaatggtggaagtcctgcaaaatgcaataaactgaagtaatgtagcttctattaatacaaagtaaataactcagatttactggattttaaaccttattccttgggtaaacaatctgtgactgacttcacaccaaatatttgttggcggaggatttggactttagggataaaagtggatacattttttattttacaaactctgtatttgaacttaattattggctcttcaattttacgttaccagcttttttttttttttttttttttaatgaatttgatttacatcatggtcaaacaaaaattgttgagcagggaaaataaactgctttctggattccttcttgaattttctcatgtgccctagagaaaatgtgttccacattaaggtgttactttttccaggggtgtgttcatttaaaaagaatgaagccaggcaatgtttatttttcttttacctataaataaatgaatggattaatcattgtatacttgactcccatgttggtagggattttagataggaggctatttcttgtctgtgcttctcaataccccataagcagttgcttcatggatgtatatactaataagcagtgaaagaaagtgcatgttcaaagaatacaacaaggagtctggatattttgcaatcatctttatatattacggtgctctgaa

SEQ ID NO: 25721 - DNA, 1030 bp, Homo sapiens
ccgagcagcaacggcagaagccgcaccgcgtcccggcggcggctgcgagtcccagtgacgcattgcaggtacaaaccagccaatcagaggcaggctcaacgaccaacgggggacgcatcgccgccacgatgctcctccgcgccgcaaagtagcgcccctcaggggccgctccaccggccttttaacggctcgctggaaatgaaacccacttacgtcatccgttcgcccactttccttgatctcttgcctcatcgaccaaataactgtgaagaaaggggtcccgagaagagtttgaggggagggggttggccgggactcgtttgcgatgttccgttatctggatgcggcggagggatctggcggagggaggtgtttatgaggcgctgggggcggaggaggcgaattagtccgagtggagagagcgagctgagtggttgtgtggtcgcgtctcggaaaccggtagcgcttgcagcatggtgagtgcatcgctgagctgccggcgctgggcctgtggggggaagagactggagcgaactgactaaacaaaggaaactcgcctcccttacaccttcaaggagtggtttctgccagagggatggcgcgaaagaggccagggatgccggcgacggttgtgtcgcaggtgctcccccacccccattctcttcaggggggcttcctctagtgagttgagggccggacgcacagttcccgaggtggtgaagctcctcgggggcttggctggaggaggatgggtccgggatgagggacagcccagtgcacgggaaggagagaaagtgaaggaagggagagagggagcgtagagagccttctgtcgggcgtctggaaaggtcaagcagggggcgaattcaatccacccgaccgacggttagtgcgggcgccaggaagcgcctttgtccgcttgcggccgccatgcgcccagggggcgggaggagcgcgcggggccctggggcgagcgtcggcgtcgcagttagcccgcgtcctccgcgtgccgggatccagggggcgcgcg

SEQ ID NO: 25722 - DNA, 1054 bp, Homo sapiens
atcttcccaccttggtctcctaaagtgctgggataacaggcatgagccaccacatctggctgaggccccacattttcattttgtgctgagacttgtaaattaggtagctggtcctggctgtagcagatggtatagattctttttctggctctgtttttgtgacatctcaacttactgggctcttattaaaggtgatttaggtgacttatcaacttttcatgagtacagatgaagaactcttctagggcaggggtccccaacccttgggccacagaccagtactggcctattaggagccaggccgcacagcaggaggtgagtggcaggcaagcaaatcaagcttcatctgtatttacagccactccccatcactagcattattgcctgagcttggcctcctgtcagatcagtggcgaccttgattgtcataggagcgtgaaccctctagtgaactgcgcatggcagagatctaggttgcactctccttgtgagaatctaatgcttgatgatctgtcactgtctcccatcactccgagatgggatcgcctagttgcaagaaaacaagttcaaggctctcactgattttgccttatggtgagttgtataattatttcattatatattacaaagtaataataatagaaataaagtgcacaataaatgtaatgtacttgaatcatccctaaactatcccctgccgccctagtctgtggaaaaatggtctttcatgaaactggtccctgttgcctaaaaggttgggactgctgctctagaaggtatgggattgggaggtgggggtcacacagatagccactgacaacctgagaatagtgacatgggcctgtaaaaacagatcaataggtatctgtggaaggtattgatgaatacatgaatgaatgaatgaaacaacaaactaagaaaaatggcatggcatgcatgaatgtgtgatgggctcaaaatatgatcctcatagggatatttgccttagaaaaaggaggcaaaggctaagctggaaaaatctgtggcaattgagagcccttgggggctctgggta

SEQ ID NO: 25723 - DNA, 1049 bp, Homo sapiens
ttgtttaatgcccaatctttatccccctattgtatatatattcacattcttaaaataatcttgacttaaattgtcagaatgtagctttccttggtctaggtgaggacagaagccactggcacatgtgccataagagctcacttccaccgttctgctttccactatgagagtcacatcagctgccaatatgatccttcatacttggagagtggaagtctgtgttaaaatacttgtgcattatgcctggcatatcattggcactcaataaaatgaagcttctgttttatgctatttctgtaaaattaatagtttttgatacccctctaatattttaagtttttggaattctagcagtactaatgatcatatactggcttacctctgtttattacactttacagttcattgtgcttcacagatactgtgttttttcacaaattgaagttttgtggcaatactgtgttgagcagatctctctgccatttttttccagcagcatgtgctcacttcctgtctctgtgtctcattttttcattatcattatgtctgttatggtgatctctgatcagtgatcctttttgtttgtttgagacggagtttcactcttgttgcccaggctggagtgcaatggcacgatctcggctcaccgcaacctcagcctcccaagtagctgggattacaggcttgtgccaccatgcctggctgactttgtatttttagtagagatggggtttctccatattggtcaggctggtctcaaactcctgacttcaggtgatccacccgcctcagcctcccaaagtgctgggatcacaggcgtgagccaccacacccaccctgatcagtgatctttgatgttactattgtaattgttttgggacaccattaactgcgcccaagataacaaacttcatctgtaaacgttgtgtgtgttctgactgttccaccaagcagccattcccatctctgtccctctcctcaggcttccctattgcctgagacacaacagtatcgaaattaggccaattagtaatcctcaaatggcctct

SEQ ID NO: 25724 - DNA, 1055 bp, Homo sapiens
aaagcgaaccattgactttggcacaagttctctaaatccttaattttttttcattttttatttttgtattttaatattttgaactctggatgatcttcagattagttgggtacattttattgtagtgtttctgcttatacatcgcatcctagaatcaagaaaggaaatacgtatctctgaagagtggctttaaattacctgtattgctcattagttctgttagtgccattaagagttgaagtaaatgttgatatgaattcctttaattttatagctattaatactttttcttttcttttcttttctttttttttttttttttggagacagagttttgctcagtcgcccaggctggagtgcagagtggcgcgatctctgctcactgcgacctccgcctcccggattcaagccattctcctgcctcagcctcctgagtagctgggattacaggcgcgggctaccacgcccagctaatttttgtatttttagtagagacggggtttcaccatgttgacctggtcttgaactcctgacctcgtgatccaaccgtcttggcctcccaaggtgctggcattacaggcataagccactgcgcccgaccctttttctagataagtcagttcaggtttttgcatttgtattatgtttttcatttttcttttctttttttttttttttttttgaggcagagtctcactctgttgcccaggctggagagcaatgacatgatttcagctcactgcaacctctgcctcccaggttcaggggattctcctgcctcagcctcctgaatagctggaattacaggcatgtgctaccatgcccagctaatttttgtatttttagtagagacggggatacaccatgatggccaggttggtcttgagctcgtgacttcaggtgatctgcccaccttggcctcccaaagtgctgggattacaggcgtgagtcaccacgcctggcctgtattatgtttttcattaagtactcatgctttagaacattgttattgacatcagtctgtagatttactacatgaaaacttggataagtgg

SEQ ID NO: 25725 - DNA, 1050 bp, Homo sapiens
ccagtcagggcaatacagcaagacaccatctctccaaaaaaaatttttttaattagctgggcatggtggtatgcacctgtgggctcagctacttgggaggctgaggtggaaggatcacttgagcccaggagatcgaggctgcagtgagccatgattgtgccactgcacttctgcctgagcaacagagcaagatcttgtctcaaaaaaaaaaaaaaaaaaggtcagactattcatatgggatagaatgaatattatgaagtcaattacaatatctactccataggaagtgtggatgtatatgtttttacaagatacataagtgtacacagtgtacaactaagtttgaggacggctacacttcccagtttaagacttaaaaataggggaaggccaggcgtggtggttcatgcctgtaattccagcactttgggaggccgtggcgggtggatcacctgaggttgggagttcgaaaccagcctaaccaacatggagaaaccccatctctactaaaaatacaaacttagctggacgtagtgactttactaaaaatgcaaacccagctactccagaggctgaggcaggagaatcacttgaacccgggaggtggaggttgcagtgagccgagattgcgccattgcactccagcctgggcaacgagagtgaaactccgtctcaaaaaaaaaaaaaaaaaaaataggggaaaacaactgattttttttttttcctattttccagtggaacacagttattctatgtgactggtttgactttctttctctctctctcctgcagggaaaagttttgattagccttagttaataacccagggtaggctgggcgtggtggctcacgcatgtaattctagcactttgggaggccgaggcaggtggattttctgagttcaggagttcgagaccagcctgggcaacacagtgaaaccctgtctctactaaaatacaattagctgggcgtggtggcatgcacctgtagtcccagctacttgggatgctaaggcaggagaattgcttgaacctgggaggcggaggtttc

SEQ ID NO: 25726 - DNA, 1008 bp, Homo sapiens
atgaatgcatttagttgtctttcatgacagattacccccaaatttaacatctttatcaaagtctcattaggttgcactcaaactgtcggccagggctatagtcatttgaagtcttgactggggctggagtatgtgctttcaggatgtctcattcacgtagctgttggcaagaggcttcagtgtcttgctaattgtttgcagaaggtctcaattttctgttgcctggtcctatccacagggctgcttgagtggattcataaagcgtcttctggtgatagggcacgtggctttgtccagagcaagtaatcgaagagagcaagcaggtagctactgtgtcttttatcacctactctcccaaattgcatactatcaccacttcctgttcattagaagtcactaagctcaaccaatacttaaggggaggagtatcaatactcaaggaagaggagtatcaaagcatttgtggactttctaaaacccctgcggaggataatgccaagtgttagtgagcgtagactttgcagccattctggagctcaagtagtagtatgtgcatgtcctatgatccagtaatttcatttttagacatctcagagtatttgtaagagtttcataaagggatatgtacatgggtattcattgccatattatttgtagtggcaggaagttggtgacagcctgtgtgttccacatatcagtctgaatgtagataagtaaaatttgtgagtgctcatactagcttttctagtgctaccatatcaaactgccacacactgggagcttgaaacaacagaaatttattctcttacacttctgtttaaaatcaaagtagcagcagcaccatgattctttgagaatctgggtagaatctttccttgcctatttgtagattatggtagtagctgttaatccttggtattccttggtttgcagctgcatcacttcagtctctgcctcttgtcacatagcattctccctctgtgtttgtcttcacattggcactttcct

SEQ ID NO: 25727 - DNA, 1065 bp, Homo sapiens
tggttgcttgacttcagtattcgatcacttccttttatgtgtcttatgtcttcttgatggcttttccatatctcagcctcaggtgtttgctgtcatttacagttgttgttaggcccatttatgcttaatgaagaattaccagttaatatttatttgataatgttttacatagtaagttcatcttattcactgtcctgaatgctttctttataatactgtttggtaatgaagttgctatattcttaccagaatgtatttcctcattaatagatgtctgatatcagtatatggacttatgatgcgcaatagaaatgatgtataattaatatattatgcataacaagaacctgttttacagtaaacttctgtttactgaatttaattcacaagagttagtaattggcaaccttaggattagaatccgtgtttttctgattaaacagccagaatgaagttttaattactaaattataatgcatcaataatcatctcccatgtaaaagcttttaaaaaatacttcaaaaatacctgaagttacactgtaaggaacagccatcaggatggtgctgtgagtttcagcattgagattctctgtctcttcaaagacagcaatgataaacatacacacaattaataatcatactttccgaatgaatgtagatgcataaatctgcatcttctctagaaatcataaagaggaaaaatgcatcaacctctgttttcagtgaactgaaagacatatgtaaactccagattatgttatttgagggctatcaaaaacatccgaaagggacagaagctattagtttaaatatacttactgacagtaaggggttcatgttgaagttcaaaaggtaaatctcttgtttgtaatgacgggagttggtggcgaagtacctgattatattcagaaaagagaaagtagagctgtacacatgtgcacacagagccacatgtacaggaaccagcttttctctgtatttttaaataatttttatttatttatttcttgagacggagtcttgctctgtcacccaggctggagtgcaatggcacaatctcggc

SEQ ID NO: 25728 - DNA, 1106 bp, Homo sapiens
gtggtatggactcatgtctgtttaataattttatgtggggaatattttcttttcgtaaaacttgagtttacctgtgaagaaattagtcactgtcaatttattaggtgttgaaacagattgctaagggaaataatttcatcattattggttaaaaaaaaaaaaaccctctcactttctaagaggatttctaagaagaatgtgtttgggaataagtaataaccatttttttaaaaatgtaggactttgaaacatgaatttagttcttagatttttaattgactcatctcacactcacttgataagttgtcggaccatcttacaggcttcttataaacctaaaccaagagaaaacaagtgttttcctgagaaagcacactagaaaaccttcattaaagagatcaactaaattttgttgctttttgttttttaattggaagctactgatgtggttaaggaaaaatcagtaagtatagattctagggaatagtctacatggttctatgaagagccaatcacagatttatttaatgtatttctctgaaacagtggcttttagtagctgaagaaggaagaaaagcaacataaccggatttaaacaaagcttttgttttttcatgaagcagtcatattggtgttatgtcagttgggggagattttagaaagttatgttatggaaactgtaacttataaaaaaatactgctaacttataaaaaaaagtactgctagccatttgcacatagacacttagtgaatgaatgtttctgttttccttcatcttctctagtccaaggtgtgttcatataattacctaatttacattattgagcatattaaatatgttcatagatgattaaaaactgggtgcgattaagtactcaaccaagaacaaatcaaattactttgaataacctgtttttaaaaaagcagatgtgttttaatctgtgtggacagaaaaaaaatgagcagactctttgaactgtctagctagaaccaaatatagcagataggggctacagttgaggttctgaagtgtgtgtggtttgggtgcttgggtgtgtataaacacatgatactgtatcatagcaataagatttgtaaaacattg

SEQ ID NO: 25729 - DNA, 1961 bp, Homo sapiens
gcttggagctgctttggagatttctgttgtctatccctcagccaaccagactgaatagtcctgccgtacagcatcctgtgtatttgaaacttgtcacccttaataaatactgatttctgaagtatctgagactatagtttgtttacttcaggtagttcctcagaagggcaaccctcagtgagagattatacaaacgccgagtcagaattttttggggggcaagaagaagactctttctattaacctccagcctttgcaaaaattgttagtgtcctaacacaagtaattgtagtagcgagaggactcttggcctaataattcaagtcaaatgagaaaataaaatggaagtcttcaggaaaatagaggacttgttattttatagaatttcaataaaatatctagaagtcttcactttcgtgtttcaattcttaccccgtgtgatgtctgtccctaaggcactaattgtcttcttagaaacactccttgtgtttttctaccaaagctattaactctgattcgatatgacttgcccagtactttcagccttcatgctcctttctggtttctaatttatttatttctgtaaccaaaacatagaaactgtctgatacctactgctgtggtttgaatgtgtctcaaatttcaggtgttggaaacagtcctcaaattcatttgttgatgatatttggaggtgagatatttgggaggtaattaggattagataagatcatcaagatggtgccccagtgatgggactggtgggtggctttataagaagagagactggagctgatatgcttttgttctctcaccgagtgatgacctctgccatgttatgacacagcaagaaggccctcatcagatgggccccttgactttggacttcccagtctccagaactgtaagaaataaatgtactttctttataaattacccagtctcaggtattgagttatagcaacagagaatggactaagacagaaatttggtactgagaagtggggctgttgctcataacgattacctaagaatatagaagtagctttcgaactaggtaatgggtagaggctggtaaagtttggaagaacagtctagaaaaagcctatatttccgtaaatggagtgttaagggtgattctggtgagtgctcataagatgagaagactaggaaagtctcaaccttcttagagattatttaagtggttgtgaccaaaatgttgatagaagtatggatagcaaaggccattatgacaaggtctcagatgacaattagcaataccctgttggaaagtggagtaaaggccatccttgttattaattagtgaagaactgggatgaactgtgtctatgcctaaggactttatggaaggctgaatttaagagtgatgaactaggctatctggtgggagaaataactaagtagcaaagcattcaggctgctgcatggctacttgtggccacttatagagagatgtgagggcaaaggaatgacttaggacataatataattagaagggaagaagagtagaaaattttggaaaattctcagcctggctgtgtggaaaagaatgaaagagaattttcaggagaggaacccaacgttgtgactagcaaccctttgctgagcagatttgtacaaatagaagatatcatcaagacaattagaaaaaaaccttgaaggcattccagagatctttgaggctgtccctcccatcacaggcccagggctctaggaggtcagattggttttcaggagggtttgtggggtggtactaattctgtaggcatgtagaatgcaagagctgtgggggcatggattcctccacctagattccagaggttgttgaaaacagtctgggggctcaggcaagagacctgtcccaggagaagagccactgcagagagcctttctagagcaatgcccagtagaaatatagggttagagctgccacaaagtttcta

SEQ ID NO: 25730 - DNA, 1961 bp, Homo sapiens; identical to SEQ ID NO: 25729

SEQ ID NO: 25731 - DNA, 1961 bp, Homo sapiens; identical to SEQ ID NO: 25729

SEQ ID NO: 25732 - DNA, 1961 bp, Homo sapiens; identical to SEQ ID NO: 25729

SEQ ID NO: 25733 - DNA, 1961 bp, Homo sapiens; identical to SEQ ID NO: 25729

SEQ ID NO: 25734 - DNA, 1059 bp, Homo sapiens
attatatgttagtcttcctcaatgccttgtggagggataaggatggagcatgattcttgggcttggatgagtcacagatgtataatggctgtgtgactttgggtatttcacttcattctgctaaatctcattccattatctttaaaatagggatagtaataacacctaagcttgctttagaaaattattttgaggatcaaatgagctaacagttgtgaaaatgctttgtaatttgtaattattgtcttaaaaaaaccctagttttttgggtgagagagtctttggtctcaatgtcaatatatgtacagatcaccttgcccggatgtgtgccttgtacttgcattctaggatattgcctgtttggaacatctactcatattttcatactgtccctctctgggcaactagcttttgtaatttacaaatatttacaaatgtttaacaaatttaaaggttaaaaacaaatttaaagaaattatccacacagaagtacaaaagagaaaaaagatggaagaaaaaaacaagagcgtcagggaacgaagggacagtatcaacaggtctaacattcatgtcattaaaatccagaaggagaggagattgggcacagaaaaaatatgtaaattaataattgccaaaaacttcctattattggataaagatataaatttacagatttaagaggcctgttaaacccaaacaggataaactcacagaaaggcatggtcagaaaaatcaaaatgctataaaacaaatgtaagggagacctagtctctccccggatcaaagaagaaaaagaaaagtaaaggtgaagcagtatggtgtacagtagtccttggtcacagacatgagttaacaaacttagttttgttttttttgtgtgttttgtttttgcatctcttagaaattttgctctttgaagtggccatgtgagcataattacaatttgtttttgtgctatcgaaagggcatatgagcgattttctttcatgtgagacttgtaattgaaccaatatattcttaggtagattttcagtaagtagtcattggaaaatgctatat

SEQ ID NO: 25735 - DNA, 1059 bp, Homo sapiens; identical to SEQ ID NO: 25734

SEQ ID NO: 25736 - DNA, 1059 bp, Homo sapiens; identical to SEQ ID NO: 25734

SEQ ID NO: 25737 - DNA, 1059 bp, Homo sapiens; identical to SEQ ID NO: 25734

SEQ ID NO: 25738 - DNA, 1059 bp, Homo sapiens; identical to SEQ ID NO: 25734

SEQ ID NO: 25739 - DNA, 1032 bp, Homo sapiens
gagagcttggagaagcggataccctaattgtgcatatgaatttgcatattcctgacttaccccaagctttaaatgcacaagatagacccaaattgttttttattttgttttgtttttgagacaggatctcattctgttgcccacacagagtgcagtgatatgatcatgactcactgcagcctcgacttccctgggctcaggcaattatcctgcctcagcctcttgagtagctgggactacggttgtgcgccaccatgcctggaattttttttttttgtattttttgtagagacagggtttgccgtgttgcctaggctggtcttgaactccgagctcaggtgatctccctgccttggcctctcaaagtgctgggattacaggcgtgagccacagcacccagccaacccaaaatgttgaaagtaagatttgaactatcatcagagtctcaggctagaccctgagtggcacattcatgggtccaagcttaaagcaggaaagtcaaggcttttgagaactgagctgacgttggaaccactgtataaggtaaaacagaaattgcagtttgaacctaactaggttatatgcttgctgaaataaacaaaccaaaaagctagtgttcttcaaaggattataacaagacccaggactcagaatttatacagcataacattcacaatgtccaggagacaacctaaaattatttgacatatgaagaactgataaaacattactaaatctcatgggaaaaagcaattaatagatgccagtcctgagatggtccagatattagaaatatcagataattgaaagcagctcttataatggtgcttcatgaggctaacacactggaaaaaatgaaaaggtagaaattctcagctgagtagtagaaactataaaaaagacggaaaaatacaataatctgcaatgaaaaatttactacatggactccatagccaaatgaaagatataggaaagagtaaattaacttgaaagtaaaccattagaaattattaacaaaggggaagacatgct

SEQ ID NO: 25740 - DNA, 1032 bp, Homo sapiens; identical to SEQ ID NO: 25739

SEQ ID NO: 25741 - DNA, 1032 bp, Homo sapiens; identical to SEQ ID NO: 25739

SEQ ID NO: 25742 - DNA, 1032 bp, Homo sapiens; identical to SEQ ID NO: 25739

SEQ ID NO: 25743 - DNA, 1032 bp, Homo sapiens; identical to SEQ ID NO: 25739

SEQ ID NO: 25744 - DNA, 1081 bp, Homo sapiens
tgtttaagttccttatagattctagatattggacaaagttaagataaagacctttgtgtaatatccagaatctataaagatacctagttagcaaatattttctcctattctgtgggttgtctgtggattcttctgttttacagaagctaaagagcttaattaatctaaagagattaattaggtcccacttaccaatttttgtttttgttgcaattgcttttgagaacttagtcataaattctttctcagggccgatgtccagaacagtgttttctcatttttttttctaactaggatttttatagtttgaggtcttacatttaaacttttaatccatcttgagttgatttttgtatatagtgaaagatagggttccagtttcattcttctacatgtagctagccagctatactagcaccgtttattgaataaggagtctctaactcattgcttatttttgtcaactttgtcaaagatcagatggctgtaggtgcatggctgtatttctggattctctattctattccattggtctttgtgtctgtttttgtaccaggaccatgctgttttggttactgtagccttaaagtagagtttgaaattgggtaatgtgatacctccagctttattctttttgcttggtattgctttggctatttgtgcccttttttggttccatatgaatttaagaaattttttttctaattctgtaaaaaatggtgtcggtagtttgataggaatagcattgaagcataaaaatgacacttcagggactcagggaaaggatgggaagggggtgagggataaaagatcacaaattgggtgcagtgtatactgcttgggtgatgagtgcaccagaatctcacaaatcaccactaaagaactttctcatgtaaccaaacactacctgttccccaataacttatgaaaatcaaaaacaaaaaactctgacatttaacaggggaaaaaataaaaaaaggaatagtgttgaatctatagattgctttgggcagtatgggtattttttaaaatgatattgatttttgcaatccgtgagcagcgttttccgtttgtttgtgtc

SEQ ID NO: 25745 - DNA, 1081 bp, Homo sapiens; identical to SEQ ID NO: 25744

SEQ ID NO: 25746 - DNA, 1081 bp, Homo sapiens; identical to SEQ ID NO: 25744

SEQ ID NO: 25747 - DNA, 1081 bp, Homo sapiens; identical to SEQ ID NO: 25744

SEQ ID NO: 25748 - DNA, 1081 bp, Homo sapiens; identical to SEQ ID NO: 25744

SEQ ID NO: 25749 - DNA, 1029 bp, Homo sapiens
tatttcagtgttggtgctgttttcacagagacaattgcttccttaacttcttttttaaaatttacagttgtagatttagctacaattttcctttggtttgtggtaatatttttcagatgagaggtttttgctttcttttgttgttggtctattgtttttctataacttttcttcctttattcttgtatctttgtatggatttgtgctggtacctttgtgataattcatcttgggaatatgtgagtttttgctcaattagctgctttcaggaggtttataataggaaggaggtagaggcacattccatattatggagttttcctttagactcaggatttttggacatgaattcatttagctagtatctttcactagccattgggggttggcagctgtgggatttttgcaatacagtttcccatttgtggtagcagagatagaccactttgtgtgattctttttttggatccagtccctctgattttcggatttcaactggtccagagaagttcctgctgctagcctgtgcattttttcctggtacttagttttgttcctcagagggagcccctgacctttgagaagtgttctttgctagctttttcttagatgtgcagctgacacatctgtcctctttctcccacaagtacccaggattgatcgtcattcttttggagccccttttacaaattttgatctggagttcaaaaatctaaaactagaattatagttttactaaaaatggagagtgtgtttttattttatttttcttgctgatgttggattaattgcttttggatgatttctaagaaaagtaaagggaaatgcctatattgtgctacaatattaaaattggaagtccatattcatttttaaagtaaaacagaaattctcgatttcagtatttttgtaataatttgaattctagtatatggtagcagtgaatagacctagataaaatctccctcaaccccagtccatacaatacaatctctgttctagttaggtaccgtagagcagtgccactca

SEQ ID NO: 25750 - DNA, 1029 bp, Homo sapiens; identical to SEQ ID NO: 25749

SEQ ID NO: 25751 - DNA, 1029 bp, Homo sapiens; identical to SEQ ID NO: 25749

SEQ ID NO: 25752 - DNA, 1029 bp, Homo sapiens; identical to SEQ ID NO: 25749

SEQ ID NO: 25753 - DNA, 1029 bp, Homo sapiens; identical to SEQ ID NO: 25749

SEQ ID NO: 25754 - DNA, 1050 bp, Homo sapiens
ccttatgcagtggggaggagcctggcctcttcagctcatgtgtggtggtctggtattcaatctgtggggtgggaacctgttggcaggacccccttttttagctgggagctttcctttaataaattctgctctcctcacctttcaatgtgtccacatgcctaatttgtcctggtggtgacacaagaacccggattttagctgaactaaggagcaaaaaatcctgcatcactaccctagacttatcaacttgagttactttatcaagtataaaacaagcaaatagctctactggcatttttattagaagtgtattaagtttattaattattttgggaagaatcagcatctttataatattgaaattttccatttaggagccaatctactgatgtctattatctatatatgtctttgtgttcctaggttttcatgtcatttgtattcacaaaactgtcaggttaatacatgaaataagggtcatgtctgactaatctccgactaatctcaataaactactttgaataagagtcaacttctgactaatctctgaaaccctatttctgtgatatgtccttttaaaatatgactactctatcttgccctttagttgtgcatctgtgaagtttgagactgttttctttgaatatatgtacttagaagctgttactgggatatcatggcttaatctacttgtttcatcagtgagttacaatgacaagaattacttaaaatagataactagttaggagcatttgtttcaattctgacacttcaagaaaatgtttaagtttttttttttattttctgtttagtttattccagctctcagaaatgtcttcacccttcactttagagcccatctttctataatgggcatagaattttattgtgtaaatatcatttgtataatttgagtgttaccagaaccttgacgttttcatgacaaatacatttcggaaactttaactcataaattccttattatatgtcactggttgtgttagagtgcattttattcttttagaactgcagttttcattaacaattaaa

SEQ ID NO: 25755 - DNA, 1050 bp, Homo sapiens; identical to SEQ ID NO: 25754

SEQ ID NO: 25756 - DNA, 1050 bp, Homo sapiens; identical to SEQ ID NO: 25754

SEQ ID NO: 25757 - DNA, 1050 bp, Homo sapiens; identical to SEQ ID NO: 25754

SEQ ID NO: 25758 - DNA, 1050 bp, Homo sapiens; identical to SEQ ID NO: 25754

SEQ ID NO: 25759 - DNA, 1097 bp, Homo sapiens
ctctcccgttaatttatatatttagtcatttatatctgcatgaactcattgttacttattttatacctgtactttaggttacaatccaatacaatgtaatttattttgttgctcatattgttttggtcataggatgccctttcagagtggctcctattgtctcttttgcatgcccccattgtttgttttttgagcacgttttactttttggacctacagtgtgctccgactctttgtatgtttcccacctcagccttagaatcagccattttcataagagtgctggtttcttttacgggagaatgatagtgaaaaccaagatgtaaggccaggcatggtggctcacgcctgtaatctcagcactttgggaggccaagtcgggcagatcacctgaggccaggagtttgagaccagcctggccaacatggcaaaaacatgtctctactaaaaaaaaaatacaaaaaattacccaggtgtggtggtgcgcctataatcccagctactcgggaggctgaagcaggagaatcgcttgaacctgggaggtggaggttgcagtgagctgagatcacgccactgcactccatcctgggcaacactgtctcaaaaaaaaaaaacagaaagaaagagagaaaaccaagatctgaggactgggtgtgcttgttgctactggactgtcattgattttaagccctttcagcagacagatctagaacatatatttatatattataacccatgtatatatacatctatagttgtttccgtgtctagccatctgtatctatattaagctaaacatgaattcatactgatgtctggactctactccagaacacatggttcattctagccttccctctttccttatatgtaaccttcctctccaacagtaagaaacctggcccccagatctgccatctgtttatttatttgtttgttcttagtattcatgtagagtggtttcagaattgttaatctctactcctagaaacaactttaccaactagactatagtgtttatgtgcagttctttttgtctttagtcttacagttttcagtcatagcatcatttatcaaagttatgtagaccagtgtct

SEQ ID NO: 25760 - DNA, 1097 bp, Homo sapiens; identical to SEQ ID NO: 25759

SEQ ID NO: 25761 - DNA, 1097 bp, Homo sapiens; identical to SEQ ID NO: 25759

SEQ ID NO: 25762 - DNA, 1097 bp, Homo sapiens; identical to SEQ ID NO: 25759

SEQ ID NO: 25763 - DNA, 1097 bp, Homo sapiens; identical to SEQ ID NO: 25759

SEQ ID NO: 25764 - DNA, 1050 bp, Homo sapiens
aaggtatggaggctttgcctacaagctggattaataaaacataaaaaagtataatacataacttattaacagtagtatttgtttccctttctatagtcataaaataactgcctgaatttatttattaaggatagtaagattgcctgccttggattcaattagtatgatactctagttggacatcttatacggaagtgcctctgtctggcctctttttattgactgagctaggtgatatgggagaagtagtctgctgtttgaatttaagcatttggtagttactggtcatgtttattctttcttcctttaccaaacagaaagagcaattgtactgaaattgaggatgtgttttgattgaattagtctttttctttttaaacactttttaatacttttgggaatttttacaactacttagcatgaaacaagatgcctgccttcctgatgctttttcttgtcagaggaaacagatgacaaatatctaaataattaaacaagataatttaaaaaggtaaaagtgttatgaagaaaataaaacaaagtagagataataaaacagatgggatagacaaaaatggtgtgctactgcacatctctttacatctctgcattcagtgacttcatgcttgggatcggccatggtaggagtatttacaccacagaaacaagccagtgctacaaaccagtgctataaactgggctttcttccctctggacagctagttattaaatgttaaccagcacactactgagtgaaggtcattgactaaaggcgagattctgacatttagtatagagggggtaggaagaaaacaaatggtgactgagcattgctttgtgatagtcattgtgccacatgctcaatttatcttctttatctaatatttataaaaatggtgttagaggcagtattatcctcattttattggtgaaaagaccaaggctcagagaagttgacttgtaaaaggttacataataaactagggtatttgatttgaacccatttctctgactctaaagcccttttttttcctctcataccaagcttct

SEQ ID NO: 25765 - DNA, 1050 bp, Homo sapiens; identical to SEQ ID NO: 25764

SEQ ID NO: 25766 - DNA, 1050 bp, Homo sapiens; identical to SEQ ID NO: 25764

SEQ ID NO: 25767 - DNA, 1050 bp, Homo sapiens; identical to SEQ ID NO: 25764

SEQ ID NO: 25768 - DNA, 1021 bp, Homo sapiens
gatccacccgcctaggcctcctaaagtgctgggattataggcgggaaccaccacgcctggccagcccctttctccttttaaagaatcacggactgttgtgttgactaggcaatttctaatcatcagtctattctgacagcatacatatctcaatgtgttttgtaacacactgtacattttcgtcaagactagtaaagtatgttgttatagccacatacataaatatttaatacttggtcattataattggagcctgggctaaaggttttcttttcggaatggcaattttaaatattcatatcaaaactgacaactctcaaactcctggcctcaagcagtcctcctggctcaaacttccgaagtgttgggatcagaggcgtgagctaccgggcccagccaaaactgacaactcagaagccatttaatttagcttagttctttaatgtcttgaatattgttctagaacattcttggagatactttggccatgacatttctgttgatctgtaaatgtgcatttatcctaagccattgccccttttcaggtcactgtgtccaacatcccaataggccagtatagtctacttaaaagccaagttcttaactgaccaactctagttgagatagaatggtttctaattcaggttcttttcgtgattttaatcccatgtctctcttatgagcaggtgcaaactactttagcgccttgatcttttccactttccattgaccaatttccaaattattagttacctcaatcttagttttctttatggattagttgttttgtagccagtacaaagctgatttgcataagcagtgagctgctgctaattctctatacatatattgagattaatgtctttgtaggactgactgaaaagtgaatcaatgaacttacatttcatattataattatgagaaccatcaagaaagtaacattaaaataatgctggatatagtaatgagtttggtactatgttattcatataaccagaacttcatttaacttcactagtac

SEQ ID NO: 25769 - DNA, 1021 bp, Homo sapiens; identical to SEQ ID NO: 25768

SEQ ID NO: 25770 - DNA, 1021 bp, Homo sapiens; identical to SEQ ID NO: 25768

SEQ ID NO: 25771 - DNA, 1025 bp, Homo sapiens
taagaggttttaagtgagagagaatgagtgatttacacttctgagttatgaagtgttcttacctttctgtatatggtaatggtgcttcaaggtaggcatttcttttacattcataaatgaactttactttgccctatttaaaggtcagtattagaactggcctattcgtgtagttcttatatgggacaatcagaccacttgtgttctaggcaattttattttcccattttggttttaacacaggtcagttaacaatattatggaaagcttcactttttactattcaacttgaggttgaaatgatatattatgaagccaaaacaagttttatttgttctcccatttcaaagactgataaaacagtctttgcttataaatggaaagccttagagaaagtccagacttggaatgttccataatttaaggcacaaaggtgacacctatcagtgcctgcaagctttttttttttttttttttttttttaaataaacttcgtccacggagtaccaaaggctgtatgtgtactgataccttaacatcattcatgggaatgctgagtcataagccacaattttacctacttgtatgcccaatgtctggcacatagcgagcctaaatcatccaggcatttgtgtcatctttgttgctatttccttttagtcttcatctgttcgtatagataatttgtaatcatggaacacatgggattttggattatgatttctcatttaattttcctgttagtcttctcatacattttaatagttgcataatattgtgtcattgatgaactataaacgttcctgtgttcttggacatttagatttctgacttgttttctttttaagatgatgctacaatgaggatatatatatattggtgagggtcaagtagataatgccatattattttcaatttcaaagtgaattagaagttatttatgcatagctactgtgtgctgtggagaagatgaaatcttgattcttggttccagtagcttatattgtcattctagaatgcaaact

SEQ ID NO: 25772 - DNA, 1025 bp, Homo sapiens; identical to SEQ ID NO: 25771

SEQ ID NO: 25773 - DNA, 1025 bp, Homo sapiens; identical to SEQ ID NO: 25771

SEQ ID NO: 25774 - DNA, 1074 bp, Homo sapiens
agtacaagcagacaaacaacatatgtgcttacttatatatttaatctaaaaccgttgaactaaaagaagcagagagtagaacagtggttaccagggttggagggaaggcatgggggaatggggagatgatagtcaaaggggaggaatttttttctttgagatatgttgcacagtatggtgaatatagtgactaataatgtactttatacttgctaagagtaacttttaaaagttttcactacaaaaaaaatttgaggtcatggatatgttaactagatttaattattccacattgtattcataaatcatcactttgtacctcataaatatataactatagtcagtttataattaaaaaataaaaagcaaagattaagttttgtttcactgtttacattgggcttcagtttgcttacataggaacccagagtcctaggaccatcttagccaaatggcctccaattaaagattgcttacactctttttttttttttttttttttttgagacaagaatcctgctctgttgcgcaggctggagtgcagtggcgccatcttggctcactgcaacctctgcctcctgggttcaagcaattctcctggcttagcctcccaagtagctgggactacaggtgcccgccaccacacctggctaatttttttgtatttttggtagagacggggtttcaccatattggtcaggcaggtctcgaactcctgacttcaggcgatccacccgccttggtctcccaaagtgctgggattacaggcgttagctaccacacctggccaagattgcttacactttttaaaaaatgttatattgtttttagtaaaacaaagggtaaaatttaataaaaaggcacaaacacattttgtgtatattgtgaaaataccatctatttcctccaaaagcttataaattgatatgagtatcataaacctgtttatttttctcctggactaagtattgttcaacgtttaatgtgtattatgtacagggaggtaatgtgggaccagattttctggttgggaaaggagatgagtactggttttagtacaataagtttccatgc

SEQ ID NO: 25775 - DNA, 1050 bp, Homo sapiens
attgttataaattgcatgaaatacatagtgggctcgattcatagcccccgtccgtatctatatctctatatctatagagacataacttctttcttcgtaagttatatatgtctacttctacctgtgttatcataataaaggtgtcatgatgatacaggtggaggtagaaatatataacttatctcttcataagggctaaaatgagaactaaaagtaatgagaattcagttgaatatgattaattatcaggatatgttaattagttctcttgatgcttactgtgatgcaaagtatgtgacgtattttaaacattttataataattgttcgtatgttaaccattaggcaagatttgtatttctaatgcttttaatgttcttttaaaataatgtttggaaaataaaaatactgaaaatcctaacatttctgaacaccagtttgcaatataatgaatttcctgtctgatcattttaaaactatcagagcatggcaatgatcatttttgcccaatggataacaatgtgttgaaccacagacagagagctctttgccttaagagatgaaataacttgtttgactatatataaatttttttttttttttgtagagacggggtctccctatgttgcccaggttggtctccaactcatgggctcaagcgatcctcccgcctcagccttccaaagtgctgggaatagaggcgttacattttgtatcatatatgctcagactaatcaaggatagttaatgccaaagactatttacaaaactaagtttcttactcagtgaaaagaggctaaatgaacatttgagcaactcatttaaatgaaatttagctggaaaaagaaaaattttgaatttttggtttatcgatcagggtctggatttaagaatcaaaaaacattaacataagcaggaaagcatttaatataggaaactagatgtctacagaatggttagatagggctctatgatgagtctccaggaaagattgcaccataaacatgaccagccggaccagccataaatgctactacttctgctccaacca

SEQ ID NO: 25776 - DNA, 1026 bp, Homo sapiens
gtttagactttacaatgtggtgctttgcaccttgtaaatttctaatataattccaacatccttggttacttccagttttccgtctcacatgtagtcctacacaaggtttttttccaaaggagaatatgtagttaattggccaagaaattgcaagctgggggaaaaattataaatactgggaaataaaggattcttcatagggaacgaaacagggtttgttaatgatttatgggaattatgtgaagggccacattatgcatcaacaataccctccagcctatatttcaagcacatgcagttttttgccgcagtgcttctgctgcaaagacctacccccacttctcttagcctgtctgtccccactccatacccccgacctttcatccagctggcctgtgcttgctaaagctccctttatcctttcccagctccctttccatgttggagtaggttccccccttccatgctctcatagcaccctgcaaccttattaggctgtaattattacatagttagattgatctccaactagattgtcatctctttggtggagagattacgttcttgtgtatcttcagtgcctgacacagaagtgtttctaaaagtaacatctgcacacccctcaaacagaatcacaaggggcgaggccaagaaatctgctctccaagtgataacttaaactttttaacatgctcttcaggtgacacttaaacttgtttgaaaacctctgtgtcataaaactaaatattagctggatgaatgtatttgtatctttttctgtgttggcctttgtgaggagaaatgctgtctatgcaccaaatcagagctgaaaaattctagtgttttgttaaaaaaaaaaaagagagagagagagctgggtttggtggtgcatgcctgtagtcccagctacttgggaagctaagccaggaggactgcttgagcacaggagttcaagtccagcctgggcaacatggtaagaccccattgctaataaatgaataaatttttctctcaaggtgagagata

SEQ ID NO: 25777 - DNA, 1022 bp, Homo sapiens
ccgatcttcttgtgtcaccatgctattatgcatagaaaggtaagtcagcaaagttctgaatttacattggtttggtgactgagaactagatatttattgttttttttctttttgctgacattcttagatgtcagtgtttagataaagttggatggcggggattgtttgtttttaaacatggcttttgctacggccattggaaatgagaattttgctgtgcctccttgctttaggtttaaagcagagaaaatgtgtgactgcttttggacctttgtagatgagtggtgtcagcctgggaatagttagataaaggaaaatacatcttattcttggttgcctcctgggtggggctgggacattttgtgtggccctgaggactctgggttctaaaagttgtgagaacttgatctggattcttacacccattctgttaaagagggagtacccagaagcctttctactggaataggaagaataaaaatttcatttattaggcttttagagttggatgtcttgttacctaattgaaattttttcctccctgatacagatgactagtcctcacttcaggctcttttcatcaaaaattccacaccctcaggtaccatctgtggtggctctctgcaagttttaaaactgcctctgctgagctctcatcattttggtggtttctgtgttagatctcgttagtctgcattccacagcttctcagttgccatttgatttcccaacttgtccggaagtgtttccagaatactgatcactttttttttttgaggcatctgacaaagtcacaaagtctcagactagaaataattacccagtatgatcatggcatccaagaccagagtctcagaactcattaagaaacagtttacttggaatggagaatacccatctgtaatacaggtcctgtcatttcattcatctcaaattattttgaattcttcccaaatggctgctggatttaggtggtaataggggctgtgggccataaatctgaagccttgagaaccttgggt

SEQ ID NO: 25778 - DNA, 1019 bp, Homo sapiens
ccaggcgtggcagcgggttgtagctgtagtcccagctacttgggaggctgaggcaagagaatggcatcaacccaggatgtggagcttgcagtgagccaagatcgtgccactgcactccatcctggtgacagagcgagactccatctcaaaaaaaaaaagtatacagataaagacattacttgctataagcagtgaaaagtcacacctcccaatgaccaggaaaatgcaaacttgaaacagtgaggcatttttagctactcctaatttagtgttttcctcccttcacaaaacaaaaatgtgtagtgatgaaaagcagtgtaaggtataactggtagttcacatttaagttttgtgtcattatatgttagcactagcttttttgaaaagcaactaatagccataaaattagctgtaaaattgtttatatctttaaacttactaatcccaatttttgtaatctattctaagaaaatatactgcaggccgggcacagaggcttacgcctgtaatcccagcactttgggaggccaaggcaggaggattgcttgagcccacgagttggagatcagcctgggcaacaaaaaaaaaagtgagacctgtgtctacaaaaaataaaaaaataaaaatggagtatattgaaaatatatactgtaatatgaaaagttacacaaattaagaatatagcatagtactgagaatatgaaagcaatctagtcagtatttatgaaaataaactttggtggctgggtgcggtagctcatgcctgtaatcgcagcactttaggaggctgacgtgggcggatcacgaggtcagaagatcaagaccatcctggctaacacggtgaaaccccatctctactaaaaatacaaaaaaaaaaaaattagccatggtgtcaggtgcctgtagtcccagctacttgggaggatgaggcaggagaatggcatgaacccaagaggcaaagcttgcagtgagccgagactgcgccactgcactccagcctgggtgacagagcgagactc

SEQ ID NO: 25779 - DNA, 1170 bp, Homo sapiens
ttcttatattctgagagtggatattttctagtcccggtggtactcacagactggttataacaactgtttttttttttctttttttttgagacggagtctcgctgttacccaggctggagtgcagtggcacgctctcagctcactgcaagctccgcctcctgggttcacgccattctcctgcctcagccatcccaagtagctgggaccacaggcgcccgccaccatgcctggctaattttttgtatttttagtagagacggggtttcaccatgttagccaggatggtctcgatctcctgacctcgtgatctgcctgtctcagcttcccaaagtgctgggattacagtcgtgagccaccacgcctggcctggttataacaactcttaacagacttcaattaaaatatttacagctgtgattttttttttttaatttcttattattctttaaaaactaacctaaaggagtggaaacaatgaccttgtcattgtttcctaactttaattattataccgcttgcatttaggagcttcttttagaacatttttatggtttctctttttttttttttttttttttttttttgagaccaagtcttgctttgttgtccaggctgtagtgcagtggcacaattatggctcactgcagcctctgcctcctgagctcaagtgatcctcccacctcagcctcctgagtagctgggactatgggtatttgccaccacacggaattactttttttgtgattttgtagaggcaaggttttgccatactgcccaggctggtctcaaactcctgggcccaagcaatctacccgccttggccttataaattatttttatattttcttccatatagaggtttaaacatagctgttatataaacataaccatgatcattaaaactatcatatttttaaagcaacatgtaaaaccaaaaagcagtaataattcgctaaattctgttcgttgatagtatggggaaaaacaatgttatctaaatgagaactgtttaaagaaaccttactgtatttaaaggaaacttcttagaaatagaggaaaatagtatgtttttagctgagaaggctaaatatattctttcctcactttttaaagttagttaattatagacatgtaccctggagtaaaatatctcagaagtagaccctgtca

SEQ ID NO: 25780 - DNA, 1096 bp, Homo sapiens
gttttttgcaccactttttttattgtggtaaaatagacataatgaaaaatttactgttttaaccatttttaagtgtacagttcagtggcattaagtacattcacatccttgcgcaaccatcatcaccatttatctctagaatcctcttcatcatacgaaactgaaactttgtaccctttaacaacagctcctcattttccctcccctcatcctttataaccactgtctactttccatctctgaatttgcccattctaggtaggtcacataagttgaatcataagtcttttttgtgtctggcttatttcatgttacatagtattttcaagttgaatgaatgaatttctgaatcatgttgtgtccttaatctgttacccattcatctgtttgctggatatttgggtttccacctttggctattgtgactaatgctgctctgaacattgatgtttgtataagtacctgtttgagttcctgctttcagttctttagggtatgtacctagaagtggaattgttagaccatgtagtatttctgtgcttaagtttttgaagagctgccagactcttctctgcagcagctgcaccattttacattccagtcagcaaatgcacaagggttccgtgttctcgccacctgttttgtttgtttgcttgcttttttaaagtatagccatcttagtgggtatgaagaggtatcttgtgattttggtttgcatttccctaatgattactgatatttcaagaatctttattagccattcgtatttcttgtttggagaaatatctactcatgtcattcattacccagccctctgctgcctttcactctgtcgtccaggctgcttactgcagcctcaatctccggggctcaagagatcctcccacctcagcctcctgagtagctgggactacaggtgtgcaacaccacacccagctaatttttaaatattttctagagacaggggtctccatatgttgcccagactggtcttgaactcctgagctcaagggatcctcccgccttggcctccaaaagtgctagaattacaggcatgagccactttacccagcccatttctgaattagattgtttt

SEQ ID NO: 25781 - DNA, 1062 bp, Homo sapiens
cagcattctttgctgtcaaatattttatcagaattgtcttttgtacttttgtgtcttcatcacatcttatttttcactttttcctgttaaaaagatacaaagaaagagtaatcatttcaaggaaaaactgccttgtttggggcatatggtgctgtagaaagttagacaatagtaatatggataatttcattaaaaagaagaagcacttaattaatgagaaaacttgaattgtgatgtttaaatattagtcagtgagtattcttaagtcagtatttctttcagttttctagtagtgtggatgaaatgcaaatacagagaaaatgatataggaaaaataaaatcttcataaagaggctattttgagttgtggatattgtagtatttattaagtgaaaaaacgaaaaagctttaagtgaaatacagatattgtctgtccatactgtcaatatgtaaaggcagaaagggcctccaatataacactacgatgctttaattttagtcgactttatgtactacaaggtggccttgcccagcaagaatggagagtgcctgaactattgcacagactactgaagtacttggaacccaaactcacccaggtttacaaaaatgtcagagaaagaataggaaggtaggtactgttttctctgtggtgtacctctcgagttctttgtttgtttttttttaaattgtaataggtaataatacatgctggttatgttgtcagtgggtttcatggtgtctttctcaaattgtttgctattgtgtcgtgggaaacaagatgaaacactctgaatgtaaactaggacagcagtgtgctcagaagccagagatgagcagtcacaacacctaagtgttaataccccttaattataaggcttcttttacacacaggcataatctaagacccactccaggaattgtcttgggacagtttactttgattgggtcataacttttgaacctcatttttatttataatgtggcacctcttcctattattaagtattttattttgcagtgtgctgacctacatattcatgatagatgtatctttgccaa

SEQ ID NO: 25782 - DNA, 1093 bp, Homo sapiens
tttctcactgttaacttgaactgcgatagtcacatttgagtttgagtcacctatcagttttagtttgattttcttctcctgtacagtcagccctccatatccatgagttccacatctgtggtttcagccaacctgaggagatggagaatatttcagaagggggtggggggatggttgtgtctatagtgaacctgttcagattttttttttcttgtcattattccctaaacaatacagtataacagctatttacatagcatttacattgtattaggtattacaaatactctagagaagatttaaagtgtacaggaggatgtgcataggttatatgtaaatactacaccattttcataacagacttgaacatctgtggattttggtatcctaagggagttctggaaccaatccaccacagataccaagggacgactatacttatatatgttttcagtatttctaaaataattgaatatggctgggtgcactagctctcaactttaatcgcagaactttgggaggccgaggcaggaagatagcttggggccaggagttggagaccagcctgggcaacgtagggagactctgtctctacaaaaaataaaaaattagccaggcatagtggcgcatgcctgtggtcccagctacttgagagaccgaggcgggtggattacttgagcctgggaggcaatcataccacttcactccagcctgggcaacagagttagacctagcctcaaaaataaaattaaattaaataactgagtatgatttgtttacagaattgtaggttctctgttgaactgttacatcatattttaaacacaggaaagcagagatccccggaaacttcactggctttttgaactgctgttggaatcaccattgagtggtgaaggaggatcctttgtagatgcatggtaaatttttttaaaaaacctatgaggttaacacgaaaggttttgtgttaacttatgtataaatggaaatgaatggtctatacttgtaaagtctagatgaagtaattactttcttctggaaggtgatgtgatctggttccatataacatgtgatacttaataagagttattta

SEQ ID NO: 25783 - DNA, 1026 bp, Homo sapiens
ttatgggatctccgtaaatgcatgttggtagatttcagttaaaactccttaaacttcatttaatttacttcactttgaaagttgacttggctgggagccatggcacatgcctgtaatcccaacactttggaagtctgaggcaggtagatcacttgagcccaggagtttgagaccatcctgagcaacatggcaaaaccttgtctctacaaaaaatacaaaaatcagctgggcgtagtggtgcacacctgtagtcccagctacttgggaggctaaggtgggaaaattacccgacccgaggaaggcaagactgcaatgagccatgatcgcaccactgcactccagcctggatgacagagtgagaccctgtcccaaaaaaagaaaagaaaaaaaagaaagttgagaaagggtttttaagtttatgtacttggtccttgagttaatggtattgtaactttttctgattctgaacagtttgccttttaacttctggtgttaggtaaatatggaagtgatttgttggggcttgacttatagttttggggattttaacaaattgcacaccaggtgttacagtggctttcagtcttcatttcccaagcagaacatttgttgatttttaattcacagtgtgagaaataggattcaaacttgagaatctgaaggaaaacttcctgttttagcatttttagagggaggtacttggttttagaaatcactgtagtctatgagaactaagaattcatggaaacaaaaatacagcctgcttttgactatcaaaatcttgtaattttaactttttcagaatcatgtatttaagtggattttaaacgctgaatattgttctttttttaactttataggcagaacagattatatttgatcatttttctgatcctaaatttgttgagcagttaattacttttctatcattagaagacagaaaaggaaaagataagtttaatccacgacgtttttgcctctttaaggtaactatattgtttacatatcctctttgtaatgcttagt

SEQ ID NO: 25784 - DNA, 1026 bp, Homo sapiens
gaataatacgtatttttagggttctttttagttacatgtatctgtgggggataatgattgtataaagtaaaattaagaataaatgaacaggtctttgcctttgaattgccaaaagagggagttttccgtcttcctttgacttttgcaagttcttaatagaattgtatttaatttataactagcattaccttcagctgaaactttattttggcaaagtatagctttttacatttatttcctatgtgtaacatttttacttttttttaacagatggttaatttcataaagtaccataaaataaaatagcctttaaaatttctaaaatgcttattttaatataggttagtaattgttcaaatcttctaaatctaaattgatttgaaaaaactaatacagtaattccaataaatggtcccattgttctgtgatacgaattcatactgcctggtgtgaagaatgaatatctgtagcatgatttatggtgattatcagcagatcaatttgaaactagtagagaaagagaattaacttagcacattagttgctccataggaaatgggaaaatatactaggtcagggagaaaatgaaacacataattgtcatgaatattttagtgtaatgtctaagatgtctgaggaaaatatctattgttaataacagtttggctgtggtattaggagacaggagacattatgcattttctgaaataccagaccagtttttagacgcacatagcaattcataagattttttttttttttttttttgagacagagtctcgccctattgcccaggctgtagtggtgggatctcagctcactgcgacctccacctcctgggttcaagcaattgtccttcctcagcctcctgagtagctgggattacaggcatccgcccccacacgcagctaatttttgtattttaattttttttgaggtggagttttgcttttgtcacccaggctagagtacaatggcactatcttggctcactgcaacctctgccttccgggttcaagcgattat

SEQ ID NO: 25785 - DNA, 1030 bp, Homo sapiens
atattgatgtggtaactgttgacaacatggctcatttttgcaaaaaaatggtaacaaaaatgccttagaagcatagaaccatcttttcagttttatcctgtcatctgtttttgttgtttttaagttgtccagttaaaatggctttcatgtaatggaaaattatgtgctagaaatttttttagactggaatttgaaactcattttcattaattattaggaataattaattggtaacttttaattctatctagttatgctgtgcagttctttgtaataagataataagaactgttatttttaaaatcttttctcaagaagctagagagcaaccatgaatgtctatgcggcaaagtagaacctacttagaactttttgcttctgtgtccccagaacaagttaatgaaactacttcagcggttgccaaacagtgttgttagaagattgcatcgtgaaagatacaagaagccctcttggttaactcctgtgcctgatagccacaagcttactgatcaagatgttacagactttgtacaatgcattattcagcctgtcctcttggctatgtttagcaaaaccggtagtctagaagcagcccaggctttgcagaatcttgcactcatgagacctgaattggtaataccccctgtacttgaaaggtaagtggttagtgggagtctcagccacagctaggtttttcttttggtctgttcagctcgattctcttttctcctctgtggcttctgttttgcttcttcgatgcttattcctgttcctagaggagaagcaggacattttaatgtaatgattggtaacttgataaaggtttattggagagaaaaaaattgaaatgaaatgggtaacatacatcttttggattcttcacacattttagttaccaaaattatatgcttatgaattaagatctggccttcctttttagatcgaaatgttgagtgtcactaaggattgagaatatggcagtgaaagtggtttttggatttcttttatttcttagaatcagtggtagaga

SEQ ID NO: 25786 - DNA, 1100 bp, Homo sapiens
gaactactgcacccaactggggcatttattttagtattgtgaaaatgtgtgttagtttggacatttgtagactgtgttacatgctatgacatatattctcctcctcccccagccttttggtcagttatatatattgctgttgtagagcttttagccaataatcagatacatgaaaaccttctttttttattagatattttccagcagatgccaccgctgagatgctagaagaatggcgacctttaatgtgcccttttgatgtaaccatgcaaaaggccatcacttattttgaaatatttcttcctacctcccttcctccagaacttcatcataaaggttttaagtaagtatgttcatatcttgacaaattctaaaaatacggtaggaaatacagataaagaaactagtaaaacaataacaactagaaaaatcattttgcaagttcagccattattgtacttcaagtttattatacttgaagtgtgttaaggctaaaacggttgtaagattgaaagtaaagagatgacacccaaataagatgagggctttaagaaattaagagaaagaaaaaattgtcagaaggggtaataacaggaaaacagataaaaggagaagggcagggaaaaggaggtagaaaattgaaaacaattgttaaataagaatggacagtacttagtaatgaagcagaagtttaatctgtgagatcatatttcttaaataaattaggaaaggaatattcagacaagaaatacccctttgttttattaagtttataacttcagtattgttttttctagttaacgtagttatcagtaagaataatagattataaaaaagacaaagcatagctggcattgaaccactttaaaatcacttgctattcataacaacatttttcttctttagactttggtttgatgaattaattggcctttgggtttcagtgcaaaatctcccacaatgggagggggtaagtatccctttttccctttcttcccccctatagttttttttttcttttttcccccccatacttttttaatttggagataaatattaatagatcatttggtaagtaacttgaagttccttaggattgg

SEQ ID NO: 25787 - DNA, 1056 bp, Homo sapiens
atagtgtagtggcactatcgtggctcactgcaacctccacctccacctccctggttcaaacgattctcctgcctcagcctcctgagtagctgggattacagttgtgcgctgccacgcctggctaatttttgtatttttagtagagacggggtttcaccattttggcaaggctggtctcgaacccaggtgatctgtgtgcctcggcctcccaaagtgcgggattacaggctgagccaccgccccagccttctttttgacttttttcttcatttttagtagttcagtccatttagaaacttgcaggtctgtttaacatctctgaagaaaggttatttctatatttttaaatacttggccatgtgatagaggctttcctgtacagacaatttaaagtactagaactgtctggtcaagagaggttgtgtgatgtaacacatcacaagggaaatttttaataagggaagaaacaaatcagagaagttgaaacaaattagagaaagtaggaacaaattaatggtctttggacaatggcagacagctcatggacactgtgagtgaaatattggtagataacttgtatggcccatgtagagaatgaagggagttgaagaaaggtattcttaaaacttgattttgttatgcctgtaatcccagcactttgggaggccgaggcagacggatcacgaggtcaggagttcgagaccagcctgaccaacatggtgaaaccccatctctactaaaattaagaaaattagcctggcatggtggtgcacgcctttaatcccagctactcaggaggctgaggcaggagaatcgcttgaatctgggaggtggaggttgcagtgagccaagcgccactccagcctcggcaaaagagcgagactccatcttaaaaacaacaacaaagaaaaaaaccccaaaaaacttgattttgccctcttgcctttctggacctttcatgaggggctgcgggtgctcgttagaacacctcaggttatctgtacgtgaggtgtatctggccttgcctccaacattattatctttttttttttttgg

SEQ ID NO: 25788 - DNA, 1633 bp, Homo sapiens
attatagcttagaattaggcagctttaaggatttcatttattgtattagctgaataacatacaagtagttcttggaagatggtattttaagcagcagcaaacaaaactgatatttacattgactttttcattttcagaatccaagcaaaaatccctggattgaagcgcaaagctgaatgaaaacgcccaaaataattagtaggagttcatctttaaaggggatattcatttgattatacgggggagggtcagggaagaacgaaccttgacgttgcagtgcagtttcacagatcgttgttagatctttatttttagccatgcactgttgtgaggaaaaattacctgtcttgactgccatgtgttcatcatcttaagtattgtaagctgctatgtatggatttaaaccgtaatcatatctttttcctatctatctgaggcactggtggaataaaaaacctgtatattttactttgttgcagatagtcttgccgcatcttggcaagttgcagagatggtggagctagaaaaaaaaaaaaaaaagcccttttcagtttgtgcactgtgtatggtccgtgtagattgatgcagattttctgaaatgaaatgtttgtttagacgagatcataccggtaaagcaggaatgacaaagcttgcttttctggtatgttctaggtgtattgtgacttttactgttatattaattgccaatataagtaaatatagattatatatgtatagtgtttcacaaagcttagacctttaccttccagccaccccacagtgcttgatatttcagagtcagtcattggttatacatgtgtagttccaaagcacataagctagaagaagaaatatttctaggagcactaccatctgttttcaacatgaaatgccacacacatagaactccaacatcaatttcattgcacagactgactgtagttaattttgtcacagaatctatggactgaatctaatgcttccaaaaatgttgtttgtttgcaaatatcaaacattgttatgcaagaaattattaattacaaaatgaagatttataccattgtggtttaagctgtactgaactaaatctgtggaatgcattgtgaactgtaaaagcaaagtatcaataaagcttatagacttaaaatatgctttggtattttcatttcatgaaattgcagcagattaaaaatgcacacagtgggtaaactgcttcaaccagcgaatggtagcttgtgcttttagaagggtttttttcagctgatggtgcagctgtttgtttgtttactgtggaaacaaaagtcaacaaatgtgtttacataatcaaattttatttgacacataaaatgtttaagtgatgtgttttatactttgaaaataaattcatgcaccaatgttttaactcacatatatcatacagtgcaggatttatgaacatacataaaatcaaaatcataccatataaacgtttacaaataagtttttcatgacacacggacactattgctctttaaatatggttgtacatgtcatcattaatcgattcattgttcttccacatggttatttcaatgcaagatccgatcagcatgaagagtctagtacaagataggcagacatggttatcactctg

SEQ ID NO: 25789 - DNA, 1094 bp, Homo sapiens
tttgccatggaatcgtgtagaatttgttaagtccaaaatgagagcagcctgtttgcttctttaaagtgtttattgaccttattcctgccatgttacaaatccatcatttgtggtggattcccattaataatggttactctctaggttagttcttgctgccacccctttctctcctggtggtgtgttccctgaatacacttaaccactatttctgttttgggccgccgaagtattcagttttctcaacatagctgcaacatttaaaaattatatgatagcacacaaaagtgtacatttctggcaacactggcctggaatatttgcatggccacagcgtatggagcagggttgtaagtgcccctttgagaggaagaatgcatatcactgtgtgcctcagttctctcccagcctctcacatacatgtatgtcacctgcctggccctaaggacatttgagacctccctgtgttcttctctttgtcttgggatagcctggcttttaggaagtgttctcaaagaggcaagtgacatttgagcccctacagtggctcaggtgtgaagtcttgggcttttcccctgtggacttggagtgaagccttgtcagtgactgtaatgaccaaatgaggagttattttagcttgtgtttgttactatcttctgtcatgttaagggcatcttcgttgctagagtaatttcttctaaaatatggaaggtcaacacttttccctttagacttgtggatagtgatggataaaaataactctcttactctatagtaaacttgctcaagtgcaaaagttatatttagcttcagcaataggagtctataaaactgtgagagaaaagccttactaactgaagtcatccttcaaacctttctaccaggggttccaatagcaattgctaagaatacggcagcttaaaaaaattttttttcaattgacagatattaagaatgcctgatatttactgacttgaacattagttaaattcagttagggtgaccagagtgttgctatttgtagaactgttgcttggtagagtcatccaaagtgtcttcctaagctgtaataaatatgcttactaatgtttgac

SEQ ID NO: 25790 - DNA, 1090 bp, Homo sapiens
gagcccaggaggtggaggatgcagtgagccataatcataccactgcattccagccacggcaacagagtgagaccctgtctgtttaaaaaaaaaaaaaaaattattaaaatcttaatcttaagttccttaatagtggactgtattactttttgccttttagccacaaaaactggtagggaaagttatattctgtcaccctaaagcaagcaaaaaatgtttttccaattcccattctttttttactttttcaacataaggaaaaatgtatttaccttgtttaaacggatttattttaatgccttacagtcagattttaaatttatgggaagtttgctaatagctccagtctctccagttgagatgaatgttttttcttatttaaataacaatgagttttttaaaatttataggaagtagctttttattggaattacattgattttatatgattcatagctaggaaaatggaaaccatcttaatttcaggaaaatgtagtagaaattactctcatttctaaatttttgtcatttagaaaagacatttttatcaagctctgtgtttacaaaataatagtttttaaacaacaatttgaaagaagtatctctataactcattgtcttcataaatgcaaaatctgttgtgtgccctcaaatttatatctacatttttagattctgggtcacaattatcactagctcttttttttttttttttttttttggagatagagtctcgctgtgtcacccaggctggagggcggtggtgcgatcttaggctcactgcaacctttgccttccaggttcaagtgattctcctgcttcagcctcccaagtagctgggactacaggtgtccgccaccacgcccagctaatttttgtatttttagaagagatggggttttgccaagttggccagactggtctcgaactcctgacctcaggtgatctgcctgccttggcctcccagagtgctgggattacaggtgtgagccaccatgcccagcctacaattatgactatttccatgtgaaaccatcttcctcagaaattgaaattttagagccgctcttgctagcatgtgaaacctttt

SEQ ID NO: 25791 - DNA, 1019 bp, Homo sapiens
ctgaggtcacgccattgcattccagcctgggcaacaagagtgaaactctgtctcaaaaaaaaattatatatatatatagtaatactttcggaaatcataaagattaaaaggaaaggaaattaatcggaattttgactataagcataaagatcgtctaatgcattatcagatttattcattctgactttgctttacagtctagcacttatgtacatgaaagctatttcatatcttggactctttcttattctagataagatttaatattctgaaacacttcaactaatcttcaactggtaatcattggaagtttttctttagtttttggatctcgctacataagcagctgttaagagtctcaccttgcaaataaactctcccaaagttctgactgacgaaacaggcactaaaccacagttgtgtaatttaagcctgaagcactggacctgtagtgcttttctttttcatagaacttgtcatttgtgttgtatatgctctttcctgtgactctgcagaaaacaggcagacttgtttccaatctaagcctgggcagaaatgtagtggtggtaattctcataatttttcatttttcatttccaagagaaatgttctagtttatatttatcacacatgccaaggatatagtagtaataaggtgactgggcctttagactcagaaaaacaatttctgaactggtcagaataggtttaagtgcttaaagtgctttttaaaaaaaaaaaacaaaaacattttagcctttataacctagtagttgatacgttattttcagctgtttgcgtctctgggcttacaggtatgagccactgcgcccagccgcatctcttatttttatttatgacttggaacttaagttacttcctaataacatcaagggtaaataatgtagtttccttttattacttacctctttcgtatagagtggttgcatttagtgactaaatctgtagtggtgttttaaaatgatctgatgttagtctgtaaataaaaagattacggt

SEQ ID NO: 25792 - DNA, 1098 bp, Homo sapiens
attttgttcctagtatgttaaatgttttatcttgaaagggtgttggagtttgtgagatgctttttctgcatctgttgggatgatcatgtggtttttgtccttatcctattaatatgatttattgtgttgattgattttcgtatgtttaatcaatcttgtatttctgagataaaggccacttggccatggtgtataatcttttttatatgttgctcgatccagtttgcttgtattttgttggggattattgcatctatattcataagggatatttatctgtagttttcctttcttgtgatgtctttgtctgattttggtatcaggattgaacaaacttctaagttaactaataaatctaaattaactaataattctcttgttgaccattagaagcaacagtatttttctcagaaaaacactatatttctcagaagggattttaataaagttctatacattcctcctattgagaatcatttatcctgtataaacaatctttcaaaatttttttattaaaaccaatttgaggaatctgtaagggactagaaattttgttggcaaatgtcaattaagtcagccacactgtttggtatcaactaatatttttttcattcttgcagcttcactaacaatcttttcagcttctttacggaaaaagatggaaattcttctgtactttgcacagtggggttggtggcagtgtagattgcctctcaggtgttcctattctaggatatattcatattatcttatgtgtgactatcagtgcctagttgtctcatttctcttggctgttcttccctttttgttttcctccagggctctaaagggtctgatggctccaccagagcattcctagtacttgtttcagtatgtctgtcatgatacctgctttgagctactctcatgtagctgcttacatatttttattcagtatgtgtgggcttacgtatgtaattttcagagcttttccatttattgaaaagaccgtgttcctaggaaccatatgacaagaggaaaggaagtggtaggttagggcttactatcattgagtactgctgggccttatacatgactattctggtatcattaactttg

SEQ ID NO: 25793 - DNA, 1047 bp, Homo sapiens
gattctcgtgcctcagcctcccgagtagctgggattacaggtgtgggccaccgtgcctggctaatttttgtatttttagtagagacagggtttcaccatgttggctaagctggtccagaactcctgaccttaagtgatctgcccaccttggcctcccaaagtgctgggattaaaggcatgaaccagcgcacctggccgcatatgtgtatttttaagaatgtaatagtgttttatgaaattggaatcatactctatatattgtttataagcttttaaaaactttagtaatgtcttatataatgcaaacatttccatgtctttaaatattttgctgctgattttttgtacttagtgttccttagtatgggtatagtttaaccagtcactttgctattgttggacccttagattgttcctttgttattgataaataatgctattaacctctttatatttaaatatgtcttacatatccctgaattattttccataaatcaatttgaaataaaaacctaggttagtgggtatgagcatttataagggtttgtataaaaattggccaccagaaaagttgtactaatttttacccttttatcagaagaagaaaacacccatttctctactttcaccaacaattcatattgcttattttttgatagataatatttttacattatacaaaatgcagaaagtacagtgacagtcacacttcttcctctctctctgttgtccagctgcctagtgctgtttcctagagttatctactatgactcgttccttaaatattcttctggacattctgtactaggtattttttaaaagccctttaccagtttgataggtgcaagtagtacttgcttttttgatctttgattattagtgaatgtgaacatgttggcagtttgtatttcttctgtgatttttgcttgttcatactctttgcccatttttaaatgtaggtgttcatttttttccctgattttatgagagttctttacatataaaggatgtaaactcttgtgttatagttttccctcagttttctaa

SEQ ID NO: 25794 - DNA, 1086 bp, Homo sapiens
aagcaattgatcaatgcaatatttctgctaattacaaggtatttactgggtgacgatttaccttgtttcaggagaactaacttgaggggctgatacagtaagaaggattgcaccagttgcacttgtacataaatacatccttcagaagatgaagcacatctcgtgctttgaggaagcctagccaaaaaataataataattataaagcacaaagacttgggaattagatgttttgaccctctggcctcctagttctgtgacttagggcaagttgtttcttcttttttctttccctctccctccttcacaacatttttaggtgggtactcttattatccttattttacaagtttcattaggcacagaaaggctaagagttacagttgtaagtgatggatttgtgatttggacttaggcaattcaatttcatgatctgtgattgctttattaggagtctgaactgtattcttgaagtcccagaagatagttaactattctggatttttttaaagagcttttagaaatgtagtacttgttttatgggtaactggatcgaatcccattttacaaaatgaagatttttctttttttcttaaacataatgaatctttgaaataccaatttgaaaacttttttacttagaaaaattccaggaatatagtttttattataaaagattattgcactaggtaggaataagagtacagtacattaaaaaaatactttaaaattatggcacaaatttagatgtagtttgttttcccactaactttaacagtaatatatgtttctagttcactttccagatagactagcctctgaattagtggcttttaactatattgtctagataaaaaagacaaccattttgttaagaattggttaactgttatttagatggagcagctgcgtaattatttggttctgctctttgaccctcaaatttcagttttatacaagctaataattcattattttagctgaagggaactttccttcattttacaaatgagaaactgtaatttaagatcacatagcaagtaatcttttaaatatgtgtacacatatatatgcactttatttaaaa

SEQ ID NO: 25795 - DNA, 1035 bp, Homo sapiens
gattttctcagactaatgccatcatcatcctttttaaccccaaaggaggagttgataatttcatatttaagctattgatatttatgtttcttggaatgatgatcattgatttttaagttgctttcatcacgtgtttccataatattctgttcttacctcttcatagtatatatcattctatataaggtaatggtatggttactgatttctttcctccaccagacagtgtactccttgaggaaaggtgctgtgacctttttctttgaggaaaaggactgtatgcattgtgtctgcattgcagtgccttagatgtgataggcactcagtttgttgaatgagaaagatgctgatcttcatattctgtatagttctagaattactataatatcttctctcaataaaaatcccaaatcttacgaaagcatttatttatttatgtatacaaggtaacaattccaaacagtactacaagaatacacagaaaagtaactctttctacctgttacccagatttccacaaattgtcttctgtagatccaccctctgttagtagtttcttgagtatctgtttagagataatctgtggataaatatttatttatacatgtatatccttttcactttattttccacaaaaatagatgcagaggactctggggatgtaccatattttatttaatcagtcccttattgatggttatttaggttgatacttagttttttctcttacaaatactatttctgtgaacactcttgtatacacttctttgggaatacatgccattatatatgttgtaggataaatctgtgcaagtagaattactgcttcaaaggatatttgcatttaaaatgttggtagctaatgccaaagtgtcattcaaagaatggttccaacctttattcccaccaacctgttaaggtaccttttcccttatatctttaccaacacagtatattagtgaactaatacattgtttagcaaattgttcttttaaatttgagtcatttttcataggcttaggtgtcaaatttttt

SEQ ID NO: 25796 - DNA, 1047 bp, Homo sapiens
atgctttttagtaatattttgatgttgacggactcctcacccccatactactcaaaacactaattgccatattaaaggtcttagaagatgaggagtaactcaatcttttcctttttctttatgaaaaagacatacttgagggaaactgaggtaagagaaaaatatgaaatatatttttaaacaggaattttttttttttttttttgagatagtctcccccttgtcaccaggctggagtgcaatgacgcaatcttggctcactgcaacctccgcctcccaggttcaagtgattctcctgcctcagcctcccgagtagctgggattacaggcgcctgccaccacgcctggctaatttttgtatttttagtagagacgggattttaccatgttggccaggctggtggtcttgaactcctgacctccagtgatccacccaccttggcctcccaaagtgttgggattacaggcatgagccactgcgcctggccacaggaagtttaatgattgacaaaagcatactaatcttgtattggtatgggaacaaagaaaatagttctgtctttgaacattagggattcagggggtgacagcactctcttggaatcttgtgtgttggaatgctgaggttggaaggcaatggggaaagaatattgcctgttctacagagttccctaattccatattgatgatacctattgggaaactttagtttttttagtaagtgtaagaacattgtgattatggttgtggatagttaaccattttcaatgtgtctggatttcttaatgcattcaagagtttgttcattaattcaacccattattgattacctaccaagagacaggatctattctaagctttgagggtatagcaataagcaagacacatgctcccccttgggagagtacagataataagcacataaataaagaacccagaatagtggtgttatgaggaaaataaacaggataatggcatagagaatgatggggatttatgggggcttttttaggttaggtgacactaagacaggcttagaaggtgaga

SEQ ID NO: 25797 - DNA, 1056 bp, Homo sapiens
gtatgtctctaatgatcaatgatgtggagcacattttcatatgcctggttgccatttgtatgtcttcttttgagaaatgtctattcaaatcttttgccttttctttttttgacagagtttccctcttgttgcccaggctggaatgcaatggcgtgatctcggctcaccacaacctccgcctcccaggtccaagtgattctcctaccttaaactccctagtagctgggattacaagcatgcaccaccatgcccagctaattttgtatttttagaagagatggggtttcatcatgttggtcaggctggtctctaactcctgaccttaggtgatccacctgccttggcctcccaaagtgttgggattacaggtgtgaaccacctcacctggccatcttttgcccatttttaatcagattattagatttttttcctatggagttgtttgagctccttatgtattctggttatgaactccttgttaggtgggtagtttgcaaatattttctcccattctgtgggttgtctcttcacttcgttgattgtatcctttctgtgcagaagctttttaccttgatgtgatcccatttgtccatttttttcttcaattgcctgtgcttatggggtattatgcaagaaatttttgccgagaccaatgtcctggagaatttccccaatgttttcttgtatggtttcatagtttgaggtcttagatttaaatatttaatccattttgatttggttttttctatgacaagagataggggcctagtttcatttttctgcatatggatatccagttttcccagcaccatttactgaagagactgtcttttccccagtatatgttcttgtcacctttgtcaaaagtgagttcactttaggtatgtgcatttgtttctgggttctctattctgttccattggactgtgcatctgtttttattccattaccgtgctgttttggttactatagctctgtagtagaatttgaagttagataatgtgattcctccagttttgttctttttgcttaggatggtttttggctattctgggt

SEQ ID NO: 25798 - DNA, 1080 bp, Homo sapiens
tgtattcttcaatccctctgaaatcctcatgtgcagaatttagaaaccatacattatttataacttttctatttttattttttgacttatttaaaaatgtttatttttgcatgggtaatgcatatataagattaacaaaaaataaatgaataaataaaccagtaaaggagattgtacaatggaaagtctggaccttctcatctcagattctacttctcctgtccttctctgcaggcacccaccgtttctgttttcttctgttatccttccagagattttctatgcctaaacaccatttgaagccatgaatgtatagtgatgaggggttttttacagttgcacatgactgggaatagaaatgcaattagatattgagaatattgatgagccaataggagctgatgggttagaaaaataaggaggtgaagagaatccaggattttaaggtttaagtgaagttagagactagatttggagcgagtaagagaagatacagaattctatttaaaagattcagaactgggaaaattagaactagcattagttttaactgaaatcatataatgcatgtgttcataccaagtagaacaaaaatggcctttttttctctcatatttaaactccacattatctactgtaatgttccacaaagagcacatgtttagtaaatattgcctttagtgtccaattatgtttgagcttgctgtagagtttagatttctaattgctaatcatgtttcatttttaaaataatctataatgttatttgcaagaatttcaatccatagcctcctagaaaaaaaatcaataccataggcagaaaaataatatttcaggtaatagagcatatcactgcatacaaatccattcttacttcaatcaaaaaagaatatgatgcctttattgagacaataaagaaagaccgaagaactacattttgtcttcatggaaaacttaaaggtttggcagcagagcctacagctttggtatattacaggaaaagaacaatccaacttgaagcaaagtaagtattttagtaactagcccaaaagatggtagttgttgcttgattataataac

SEQ ID NO: 25799 - DNA, 1050 bp, Homo sapiens
aaaaaaatgggatgcacaactgaatatagagtttaatttcaagttttgtaatgtttggaaggaaatattccaaaatattaaatagatatttatttcattaattttgtctggtttatattttccgaattttataccaggagtatgcttctgtaattagggaaaaagttacgatgttgccttgccagccattattaagcaagccaagagttctgtttgaagttaatgtgactaaatcttaggcaccaacttctgtatccaacttcagttggacaattttttttttttcagtaaaaactctttctctttttttttttttgaaatggagtctcgctcagttgcccaggctggagtgcagtggtgcgatcttggctcactgcaacctccgcctcccgggttcacgccactctcctgcctcagcctcctgagtagctgggactacaggcgcccgccaccacacccggctaatttttttgtacttttagtagagacggggttttaccatgttagccagatggtctcgatctcctgacctcgtgaaccgcccgcctcggcctcccaaaatgctgggactacaggcgtgagctaccgctcccggcctttcagtaaaaattctttattcattccttcatcacgtgacagttggccttgagtacttacaaagacagcagttcctgcctctcagaaatctaagcagacattccagagctcacagatcagtgccccaccaactgctacctggaagcttcagggagatggggagcctggaggaggggatgctgcaggaaccccctggcacgcagtggggctgggcttcgaaggcatccaggactgaattcgaggtggcagggggcaagcaggcaggcagcgtgacggtcatgaggtgcggggtgagggcaggaagcccacagcattcctgacttggggtcaggggagacagattggaggggcccgagatgaagccagagcttacagagaggctgtaagccagcactcagcttcccgggagaccccaaccactgccgggtccagagtgccctgggagaatgtcag

SEQ ID NO: 25800 - DNA, 1031 bp, Homo sapiens
taagtagctgggattataggtgtgagcccctgcgcccagctaatttttatattctttaatagagactgggttttgccatgttggccagactgatctcaaactcctaacctcaagtgatccacctgcctcggctttccaaagtgctgggattacaggcatgagccgctgtgcctggactattttttttcttgtgtgttgtctgtttctacatgaatgtaacctttgtgagattagggactttgttttgttcaatactgtgtctccattgtctagaataatggcagacaaacaataggtgtcccccaaatattgaataaataaatgtagcacaacttaagcattgccctagattttgttttactagatgttttccctaatgtttccttgcccccttccgtaggctgatgagatgcccctctggccttctgtagcctattgtgcttacctctgtcacactgccttttctgctttgtagcagtggctcatttactagacctggaacacttgactgggaacccttgtgacttgtcaacacatccctaaatgtctaatatgaatgaatgaatgaatgaatggtaatcttggttggtttatgtaactcaatggcattttgtagatgttaaggaacaatccctttagctgtgttctggtttgagagcaccacaagtccaatgtcttatgaatagactagattattgttcagtgattattgattattcagcaaacatatgtttgagtactgctctgctagaaactgcattatgcacttgaatgcatatggtagaggagggatgatggggaaagagaacattttgtttcctgatcttgtcacgcttacagcctaacagatgagacagaatataaacaggaagtctctaaggcagtgtggtggaaggataataccatgatggaggaagtgcacagtattatgggagaacatagcagtggcatctgaccaattttaagggaatccaggacagctttcctgaagctgaagaaagagtaaaagccaggtgaatcaaagtgatagt

SEQ ID NO: 25801 - DNA, 1032 bp, Homo sapiens
agacctgttgactatataaccatctgaaatctgttcatctttcatgcccataatctcagctcaggccatttcttattgctattgaaacccctaaattgtctgtagttgatgggttccctttgcctgagatgtatgttggttttacccattcaagtcctgagtaccatcctgtcctcagcaaaaagtttatgtctacctttgaaataggagatttaggttattttgttacaaatcaagtcttattcacagcaaacttcatttttgagggggttcccctggtatttagtcccatcatttaacttgacaagaccataaaatttttaagaatttcagtgtaatttcctggttaacaccacataatgtagtatttagtaggtacttatcatttattgaatatactaaccttaaattatcttttttaaggctcattaacctcattgaaacaccataaagatgacatttcaattgtcaaaacgggaatggattgtggtctcagtttagatgaagacaatatggaatttcaagtgggagacagaattgtttgttatgaagaaaagcaaattcaagccaagacttcttgggatccaggattttaaaattacattaaaaatgtaaataactcaacgtgttgtttgtttgaaggtagaaatgcactactactggccaaaaagtatctaagttgttttaccatgtgttcatatgcatttgcacaaactgtcaaagtgctcagaaataggaaaccttatttaaggatgcctccaactagaaatccttgaatggaaagactggcaatatggtaaaagtgaattgttatttatacatcaccgatttctttcaagtgtatgctttagttaagaggcttatcaagtgaaccagctttccctgaattgagctccgaaggaagataggctaccccagtcctgcttgaaactaaactgtcttttactgttaacagtacaaataagtaatcattcctttatagggatccatcctgaacaaacattaaattcccaagcgttgtacaacagacag

SEQ ID NO: 25802 - DNA, 1047 bp, Homo sapiens
ttttgtatttttagtagagacggggttttgccatgttggccaggctggtgtcgaacccttgacctcaagtgatctgcccatcttgacctcccaaagtgctaggattacaggtgtgagccaccgcgcctggctgaaaattgtgttaacttttaattctagctcattcttagtttgatttaatgagtctacaatttttttattaattatgtttatataacttcctttgctaggttgtgataatattgctgataataattaaataatagtcccatttacgagcacctagcatgtttccagtactgtgctgagcaccttatatgttttgtcttttttatcttgacaacaacatcataaggtaggtattaatagttgcacttacaaataaggaagccgatacttcttcgagttaagcagctttcccacagtatatagccagtaagtagcatagccaggatttaaacccaaggtcaatggactcaaatcgtgagctactgcctactaaattgcctctctgtggctcagggagttgtgcaactctgatttgctaatgtgagggtggctgcctgtacaacaattggtctgttctgtctctaaaatagatatatcagttgatacatttatgaaagtagttatgttctagaattatggagactttagtttgaaatttttacatggaaaaaaacccataagaatctcactggcattttatcacttttcattgtgaaatgatgatctgtgttctgattaagattaatggaaggaataaaattattttaaagaattattgatggtttctgataatgtcgcatatattctttggtattaaggaagtacatgtttgaatccttgatgttcttgaatttctgtttccacagtctctctgccttctggggaaaagataacttttcttgatactccaggacatgctgctttctcagcaatgagagccagaggtgctcaggtcactgacattgtcgtattggttgtagctgcagatgatggagtgatgaaacaaactgtagaatctattcagcatgccaaagatgc

SEQ ID NO: 25803 - DNA, 1051 bp, Homo sapiens
tttactagtgaattatgttctaggaattacttttttagtttgaagccttttgtggtaggaatacaacttccccacagttttcttgaaaattaatgactaaatgcctattctatgatgagccactcaaaaattatctctgattgtctgtcattctcattcttatagaaatacctggtgcatgctgttcttatagtggctgctctgtattttgtgtctctcttatctttaagcttttcttatattttctttcttctttctaccttccaactaaatacagagagaaaagtgtccttcagtttctcagtatgaagcctttatttctgaagtaacaagacacctagcaactataggaatcatttttaaaaatctttaaggagacttttaacagtccttcgtgaatagagcaggcaagaaatacaaaccttcattccttgaatcaaggagcactactggattcaactgccaaaattttttaaaggttttaggacttactataccttgtactgttaagatctactgaataaaggacgttctctcactaaggaccaggtgttttaaggttaagtgtttaaagaagtactccaagaacaatctgcttttttcatcatttgttttatgaatttatccatgtttgcttaatgcttctgctaagtgttagccaaaatctagccatttatatttagttgtgtaaacctaaattaaatgctgtagtattttgtggaatgtactatatagcaagatacagagaaaattgttttggcatgtcagagccttatttggttagcagactgcatgtgttgatactttttttttcttaaagccaattattttgatgcaaaagaaattcagtttataagataaatctgaaaaatccataatgaaataggagttataaaaaatttatagtgatattaatctttccatatttcccattaagcaacactaagcattcataagttaacccatggtaaagagtgtttttctgaaacttttttttagtaagatggtttttcagcaaatggcattcccaagataaagctgttgtgcttta

SEQ ID NO: 25804 - DNA, 1197 bp, Homo sapiens
tttaatgacctcacagtaagtgtacacagtggtcttcagtaaatgacctcacagtaagtgtacacagtggtcttcagtaaatacttgtcagaattaaaagtaagacatgttctagcaccctttttttgttccccttttcttggtagtttttggaagagataaaccatagttagtttttcctcaattacagcttttaattattttcttttcaaattagattaagatactggaacaggaaaatgaacatctgaatcaaacagtgtcttccttaaggcagcggtcccagataagtgcagaagcaagagtgaaagacattgaaaaagaaaacaaaattcttcatgaatctatcaaagaaacaagtagcaagctaagcaagattgaatttgaaaaaagacaaattaaaaaagaattggaacattataaagaaaaaggagaacgagctgaagaacttgaaaatgaattgcatcatcttgaaaaagaaaatgaattattacagaaaaaaataactaatttaaaaattacttgtgaaaaaattgaggccttagaacaagaaaattcagagctagaaagagaaaatagaaaattaaaaaaaacattggatagctttaaaaatctgacctttcagttagaatccctagaaaaagagaattcccaacttgatgaggaaaacttagaactgcgaaggaatgtagaatctttgaagtgtgcaagcatgaaaatggctcagctacagctagaaaacaaagaactggaaagtgaaaaagagcaacttaagaagggtttggagctcctgaaagcatctttcaagaaaacagaacgcttagaagttagctaccagggtttagatatagaaaatcaaagactgcaaaaaactttagagaacagcaataaaaaaatccagcaattagagagtgaactacaagacttagagatggaaaatcaaacattgcagaaaaacctagaagaactaaaaatatctagcaaaagactagaacagctggaaaaagaaaataaatcattagagcaagagacttctcaactggaaaaggataagaaacaattggagaaggaaaataagagactccgacaacaagcagaaattaaagataccacattagaagaaaataatgtgaagattggaaatttggaaaaagaaaacaaaaccctatccaaagaaattggtatatataaagaatc

SEQ ID NO: 25805 - DNA, 1033 bp, Homo sapiens
ccaagaaaagaggaaggatccaattttgaaaaatgttatcattctgcatttcaaaaatgttagtgacctaatttttttcttttaatgtttatgggtgctatagtaaaggacagggacaaggattttagaaaaaagacgtaaagctcaaggagtttgaattttagagaagacaagagtaaacagtacgagtttgaggtgataattaccgtaatgtaatatacattggtgcattgaagaagtattttcttaagtttactggtagtattaggaaagccctctgacaaggtaatatttgaaatgagagcaaagatgttgagaaaacaccctattcaaggaacatgaagtgtggttgggccaggggtggtggtgggtggatcatttgaggtgaggcgttcaagaccagtctggctacatggtaaaacgttgtctctgccaaaagaaaaatacaaaaaaatagctgggcatagtggcttgcgcttgtagtcccagctacgcaggaggctgagacaggagaacggtttgaacctgggagatggaggttgcagtgagctgagatggctccactgcactctagcctgggcgacagagcaagacttcatctcaaaaaaaaaaaaaaaaaaaagtgtggttgaaacgtaggattcatggggatgagtggcaaggtattagactggagagtttacatgaattgagttatgaaggactggatttgccactttaagatagagttcagatttcaggccagacatggtggctcacacctgtaatctcagcacttgggaggccggaacagtggatcacctgaggtcaggagttccagaccagcctggctgacatagtgaaaccctgtctctactaaaaatacaaaaattagccgggtgtggtagtgggcatctgtaatcccagctactcgggaagttgaggcaggagaattgctggaacccaggaggcggaggttgcagtgagccaagattgtgccactgcactccagcctgggtgacagagcaagactccatctcaaaaaaaagaaaaa

SEQ ID NO: 25806 - DNA, 1042 bp, Homo sapiens
atcagaacaatatttggaattattatttatgattcaaccctattagatagttatagagagctgtacttggaacacttggtaattgtgataaacttgttatggcttttcctttagaattttgggtttgaagggacttcagaagtcatctgcccttttttgtttgtttgtttgcttgttttttttttttgtttttgtttttgttttttgagacggtcttgttctgttgcccgggctggagtgcaggggcatgatcaccgctcactgcagccttcacctcccgggctcaagctatcctcccaccttagcctcccaagtacctaggaccacaggcacgcgctaccatgcttgactaatttttgtattttttgtagagatggagtttcactgtgttgcccaggctggtctcaagcgatccacccacctcagcctcccaaagttctgggattataggcacaaaccagcctgactctttgcttgactctattgactaggctgtgagtttcctgaagccagggactctatcttttgtctctgtattcttaggacagtgtttgacacacagtacattcttgatatatttctgttgaatgattgaataatacagccatgtgtagtaaagtggaatgaatttgagccttatgtcagatagacatagacttgggttcagttctagctgtgctacttattggtatgtgagcctaatatctccaaattacagttcctacatttataagatgggagataatgtttcccttcctgatggggaaggattatctactaaggcagggacagataagtctattttctgttttgttgacccactatatccccagtgctggttgctgtcattattattatcctgtgctatgctatatctacctacttatggctcctcaagtaaatcatgatagttcacagcttagtttttttgtttgtttgtttgtttttgagacaggatctcactctgtcacccaggctggactgcagtggcacaatcgcaacccactgcaacctcaaactcctaggctgaagcaatcctccc

SEQ ID NO: 25807 - DNA, 1027 bp, Homo sapiens
aagctagtctcttacaccttgtaagtataagaatggttgttagtgttctgagtgcctacatagcaaagcttattgtggggtaggcgtgtctgctcagtatacaaaatttaaatttattctttcattttcagcctggccttacccatgccctttactttgcctaaagtcatgaagtatatggtcctttgctctgtaaagttcattacattctctatagaatttattctttatagagtcattttctatgtagaattctctgtagttggtgatggtggaggaacagaaatctcctggctgtcagaggtgtagaatcaatgacccagttgtctgttttactataattaaactgttttccctgctttccccaatattttggtgcctttactgcctagcttctttctggggttttcttaagacaaatcagtttctcgtttctgtatccctctgcaaatacttagttcttggcttcttcctgttgtatgacttgccttgcctctgatttctcttttccaaaaatgccttggcaactctaaactgctgttctctcttctcctgttttctttgctggtattcactttttaaatttcttacctaaataccctgcaaaaacaacccaaatgtccaaccagaaattcaggaattaaagtatatgatgaagccgagcatggtggctcggctttgggagtctgaggtgggcagatcacttgaggccaggagttcaaggccagcctggccaacatggtgaaaccccatctctactaaaaatacaaaagttagccaggcatggtggtgcatgcatgtagcccaagctacttgggtggctgaggcacaggaatcgcttgcaccctggagacagaggttgcagtgaactgagatcacacaactgtactctagctcaggcgacagagcaagactcttaaaaaatatatatatattcataccatggaatgcaagggtttaaaacaatgaaatggaactttatgtactgacatcgaaagcttttttttatatgaacatgattgtaaaa

SEQ ID NO: 25808 - DNA, 1028 bp, Homo sapiens
tgtatttttagtagagatggggtttcaccatgttggccaggctggtctcaaactcctgacctcatgatccaccctcctcagcctcccaaagggctgagattacaggtgtgaaccgctgcacccagccacaatttccaatatttaaatgtttatattgtttcaagatttctattattataagcagtgctgttgtaactgtagttttgtgtacatgtcagttcatttaccagcagtgtagaattgtgcctctttgctcacaaacttgccagtgcttcagtcttttgcatcttaagtaaaccatttcttatcctgccacaaaaagagggaagattgtaagtctaacacgtctccccatacttgtttggtgttacagttaacatttataccttatgtggcctatttctgttttattctcagataatgtttagaacctcttgtgacaggcacaagttctttgtttaatgagtttcatctatgaacagagggttggaatgagaaaatgacttataaaatcagaagccttgtgttttgaagatttgactagtggtatctgtagaataaactacttaggggaaaggatacaagttaaaggatcaacatataaaaataaaggattgaaattatagtccttcctgttccataagatttttagcagtaatattgctaaatttagtaagctttatttagctagtcacgagttaaaaaggagatttcttttcagtgtcctaaaatgtgaagtcaagttgtacttcttattcattactctgttttacttttaacaaatacattctgatctgccacagtgcatatttagccaggtaaaatagcttgtaagcaattggtacataagagaatgatgtaattataatacggagataggattggttcacaaattgtttgttttttgagacatagtctcactctgtcacccatgctggggtgtagtggcacgatctcagctcactgcaacctccacctccagggttcaagtgattctcctgccgcagcctcccgagtagctgggacta

SEQ ID NO: 25809 - DNA, 1061 bp, Homo sapiens
tgatattcaaacagccaaaaatatccttttcttaaaatgtcttttctaaaagcgtataatttttcttgagaaatttgcactgagccactttaggcaaaaagttttaagtattttttaacaatgggcccttttatagatttattaatattaataatatagcatttattacagaaacattaccaagaactcctcagtgccatcaaggtattattatcatgttcatatatttttattgcctttctttctgtatttcatattttatgcaaatataagtcttagttatctagtaggtaaaactgataatatgcttctggagagtctgcctaatgaaaaagtaaaaatctacagccttttaaatggatatgaaaatggaggaaataggccaggtgcaggggcttacacttgtaatcccagcactttgggaggctcaggtgagagcatcgcttgagtccaggagtttgagaccagtccagacaacatagtgaggccccatctctacaaaaacttgaaaaaaaaaattagctagcatggtggcgtacatctgtagttccagctactctggcagctgaggtgggaggatcagttgagcctgggaggtggaagctgcaatgtgccatgatcacaccaccacactccaaactgggtgacagagtgagactttgtctcaaaaaaaaaaaaaaaaaaaaggaggaaatacagtttagattttgttataacatataggatgtaagctttatttattctttatttagatatattcaatatttattttcatgagattactttcttttgtagataattatcaaacagcacagctacttgccttaattttagagttactcacattttgtgtggaacatcacacatatcacataaaaaactatattatgaacaaggacttgctaagaagagtcttggtcttgatgaattcaaagcacacttttctggccttgtgtaagtataaaatgttttaaggagcaacatttttaatagagataaaactgaagttacccatttgaagttatttattagcagtgtatattctatgaatgagatgattg

SEQ ID NO: 25810 - DNA, 1638 bp, Homo sapiens
atcggcacccgtaattcatcagctgcaatttctgttttcagtttattaaaatggagtgaaaatctaaaaattttttgaaggagtctgagtgcagaatcctttggttttagtatatccctctaggtaattatagttgcatgtatctaatttggaggcaatttttaaattgagtccttctatattcaacttaactgtagatattacagttctctgagatttcatcagtctcatatgttaccatatgaccatactacatactaacataagcaaaggactttgaaaagcgtacaacttaattagtgaaatcagaaatatgtggggcataatagaacattagccactatctgagaatacttgttaacctgaagagtcacttaaaaggaagttaggagaatgtttatgaaactaataaagttgaaacatgagcacaccctatgtaatactatcagttccatttctgagtatatactctagggaatgtttgtgcatatgcatgacaggtacaagaatgttgctgcattgtttgtggtaggaaaatgaataaaatatgtttttttcatataatggaatactatatagcagttaaaataattgaattttgatgtatcaactgaataattccccaaaatatcaaggtgaatgggtacaaaagcacatcgcagagggttttcttgcagaatggttccatttatataaatgaaaataatgcattttttatgttcattttaataaaacacttccagcttacagaaatatatagataataatataacagacactcatatactccctgttggctttatcaaaactaacttgccatattttttttcagatttttttttaaaacattacagatatagttggagtttcatatgtaccccttcacattcccattcccattctaccccctcttcctccatctctcaaggtatgctgaatttggagtgtatcactcctatatttacttatgttgttatgatgtgtatatacggtattatttttcttgttttcaaagttgctataaatttaatgtctgtcatacatattattctgcatattttttatccagtgttatttttgagatctattcgtattgatacctgttcatattgatctaattcatattgaaatagagttcttatttatttttaactcctacataatcctctcttatgaggatgctgtaattcagccattctgcctctaatgtgcatttgtttctagctttttgctattacaaataatgctccagttacattcttgtgtttccctgtgcacatgtgccttgatgtgctctagaatgtattcctagaaattggaacttatttataatggcctacttaattgagttttttttttaatttaaagcataaacacattcattattctggagttttaaaaattcctgcattttctgtttttaaaaattagatgtataatggataatcaaatgcaaatgttattttaaaaaattaaaaatagtaaaacaaaaatgagatgaagagaaataccctaattgttgaatgatgaataggagaaggtaaaagaagatatgtcagttttatctctggttgtaatcttactttttatcagaatatttatgctatgttgtcttttaataattccacatctgcatcc

SEQ ID NO: 25811 - DNA, 1038 bp, Homo sapiens
atccagtggcttgataaagtgattcagtggtttttaaaatttagatagaattggtgaaatctggggttccaaattttaggtagttaagttgctatcacatgggcttaattggttctttttctttctaaacatttttattcttccaaaacagattcaaatgtgccttttacccccatttgaatgttatttttaaagttgagagaattttctttctttgttactttcttgggaaaaactcaatacactgcagagagagagagacaaatgggatcaatagtgattatggtgcttgctgttctgacttacatgttgtttattttgtgtctgttttacctcaagtatttatttgtgttgagaacacttaaaatctactgtcttagcagtttgcaagtgtaatacattgttagtaatatgttgttattatatatgttgtacaatagattggttcttcactgcgtttcatattcgtatcacaggcatctttttaaaaaattattttgaataattttcctcagaaaaacattttgtgatgctctctgatctttatcttgccttcatttttacttagtacataatatgaagtagacttaattttcagttccacagaaataagattaaagtgaatatagttagtttttggttctttgacaacgtataaccaagtgtttgatttttttcacagtattttaaagtatctgcttatatatgatctgtactgctaattctttttgttttggtttggttctggaaaaggtatgtactgctaatcttgaagatgtttttatttacataagtaacagtattgtttaaaaaattctatgtttcagaaaaccgaaaaaagtgaatttctaaattttttctacaaccattgtatgcatgttctcacagcaccacttttgaccaatacttcagaagacaaatgtgaaaagggtagggtctctttatttatctgctgtgatttctgtttttaaagaaggatgagataaatattaaactaacaggcaatttacttgagactttataagacagggagattac

SEQ ID NO: 25812 - DNA, 1043 bp, Homo sapiens
tttttaaaaatgcgtgcttgactatatatatattatatatatataatatattaaatatatatataaatatatatataattatatatattttttatatatatataattttttttttttttgagatggagtctcgctcttttgtccaggctggaatacagtggcacaatctcggctcactgcaagctccccctcccgggttcacgccattctcctgcctcagcctcccaggtagctgccactacaggcgcccaccaccatgcctggctaatttttttgtatttttagtagagacagggttttaccatgttagccagggtggtctcgatctcatgacctcgtgatccgcccgcctcggccttccaaagtgctgggattacgggcgtgagccaccgcgcctggccacttgactatatttttctgtttgtccttttagacaacgcctgtagaaattagcacttgtctttctttttaataccccagagtcattagtatgaaaagcagttattgtagtgctttgtcatttagttatatccttggggaccgcaagaacgtgtaaaactgtgcaccagttggttgtaggttgttgtattttatgagttattgtattttaaatagctttgtaactttatctactgtcggaattcagcctcctttactgttttccttgttccttgtcttacaattcttgtttttctaatctgttataaactgacaataagatccttaggcttgtttgaattatgtttaaattaagagtaagtagaccctgaaagggggctagagaatctaagttaagtgagttttcacgtaacacctctagaacaaatatttttgttttccagagagttatttgtagttgaggtttttagttaaactagatattgatgtatttataacaagaattgaatggtgtagtcaaattttagaaaattgtaacacagaaatacaccccagaatattaggtttcatgatgaaaatactacttgtcaactattttttataatttgtgtaagtcatataaatgagtataactttattctttt

SEQ ID NO: 25813 - DNA, 1069 bp, Homo sapiens
ccaggaggatcacttgtggtcaggagtttgagaccagcctgaccaacatggcgaaactccatctctactaaaaatacaaaaattagccaggcacagtggcacgtgcctgtaatcccagctactcaggaagctgaagtgggagaattgcttgaaccgagaggcggaggttgcagtgagctgagattgtgccactgtactccagccagggtgacagagcgagactgtctgaaaaaaaaaaaaaaaaaagtttaaaagggtcctgatacaaataattgagattctatctctgacttagtgcctagctaatcgacttcattttgcgacgtttcccaccagtagtcacctattattgtttactttaattttttgcataggatttacttttctttcaggtcatttattcacctaccaattttttgttattcaccaataatgagtgtgggggaggttagatgtacatatcaggttctttttataatatataggacctgtgtatttttaaactgtagtatacaattcagggtgctatttcacttgttgacagaaaaacatttaataatcttaggagattggacagagtcacagtctgtagttgataaaaagaggaccaggaacagaagctcatatgtagctttcaaatgactgtttttgtcttcagaagggtttccaaattcatactagtaaatcgtaaatacttttttatattcagaaaataaattatatgaactataaatatttgtaaaactttgtcattttatgtattttataataggtttatttgtgaaggctataattacgtaaatcaagtgcagctttttatttttctaaaagatttactcatttctgcttcatgagatgcatttcatgaaatagccagattctgtgaactgtctgttatttacataacatttactacttaattatctcttatgtgccagcaatgatgttgaatttttttttttttttttttattttagattcagagggcacataggcttatttgttacatgggtattgcatgagtaatggtggagattgggcttctagtgtacccatcaccgtgatattg

SEQ ID NO: 25814 - DNA, 1099 bp, Homo sapiens
acacgttgtatgaaaggaagacctccatagtgagccaattatacattatttactaatactttatttttctcaatgacttgtgatgtcaccatatgatagtcaaagtttataaatgcatgttaaactatatcctttttcattgttacgtgaattttctgggccactgtcaaactattttaattattatgatttaggggtatattttaatatctgagaagcaagtcatcttccctgtttgttcaatcccctcaaaattatcttaaaatttagatacatttgttcctttatttgaattttagtattatatcaagttctcaaaatatccttctaggatttataattataattatactaaatttttatattaatctgagagaagaatcatacttttacaatttaagttatagtctacaatgaatagagtcagtgtcacctttgattcaggttttcttttatgctctttagtcaagtttttaaaatgcctttattaagatgttctgcatacttttgttatccattgtgacaatctctggctttgtaactgtagtacttagtccattcatgttaaatttaatcattgatgtgattgaatttaccgtcattttattatttgtttttcttttgcccttctgttttttgtttctctattttttactttcagccttctttttgaatgaattgaattgtttttagaattttaatttaatttgcctatttattttttagctgtacttctgagttattttccagtgattactatagaaataacagtatacatccataacttctcacaactttttatttatatattgtaaaaaatttttgtagagtcagggtttcgccatattgcccaggctagtcttgaattcccgggctcccgcagtcctcctaccttcgcctcccaaggtgctggtattacaggcataagaccctcacagtctttttagaattaattttgtaccacttaacataaaatgaagaaacttcgcaaccatttaggtgcatttcctgccccttctatcctttatattgcagttgtcttatcagttacatctacatgtgtcataaacccccacaaggtggtgttataactttcata

SEQ ID NO: 25815 - DNA, 1030 bp, Homo sapiens
cttttttttttttaagagacagggtcttgctctgtcacccaggctagagttgttcagtggtgtgatcatagttcactgcagcctcaaactcctgggcttaagcaatcctcccacctcagccttctgagtagctaggactatgggcacaggccattgtgcccaactaattttttttttgttgggggtagagacaaggtctttctgtgttacccaggcagttctaaaaccctggcctcaagtggtcctcctgctttggcctcccaaagtgctgggattacaggcgtgagccactgcacctgaacgttttttaaaatcactttgcagaaacatttctatcaactttcctctccccaaaagatacaaaatgctaagtaaataacattttctactctgagtctagactgtgttgttagcaacctcaggagaattagcattcatacagtatagtttgtttctgcaaaaagaattatatgaacttttttttattgctgcttcaggttgactacagacaaaaagctgctgcagcaggtagaattcccacaaactatctgagaagagagattggtacttctgataaagaaattctaacaagtcgaataataggtaagatattaacatagaggcgttcatcttctctggtatgcctatgttagcatctcttctcttgcatctgtgttctacaataagtcttaagttttccttcatagcattaacaccacctaagattattcactccttctcttccctcactcaaatgtgggcactgtgaaagaaaaaacttttatttcttcagggttgaatccctagtacctgttatactgcttagcacagaataggcattcaataaatatttgttgactaaatgagtaaatctctattgagcatatgaattttttggcccatgcctctactttgttgaatctattcctagtacattttttcatgttcagaatagtaattcctaaacattatgttcatcagctactgaaatatgtccataatctttcaaatctttaacatccctacatat

SEQ ID NO: 25816 - DNA, 1045 bp, Homo sapiens
gacacctttattaagatataattcacataccatacagttaatttaaagtgtacaactcgtctgggagcagtggcttatatttgtaatcctagcactttgagaggccaaggcaggaggattgcttgagtccaggagtttgagaccagcctgggtaacatagtgagacctcatctctacaaaaaatttaaaaattagcccagcatggtggtgcacacctgtatttcgagctactcgggaggctgagatgggaggatcacttgagcctgggaggtcaaggctgagatgagctgagatggcaccacggcactccagcctgggcaacagagcaagaccctatctcaaaataagtaaatacagataaataaagtgtacagttcaatggatattagtatattcaaagttttgcagccattaccaccatcaattttagaacacttctatcaccctaaaaagaaattcattagtagtagtcacttagcgtttctccccagccccaggtaaccactaatctactttccatcgctgtggatttgcctattatgaatatttcttacatggaaacatagtctttggtgactgtcttctttcacttaacataatgttgtcagggtttatccatgttgtgacatgtattagtactttgttcctttttatcgctgaataataatcagttgtatggattataccacatttagcttatccattcatcagttgatggacatttgggttgtttccatttgggaactattatgaataatgctacaaggaacattcataacagctgtcaagtggtattcactgtgatttggatttgtatttccctgatagttaatgatattgagcatatttttatgtacttactggccatttgtatgtcttttttggagacatggctattcaaatcctttgccaagttttaaaattcagttgtctttattgttgaattgtaagcattctttaaatattctagatattaacacaagtcccttatcagatacatggtttgcaaatatttttctcttaatctatggtgtttcttttactt

SEQ ID NO: 25817 - DNA, 1028 bp, Homo sapiens
aaaagcatgtttcataagagaaaaacatgattaactgaactctattaaaaaaaaaaaatggccgggcgcagtggctcatgcctataatcccagcactttgggaagccaaggcaggcagatcacttgaggtcaggagtttgagaccagcctggtaacatggtgaaacctcgcctctactaaaaatacaaaaactagccgggcgtggtagcatttgtctggaatcccagctactcgggaggctgaggcggtagaattgcttgaacccgggaagcagaggttgcagagagcagagatctcaccactgcactccagcctgggcaacacagtgagaccctgtctcaaaaaataataataataaattttaaaaaaacaacttttgctccatgaagaacctcattaagaagataaatagacaagctacagggtgaaagaaaatatttacaaaccctatatgcaacaaattactaagatgtagactatataaaggattcataaaacttaatagtaagcaaaaatccaattatggaatgaacaaaaaacacaaagaagtaacttctcaaaaagaatatatagatgacaaataagcttataaaaacatgtttaacatcgttagccattaggaaaacgcaaattaaaatcacaatgagatattactatatatttctcggaatggcctaaaaaaagtaaaatatcaaatgctggcaaagatatggacaaactagatcacacgtacattgataatgggaatgtaaaattatacaggcattctggaaaatactttgatagtttatttaaaaaagtaagtgtacaactactttatgccccattatttgtacctttagaaatttatctcacataaatgaaaatatgttaatacgaaaacatgtgcatgaatatttatagcaactttattcacaatatctccaaaaaagacacaactctgatgttcttcaatggttgaatgtttaaataaactatgacatatgtctagcatggaatactgctcagcaagaaaaaggaatgcatta

SEQ ID NO: 25818 - DNA, 1030 bp, Homo sapiens
ccttcccatctgttatgtttgtttttaccctgttacacttgttataaattattttgaagagattatggctggatcctggtctaaaatatgccaccatagtttgcacatctaatctgtatttaatttcatttcttccgctttaatctactttgcttctgatcataaatggaaatgagccagcagaaaggagatggcatctatccacccagtatgtgtgtgggagttcactgttctggaacctgaacgccatgaaccctcactcatgaccatagatatgaacctaggaaaatacttgtaaatgaattaattgaaatgatacacattaaaaatgttgctaatgtgaatgtgaatgcaaatacaagtagatacaatcaatttaagtgaatgcaccagaccattcatgtggccacaatttctcaagccccactaacttcaaatattttctgtatcttgctagctttatttatgtctcttcagcagtttgccttagtgtggaagaactgtattaggagaaaagactgatgatgtgttgagcaacactggaggtgagggttggagtataacatgtgacaaattaacttctccctgattgttatctctggcaggtgttttgtcttccaacatgaagtatgtaaaaatatattcagatctgcactctttttggttgtatgatattagagacatgacaaacagacaaccaattaaagaacacctttacacaggggcacggaagcatttatatcagtgaaaaagagaaaaatgcctttgcttttctccccccagcccccgtcacacacctccccccgccccacaacacacacacctctctctcacacatctaattcacacacacacacacccatgcacacacatcccaatttctcaccccagggctcggatgatcaatgctcagtctcagccttgctcctgctgaagtcacaagtgagttctaacaaacccccctctaaggctacctcctattgcctgctcttcaggacatgaggaacacatccaccgaaaactatgtttt

SEQ ID NO: 25819 - DNA, 1083 bp, Homo sapiens
ctttagtcaaagcagcagcaatccccttagaggaggttagagaggctactacccttgaggttggagagatcccctccagtagggctggggaggtctcttctactgtcaaagaagactcattcgaatttaggagtttaatgtccctagcttcatctgggtcttccaacttacatgatcctattctttcccaatcaatgcccttgctttaacagtagacaccctaccaaagtgagaaaatgtttacctcctatctcactgaatgtttttactgaccctctcaataattcttccatgtctttttatatatcttacatatgttttatatttttcttcttcttgcatttttatgtcatttcaacagatttgttttgcatcaacatttcttcagttaggcctcatttattttttactttacccattgtcttttaaattttaattatcttattattaaaagcaacatataatccaaattttataaaaatatcaatatttagaagaccagaaacaactgtatcaaaaagcaagagatatctgaaaaagtgctagagtaagaaattttcattttaatctacacactttctataattttgaaattttccattatgagcttgcattacttttgtaaccacagaagattctacatttttagaagaaagcaatctatttagataatattttaaatgttaatatctttatcttcttagatgttgtttaatccctgtgtaaacatggtttcctgacaaaatagtttttgcatataaatccctacaggctgacctggctaattatatagtcatatcatgcagaatacaatatattggacaaaacttaatattttctagatgataattaaaattgcaagccttctttcttcattgcatgaatgttaacataatgtttatacatttctttgcctttcaagtgtgaaattagagtaaatgggccactaactggtccctggaagtagaataatgaccagctaactggactgtaagtctctacattcactgtaactgcagagaatttgataggtgattatttaatacagtttcaaatgattttccactatactggaagaactag

SEQ ID NO: 25820 - DNA, 1025 bp, Homo sapiens
agctaatatcaattcctttctttaaatactatcagggacattataacaatgtatgatatgggaatattactgatgcccaaacatcttgccagccaaaaatggaatctctttttttagcctagctgtgtatatttgagtggaaaaggaaacaccctacaatagctttgctaggtgttaaatagtaatgtaattatatttcctataatacagcaatatagtcacctttataaaaactatatttataaaacattcttcctgatcttaccttgtgttttaaacacatagatgatttcgtattctaaagtagttagaagaattgtaatgttcccaacataaaaggtaaatgttgaggtgatgaatatcttaattatcctgatgtcatcattaaacactgtatacatgtatcaaaatatcacacataccctcccaaatatgtacaacgaataagttagtgagacacatacgctttttataaatatttttcttttgaaggattttactatggattgtggaatttgttatgcttatcaacttgacggtaccattcctgatcaagtgtgtgataattctcagtgtggacaacctttccatcaaatatgcttatatgaggtaaaaaataaaaatattgtcaagacttttttccgctaacacaacataggaagtattcctgtttgaaatacacagaatctaaaatctgttgagtcaatagtgatcctctcttttgccattaactccttttaccagtttattccagatgcttatgtgcttcatttcttcatcacagttactaatgagtggagaaatgttctgaagtatccaagggagaaaatctatccagaatatattcatggactagcttattgacacataacaaattaaattgatggtacattggaatctttctataaattccttgttaccacaatgtaagcttcataggtttacccgaggtggaggtggttgaaagtggcagtaatacagtgaaaatgaaattagtactatgtagtatctattacttttcaggc

SEQ ID NO: 25821 - DNA, 1078 bp, Homo sapiens
aaactttaatacagttgaccagaattgcaatctaattaaatatatcaatttgttgactggctgaaatttaagatcctttcaatgataatcatatcaaaattacttcttttggttcaattatatttaccattacataaaactacaaaacatttggttaatctttccgtgggtatacagtgaaataggtagccagaccaacacctctttattttttattgggttgtttgatgagctgttctacttctaaaagatttaatcttgtttcattctaggtaataatgtttccataaatatagaggtagaccccaggcatcctactatgcttcctgagtgcttctttcttggagctgaccatggtatgacatctgagatttaaacgttttttaatagagtcataaaatccttgcctagcattgttaaattattagacaatattagtatattaatggtagtttttattttttgtctgagacggagttttgctcttgttgcccagtatgtagtgtaatggcgcgatctcggttcaccgcaataatgatagttattttaaatgacaatgtctcagcattctgaactgtataattttgttttttaacataatacatataattttgattttctaatcaagtagttaagaaacattctgtatcaaatgtggctttagaaaccaagagtagagcatgcaattattaaattttttttttttaatctgaagtggtaaaacccctgggaattaagctgagcaggaacatacatttgtggtaggtaccttggcaatataatttttactttttggtgattttacaaagttcacagcataatttttttccccatgctttcagggatccagaaaatagtgtgttacaaaatttgaaagatgttttagaaattgattttccagctcgtgctatcctggaaaaatctgtaagttttatcagtgttttgatattccagacagtattgcataatgaagtttaaatgcttctctcagtgaaaaatgaggctgaaaaaggagggaattagaaaaatattataacacagacttctgatctgcatcaaaaaacttgtttacctttga

SEQ ID NO: 25822 - DNA, 1019 bp, Homo sapiens
atcacctgccttctgccttgatctcgctgggagctgcagactggagctgttcctgtttggccatcttgccagccaccaagaatgttagctatttttatttttaaaaatattttttagagaattcatctccctgcaaaatacttactgaactttgattttaattttggccatattatttcttggcatttgtggtgctgtatataaagtatttaattccattggtaatatttagaaataatttatttttttcaatttggggaaaaaattcaaaataagggtttttagtgatttaatggacaaaataagcagttggagaaaaaactattaatcgcatagcttactgatataatagttttgatgtctaccccctaagttcgttgaaattgctaagagaagtgtttctatgtccaacttgtcacatttttgatctttcttttccccatctggaatgtaaaaataatgtttaatgtatctacctcaaatggctagctagtaaaatcgtataatggcttttagggtttaaaattcactttttctgtaattaccaagtaacttctagttccagggatgttttgtttttggctattttcttattaagaatacatttttctgttcaaaatgcaattaggattttatttgcagttgtgcataagagaaatggacaatgccattggaaaaaacttcaaataaaagatgccactgtgaaaatattttataactctttttttggcaggggagttaaccttatcttgggtatacaaaggaataggtaattacggattttaaatacacatgtagaaacagacagagaaaggagaaacagagatatactattgtactgattttaaaactagcttcttgggagtttaattttctgatttctggattctgtcacctaaacttacaggtaagtaaagtataccagaagagaacagacattataccgtcaatatcctcaaaggttatttttcgggtattaggctctaattcctacttcacaccttttttttctttttgag

SEQ ID NO: 25823 - DNA, 1007 bp, Homo sapiens
tgggttggtttcaagtctttgctattgtgaataatgctggaataaacatatgtatgcatgtctttatagtagcatgatttataattctttgggtatataccccataatgggattgctggatcaaacagtatttctgcttctagatccttgaggaatcgccacactgtcttccacaatggttgaactaatttacacttcgaccaacagtgtcaaagcattcctatttctccacatcctcttcagcatctgttgtttcctgactttttaatgatcgccattctaactggcatgtggtagtatctcattgtggttttgatttgcatttttctaatgaccagtgatgatgagctttttttcatatgtttgttggccgcataaatgtgttcttttgagaaatgtctgttcatatcctttgcctacttttagatacggttgtttttttcttgtaaatttaagttccttgtagattctggatattagccctttgtcagatggatagattgcagaaatattctcccattatgtagattgcctgttcactctaatgatagtttcttttgctgtgaaggagctctttagtttaattagatcccatttgtcagtttttgttgccattgcttttggtgttttagtcatgaagtctttgcccatgccaatgtactgaatggttttgcctaggttttcttctagggtttttatggttttaggtcttatgtttaagtctttaatccatattgtgttaatttttgtataaggtgtaagggaggggtcccgtttgagttttctgcatatggctagccagttttcccaacaccgtttaataaatagggaatcctttccccattgcttgtttttgtcatgtttgtcaaagatcagatggttgtagatgtgtggcgttatttctgaggcctctgttttgttccattggtctatatctctgttttggtaccagtaccatgctgttttggttacagcatgccttgcagtatagtttgaagtcaggtagc

SEQ ID NO: 25824 - DNA, 1098 bp, Homo sapiens
tctggttttgatttttgcagcactttttactcaaccacattgcttcagtcagcttcgtggtggtgtatgttgacaaaacaattcactgcggttccgccactttacttctttttgccccagggattttctaatgctgtaagaccaaggatgcttgtggaagccacaaggcatacatacatatctacacctgtaagtgtgagagactgaatcccctttagggcaattcagccagtggcatggaagccggaaaaaaatgctcttgcattctggttcttggacaggaattctgaggaactttttctacagctgcttacatagctaccattgactacaataaccagcttgaaagcacatccttattttggcattccctactgtgtttcactctttccagtccccactcttcgttccctgagttcacttccaataaattttccccatacatgtccttgtctctggctttgccttctggggaaatctcaagcttgggccaattgtcattgttgtatgctacagatgaagatatgtaggacaagggtccaaatataccaatcatacttatggcccagaaatttaccttcttaaagaaaattctgatgtttgctttttgattatttgacttatttttcaagattgaacaaaacctatgcaattatatatgacctcctaagcagtataacttggcaggccttctttaaaatcaatttataaatcaaaggctgcactaggcttctctcaaattatttccttgcccctagaaaattgtaatcttcttcacagttgctgtcggcttcctttgacttgtcactatttgaaaaattttctgtgactactgtataactaacagtgggtaataggcactgacttcttagctgcacttgtacctagtttgcagaatgtaagtgtttctcaatatttcagtgataggtactaatatgttttttaaaatgtttagacctaagtgtacaagtaattcagcagtggaaaataacactgtacaagccaaactactgactccttgactaaaattatattccctagtcatggaactaacagaatttttgtttatctcctgattccttaacttgtgcttcttaa

SEQ ID NO: 25825 - DNA, 1029 bp, Homo sapiens
gtagataatgaggagtttgttgttttctccacctaccctcactccatcctatcttcctgctttccccaaataactatattgtaatttggataataatattcagtgtttacattattatgaagatatttgtatcctatgtagatataagtaatgtggttacttatgtctaatgtaatgtggttaacggtgattaattttcctttgtcaccctcgtttttattattcctagaggtcactttttaaaaaacttttccatttctttagttttctaagttgttataactcattcaacctccatatactaaaataccaatggtatttcttaagtaaatgtgttttatgggcagtgggatggatatatgactttgaatctcacttacttgccagattaaagaagatattatatcgctatagtttcagttgatttctaagattataaaaattggtttaagctttgtagaagatttgagatctgtgcattttgagcacatgagatacttgtggaatggcaaagctctctcatgaatttaaagacccaaagaaactagttgcatggaacaggtttttttaatcaaatgccttcattggtacgttaactgatttacttgctgatgttaataaatatgactttactatagaccttcacagtaggcttcatatctgctcagccactgtagcatagtataaagagaatacagagtcttaaagtctggatcaaattctggctctgtctttaccagtgcatgaccttgtgtaaattacttatttataaaaagagagaaagaatatctgtgtcatagattacatatgagaacaaattggggtgttgtatatgaaaatccttttgaattgtaaaatgctgtacaaatgtacaaagtgatgtagggagttaatgcagtttgtaaactggtgaactcttaatatagtgagagctaatatgggcaaagaagtagtctctctccatgtgtaatgatattgtatatttgtggatttatacacacatatctgtcagacagcaattattatcta

SEQ ID NO: 25826 - DNA, 1055 bp, Homo sapiens
ccatccatgtaagatgggacttgctcctctttgccttccaccatgattgtgaggcttccccagccatgtggaactgtaagtccaattaaacctctttcttttgtaaattgcccaatcttgggtatgtctttatcagcagcatgaaaacagactaatacagtaaattggtaccagtagagtggggcattgctgagaagatacctgaaaatgtggaagcgactttggaactgggtagcaggcagaggttggaacggtttggaaggctcagaagataggaaaatgtgggagagtttggaacttcctagagactagttgcttggctttgcccaaaatgctgatggtgatatggacagtaaggtccaggctgaggtggtctcagatggaggtgaggaatttgttgggaactggagcaaaggttactcttgttatgttttagcaaagaggctggtggtattttgcccctgccctagagatatgtggaactatgaacttgagagagatgatttagggtatctggtggaagaaatttctaagcagcaaaacattgaagaggtgacttgggtgctattaaaagcatttagttttaaaagggaaacagcataaaataaaagttcaaaaaatttgcagcctgacaatgtgatagaaaagaaaatcccgttttctgagcagaaattcaagccagctgcagaaatttgcataagtaacaaggagccaaatgttagtccccaagataatggggaaaatgtctccagggcatgccagaggtcttcacggcagccactcacataacagccctggaggtgtaggaggaaaaagtgggcacagggtcccagcactgtgtgcaggctagggacttggttccctgcatcccagctgctccagctgtggctgaaaagggccagtgtagagcttgggccgtggctgcagagggtgcaaaccccaagccttggcagcttccacatgttgttgagcctgtgggtgcacagaagtccagaactgaggtttcagaacctccgcctagatttcagaagatgtatggaaattcctggatgccc

SEQ ID NO: 25827 - DNA, 1080 bp, Homo sapiens
taagaattattttcgttgcctttgccttctacttccctttatattccttaaaaggcttttatttagaacagtttctcttcttatgtgtagatcaattttttcccttttgttttaaccactaaaatttgactgagtgggccatacctcttttggtgcacctatgtgcagagataggttagccattccttcagtcatgactttatgtagacttaattttttatgaatacttctttaccttaccgttttccttaccgcctccctgattaagagtcaaagtgtgtacgatctgtacttaagagccaagttatttaaatcctggtcttgataaaaattacagcctcggatttcaactgttaaaaccttactaaaatcgcgattgcatgtaatagtgtttcactgcagatggactgcttaaagtctctgtaatcttattttatatgttttctcagttttacccatggatattagaaccgagctactttattttgctctcttgtataattgctcttgaggatgccactgacttggattaaaggatgttgtatgaaatagtcctaagatatgcagtagggattttatgtttggatgtcttccattgtatgataatagcactatctttatgagaagccatgaaagaagttttattctgtttcagatgctagaaaagtcatgctttgcctgactatccaacctgccacttaatgaataatgtgaactatgtaattgactatgttctctttgacttggcctctaggaaatttagagtcaaatttttggcacactttttagagccatgctggatataggatttatatttctgtatgctaatcttacctgacttttgttctcctgtgattcttctcttcatatcaagggtacatgttatctctgtgactcatcactgttgatcttgatcttgattacctggtgaggtagtatttgtcgggtttctgcaccgtaaagttactgtttttttctctctctccacactttactctttggaagtcactatatgtagctcacacttcaggagtgggcagttacgctcacacctcctttagggcacagtatttacacaga

SEQ ID NO: 25828 - DNA, 1029 bp, Homo sapiens
tggttttatttattcttaatatggtaattgatgtagctttttggtatgatatgtggggagatggaggtttaggtaactgttagtatttctgttgcctgaaagcctggaaaatctggcttttttgagaacaattaatatttctagatactttaactaaaaagctaattttggacattttcttgaatcaggaaagtatcgtggcatgtgacatgttatttgaccttttaaaatggctgggctttgcaaataagggactttggaattttattctttcagataacagcacagatttctatatagaatagttcttctatttttcgtgtaaattaagaattccaaattgttcttacacctttgtgtgggatgtctataatgttaggttaaagttactacataataccttttagtgctttaatgaaacagtgaattattgttacttgaccttttgaaaaggtcagtagtacattttgtttcatttttttaaaggacatttaaatgtaatgaaagtcagaactgtaatattaccatgaaagtaaaggttatagggtacatttaattgtgttcctctgtttttgaaactgctttgagggagactgtgttaaaattccacatggtaattgttttttgagaattttattactttttcattttattctgttagagtaaaagattacatttctgtttgtctttttctgctatttttgctcaagtttcctgtgtattatcctatttaagttataaagtttaaactacttacccattcacttttccaagaaagtaaaatggaataaatgtctcagaggtctttcttctcttagaaagactcttgagtaaaattctgtttgttcaaatatatagttaatatgttactgatttcaaaaaagttagaggcccactaatgggagaattaaatatactctgatttatgcaagtatttcacttatgtctgtatagattgtgtaactaaatatattttcattttattaaaatttagaaagtaagctgaaaacgactatataatgttatata

SEQ ID NO: 25829 - DNA, 1021 bp, Homo sapiens
ccttgtatgaactttgagattgttttgcagactgttcctgtacgttcccacctttgggtgttttcctcatatccatggagcaagcagtactcagctgaagactccttgtcaggaatcctctgaaattcgctggcgtttctctgtgtatatttctctactctccatgcatttctctcctgcttggtactataccttgcgaattgtacaattgttggcctccccttgatcacatgtttcttctcacatcagggagaatattatgctcttatttgtttgtccatccctatcttgcagcctgaaaatactcccatcatagaaccagacaattttaggcattttcacatttgtttcccttatttcaaggatcactgtcctcgctgcctattgtttaatgtctgaaaatcattgtttcatatgttttgtccaatttttaaataaggagggaagataaatcctgtccttttaactccataatagctagaagcagttctcttcagtttcttaacattttctatttcattcttgcttcattttttaatttgctttaagaagtctgtttccaattatattctgttttctatatatttgatcttttacctagagactctggacttttttcttattttgaaaatctgttgattaagatatatctcaagagttgatcattgtgaatcacttttatcatgtggccacttatcccttttggtatgtggaactccaggaagtgtacttggattatatttttaaatttttttttctactattttatttttctttccaagatctccaattatatgtactctggacttttttgggtctgtgttccacttcaactccttttctctgatggtctttaatttttttctcatttggtaattttcttgctttttctttgccctttatgacatttgtatttcattttgttcttccttggactctttttaaatttattccttcactttcatataattttgtgtttttctttattttcatttcaccctgcgtttattcagctcattca

SEQ ID NO: 25830 - DNA, 1042 bp, Homo sapiens
ttttaaaatatttattgagccttaattttatgaccaataatatagtctatcctggtgaatatactgtgtgtactctaagagaatgactattctgttgctattgggtagagtattatataaatgccagttaggtcaaattggttcagagtgctacccaggcccttattgggtagcactgtgctcactgacttttttgtctgctttttctatcagttagtgagagggggtgttgaaatctccaacgatctttgttgatttttcaatttctatttaatttctatcagttttgcttcatatattttgaagttctgttattaggtccataaacttttagaattgttaagcactctttatgaattgactcctttaggattatgaaatgaccttttttatctttagtaataatgttttctctgaaatctgtattttccaatattaacatatagattgcatctttcttttgattgatgttaccatggtttatctttacttctttattttaaacttatttgtgttttaatatttagtgtgtttcttctgtgctttgctttgttatgcaatatgatagtcattgccttttacttgggggtgcttcgactatttacatttaacgtggttattcatatggttggatttaaatctactcttgctgtgtgttttctgtttgtcttacatatttttaattgttttggtatttttctgtattttatattattggaattcttttttgtaattctgttttatctcctttgccagtttattggctgtgtgtgtgtgtgttttttttttaactagttgcttaaagggtttataatatacatattaaatctatcatggtctgccttaacgtaatattaggattccattttttatgcactattggtttatcaactatataattttgtcacttttgatactgtaaagatgttacttcactgtcttgcactgttttctacgagaaatctctgctcttttctttgtttctctgtaaatagaatatttttttcctctggctgcttttaagatttttctttttggtcat

SEQ ID NO: 25831 - DNA, 1029 bp, Homo sapiens
aggccccatcctctcctgcttgtagtactttgctcacagagactgagggaggaaatacagtgttttcttgttttaagcctcttttccccctccgtacacacatgaacatgacttcttatgactgtgttgtaactgtgtgttcctcattacgattctgttactccattgtccctgggcctggtgtgttcaggaatgtacccatcccattctctttttttcagacaacttcccataaaaaaaaaattgtgggaactttgccgatatgaggatgggattggcagagttctctcaacctgcttggaaaaatgtttcttaaaagactgctaacttttaaaaggcatgagccatctagcagattttcctagttgtctcctaaagccctgcatatttcccaatagaaaataaacgaacccattgttagagaaatggacatcagaacacatagagggaattggtatgatgtgtatttactctagggctgctatagctatgaactgtggacatgggttgtccggtctgcacttctgcttgctggcatctcgttatcccattagcccgctgtttaatttactacatacagcacgaggccagtgactcagcctttaggggaatggggctgtttctctctctctctctctctttctctctctctatttcccagcgtcatctacggtcatgggataccattaattcctcccttccaaatgggaaagagaccaatccagttcacacgggtcattgtacttgagaacctaaacttggctgaacacagctcgatggttgatccaaatacgtttttcctttctgtaaagtggcaaaaactatttcaagggagcacgtgtatcagatctttcatagggatggtagaaaaggcaaattaagccatttccccaagtatcctctaaagcgggagcccctaaacccataggggggctgtgcttttaaatagctgtgaacgtggtacatgcccatgatatactttgtctattagaatttgaatattggtagcaggttggacgaaagggtttg

SEQ ID NO: 25832 - DNA, 1029 bp, Homo sapiens
tttaaaaatggtagtggaaattctatgccttggatacacaccgctcttcaggttgtaaaaaaaaaaaacatacattggggaaaggtttaagattatatagtacttaaatataggaaaatgcacactcatgttgattcctatgctaaaatacatttatggtcttttttctgtatttctagaatggtatttgaattaaatgttcatctagtgttaggcactatagtatttatattgaagcttgtatttttaactgttgcttgttctcttaaaaggtatcaatgtaccttttttggtagtggaaaaaaaaaagacaggctgccacagtatatttttttaatttggcaggataatatagtgcaaattatttgtatgcttcaaaaaaaaaaaaaagagagaaacaaaaaagtgtgacattacagatgagaagccatataatggcggtttgggggagcctgctagaatgtcacatggatggctgtcataggggttgtacatatccttttttgttcctttttcctgctgccatactgtatgcagtactgcaagctaataacgttggtttgttatgtagtgtgctttttgtccctttccttctatcaccctacattccagcatcttaccttcatatgcagtaaaagaaagaaagaaaaaaaaaggaaaaaaaaaaaaaaaccaatgttttgcagtttttttcattgccaaaaactaaatggtgctttatatttagattggaaagaatttcatatgcaaagcatattaaagagaaagcccgctttagtcaatacttttttgtaaatggcaatgcagaatattttgttattggccttttctattcctgtaatgaaagctgtttgtcgtaacttgaaattttatcttttactatgggagtcactatttattattgcttatgtgccctgttcaaaacagaggcacttaatttgatcttttatttttctttgtttttatttttttttttatttagatgaccaaaggtcattacaacctggctttttattgtatttgtttctg

SEQ ID NO: 25833 - DNA, 1005 bp, Homo sapiens
acctgattgaaatgtcgactaaaaatcaatgctgttgactagtgataatttacaacgttcctggtgctaagtagttccccgcttaagaatgcgttggctgggcagagattagcgcagggagttgtgtgtgtcacaatgaatcagacgcattataggtcagccctttatttgtttcatcatgacttttacacagttgtcatgtaatttatggctgctttcacgttgtcaaacattttcattgcatcttcttctttaacaccctcctgacatagacacactgcacttgaaggcttggtattgtttcataatccgagaggaggcctataaaccatcaaattacactatctttgggctaatctaaatgcgctgcagattaaaatcagagctcatttgtccctgatgcaaattattaagttctaattataaatacccatttaattacccgacacatttttattttgcggacccttttgagcactgctgtctgcgatgcagagggggtggggggagatgcataggagacaatctgcagtaattaatgtacacttcccaaatggtaaaggataaacatatgctgctttgtttgtcttatttatttattgattagatgtatagagactttggcgtgggcacaatctgaagttgaaatccttttaaagatgaaaactatttaaaaatcttttggggaagaaagagcaaaatatagccaaccaatagctttctgctagaacacatcatcccaaaatatgggattctgaatttgatcaaatcaccagtttctgaatttgatcaaatctagattttgcagaagttcagggtgagagaaaccatgcctgttttatatctagaaagtgaaatcattgttatagaaaaaacctactgtggttagaaaaaaaccacattcttttttcccagccctgctgccatcctctaccagaaaataacagtatctgcctgtagtatgaagaccttccaattgagagcattatgataaactatttttga

SEQ ID NO: 25834 - DNA, 1053 bp, Homo sapiens
gggtgcggagagaggttcttggaatattcttcgatagcagttcaaatgaaatccccacagcagagagcttttgggtctagcagtggagcggtaagctgggacacgtggcctttcgaagctgttattctcagtctgacttgcacaccagctgagataggacttaacatatactttcttgctttcacctgggttggagaggttggggttgggaggaagaggaggagttcattgggaattctgtcactagaattttttaaatgtcaggaggttagcaaggtgtgagttagcattcaagcaaaggattcttctccagactagtaattggaaagcctgcaaatccaggttcccacgatactctctaataactggggtgggatggtggtggtgggtggacaccacaactttctgaatgtcagctgatgtctgcatgacccgttcaccatggattaaatgcggctggtgccgaatggaggaaatcagaaaggcaaatctcaagcaacaggatttgcactcctcagaagtaaaccagaccttgctcctctccctcctgtgcttctcctttcttgctggtttccctttggaagcagaaacttctaaaattaatgccactccaagccaatgaaaaagctgtttttataccacagtggatgtttacacaggagagacaacttgagggggaaaaggctttttggaagggtggagggactcgtgttaatctgttctgttggaggactatgcagtattgcctatgagcgactctgggctgtttttgataaattaccatgtttagagataggtttggctcttaagggcttagttttatgaacaaagtccgtgacgatgtttgcagcctctgtttgtatcttagcccctttggcttgactagaagctctatgtttagtttaagctcagtctggaagatattacaattttgcattaaaaaaatgaggaaatcataggaagaaaaaccctttgctttttggatgaatcttactgataatttgctaaagctcatttgaattttaagcacttctttaatcttcaaaggctaaa

SEQ ID NO: 25835 - DNA, 1086 bp, Homo sapiens
tcagtaactagaatcacgacttctcataattcacagtaatgaattaagagtttcctatggtgaagttaacattctaccattgcacataaattccgacgctctggccctcaggtgcccctgaagcgaagttctggaagacggctgtgtgtgtacccccagcccatttctctaaagcacgtctgcacaattccaagtctgcttttctttttatgatgaggaaggaaacaataacagtaatcattcagtagatatttgaattgtgtcacaaaaagaaaggagaagcaatgccttgtattaaggaaagagatatattgatgaatctctagaagaatgtgtttggcaaccacataaaaggtagtcatttaagcgtgctgggtaggaaaggctttattaaagtgatgtaagttggatttgagttcactgtgagcctgtactattttataggcaggaagcaagaataaaacagtgacagatcttcttcctaagataaataaagcttagaattcgggactttcagataggagaataaggcagagttctttaaatcttgagtaaaatggtatgcattttcactgtactcaggcctctccaagctgagttttttttttttttttttttttttagacagagttttgctcttgttgcccaggctggagtgcagtggcatgattttggctcactgcaacctctgcctcctaggttcaagcgattctcctgcctcagcctcccaagtagctgggattacaggcgtgtgccactacgcccagctagttttttgtattttcagtagaggcagggtttcaccatgttggccaggctggtcttgaactcctgacctcaggtgatccacctggcttggcctcccaaagtgctgggattacaggcttgagcgaccgcacctggcccaaactgagtattttttagaggattctttttacctggtgaatagatgggtatgtgctcccccacttcatccacgtacacatatgagctgtacacatagatgttaatcaggttgcttttttcattttatttaaatattcaaaatattgtgtgattgtgatccattgagatcattgaagtagt

SEQ ID NO: 25836 - DNA, 1088 bp, Homo sapiens
atccaaaacagggagatagtgggggaaaaggcacttgccacttcttcctctccttcacctccctgtctctacctcttttccaccattccaaaacctctagcagaaaccctgtcagcagtctgtcctttagcttttcataatctgtagtttttcaggggtctgatgcacttgttttcttacagcgatctccttgaaaacaggaaagattactgttcctaccttaagtgtctaagagccaactccttaaaattaagtggctgcataaataatgcttgttaagttacaaaggcagaattgggaagaggaggaggtactaatgtttggctcattccttggatcaggcataaaggatccccactacctttcagtccctgaaaaaactgttgattgtactgcctggttgcatctgctctaccccattggaagagatgaatttattcaccttccttaggtgcaacccttgacccacatcatgctttcctgaagtattttgagtctggttcagcctcctaccaggctgtagtgtgctctggattctcctagatgtttgccatcctgtactctactggtggtttctctacttttccaaaacagaactcaagtgtagagaccttatcagagtcatctccatcccctgaagaaatgccacgttgttctctacagtagaaatctttcagaggctagtatacactgatcttagctcacttgacttagcatacagtaggcattcagaaaatgacttttatcagttgatttttgagctgagtgttctgttcagtcaattggagatctcgttttccctctccactgctactgctgttctttttcattcttcctgatttgggtagtttcttggtttctgtactctcccactacctattgctccctattgctttctctacttctgcatcgcaggactcccttcgcttgacttctttcacagacagaactcactgtgcccccaaatttcccttaaaacaaagcctaaccatataaggcctccaaagcttccagtgctatagaagcagccatcctgagcaagaaacagaggcagaggcacaggctgtgactggtagaccaaggcaggt

SEQ ID NO: 25837 - DNA, 1113 bp, Homo sapiens
tattacagtgtgtaagctgtagtgaactggtggaagaggattcaaagaagggtgctgtatagtaaaataggaaaaaaactaagggcttaattaagctaatacagttaaaggaattaaaagatttaacaagccaatataaaggaaatgaattcctaccttttgcagctctttttacctctttcaggcctactcttttgagtatggctgacagtcactttaccattgtctttggacagagaccctggaaagttggttaaagcagttgcctattctccctaatcttttgtgacctactgctttgtaattttgaagacttaacaatcttagagcaagtacttttttaaaaaaatgtgattaaactatttcttcagactagaatatacacacaaaatagcagagctctgaaggtgaggaatgtttaaaagagcttaatgagagtttaacttcaggatagaaagcaaatacgtttgctttgcacacatgtgcacacacagtctgagtctgaaaacatctatcgtagaggacgagtactaccattttgtggctcagtaagcaaaaatgaaattaagttttcaattttttcaaatcatttgtagtctttcaacactttgcacatgatgtatcacgaagctacagcttgccatgtgactggagatttagtagaacttctgtcaatatttctttcggttttgaagtctacacgcccttatcttcagagaaaaggtttgctcattcctacttcttatgttttgttcgtgctactagtaaagagagagaaggttttaaaatcatgtgccccagagaaattgtttttatcctagtttatgcacagaagatgaggctgaagctagctaaccatcaggaaatgtttgtcatgaactcctgatgtaaagctggaaggctcttttatgtttttgtacctgcctgaaaaatacgcaagcaggtatcaagatttcagagattggaaaacatttccaaacacagtaacaagctgggcactttgtaaagattctccagctggaaacttctttggcttagattagatcatttgcagtttcatgcgagatgactataaaacctacctgtcttatgtccctataagatactgtgaac

SEQ ID NO: 25838 - DNA, 1031 bp, Homo sapiens
ctgttaattaaaaagtcaaacctagatctcatcaagtctggatctgactaccagtttatagaaaatgcagggacagagaaacatgttaagacagcaccataaggatacaatcagcaaagtgtaaatgtgagagaaactacaggacaaatgaccttcaacagataaattgcaaacacaaagctggtggggaaaccaatagattaaaatatttaagagacttttcaactaattatggcaaaaggctttatttgaatcctgattcaaacaagttaattttaaaaatctttttagaaacttcaggaaatgtgtacgctggatattgtatgacagtgcggaattattcatttaggcatgaataatggtaccgtggttgtttttgaaacctatctgttaaagatactatgatttatggattaaatgataaaatgcctggaatttgcttcagaataattcatattgagtggatgggggttcaaatgaaacaagactggctctgattttggtaaatttgaagctgactgatggaatacttgtactattctgttttttaatatagctgaaatttttataagttataaaagaaatatgcaatctaggtgtagtggcttgtgcctgaatcctggttacatagaaggatcccctgagcctagtaattcaaggctgcagtgagctgcgatcacatcactgcattcccgcctgggcaacagaagtagactccatctctaaaaagaaggaaagaaaaaaaggaagaaatatacagtaattttaaactgggagatgaaatgctaatttctagaagtccatttggttttgaagggtctcatgtcaaaaaaaaaaaaaagtaagtaaaataagacccatcctactgttttatatactaaaatagtaagttaattaaatgaaaatgaagtacatttgggctttcatttaccaatcctggaatgttgaaaagttgcccaaaagacatttagcaagcaaatgtagctagcaaaaaatcattttatgatggcaggttaatacaattataattg

SEQ ID NO: 25839 - DNA, 1030 bp, Homo sapiens
taattttatagtaattatatgctgaacagatctctgttttagtccatatcttgacttcaatttgattataagctgctaaacagcagagccatattacttgcagtcttccataaagctggcaaaaataactaatgtatactcttagcttgtggacgcctattattccacaagactttcaaagttatgagaggtaataatttgtaataagaataatacctactttatagattcattttaatacttgagtgaggtggaatatgtgtaataagtaccttgcatgaatatggatctttcctataaggcttggtgttcaatactaaatctctaatgtgtgagtctagccagattcctgaatttgacttattgatagttgaatatttagacagttttcaaagatcctggctggtattcctcttcagtgtgaagaatatactgttccagaaagagtaaagatatgaataaatgatgatgagatgtcattggttaatatttcaaatgtatttttttaatgtgtaggtttacttgtggaagacaactttgattgcacctgaagtgtttttcattcttgcattcttggaaatcatcagcattgtaccaaataagtgttaacctagaaagtgatttttaaaattctctcttcggtttccttataagatagtaatagctgtatttatgtaacaaagcattacaatttttaatgctataattactaaagaattgaatgtgttggtgtttttcttttatatagccaaaagaatgaaaacagatacagtgtacattgcaagactttctttgctagaatgcctaatttactaccatcatgtctgtgtttttaatggtgttttctcttgattttcagtattcagaggatatgaagcacaagaccactcttctggagcttcagaaaatgtttacatatttaatggtatgtttaagaatcatggaggctaggccaggcactgtggctcatgcctgtaattatagcattttgggaggccaaggtgggtggatggcttgagttcaagagctt

SEQ ID NO: 25840 - DNA, 1057 bp, Homo sapiens
attcttaagatgaacacttcagttaattatattattcccttttctgatgctcacatgaagtttaaagaaagctacatatattctaattgtggtaaaatatatgcaacattaaattcatcattttaaccatttatacatatatacagttgatgggattaaatacattcacattattttgcagccatcaccaccattccatcttgaactttttcaccttcccaacagaaacttgttaaacacttaactctccattctccctcccaaccccccttgcaaccactattctactttccatctctatgcattcaactgtttcaggtacctcatataagtggagtcagatttgtctttttgtgactggctgtgagtggcttatttcacttaggatatcttcaagggttatccatgctgttgtatgtgtcagaagttctttcctttttaaggctgaattataatttattgtatttaccacattttatttattctttcacttatcagtggatacttgggttgctttcaccttttggctgttgtgaataatgctgttacggacatgggtgtacaaacatgtttgagttcctgcttttactacttttgggtgtatacccagaagtggaattgttggatcatatgggaattgtgtgtttagttttttgaggaatagccttaccttttccatagggcttacaccgttttgcatgcataagggtttaatttctcgacgtccttgctaacacttgacattttctgtttgttttaataatagccatcctaatggatgtgaacacaattttttaagtagtaaatacatatagatgcaggctatgtatttatttaaaaattgcgcattaagtaaaattcccttgttgttgcttgactttaataaatttaggcagctctttagccaactcatacttcattctctaataataaaaatataaatccaggtctttattcctgaacttttttgtatcctgaatcaatactttgatacgttggaaaatttcattttgtgtgacttttttcgtaatatggaatattaagcctctcatataac

SEQ ID NO: 25841 - DNA, 1043 bp, Homo sapiens
aaaggagacatacatgcggccaataagcatatgaaaaaatgctcagtattactcatcattagagaaatacaaaactaaaccacagtgagataacatctcaaaccagtcagaatagctgttaataaaaagtcaaaaaataactgatgctggcgatgttgtaaagaaaagggaatgcatatacactgctgatggaaatgtaaattagttcagccattgtgagaagcagcttggcaatttctgaaagaactttaaacagaattactattcggctcagctattccattgggtatatacccaaaggaatataaatcatcctaccatgaagacacatccacaagcatgtttaccacagcagtgttcacactagcaaaaacatggaatcaacctacatgcccatcaacagtggactagataaagaaaatgtggtacatatacagcatagaacactatgcagccataaaaaaagaacaagaccatgtcttttgcaaaaacatgtatggaactggaggccattatcctaagtgaactaacatagcaacagggaaccaaataccatatgttctcacttataagtgggagctaaatattgagtacatatggacacacaggaacaatggacgttgtgtcctacctgagggtggagtgtgggaagaggaacaggattgaaaaactacctattggtactattattacctgggtgatagaacaatctatataccaaacttacgtgacacacggtttacctatataacctgcatatgtacccctgaacctaaaataagagtaaacagtaaaaaaaaaaaggagacctgtgtacatatatttctatatctatctatctatctatctatctatatatatatatatatttttttttttttttttttttttttttttgacgaagtcttgctttgttacccaagctagagtgcagtggcgcgatcttggctcactgcaacctctgcctcctgggttccggcagttctcctgcctcagcctcccgaatagctgggattacaggcacctggctaatttttgtattt

SEQ ID NO: 25842 - DNA, 1050 bp, Homo sapiens
cctttctgtgggtatcaagagtctcagtcttactgtgctatctcttttctgcacagtactccaggaggttttatactgcagaccaatgtaccatagtactatttgggatgtgtgagggtgataacttggtaaaatagcaaaggaccaattagaaaagaataagtggaaaagataacccagcacccactttctcagacagacttaattttggaaaaagtacaacagtactacctttcaacagtataagtaaactgttgattttgccactgttattgttgctattatttattagtagagtgaagtaaggggaaagttaatgcagaagcgccagtcagacttgtcaagggaataatgaggccttaacaaaaactttacatcacttaatggaatagaaaataacaacattgtacgtgaagagtctaagaatgagcttattaggtatcaaaaaggagagaagagtaaaagttgatcgccgccttcgttttctcttaagagaaatgaacacggaggactttcagatgatggtatatcatgctgctatacgtttttgagtagcttaattgtagcctgtcatcctgtgtatatgttaactatatttggaatgtaattaatatctcagtttagataacatgtttccttttactccccaggaatttttgagagatatcttcaatctcctgtttttgttgccaagtctaaaggaccgacaacagccaaagtgcaaatcacattcttcaagagctgccgcttacgatttgttagtagagatggtaaaggggtctgttgagaactacaggctaatacacaactgggttatggcacaacacatgcagtgtaagcattcttcttttcctttaatctttatagattttgaattcagaaataagattttgagggcactgtttaacaaaagaatctgctcttcacacactttaacattataaatgattattggtagggtgttattaaagttaaaaagtaaacattgatgtgaaggacctttttatatgcattttaaatacttcggctttttctgtaaaagtaatttgg

SEQ ID NO: 25843 - DNA, 1028 bp, Homo sapiens
aagcttcacccaggttggagtgcagtggtgcgatctcggtccactgcaacctctgccttccaggttccagcgattcccctgcctcagcctcccaaagagtagctgggattacaggcgtgtgtcaccacacccagctaaatttttgttgttgttgttttgttttgtttttgtagaggcgggttttcaccatgttggccatgctggtctcgaattcctgacctcagatgatccgcccaccttagcctcccagtgtgctgggattacaggcatgagccaccgcgcctggccagatacagcttttttaatggatatcttttgtagaaaagtaagggaaacatttaactcataggaaagaatatgagtaaaaattaagtcataggaaagcaatggtttcatgcagaaaattggttggttcagtttagcctatgttttaggaagtataggagaaacttggtggccatctattgtgggcacaggaaattatttttatatataaaatgaaagcattattgtcttagtctgttcaggctgctgtaataaaatattgtaaactgggccaggcgcagtggctcatgtctgtaatcccagcacattgggaggccaaggcagctggattgcttgagctcaggagtttgagaccagcctggccaatgtggtgaaacccagtctctactaaaaatacaaaaattagccaggcatggcggtgcatacccgtaatcacagctactcgggaggctgaggcacgagaatcccttgaaccagggaggtggaggctgcagtgagccgagatcgtgccactacactccagcctggcaacaaagcaagacactctcaaaaataaataaaataaaatattgtatactgggtagcttataacaacagaaatttacttttcacaattctggaggctgggagtagtacaagatcaaaactctggcagattcacagtgtcttgtgaaggcctactttttgattcacggagtcttgtgaaggcctactttttgattcacggatggcaccttctcatg

SEQ ID NO: 25844 - DNA, 1058 bp, Homo sapiens
gaatcagttcatctagttctttaaaaaaataaaattgtgttacttttttggttgagattgtattatatttccagattgatgcagaattaactttatgatactcaatttgcctgtggaagagtatgatttgttgtatttatgcaaagccaatcgttttatgttttttatttagaagattctttttcctacaaaatttaggttttaagtatttcttagtaagtttattcttaggagttttgtcctttttgttggtatgttgatatggaatcattgcttatgttttttaacttgtcatttatgtgtagtaagaatttgtgtatacagttgttgcaggccatctgaaattgacttattgttggtagactgttttcagttatctttagctgttagtgttctttggttcttcatttgtttttggtttattatctgcaagtaattcttgtttttcttttattttccccaagcagactcatgtcacaatcatctgcaagtaattctattacttcctgttttacaagtttaactctttccatttcttcaccaaattttttctgaaacattcagaataatgttaagttagttgttcttagcattctttattgaaaaggtcttcatgttcatgtcaaattataatttccccttcgtttcagtgttaagggaaaactttagaagctttcatacaggagagatgtgatctgaattaacatttcagagggtttactcgtatgctagttggaaaattagtctgtgggcaaactcaaagggcaaatgtatgagtcaagggatccagttaggaagtttttcgatggttccagagagggacaatggtgaaaagtgctttgacgtggaatatttattgaaggtagagctcacaggtctcagatttggatatatatgttggatttgagagaggttaataaagaatgactcctaatttttttttttttttttttttgagatggggtctccctctgtcacccaggctggagtgcagtggcatgatcttggctcactgcaagctctgcctcccaggttcacaccattctcccgctgcagcc

SEQ ID NO: 25845 - DNA, 1040 bp, Homo sapiens
tcttttgcaaaaattagctgagtgtggtggcacatgcttgtagtcccagctattgggaggctgaggtgggagggttgcttgagcctggaaggtcaaggctgcagtgagccatgatcatgccactgcactccagcctgggcaacagagtgagaccctgtctcctgtcttttaaaacacacacacactcacactctctctcactctcactctcactctcactcacacacccactgctttccttttttgggggggaagtgataaccttaaaggatatatgttaataaattgaattatttttaattcattgctgaatttaattggtggtggtggtgtttttactttacagagttttaaaagctcagtctgatcacaggtctagacatgaaggtaagggttccacaaagttaacttttaataaataaaaacttgaataatatattgatatattttacctttaatattgaacattgtgttttcattttagcacaaaccttttatagtgaactgttttctaatttttctttagtttcacattattcaatgtggctcttggtgagttgggctcattgctgttctttagtgaaatctagccttgctgatagcgatcatttacaagattggctaaagaaattgactctccttattcctgaggtaagataaagattgaaggttagtactgttattttttgtatgttttcatgttattagcattgataataaaagagctaatggaaacaaatatgcgtgagtccataaatatatcacattatctgcttaatcctttaaggtctagagtgttttgaactatgtacaatgtttaagaacttctgactattatatattatgtagcatttatatttttctgaaatgtttatagaatgattattttgctttggattaataaaaaaaagtttttccaggtagtaggaagggcttgagaatttattttggtaatttatgttttagaaaagttctgtggccttttttttttctttctttgagacagaatctccctgttccctgtatcacccaggctagag

SEQ ID NO: 25846 - DNA, 1030 bp, Homo sapiens
tgttacgatattctggctgggccgtggtggctcatggctgtaatcccagcactttggggggccgaggcaggcggatcaccggaggtcaagagttcaagaccagcctggccaacatggagaaacccgtctctactaaaaatacaaaaattagttaagtgtgatggtgcacgcctgtagtcccagctattcaggaggccgagactggagaattgcttgaacccaggaggcggaggttgcagtgagctgagattgagccactgcactccagcctgggtgacagagtgacactccgtctcaaaaaaaaaaacttacaataatatgaggtctttgtaaaatgtgagaataaaacttttggagataagcgaacatctgagtaaattgaaatagcatgtctctgtacagaatattgtaaagatgttaggtaaatttattttttaaaatgttctatcagtaattccaatgtaatttttgtttaaaatttgatgaaattactgtgaagttatctgtatgaataaactaagcaatattataagttctgggaggtcagtaaattggcactttatgaaaaaagaaaaaacaaaaaagtcctgggagaaaaattcaaaaggataatagaaagttgaacttccgtactagctgtataaacattaaaccataatttgattttggtatgggaattgttagttaaatgatatagaatggatactgaaaattagtcatatatgacttgttcagtttggggaaagaaaaacccctttttctaatatttaggatatgtttaaaatgttgtatctgtgttaacaatggtaggaaaatttagaagaaaataggattgaacgtttgtcaaaccattttgagggccaagattgagggctagaaataatgagaaagggaaagaatcatagatttagctacacaatgattagcaatttacttataaaaaaattgtgcttaaggcaaattgccaatatgactcgtcttggaagaaaaacatattccttctgtgtttgaaatatttttccacaaacct

SEQ ID NO: 25847 - DNA, 1025 bp, Homo sapiens
tcttccagaggtagaacttttatgtgaaatcgaccccatgttttggtaataagtctagagaaagttgtctaccacaaacaatacattaagaagatgtgttgtatgctttattctaaataagcttttggagagatttcggagacatttgaattttagggaaaattcgacttgttgaaggattcatttgtgagatcaagttctcaattctaagcttaggtggtaagaacacttgcttgctttcacagtggagtatcacttttatagttcttggaagtctgcactataattccagattagatgaagttaattcttctgagtcatataccttgcttctaattgttcttttaaagggaatatgtttaatctggacctttattattatttagaagtatcttagtctctttctttggttaatactacagtaagaatccagtgaaggttctgtttttgcaaggaaggtccttcagcttccaaaaggaggggtaagggaaagcatttaacatcactgaagaacaagaatagtgtgagccatttttcattgcctctttctataatttttaagtggctgaatttcaaaattctaatgcagtaaaggcagtcatttggtgctaacacgggcgagcaggtgtcattatagtcagtggaggtggttcatattaaggagtaactttcttgtatagaaggggcagtctctgaatattcagttacttaatcaagtacccgaacctaaatatattgagttgaaactcttttagcttgttccttaaattaaatgtaaataagcttaattaaggaaaattcacagggtttccattaccacaagagattggtatcctaaatctcataaactacatcacttaaaagaactcctgtggttatttgacatcagtaacaacaaaagctgtcatttattgtgagtctagtatgtatagcagcacttaatatttagtacatattatctcttaaactcgttctaatggcccatagtttaaaattggaaacttacccttgattcttctaataaa

SEQ ID NO: 25848 - DNA, 1051 bp, Homo sapiens
gaaatcgcctggtgcggtggctcacatctgtaatcccagaactttgggaggccgagacaggtggatcatctgaggtcagcatctcgaggccagcctggccaacatggtgaaaccccgttggtactaaaaatacaaaaatcagctgggtgtgatggcgggcacctgtcgtcccagctactcgggacgctgaggcaggagaatcacttgaacctgagaggcggggaggttgcagtgagccaagatcataccactccactccagcctgggcaacacagcgagactgcatctcaaaaaaaaaaaaaaaaaaaaaaagaaagacctgagtctgggtagtttataaacaaaagtggtttattttggctcacagttgtgcaggttgtgcaagaagcatagtgccagcatctgcttctggtgagggccacaggaagcttacaatcatggtagaatgtgaagggggagcaggggtctcatggcagaagtggaaacggggggttggaggggtgtcactctcttctaaacaaccagatcttatctgaactcaatgtaagaattcacactatggtgaggacagcatgaagacattcatgagggatctgctctcttgacccaaacgccttctactagactcacctccaacactggaggtcacatttcaacatgagatttggaggggacaaaacattcaaactgtatcaaactgctttatcacaaagttaaatatatacctaccatatgacccagcagtttttttgccttaggtttttactcaagagaagtgaaaacatgtctgtgaaaagatttgttcatgtgtgctgctttattcagaaggccttccaactggaattaactgataaattcacatagtggaattttgctcatcagtagaaaggaaagaactacagacacatccaacatcatggatgaatattgaaaacatcattctgagcaaaagaagctagaaatagaagaaagtacatactgtgtattacttatgtgcagttctagaacagtcaaaagtaatttgtaaggaaagaaagctcctcaatcattg

SEQ ID NO: 25849 - DNA, 1079 bp, Homo sapiens
tattcagcggggaaagaaaatatatagcaataatatgtaataattaaagctctatattttagaaaatatatggttgtattagaatttatactcagaaatcctaggacctaaaagtataggaaatcacaaaagataaaattgtatgattccatttatatgatatgtctagaataggcaaatctgcaggcagaaggttagtggttgcttggggttagggaagggtaggagggaataaggaggggcgagtgtgagaaatgattgttcaagtctaaatcactcttaaagtaataggacatgaccagacttgaaagaatggaggatggaggaaggtaaagagtagtagggaattaatgagtaaagcaagaaaaaataagaaagtgaaaaacagttttagaattggcagtttaaaggccttaaacctcttgtttggttggtatcatcaacatatgctggcctagtaaatgggttttggatagccagtacattataagtaaaccggatggattacgtttatgcaaagaggccataaacacacttagaaacacaacttgtggaccttggcaacaatttactgatttgtatgtgttttttgtacatgatctgtctaggttaagttactttgacttattttattgttgtgctgttgtggttgttgagaaaggaataggttagattgaggtcatctgactgaatgtgatgccatatttgtaaattgttaccattcttttctcaaattttcctttaatcaatattttacctattttttactgcgtggagttagaaattgaacaaaatggttttcttttcacaacccattgtagacagaataaaatgatagtatatgttaatgctttccaaatctaccttgttttacaatgtttttagtactagaagacctcctccaacagagtaagacagtcagtttaaaaatgggcaaaagtgttgatcagatactacataaaagatgatacatagaaatggtcaataagggctgggcatggtggctcacacctataatcccagcactttggaaggctgaggtgggcagatcacttgaggtcaggagttcgagactagtc

SEQ ID NO: 25850 - DNA, 1070 bp, Homo sapiens
cccaacaaggtttcaataatatacttaattatcaaaattaagtatattatggaaatttcattatattaatggttaaattggcagaaaattggaagtttattatgtattacatatagtgtatagtttagtatatacatatactatatatataaacatgtatatatgtgtttttatcatattttaagtagaaaaaccatgtaagagttacttgttggcaaaaagtagagaaaactgttagtacaaattgagaattcctaatccaaaactctaaaatttgaactgctacaaagtttgagatctgagtgccaacatggtgctcaaagaagtactcattggaacatttaagattttggattattgaattagagatcttcaactggtaagtatataatgcagatactccaaagtgtggaaaaatccaaaacctgaaacacttctgcttccaagcatttcagataggggatacttaacttgcatattttaatctgtaatgttatttaatactatatttaaattaacattcttagtcaagacctgtaaaagtggtaaacttactgagtattcacttgtccttaaaatcaaatactgtttgtagtattgaagtactgccattgttttttaaatggatacttagtggtgttaaagtaaatagcagtagaagcagatagtgtaatttataagaagcctcaccaagatagaagaattcctgcagtattatgttttcttacatgtatttcaccttatatttcagtattaggttgtgcatatttaccctgaaagagaagcagcagaagagaattcatatgtgtatgcctacaaaatataaaaatcagtatttttgagtaaaatctatattttaatagatttttttatgtattaaaagtaggaaactttgcatttgacagccctcaaattgggaattacttgtctaatcttctgtttattaccctatcttgatttagtagttagcagcttcatggctgtaaaatacttttattttacatgacataatatttagtgtttatatcttcataaatattgtccctcatgaatttacatgtttgtgttta

SEQ ID NO: 25851 - DNA, 1084 bp, Homo sapiens
acattaaattacatgatctttgccaacctgatgggtgaaaagtgatatcattggtattttaaatttgcgtttcttttatcatgagtgagtttgcaaatcttgtgtttaagagccattttgttgctttttctggaattgttcatattttttgctatttatcaattgtttttcttattttttttatttgtaggagttctttatgtgtcactgaagttgatcttttgtttgtgattacaacttattactgtatcctggtttgatgcctttttgctttgcttaaggtggtttttactgttcagtttcatatttgtggttgtagtttttatggtctgtagattttgtatcttggtttgaaatgccttctccattcacaacattataagagaattctcctttagtttctccctatacattttctattgcaattatatatcttaatctttgatccagctgggatttatgttggtttaaagtgttatgtatgtgtccaactttcctcccttttttgttgtgcaatttttccaattccatttgtttactaactcttctttctgacttgatataccaattttttcttgactgggtaattttttgaactttctagactgacctatttgtgtgtataattatgatctataccagggattggtaaacttatagtctgtgggccagctatctgtttttggaaattcttgctacacagacatgcccattcttcttttttttttttgagatggagtcttgctctgtcacccaggctggagtgcagtggcgtgatcttggctcacagcaacctctgcctcccgggttcaaaggattctcctgcctcagcctcctcactagctgggattacaggcacgcgccaccacgcccagctaatttttgtgtttttagtagagaccgggtttcaccatgttggccaagatggtctcaatctcttaacctcataatccttccgccttggcctcacaaagtgctggtattacaggcgtgagccaatgggcccggcctgacgtgcccattcttttacatattgtccatggtggcttccacagcacaacagcagagttcagtaatcataaca

SEQ ID NO: 25852 - DNA, 1066 bp, Homo sapiens
gtacttaatgacagggatacattctgagaaatgcatcatgaggtgacttcattgtacaaagttacacaaacctaggtggtataacctgttgctgcttgactccaagcctgtacagcatcttactgtacttaattctgtgggcatttgtaacactttgtaaatatttgtgtatctaaacatatctaactgtagaaaaaataatgtaaaaaacctgcaaaaaagataaaatagggtattgcctgtataggacgcttaccaagaatggagcttgcaggactggaagttgctctgggtgagttggtgagtgatcgctgagaagatgtgaaggcctaggatgtgactctacactactgtagactttgtaagcactgtacacttaggctatacaaattatttaaaaatttttttcttcactattaaattaaccttagcttactctaactttttatttacttttataaacttaaaattttttaacgttttgactcttataataacatttaaaacacaaacacgttgtatggctgtacaaaagtattttttctttatattcttattctgtgagctgttttctttcctttttttttttttaactttttaataatacacatggagctgtcatctcccatgctgactgtgcctttttttaaaaaaactagaaagagtatcctttaaagatgaaaagtataataaatacataaaccagcaacagtcatttattaagtattatatactgtatgtacatgctatacttttatatgactggcagtgcagtagatttgtttacatcagcatcaccacaaacctgtgagtaatgcattgctctatgacatggtggccacagtgacattaggtgataggaattgttcaagtcacttttaatcttatgggaccactgttgtatatttggtccatcctttggtctgccattgaccaaatcattattatgcagtacatgactgtctgttacttcacttttcatctattgaatcttcaatagtatcagccaggagacttacagtttggcttggggataattcttttgttgttcatccttttgacaacc

SEQ ID NO: 25853 - DNA, 1067 bp, Homo sapiens
tttgtctctgtactttattcctttttattgcttaatagtatcacattgtatagatataccacacttgatcaagtaccagttgatggatatttggattgtttctacttttttttttttttttttttttttttgagacagagtcttggtctgtcacccaggctggagtgcagtggcgcgatcttggctcactgcaagctccgcctcccagattcacgccattctcctgcttcagcctcccgagtagctgggactacaggcacccgccaccacttccggctaattttttgtatttttagtagagacggggtttcactgtgttagccaggatggactcgatctcctgacctcgtgatccgcctgccttggcctcccaaagtgctgggattacaggcgtgagccaccgcgccccgcctgtttctactttttgattaatataaataatgccattataaacatttatgtaaagtccttttgtgatcatatgttttcatttttcatggtagatacttaggattagaattgttgcttatatgattagtttacctttaactttcattggagctgtcaaactgttttccagtatacctgcattattttacatccccactagcattgtaggaggtttccagtttctccctattcttgccagcagttgttattatctagatttattattgccatttagggggtgtaaagtagcatttcatcatggttttaatttgcatttccctaattattaatgatgtagagcagctttttatgtggttatttgccataatgtttcttcattcacaatattgtccagtttttaattggattcttggttgtgttttatggcttaatgtggtctgtactacagactgttctgtgtgtgcctaagaagactgtacattctgctgttgtcgtatggggtattctgtggggtgttctatagatgtctattaggtcaaattggtttgtagtgttgttgtctgtttcctatattcttgttgcattttctgcctagttcttctctattattgaaagtaggagactgagtgcagtggctcatgcctgtaatcccagca

SEQ ID NO: 25854 - DNA, 1235 bp, Homo sapiens
ccttcctcagccctcagctctttgccagagtttgtcatttcatacataacaccttttattaatttataaagaatccaatagagacaaggggtttattttattatggagtagaaagaagtgcaaatgaggattaataaaaagaacttcacacaaaatatgctttagtcaaaggtataagcttgtagggcttaagtaacgtataggggaacacaatagcaatttctgaatgttcagtgtcctaagactgctttttacaaatatactagcaaagactgtttaatatcagaaactagggtaggattacatattttttgatatctctttactagataggagaataggaaattaagttttcatgatgccactttgcactttgtcagaactaggtttgatgcagaacgctgtttttctgcagttacagggagcaaggaactttttttttctttttttccctatttctgagagttttaacctaggttaaaaggttaggagggctgctagaattccattagcactaagcagggggtggggagaaggaaacctgaaaagctcaaaacttaaaaaaaaatgataaaggacacactgtaggattaatagcatatgcaatttggtttttatgatgttgggatctatagtagtgttaaagaatgctgatttttataatgatataatcctaggtttgaattgtacctctgttgcatagtatgtaattttgttttcattacttttataagcattacttttctcatttatcacaatgggaatattaaggacttagtaaatggtagatcttccttgtattaaaattttttcttgtattgacatttttcttcatttgctgttttttaattgaaatttttaatcacttgtgtctgtgtattctaaaataaaagatataactatgccctctgatgtatcttgtataaaataggatttttaaccttctgttaaaatttgaaaaataacattcataaagaaacgtacacaaagtgataacatgtggctcagtgatttatcaaagcaaatattcgtttaaccatcactcaaaccaagaaacagaacattgtcaactccccagaagcctaccttatgagtcctcaggccactaactattccatctcttctcctttaaaaataaacacaattcatcctttaatgctgatcattctcctgctttttttaaacaaagttttatcacctaatcttatatccctaaacactacaatttggttttg

SEQ ID NO: 25855 - DNA, 1033 bp, Homo sapiens
taaattaatatattttttgaacaccgtaatactataatactatataatctgtttgttaattttctgagaataataactcaatggagtaactctttaataggcatcttttccttataaaaaatattgtagattggctctctgcaagctaatttcttttatatggttaatattttagtgtacattaagagcttagagttctttttgtaatcaagcttgctacagaagctgtgctttatttatttcatagtaatttcctctagtgggtcattgtataaaccctgatcatttttgtatgtctattccttttcttgcgaagtgggcagcttgtttagccatggtgttttggcttcaatagggtgaggtctctatttgggaatctctgaatttcacaggaatgagtagaactatatttaacaatgaaaaaaatagtattagattttagggcagccgtttgtaaagaaaagaaaataactcataaatcacttttgtggcaggaaagatacggactaacgttactgaatacttctttttctctattatactaaatcacacattcagaagagaacatgtttatagcatttcctgggactcaggaaatgatcccattctgtttattttctagtatgatttcctcctcacttaaagaaaaagctatatatttattttgagactggctaatttttgtgtttctggtagaggtagtgtttcaccatgttccccaggctggtcttgaactcctgggctcaaatgatccgcccgccttggcctcctaaagtgctgggattacaggtgtgtgccattgcacctggctgatttcctcactcttactgaggcaaggtaactttgtcagatggtgagtgttattttttcgttttttttttgagctggagtctcgctctgtcaccaggctggagtgcagtggtatgatccctgctcacctcagcctccgcctcccagattcaagcgattctcctgccttagcttcccgagtagctgggactacaggcacgcaccaccatgcccagctaatttt

SEQ ID NO: 25856 - DNA, 1044 bp, Homo sapiens
ggacttagatatgtgaaattcacagaaattttttccaattaaaaatttcttaatgatatagaactatataagtaatactgagtctgctgcttctaaaataaacttgctcatcagtgttttttctttcctgttttcaaaaatggtaatctctaaatgtaggcatagttacactcctgtactttgttttaaagtactttgttattattattcgtgagtattttatgttactacttggttgaaagcagtggttttttgaggtcttcgaggaaaattctgacaaaaaatacccatagagataataaaggagttacctccttataccaaattctattaatatattagatatgtgcctctttaattttcttttcgtaatagttgtttccgaggtttctattatcttaataatgatctgttacaagtgctctaaaatttctagtttctatcccagtggccatttaattaaatgcggtaagggtcaactgtttcaaatggtcttagatcaaagacttggtagcatacatgttataaaattatatatatgtataaattttgtatgtatatacacacaattattttaaagcaaacaaattattatgaaatgtaatacagcttactagagatttttatcccacttttctttgaggaaattgtccatctagtcttttctttgtgctgctgtgctatcctttcttaagcctttgattttgatttttcgttaatattttttaaagaggcacaacttagccaaaattcttaggaggacaagattcaaaactcatgtgttagtattttgatagctgtgtctttagaaacctactcaacacttttattttatagaagaagcaactggcctacagaggttaaaagatttgattgggcatattgctgagaagagtcctagaatccgggtcttactctactgcactacttctaaatcattttgaactaattactgtattctaaataatatgggaacttggagccactccttctgtctcccttccttcttctctttcctattgtccccatcaaagctgatatttt

SEQ ID NO: 25857 - DNA, 1024 bp, Homo sapiens
tccacccgccttggcctcccaaagtgctaggattacaggcgtgagccactcactcggcctcttttgtttttttatttttttattttaatttttttgagactgagtctcactgtattgccaggatggagtgcaatggcgcgatcttggctcactgcagcctccgccttccaggttcaggcaattctgcctcagcctcctgagtatctggagctacaggcacatgccaccacacccagctaatttttgtatttttagtagagtcagggtttcaccgtgttggccaggatggtctcaatctcctgacctcctgatctgcccgcctcagccttccaaagtgctgggattacaggcatgagccaccgcgcccggcctccttgatactcttaattactctccctgaaagcttttagaatctttatccctcctcagcttcagaaattttgtctgttttggtgggccttttggttgtgaaaattttatttcataatttccttacctccatatttattgctctcacttcttggaactatgttagtcagatattgtacccttcttgattacttccttttcatattctctcttttttttttttttttttgagatgggattgctgtgttgctaaggttggagtgcagtggcgttatgatggctcactgcggcctcgacttcctgggctcaagtgattctcccacctctgcctcccaagtagctgggaccacaggcatgtgccactatgctcagctaatatatttttttattgtagaaaggaggtctcgcgatgttgcccaggttggtcttgaactcctgggttcaagcagtcatcccaccttagcctactaaagtgctgggattacaggtgtgagccactgcaccaggccttttctctccattattaatatttttttctattttgtgggagatttcatttttcccttttgtggaccttttgttgaattttacaaattgctataattttaattggtttttaaactgtaaatgatatatatacaaaaggtatatgata

SEQ ID NO: 25858 - DNA, 1441 bp, Homo sapiens
aagagaaacataaacgtcaaatgtctgtccctggcatctttaatccacatgagattccagaagaaatgtgtgattaaaatccaaattcatgctgttttttttctctgcaactcgttagcagaggaaaacagcatgtgggtatttgtcgaccaaaatgatgccaatttgtaaattaaaatgtcacctagtggccctttttcttatgtgtttttttgtataagaaattttctgtgaaatatccttccattgtttaagcttttgttttggtcatctttatttagtttgcatgaagttgaaaattaaggcatttttaaaaattttacttcatgcccatttttgtggctgggctggggggaggaggcaaattcgatttgaacatatacttgtaattctaatgcaaaattatacaatttttcctgtaaacaataccaatttttaattagggagcattttccttctagtctatttcagcctagaagaaaagataatgagtaaaacaaattgcgttgtttaaaggattatagtgctgcattgtctgaagttagcacctcttggactgaatcgtttgtctagactacatgtattacaaagtctctttggcaagattgcagcaagatcatgtgcatatcatcccattgtaaagcgacttcaaaaatatgggaacacagttagttatttttacacagttctttttgtttttgtgtgtgtgtgctgtcgcttgtcgacaacagctttttgttttcctcaatgaggagtgttgctcatttgtgagccttcattaactcgaagtgaaatggttaaaaatatttatcctgttagaataggctgcatctttttaacaactcattaaaaaacaaaacaactctggcttttgagatgacttatactaatttacattgtttaccaagctgtagtgctttaagaacactacttaaaaagcaaaataaacttggtttacatttatttttcctttattgactcatttattcctatattaatgatagtgggtatttgtgtttaagcatcaagtaacattttaaatgaagttggaccccttgatttacaaacaagatttctaaggttattgttcctagtaaatgcagcagttgtgtaaaatgaacatgttcctaagataccttttgttctcaagaaacaaattcctcctgtggcattttgactcattttacctttatttgggattagagggcacttcttgtctaactctacttagcatctaaatgtaacaaagaataaacattagccttggaatgagaacacagatgtaacctggtacaaatactaattgtattcttaaaaaatgtaagtaaactaagtagccatgagccttctcaaaagggtgagtggagccaggcttggtagctcacacctgtaatccctgccctttgggaggccaaggtgggcggatcacttgaggccaaga

SEQ ID NO: 25859 - DNA, 1027 bp, Homo sapiens
gtgatttctgagattttggtgcacctgtcatgtgagcagtatgaactctactttatgtgtagtcttatccctcatgtgtatgaactccaccttatgtgtagtcttatccctcacccactcctgcccttccccacaagtccccaaagtccattatatgatctttatgcctttacatcttcacagtttagctctcacacaacttattataatttataagtaagccagcattggatatagttgtattccattattaatttaagaaaccttatgcaagtaattattagtcatcatcccaaaaaaaagggagaacagggttagattcagaatactttgataagagctaaatactatcatgagtgctgtcagtctgtagtaactttccattggtattctatgtcttttaggcttacagatactttttacactcttacaaaatgttgcacaagaagaagctgcagctcagagtttttatcaaacttatttttgtgatattctccagcatatcttttctgttgtgacagacacttcacatactgctggtaagaatttaatacgatttaaatgttaagtgccagctgggcacagggcctcacgcctataatcccagcactttgggaggtcgaggcggggagattatgaggtcaggagttcgagaacagcctggccaccatggtgaaactgtctgtactaaaaataccataaaaaaataaaagatacaataaaaatactgggcatggtggcatgtgattgcaatcccacctattcgggaggctgaggcaggagaatggcttggaccgaggaggcagaggttgcagtgaactaagattgcgccacggcattccagcttgggtgacagagcgagactccgtctaaaaaaaaaaaacaaaacaaaaaaaaacgctaagatctatagttatattacattttggagttaataattttcttcttatcaacaggtttaacaatgcatgcatcaattcttgcatatatgtttaatttggttgaagaaggaaaaataagtacatca

SEQ ID NO: 25860 - DNA, 1107 bp, Homo sapiens
gatgttatttctgcttgtgaaaatactcaccagttagcattcattagattaaaacattagtctgagttgggtggatcacgaggtcaggaaatcaagaccatcctggctaacacggtgaaacaccccgtctctactaaaaatataaaaaattagctgggcgtggtggcaggtgcctgtactcccagctactcgataggctgaggcaggagaatggcgtgaacctggaggcggagcttgcagtgagccaagatggcaccactgcactccagcctgggcgacagagcaagactccgtctcaaaaataaaaagacagtattgagggctcgcttgctgccatcttacatatacagtatacgtagaatcctgattctgccacctaagttggagacacccactgaattttgagcctcacttttcttattgtgagagttttgtagctgggcatggtgctatacctatagtcccagctactcaggagactgaggcacaagaattgcttgaacctgggaggtggaggttgcagtgagcagagatttgccactgcactctggtctgagtgacagtgagactgtctcaaaaaaaaaaagtcttgaatgacagtgtgtccatgagacttcccaacccattgtgatttcctgctttcttttgctaaaaactgttttgacgtaggaaaccctaatacaaacacaagattttcctgttttcagtagatgatcatgctacatctcatagacaggaataaccttgttgtttaaaatagtcaccatgtacctaaattaaaacataacttttttttccctccccaacaggtcgctgaaaattttgttccccctctgttggatgcagttctcattgattatcagagaaatgtcccagctgctagagaaccagaagtgcttagtactatggccataattgtcaacaagttagggggacatataacagctgaaatacctcaaatatttgatgctgtttttgaatgcacattgaatatgataaataaggtgtgtaatatttcagttatgtaagggggaaattctgcaggatagccttaattcttgaaagctaaagtatgtctgtggatataacataattttaatgccatgg

SEQ ID NO: 25861 - DNA, 1250 bp, Homo sapiens
tttataaatctattctggggtggaaatacattttaggaaatgtacttgtagtttctaaatattttctaaatgtattgttactcatcaataaaattctgctcattatttgcatttgaaaccatgtttttctttgtagtttatcttactcatctggattatgtagatacagaaagaataatgacagagaagcttcacaatcaagtgaatggtacagagtggtcatggaaaaatttgaatacattgtgttgggcaataggctccattagtggagcaatgcatgaagaggacgaaaaacgatttcttgttactgttataaaggtatgcaagggataggtatgaattagaattgctaaataagtattatgttgttacaataaataatacaaatttgtcttatttacaggatctattaggattatgtgaacagaaaagaggcaaagataataaagctattattgcatcaaatatcatgtacatagtaggtcaatacccacgttttttgagagctcactggaaatttctgaagactgtagttaacaagctgttcgaattcatgcatggtaaatctctttctttactatattttgcttttatttttattgaagaaaataaatgaatgtttttgtcttgttagagacccatgatggagtccaggacaaaataaatgaatatttttgtcttgttagagacccatgatggagtccaggatatggcttgtgatactttcattaaaatagcccaaaaatgccgcaggcatttcgttcaggttcaggttggagaagtgatgccatttattgatgaaattttgaacaacattaacactattatttgtgatcttcagcctcaacaggtatgttaagcactgagcatatgttatttttagaaagtaacacttgtatcaatctgtatgtatcaatggaaataggagggcaactattggatccaatagaagtgtttctgattaaattttctttcttttttccttgagacagggtcttactctgttgcccaggcttgagtgcagtggcacaattacggctcactgcagccttgaactcccaggctcaggtgatcctcccaccttggcctcgtgggtagctgggactacaggcatgcactgccatcacactcagctaacctttttcccccccttggtagagatggggttttgccaagtggcccaggctggtcttgaactcctagcttcaagcgatacgcttgcctcagcctcccaaaatgattttatatgt

SEQ ID NO: 25862 - DNA, 1050 bp, Homo sapiens
aaaagggtgttgggatattagggcttaaaaataatagtgttggctgagtgcaatagctcagacctttaatcccagcactttgggaggctaaggtgggaggattgcttgagccaggagtttgagaccagcctggacaacataacaagataccgtctctacaaaaatgttaaaaataagcttagtgcgatggcacatacctgtggttccagctactcgggaggggctgaggaggactgattgggcctaggaggtggaggctgcagtgagctttggtcataccactgcactccagcctggacagagtgataccttgtctcaaaaaaataataataaaatattaagtgtctttagttgttttataaaatgcgaactgatcgtcccttttaaaatttgcagatgcttcctttaaataccaatattcgacttgcgtactcaaatggaaaagatgatgaacagaacttcattcaaaatctcagtttgtttctctgcacctttcttaaggaacatgatcaacttatagaaaaaagattaaatctcagggaaactcttatggaggtaagatatgtggagcttttgctcctaaaattctgctctgcctactaataactcttaaaagtgcctttttctaaaatgtatgtaccttttgagatttcttattacttaatatttgatcagtacattatatatattctcaattctgaattacagttataagcccagttttctgattttatgttctccataaagctaggactaaaaatttataatcaaaattaaattactaattattatatcatttctaaggttaaaatttcaaagaccttattttaaaatttcagttttaattcaaataacatgcatttgttcatttaaagatatacaattcatcgtgtaatcccagcactttgggaggcggaggtgggtggatcacttgaggcaggagttcgagaccagcctggcctacatcgtgaatctctgtctctattaaaaatacaaaaaaattagctgtgcgtggtgtcacatgactgtaatcccagctcctcaggaggc

SEQ ID NO: 25863 - DNA, 1032 bp, Homo sapiens
atcctcctacctcggcctcccaaagtgctgggattacaggcacgagctaccacgcccagcctggccaggctgttctcagactcctggcctcaagtgatctgcccaccctggctccccacaaagtgctgggattacaggcatgagcaaccgcgcaaggcctcctagaataatttctacatatctatcaggcagatactaatacacagacagacccattagacggattggacctttcattaggataattgaaaagggtcctgcggtgattaagataaaagactttgtgttttgttttctacccagtagggtgaagagggtggcacatttcttcctttaataaaggaggagaaaatgaaaagtgatttatccttactcctgcctttatccattacataatttctttgaagtttgttttatttgcctttgagaaatgaagtgcgattaacatttcatgtcttgttttagatactgaaacaagaatggcccaaacattggccaacttttatcagtgatattgttggagcaagtaggaccagcgaaagtctctgtcaaaataatatggtgattcttaaactcttgagtgaagaagtatttgatttctctagtggacagataacccaagtcaaatctaagcatttaaaagacaggcaagtaataattatgttttagaattttaaagtgatttctcaaacaatttcaagcagtttggatgtaaattgtagatattttaaggaactatgatcagtaatatgttaaattgcttgtagtggttttcaactgcagattaagaaatagtcctagacggggcctaataatttacctctgaaggttgaaaaatgaattgttcaagacacacttcaggaattgttttgtatggtaactagtttaataggttctaagcaaatgatttgtgtccaaacatacgtattagttattttattttattttgagacaagtcttgctctattgcctggggtggagtgcagcagcgcaatcttggctcaccacaacccccacctcctggattgaggt

SEQ ID NO: 25864 - DNA, 1051 bp, Homo sapiens
tactatgcagttgcaagtttatattgactatttgatattgctgtgtttttatttgaaatgggactgttagacacatttttctttatattgagcaatagagctggaatattaaagatgtatgcattaacccttgcatttggaacatttacatgtcataagctgcctttcagtaagtggttaggcatttctacgggtgtgtattatattttgaataaattttatatggctttccaagaaacaattagagcatttgacccaccgactttgttgtttatttttatttttttgagatggagcctcccgcagtagagatagagtttcactatgttggccaggctggtcttgaattccgcctcaggtgatccacgtgccttggcctcccaaagtgctgggattacaggtgtgagccaccatgcccaacctgacctaccaactttggatgtgaatttttttcatttatattgagaagaatagggtcttgggccactagattgtaccagtgctaagtcagtatctgaatccattgaagatcctgttggcaacgtcaggacttatcaaagacacacaacttcaatgagaacctttctttggaattaattaattaatgatatggagccttgatctgtcactcaggctggagtgcagtggcactatttcagctcactaggaatgcatctttctcttctctttctccacctcccaggtttaagcacttctcctgcctcagcctcccgagtagctgggactgcaggcacaagccaccatgctgagctaatttttgtatttttagcagagacaaggttttgccatgttggccaggctggtctcgaactcctggcctcacgtgatctgcccacctcagcctcccaaagtactgggattacaggcttgagccactgtgcccggctgccttgtttgatttttttttttaaagagacagagatcccctctgttgcccaggctgaagtgcagtgacacaatcatagctcgttgtaacttcagtctcctgggtgatgggtagaattctgccacagcccaagtagctaggagt

SEQ ID NO: 25865 - DNA, 1037 bp, Homo sapiens
gcttaactctagcctcaacttccggggctctagcaatcctcctgcgtcagtctcctgcataactgggactacgtgcgcatgaatcatacctggctcactgtttctattttttgtagagatggggtctcgctatgttgcctaggctggtcctgaactcctgggctcaagcgatcctctgcctcagcctcccaaagtgtttagattacagtcaagagctactgtgctcgacctgctttcaccttttggctatcatgagtgatgctcctgtcaattttaataaaattttaatcttttagattttttgtccagtgtgtttgaggccataaacatccatttaagaatggcggatgtgcatatagatccatttctcttaacattatcaaagcaggttaaattatagattatctgtgggaaccctaacttaactcctgctttagaattattgttagctgtttgtcttccatgtggcattgttcttattaatatttcattgagagaacagtagtaacaatatcctgtatacccttgtgtaagtaaagagagcagatcactattttattgaccatctttcaaaagatcgattttgtgtgtttttttgttttgttttgagatagtctcacattgtcgcccaggctgcttggattgcagtagtacaatcttggctcactgcaacctctgccttccgggttgaagcgattcttgtgcctcagcctccagagtagctggtactacaggtgtgcaccaccatgcctggctatttttttgtattttaatagacaggtttcaccatgttggcctggctggtctcaaactcctggcctcaagtgatccacccacctcggcctcccacagcgctaggattacaggcttgagccaccacatccagccaattttgatgttttcatggactgatacttgtaataaacatttcaattatatatagcattgatgtagaaatgtaccaaatttacatttttttagcttatggaataaataaatgtttaaactgaaattgattcgaaactagattgaacttg

SEQ ID NO: 25866 - DNA, 1052 bp, Homo sapiens
gttactcagaggtgattgtttcatttatgattttgaaaagaaaatgtaaatattagacttaagtccttgcatctaaaacaaattcatgagaaatcccacagaatacaatgttagagatgggagcaaaaattatcagtctaatctcagagagttgacaggcattccaaatcgttttttgtcagtatttaaaccatggtaggataatgtaagaaatatacttaatgcctggtgcgatgtctcacgcctgtaatcccagcactttgggaggcctaggcaggcaattgtctgaggtcaggagttcgagaccagtctggccaacatggtgaaaccccgtctctactaaaaatacaaaaaaaattagccgggcatggtggcgtgtgcctgtaatcccagaatcccagctactcggtaggttgcagcaggggagttgcttggaccagggaggtggaggctgcagtgagctgtgatcatgccactgcattccagcctgggcgacagagcaaggctccgtctcaaaaagaaaaaaaagaaaagaaaaagaaatatctgtaagctataaattatgtttttcatttctaaaaaaaacaaggcaggccaggcacagtgattgaggcctgcaatcccagcagtttgggaggctctcttgagcccagaaatttgagatcagccaggacaagatagttagacttctctctactaaaaatacagaaaactagcagtgtatggtcgagtgcccctgtagtttcagccactcaggaggctgaggcgggagaatcatttgagtccaggcaggaggtcgagccctgattgattgcaccactgcactccagcctgggcaacagagtgataatatctgaaaagataggctgggcacagtggctcttgcctgtaatcccaggactttgggaggctgaggcaggcagatcacctgaggttgggagttcgagatcagcctgaccaacatggtgaaaccccatctctactaaaaataacaaaaaaattagctgggcgtggtggcgcattcctgtaatccctgctactctgaaggctga

SEQ ID NO: 25867 - DNA, 1396 bp, Homo sapiens
tttgtgtgtgtgtgtgtgtgtgtgtgtgtgtgtgtgtggtttttttttttttttttagtagagatggggtttcaccgtgttagccaggatggtctcgatctcctgacctcgtgatccaccctcctcggcctcccaaagtgctgggattacaggcgtgagccaccgtgcccggccaggttggattttataagtagttgggccactaaaatttctgagttgtacagtttcatgtctttagttggcagaccaaagctgatccactcataaaattttatttagtgctctcctttgacgtgagacacgtggtatatttattggcaccgtaatactggctacattatttgacctcatatttcagtttgtgttgcaaggttttgggcattagagctaatgtataggaagccctgtgcttacatatgctgagtatgagtaagtagtgggttaccaactgtttttgatgaaatatctgcatttcaccaaattgccatataccagtctcaaaatatcctgaaccttctgaaataccttcctaagtgagctcactaacacctacttttctgtgtcctttacaattttttcaccacaaagtctcaaagtttcagaaacggaactaatagggtcacttctgctgaagatctcctgtagtattgaagatatttaacatgtttcctttaattgatattggcctttgagaatttttgtatttgccttatttattaggtttaaagtgtacagttggataagttttatcttgtgcatgctcctgtgaaactacctctgtataatcaagatctgcctctatccgattactttcaccttcactgcccctcttcacatgtgcttgttgtcacttgcttggtaagagtggaatggctggattgtgtggatttttttttttttttttttaagacagtcacactactctgtcgcccaggctggagtgcagtgtcatgatcttggctcattgcaacctctggctctcgggttcaagcgattcttgtgcctcagcctcccaagtaggtgggattacaagcatgcaccaccacaccagcataatttttgtttttgtaatagagtttcgccatattggcctggctggtctcaaactcccgacctcaggtgatctgtccacttcggcctctcacagtgctgagattatactcataagccactgcgcccagcccatatggatgttttggtgtatgtttaagcatccaactgtattccaaagtggtcatgtcagtctcaccagcagtgtataagtatgtttcacatctcggctgacatttggtatagacaatgtttttagtttggctattgtagtgcatatacaatagcatctcatggtggttttaatttctttcttttttttttttttttttaaagacagagtctt

SEQ ID NO: 25868 - DNA, 1028 bp, Homo sapiens
aattagtagaaatagcaactataagggtggggttaaaatataaaataaacccatgggttgtcttgctgctccttaagtaacacaccagtgatgcttgtaaacactttctatagaaagtatctgtgacaatactttaatatttggccaaaagcttataactcctagaggatggtaggaagcttgatagcatccaagctgctaaattcttaggagcctgttcgtgttaaagtacgtgagcctatgagcagtcatttatgctgtgaattcatatctggctgctacttttccttcgacagataagcctatttggctgctaaagggctttttatttggttcttcctcctggtgtgagcatgtataaacagcaggacgttatatagagtagcaaacaataaaatgaggaaaatgcatgaaaactcagtatatgggtgaatagatacttgtttaatatgtgtaattaaacttggtagcataatgtttttgaaactttagatgtaaatgtgtgaatgtctgtccatttgtgaatcctgagagttgccagtcctataagcaatatattcacatgcttctattctccaattttcagtactatggactacaaattttggaaaatgtgataaaaacaaggtggaagattcttccaaggaaccagtgcgaaggtaggaaaataaagaattataaattcagagttttgtttttcctggcatttttattgtagttgactgtttgagggggcatgtaatgaatctttagtatattttgctctaatggagcttattgcttttatcatgaagcaaacaggtctgtttgtattggtgggtacaggaaggccacttacaggttatcttttgggagaaagaggagactggactgttgaaaactctgacaataaatattctagttaaaaatatgggctatggcacagtggcccacgcctgtaatcctaacacttcaggaggccgaggcaagtagatcgcttgagtctgggagttctataccagcctaggcagtatagcaagacctcatct

SEQ ID NO: 25869 - DNA, 1054 bp, Homo sapiens
agtccttttggtctctaaaagtcctatgtcgttagttcagtctacttttcgtttaccacctccttgggggtcttatttcaaaggaaaaggagtagtagtagcagcgagctgctatagtggaaaacatgatttttagtgttagacgtcttaatttgattcttggaagctctctctagtcattgcttaagtcccatgtacaaatatgacctgtcctacaagagattggagggttagttatgaggtttaaaagcacctattacagtgcttgataggtagaaggcactcagcttaaagggtacatttagcagtataatgaaaatgatttagcatatgtgatactcattgcttaaaattaaaaaaattttttttttgctactcataaaatatgcactaatgacaagaaaaatttattatgctaattaagcttttaaagtcaactgggaaaaaaagctgtaggtaggtttttttttttttaaaggaatgtgtaacttgggggaggggaagaaattatttacaagggtgacttttaatctgtagacagaacttctgcatacatggttagtatagtaggatatttagcagtgtaacattaggactaccctctaccctctgttatcagcatttttctatttttagccaagtagacagctagaaaaaagatgcgggaagagttggatgttttctccaatattgtgttctgttaaagatcttgaactctattgcttagcaactaaaatgctttcaccattcagttagtagtacaagggagatgctaggttttctctctttagtttgcttttgtgtcttttttttttaaacccctgctggggttttaagtttataaagaacattatgtaagaatggtgggattagaataaatcagaatgcaaatactagaagtagcatcagagagtaaaattacaactaacaggaaagaatattatttatgtagcgattgatgtgagtggtgatagtgtgggaagtatttgattctgtgtagaatgcttatcacttcaaagcatctgacaaaatggtaacttgaccaagtaacttt

SEQ ID NO: 25870 - DNA, 1059 bp, Homo sapiens
ggtatttaaagtcatggactggttgagaacagcgaggagtgaggatatgtagatagagaagagaaaaggtctatgcaatgtgacccaggtacaccagtttttaaagcttaggaaaataaaggaggcctcaacaaagaatgcagagaacgaatgcaattgagctatgaggagaaccatggagggtggtgtcttggagacaaggtgaagaaagggtctcaggctggacacggtggctcacacctgtaatcccagcactttgggaagccgaggcgggcaggtcacctgaggtcaggagactgagatcatcctgactaacacggtgaaacctcatctctactaaaaatacaaaaaaaccaaaaatacaaaaaaacccacaaaaattagcccggcgtggtggcgggtgcctgtagtctcagctacttgagaggctgaggcaggagaatggcatgaaactgggaggtggagcttgcagtgagtcgagatcatgccactgcactccagcctggacgagagagtgagactctgtctcataaaagaaaaagagaccaaccaataagacaaatgctactgataggcagaacaagacaagaattgagatttgtcctttagatttgaccgcatggaggtcattggtcattttcataagtgcagtttcagtgaaacagtggaaggaagtcttgattagagtgggttcgagagaggagagaaaatagaaattaagtatagacaaggctgggtgcagtggtcacgcctatagttccagcaccttgggaggctgaggcgggcagatcacttaaggctaggagttcaagaccagcctggccaacatggtgaaaccctgtctctactgaaaataaaaaattagctgggcctggtggcaggcacctgtaatcccagctacttgggaggctgaggcaagagaatcacttgaacccaggaggcggaggttgcagtgagccaagatggtgccactgtactccagcctgggcaacagagcaagactctgtctcaaaaaaaaaaaaatctgaatattaaaacaaaagattctcctagtgtccc

SEQ ID NO: 25871 - DNA, 1035 bp, Homo sapiens
cttaatctgcaaaaatttggctttcatctgttgagactaccaaatgtcaatggcttttaaatgtgacattaatcttccaaatgcattccaaaataatgttatccactagatatattttatagttctatgctttgaaattgttctggcgatgattcatatgaggatgacgatgattcatctgatgtaagtgagccacaaggatcccaaagaagtatagaatttcctataacctgatttaaaaagaaagtctaacatatgaataggaacattgaatttccaacacattcaactgatattaaaatagataaaatgaagaaaactactttcaagactgattttcacatacaaaacaataagataacagagggtataatttggataaatatttagagtagactagataacagagattaagagaaattcatatctcattcttagcatagggacataatcctgtatccaaattctttcttgccagatgtgtttcagaactgagagttatcaggattttagacaggaatataatgcatatcccatatattctgtaacagcccagcaggatctggagcagaatcttgtaatcaaaccaaaatatgcatgcaaaaaatgcattagtattaaccataagtaggataaacaaaggctagaaacagatacacatctgttcaggtcagattttgctgctaaatgagtttgccacgaacttatgaaaaacttcaggtttctacagtttttttctttgttttgaaattttagactatgatttgtagacctctacaagcaaatatgttcagatttcaacatctggccagatgtgagtcaaagagttgttttcaaggcttggctgtgttagatagtcttgtggtttggggtgtttagtctgaaggcaaagagtgccctttttttttttgatacagaatattgctccattgcacaggctggagtgcaatggtgcaatctcagctcactgcaacctctgcctccctagtttaagtgattcgcctgcctcagcctcccaagtagctgggattacaa

SEQ ID NO: 25872 - DNA, 1032 bp, Homo sapiens
aatcacactgaatcatcaaggtctcctctctatgcccttgctgttgtttgcagcgtcagggtgtcagcagccgcatttgtgtttagaacatctgtggggacgcttctgatatgtgcagggctgttgatcaaagtcatctgtagcctgaaaagcctgaatccagctgattggtcatttgatcagttagagtaaggctttgcctattcagttttaaaaatcattgtgtattatctgtttgcaactatgattttgtatttttaaaaagtgagaaccacagctgtcacaaactgattagttataaaaatatacattatttcattaattttactggaaaaaatggcttagtattgaaaggagagagaagtattggtctttggtggtttactttttaaaaattttggaaagtgtgaatcaataactatttttaattatactatttgcccattctttttctctgcagtgcatttcacagaataaatcctctaacttgttttgctgctctgagccatttttaaaagtatagaaaaaacgccgggtatggtggctcatgcctgtaatcccagcattttgggaggccgagacgggtggatcacgaggtcaggagatcgagaccatcctggctaacacgatgaaaccccgtctctactaaaaatacaaaaaattagccaggcgtggtggtgggcgcctgtagtcccagctacttgggaggcagaggcaggagaatggcatgaacccaggaggcagagcttgcagtgagccgagatcgcgccactgcactccagcttgggcaacagagcgagactccgtctccaaaaaaaaaaaaaaagtatagaaaaaaatggatacttgcaaatttacatttatttttgcactgagagtttactgttaaattgtctacaccatcatccctttttctttttatccttagttctagtccaaattatttttgatttgtaaattattaggaaagtttttatactagtttttttaaccctatgtattattacagatggaagtaattatggcatgtgt

SEQ ID NO: 25873 - DNA, 1624 bp, Homo sapiens
agatcaatctaatgtggccaccacccatgttaacaaatagaccattgccagcaccccaaaaaccctatgtgccattgcagatcacagccctctacctctccccaagaggtaaccaccattctaactttcaggataagtacttccttgtttttctttgcaattttacagtgtgtgtacctatcctcaaacaatatagttgttttgcccatttctgaactttatatagatcatacaatatgtacttgtcagtgctttgcttcttttgctcagtattatatttgtgagatctatccatgttgtggcatgtaactgtagttcattcattttccttgctttgtttcactccattataggaatagaccacaatttatttatccattctgctactaatagatatttgggtgatttcccatttggggttattgaaggacagtactatcctgaacattcttgaacatgtcctcccttgggactcatatgtgggagcttctctggttatattcctaggagtgtaattgttggtcatagggtatgcagattttcaaacaactgtgactgctgaacttaattatcaccagtacttttaatccatattttttttttttttttttttgagacagagtcttgttctgtcacccaggctggagtacagtggcgcgatctcggctcactgcaagctccgcctcccaggttcacgccattctcctgcctcagcctcccgagtagctgggactacaggcggccaccaccacgcccggctaattttttgtatttttagtagagacggggtttcaccgtgttagccaggatggtcttgatctcctgacctcgtgatccacccgtctcggcctcccaaagcactgggattacaggcgtgagccaccgcgcctggcctaatctatacatttttgatgaaaatttaaagtcttctgttctcgtctaaaaaggtttgtctttcctatagaaaaatgcaagaatggcagcagaaaagcattattctaataccctaaaagcactaggaatatctgatgagtttgtttcaaagaaaggccaaagtggaaaagtacttgagtacttcaacaatcaagagacgaaaagtgtcactgaagacaaagaaaggtaacatatataagatgtctgaatggcttacctttgaaaaaattattacctgcagaaaagcacaattttatactatgtatattttttgttctatattgttttaaaaagatcttttacccaatagtaaaagacatatgaactgttgtaaaacacactgatattttaacatgtttgacacattaacgttcacatgaagtattttatttttaaagcagaataacagatttcttaaagacataagtaacaaaaataatagcatgctttcaaatgaagtttaaagaaacaatcactcaaattttgaaataaattagttttcaggaatattaaatttctcaatgggcacttttatagcgttttcttcttttttttgagttgtcttggtaacaaattggaattcatacacttgaggaagactggctacacggtggcatacttgcagagggtttgtttacctttaaaccaactcatttttcctttgaaagattgataaatttcttcccctagc

SEQ ID NO: 25874 - DNA, 1056 bp, Homo sapiens
ctgcaattactaaaagaacttcctttctatacgaaaaacaaactagtcttacggacagtggaccctgattttactaagtttatgcccggttttacaacctttcccttaagggaaatttgtcaattttaggtcatcttctcctttgtcccataggggaggcatctgtatgggtgacatggcttaacaattgacaaaatcactggaggttacaggttctaaattgtgaatttgaagctgttataattggacaatagacagttggagaatttacctgtaacagatgagcatagttacagaactgtacttgccagtgactcattgaggacagtggacatgtattgtgggtgaatctgcacattacagtctctcaaagttacgtaatctttttgctcactgatctagatataattttatataatgcctttcattttaagtgatggatttttttaacatctttatttcaactttagggggaaaaatcattttaagctgttctacattataatcataaagtgattggcttttggctcaaagacattatctccagctctgaactgcaagttttttgtttttgctctttacactgcttctgggtttttcttatttatttatttatttattttttcaacttttattttaaattcaaggagtatatgcgcaggtttgttacaagggtatgccaggcgccgtggctcacacctgtaatcccagccagcattttgggaggccgaagcaggtggatcacctaaggtcagtggttcgagaccagcctggccaacatggtgaaaccttgtctctactaaaaatacaaaaattagccgggcatggttttgcgtgcctgtagtcccaactacttgggaggctgaggcaggagaattgcttgaacttgggaggcggaggttgtagtgagctgagattgcgtcattgcactccagcctgagcaacaagaccaaaattctatctcaaaaaaaaaaaaaagggtatattgtgtgagctggggtttggggtatgattgaactcatcacccaggtaatgagcatagtacccaataggtag

SEQ ID NO: 25875 - DNA, 1043 bp, Homo sapiens
ccattgtttttttaaaagtttttacttttttttttttttttttttttctgagacgaagtcttgctctgttgcccaggctggagtgcagtggcatgatctcggctcattgcaacctccgcctcctgggttcaagcgattctcttgcctcagtctcccacctcccaagtagctgggattacaggcatgtgccaccacacccagctaatttttgtatttttagtagagacggggtttcaccatgttggtcaggctggtctcgaacttcttaccttgtgatccacctgcctcagcctcccaaagtgctgggattacaggcatgagccaccgtgcctggccaagtttttacttttgataaatatttgctagtcatcaaggtgacagcagttcttaatacaggttttccttttattaattgccttaaacattttccagctttaaaattctgtcattacaggttttgaaatctaagtttttctcttatcaggtaaacactcgataatctggataactgactagcaccattatgatcaccagtattgtggctggaatggaagaagatcaccttggtgttccttgtttggaagattatttcctctgaatttctgggcttggtcttccagttggcatttgcctgaagttgtattgaaacaatttaatgaaaatattaaatatttggtttcaaaaggcagatttatcttctcccaacattctgttatttctgatacttttgaaaaactaataaaaactaataaaagaagcgtaaaaagtgagtttacatgttgaggaaaaaaatggcccaatatgctcatcactgataaatgctccctggccttaaaaactaccaacatataatatatatgctgtcttaaaagttaatgatccaagtggcacctctctgaacctactttggcttgggaggctgcccagttaaaacaaaaataagttaatggtacagaaagagaatgaaaaatgaaagcctccttttatcctatcatcctaattccttttcccagtaataatgactgctgtgttggattccttct

SEQ ID NO: 25876 - DNA, 1119 bp, Homo sapiens
taaggcagcagtggatcaaagagatccaggagtggggcaataataaatgtgaggctgaatcatattttattggactgatgacttttaatctgttcatctattaaacgtacagatgtccactccctcttaactacccctctttgttttcttttatccttagtgggacaattgatgactgtgagttggtggaagggctggttctcacccaaaaagtgtcaaattctggcataaccagagttgaaaaggccaagattgggcttattcagttttgcttatctgctcccaaaacagacgtaagtagaatccaaatgaaattggttctctgtgtttaactttttaataactcaggcatttctttattaaaaatagaaaatactactagtgatttaaagcagatctcaaaagacttactagaattgagacaaaaatagtaattgttggtgccacaagtgacaagtctgtatcctcagttgggatattgaaattgagagctagccatttgcaacgatgcctgtagtcccagctccttgggaaattgaagcagaaaaattgcttgaacctaggagtttgaggttgcagggtgctattccatgacctgtgaatagtccctgcactccactccagcctgggcaacatagtgggaccccatcttttcactgttgctgttaatttacaaattcacacagattagagagggaccctatcttttgaaaacaactagggtaaccattttatattttttggttataaaaaatttacttgcaaaatgtaagataccagtgtacttagttgaaaataaaagactcaagtttgggatgtgtatcttaatccagactcttttctatgcatgtctatataatttattacttgatatagttttggttgaatttatacaacacatagtattttcgcttaaaattctacttttaaacttaaaatatcttacaatgcaaattatgatgttctttttctgaacagatggataatcaaatagtggtttctgactatgcccagatggaccgagtgctgcgagaagagagagcctatattttaaatttagtgaagcaaattaaaaaaacaggatgtaatgtccttctcatacagaaatctattctaagg

SEQ ID NO: 25877 - DNA, 1026 bp, Homo sapiens
caagaccattctagggaacataatggggccccgtctctaaaaacaaacgaacaaaaaagactttttaaaaaaagtagccagatgtgttagtgtgcacctatagccccagctactcgggagactgagacaggaggatctcttgagcccaggaggtggaggctgcagtgagccatgattgcactgctatactccagtctgggtgacagagtaagaccctgtctcaaaaaaaaaagtttgatactctagtctcatctggaatgccccttttcttagcttccaattctatagagtacttacgatatatttttgctttctaattagaacttttgagtagcagggcagggggagatgacaacccacaatctgaactggagatcatctactagtctttaattttaaatgaaacccaaggtagacaacaaatcagaagaaatcaggaatcatgttgcatcttcaaattctgtttgtgacactggtgcgattatttgaattaggtgttactgggttctgtcatttctcattgagcaacttggcattttctgttcacttagctggtggagctgtctaaggctcaagatatagaagcaggagatggcaccacatcagtagtcatcattgctggctccctcttagattcttgtaccaagcttcttcagaaaggtgggtaggatgtactttattactgaataaagaaaagtttaaaaaacaaactttaggaaaagccaagttattcataagtaatatgggattgaagatttaatttggaataactaatctttttaccaagaatttttaaagttagattttgctatatttataatagagattagaagaaattttccttggcttctgatatttgctgggctcctttttgaatggaactcaattgaattttgctgttcaaaaatgagtggtagaggccgggcgtggtggctcatgcctgtaattccagcactttgagaggccaaggtgggtggatcccctgaggtcaggagttcaagaccagcctgaccaacagtgaaacac

SEQ ID NO: 25878 - DNA, 1023 bp, Homo sapiens
tattttgtttaatgcttcttaaacaatgagaatgcacacccaaatatagatatctattatgtagttaagtggaaactattataaatccaggtgttgggacttcagtttagtgttccttatggatgtaactttgtatcttaatgtgggtctctgtgagataaaacaatatggaggatcatctggatgatactatagattattctccgctctggatattcaaaaatctatctttcccaaaaatgccattgtcctttttgtaggacaaaaaaggaaaaaagttactgtgttgactgtaagaattgtgttcaccgcatggcatggtactgctttaggggcatccatggtggaaatcgtgtttctgattaataagaaatcattaaagatagcaagtgcttctttataatatttttccttttgtgtgtgtgtgtgtgtgtgtgtgtgtgtgtgtgtgtgtgtgtctacatttcttcacttttagattaccctgcaacaaagccacttttttcttttgtaaagttggactgttattgcgtattcttaaactattatgctaatgtaagggaagagaatttaaaattaagtactttgcaaacagaaattaacttctctattttgaaatgtaaaagtttaataaaactattaaggtgtgacattgaaatataactttaaaattttttttctagattcaagatggaaaaggtgatgtaaccattacaaatgatggtgctaccattctgaaacaaatgcaagtattacatccagcagccagaatggtaagtgtaattttaggtgagtctttttttttttttttttttgagacagagtcttgctctgtcatccaggctagagtgccgtggcacaatctcagctcactgcaacctctgcctcccagattcatttctcctgcctcagcctcctgagtagctgggattacaggctcgtgccaccatgcctggttgatttttgtattttcagtagagacgggtttcaccatgttggtcaggctgttctcaaactcctgac

SEQ ID NO: 25879 - DNA, 1019 bp, Homo sapiens
gaacatgtcaaaaaatcatgaatatataaaatatgtgaaccaacttgatctgacattttttgaacctatatccaacaactgcagaatacacattcttttcaaatctacatggcatattccctaaatataaactgtattctggttcataaaataaagctcaacaaattctagaagattgaaatatgacaagaaaggaattaaattacaagtcaattacatccaaatatctatgaagttcccaaatacaaagtaaataatacttctctaaaaagatcacggattaaagaaggaatcacaagagaaaatgagaaatattttgaattgaattttaaaatgagaacataatatatcaaaatgtgtaggatgattataacatgtagcataaaataaggcaccatgacttcataatgatacaagtaaataaatccaactaataaatataaaagtaaagatagaattagaaaatgacaatttggcaaacatcatagtgataattttctaagacaagaatccataatggatgctataactggtgagaaaaagtttcatgaaaaacaggatatttacatagcctcaaaatattttctcatgaaatatctatgatttacaaagggaaaaggaataactttgcagtggagaaggctggcagatgccctgttaatcaagtaatcaaaatttatatttatatcgtcaataatggaagaaataaaagtaatttgtcacctcatatattgcagtaagaacacaacatccgttccttggtattcttgaaaaaaaaatgcataacccaaatctagtcatggggagtatcgattgaacctacattgagagacattctaataaccagcctatactcttcaaaaatgctaagttcatagaaagtaagagcaaagaactattccagattaaaggagactaaagaagcattacaactaaatgcatcaagaaatggatatttgtgataggaaggacattatttgaacaactggtgaaacttcagtgattaagtttgagtaatg

SEQ ID NO: 25880 - DNA, 1019 bp, Homo sapiens
tacttttctcattagtaatcattgaggccagaaggcagtgagaagacatatgcaaactgtttaaagaaaaaaaaaaaatcacctgtaatcccagcactttgggaggccgaggtgggcagatcacttgaggtcaggagtttgagaccagcctggccaacatggcaaaacctcatctctactaaaaatgcaaaaaaagaaaaaaagccagatgtggtggtacaagcccgtaatcccagctactcggaaggctgaggcaggagaatcgaacctgggaggcagagggtgcagtgagctgagatggcaccactgcactccagcctgggtaacagagtaagactctgtctcaaagaaaaaaaccaacaacaaagaattttatatccagcaaaattatctcttaaaaatgagggagaattaagacattctagataaaagatgagggagtttttgctagtagacgtgtcttataagaaatgctaaaaggagttcttcagactgaaatgaaaagacactggacagtaactcaaagccatagaaagaaataaagaacgtgtaaagataactacataggtaaatataaaagacaatactactgtatttttagattgtaagttttcttcatgatttaaaaattaatacatgaaacaataattaaaacctatgtaaatggggatacaatatatatacatgtaatttatgacaataataacagggtagatagagctatagagaagcaaagtatttgtatgttattgaagctacgttggtgtgaattgaaactagattgttataaatttagtacattaattataatccttagggtaaccgctaagaaaataactaaaaatatatacagaaaaggcaatgaagattaaaatggtacactggaaaaaatttgcaaaataaggcagtattggaagaattatataacaaaacacatatgatttatggaagacatagcgaatggtagatgtactttcttatcagtaatcaatttaaatgtaaatagattaaatttgata

SEQ ID NO: 25881 - DNA, 1021 bp, Homo sapiens
gctggagtgtggtggtgcgatctcggcttactgcaaccttggcctcctgggttcaagcgattctcctgcctcagcctcccaagtagctgggactacaggtgcacaccaccacacctagctaatttttgtatttttagtagagatggggtttcaccatgttggccaagatggtcttgatctcttgacctcatgatctgcctgccttggcctcccaaagtgctgggttacaggcgtgagccaccgtattccagtttttagagtaaaagctttcaacctttccttattcagtatgatggatggtctttctatgcctagtttgttgagagtttttatcatgaaggagtgttgaattttattacatgctttttctacatcttttgagatgatcatataatttttgtctttcattctgttgatgtgatgtatcatgtttattgatgtgcatgtgttgaaccatccttgcacccctgggatacattcttcttgatcatgatatattatcatttgatgtgctgttggatttggtttgttagtattttgttgacgatttttgcatctatttttatttagggatattggcctgcagttttacttttttgttgtatccttgtctggtttcggtatcatggtaatgctggactcatagaatgagttagggtgaattcattcctcttcaatagtttgaggaggtttagttcttctttatacatgtggtagaattctgcagggaatccacctggtccttggcttttctttatagggagactttttatactgattcagtcttgttattggtatgctcaggttttctgtttcttcctgattcagtcttggtgggttgtatgcattcagcaatttatccatttcctctagattttttagttcgttagcatataattgtacctcttagtccctgatgatcttttacatttctgtggcatcagttgtaatgtttcctttttcacttatgattttatctgggtcttctcttttgttcttggttattctagcaagtagttta

SEQ ID NO: 25882 - DNA, 1050 bp, Homo sapiens
tttttgttttgtttttttctcttttattgatacataatttacatatttgtggggtacatgtgagtgtttatatgcaaagaatgtgtaatgatcaagtgtgagtaattgggatgtctgttaacttgagtgggtagtatttttacatgttggtattacttcaagttctctcttctaattattttgaaatatacataatattgttgctaagtatagtcatcctattctgctatcaaacattataacttatttcttctatctaactatatgtttggactcataaccgaactctctcccccacccccgattcccagtctttggtatctgtgccttctattctctatgtccatgaggtcaagcttttagctcccatatatgagtaagaacatgtagtacctgtctttctgtgcctggcttatttcatttaacatactgacctccagttccatccatgttgctacaaaatgcatgatttcattattttttatggctgaataatattccattggttatatacaccacattttctttattcatcgatctgttgatgggcatttagattgattccatatctttgctgttatgaatagtgctgtgataaacatgtgagtgcagatatccttttgatataaatatatttctttttctttggatagataccaagtagtaggatttctggattgtatggtagatctccttttgttttgtttttcttctttttttgagacagaatctcactctgttgctcaggctggagtacagtggcgcaatctcacctcactgcaacctccccctcccaagttcaagccattctcttgcctcagcctcctgagtagctgggactacaggcacatgccaccacttctggctaattttttgtatttttattaggcacagggtttcaccatgttggccaagctgttctcaaactcctgagctccggtgatctgcctgcctcagcctcccaaagtgctgggattacaggcgtgagccaccatgccaggcctccttttggtttttgataaatctccatactattttccatagtggttg

SEQ ID NO: 25883 - DNA, 1050 bp, Homo sapiens
ccagtaatgggatggctggatcaaatggtatttctagttctagatccttgaggaattgccacactgtcttccacaatggttgaactttttaaaaaacaaatttgttactcctctgcttaaaacccttctacaactttggaggacaggtgggaaactggaaactgattaaaagggatagagaaacgtgggtaaggggatacagggatgagaagaagacttttaatggtacaccttggtataatctgctgttgtgttcttttggagctacatgaatgtattatatattccaacatgaatcaataatttgaattttaaaaattataacatcaacaaaactggtcccaatctacctgcattttaaatttcatcccttactgcactcttttttaatctcattggccaagctacaccaggtgtattaggccgttcttgcattgctataaagaaatacttgagactggatagtttataaagaaaaggggtttaattggctcgtggttatgcaggctgtacaagaagcatgttgctggcatctgcttggcttctggtgaagcctcagggagctttcaatcatggtggaaggcaaagggggaagccagcatctcacatggcaggagctagagcaagagagagtagggatgggaggtgctacacatttaaacaactaaatttagtgaacactgtctcactattgccaggataacaccaaaccatgaggaatctgcctctgtgacccaaatacctccccgcaggccccacctccaacactggggattacatttcaacatgagatttgggtggggacaaatatccaaactatatcaccaggcttctgtcaatcccttatattctacatactatctcttgctacctggcctttgcatgcaccattcctagctctgcctaaaatgccctttgcttccccttacatggaagtaacacattctcaaccttagatcccagactatcagttgtctcttcctcaaggaagccttcccagagaagctttatcctttattttgtggttttagaacatcatgtatttccttt

SEQ ID NO: 25884 - DNA, 1029 bp, Homo sapiens
tccagtgtatgggtatctacatttttttttctccattcatccataagtggacatctggattgcttccacctcttagagtttgtgaatagtgcatctatgaagatgagtgtgcaaatatctcttcaagaccccgctttcaattcttttggatgtatacccagaattgagatcactagatcatacgctagttctatttttaattttttgaggaaacaccatactgattttcatagtggttgcaccattttacaatctcaccaggagtgcatgaggattctaatttctccacatctttgctaacactagatcttttctgatttgttgttgtttgtttttgtggtagtaatcattctactatcaagctatgaagtagtatttcattgtgattttgatttgcagttatctaatgattagtaatgttgagtatcttttcatatgcttgttgggtatttatatatcatctttgtagaaatgtctatttaagtcctttgcccatttttaagttggattatctgattttttcgttgttgaattgtaggagttttaaaatgtattttgaggattaactctttcatatgttttgcaaatattttctcccattctgtaggttaccttttcattttgttgattgtgtcttttgatacctaaaggtttttaagtttgatgtcccatttgtttgtttttgcttttgtagtatgtgcttttggtgtcatatgcaagaaatcatgaagtccaccccaatgtcataaagcttttcctctcttttcttctggaagttttatagattgggtccgtgatactttgcttttccagggttctctctctacatttctgtctttaatccattttgagttaatttttgtatattatgtaaggtaaggttcaacttcgttcttttgcatatgaatatccagttttctcagcatcgtttgttgaaaagattgttctttctccccatcgaatagtcttggcacccttgtggaagatcatttgaccatttatgtgaggatttattcctgggatctcttt

SEQ ID NO: 25885 - DNA, 1052 bp, Homo sapiens
ataacatttttagtattatagacaattagttatgtaatactcactaataatgctcagcacttttaatcttcaaagcattatacacactagttaatccttacaacaccgttacaaatgtaggtcaatatcattatccctgtttttgcaggtggggaaattgaggcagaggttaaatgatttggagtaagtttgtcatagcaggattagaatgaaggcatttttggcttacagcccagcattcagaacagtagaaccacacctttagcagacttaacctctatgtacttgataaaacattacttctcattaaatcatattgaggtcatctctgcattaaaattcagaaccaacaagtttgatcactgtataaccactttacacacacacacacacacacacacacacccccacaccattttctctttcaaggctttcttgacactatattatcttagtctgtcttttaaattgactctttattggagaattaccagactatctatctttgactttatttttcttctgtgatcttactcaatggctttactctctatttagaaaattccaaagtagtttttatgtagtccaggcctctcttctgtatttctagctaccagctagacatatctacccagagcatttccttgtacctttatctcccactgagtctaaaattcaacttattaacaaaacttgctcttcttctagactaacctgtttctatgtgtgtttcaatccaagtcctgcccttgaaactaggatcaactaggtgggaacaagtctgggtaaggggttcctgggaacttgatgtggccaagaagaacagtattcatgggtcctttgacaggatgaagaagttgaatcacagtttaagaagaagagccagagttacaaactgaggggcaaggcagaagtaaaacaggagaccacgtagccaggttagtagctaggaacattgatgtgtgtgggttcagtagttgaggcagtcattgtgaacagatggaatgcactggtacccatttactgggcacatgatgatgcaggcatgcctg

SEQ ID NO: 25886 - DNA, 1034 bp, Homo sapiens
gtccagatatacagaattgaagtcacctgtgtggtagttcacgggccttgttctgtttattgctagttgcccttgtaaatcaggttaaggagcatattagcactgattgtaagttacttttctcaggtaatataatacactgcaagagaagatgtttggtaaggtgggtatatcagcacatttccaattatactaataagattgtctgtgttctcttccttttgaaccgtctttggtaatagctaatgtcaagtagcacaatatgtcattgcactttcactgtgagtttgaatctccaggtggtttgtgaatgtgttgcagacattcattttttgttaaggcaacaaacagagcattaaactgttatgctatatttggagttatgcttaacattttttttgcccagcctcgcgttatttagtaaggtaatatttaattcaaattgtagaaaatgtttgaaataccattctaacaacatccagcaaagatattaaaggatcattaagtttcaaatctctgaaatagaatgttggctcttgatacccaaggcactttggaactcacaagatcttatgcttttttatagtatacaattatttaaccacagctaggcgtggtggctcacacttgtaatctcagcactttgagaggctaaggccggaggactgcttgagtcgaagagtttgagaccagcctgggcaatatactgagaccttgtctctacaaaaaatttttaaaaaattagctgagtgtggtgttgtgcacctgtagtcccagctcctcaagaggctgaggtgggagggttgcttgagcccagtaagcagaagttgcactggcatcactgcaccccagcctgggcgacaaagggagatcctgtctcaaaaaaaaaaaaaaaaaaagaaaattatttaacctcatattaattttatctctagcatatataaaattgttatagatctagttaaaactcattcatcttaatgttttctttaatgaagttctattacacttttaagctattttataacaatttt

SEQ ID NO: 25887 - DNA, 1052 bp, Homo sapiens
caaatttaaagtaccatgacaggttgagagagagaaagtggaagaaaggaaaaagatttatatattagttcctgtaacaatacatgtttcctgcttcctggacaaaaagcctcacatttttgttttgtaccaagccctgcaattgtgtagctggtcctgtactcaagtcccctttcccagggaaggattaatttcctaatatggagtgtcctctacctgactcccagtgcctgaagctgtgacaagactttccatgccagcttactgcctccatacagaggccgatacaggttgcatggacctgaagctcatataatttagggggcagtcctttaaaaaactacaaatacaagattgctaggtcccctcacaggaccttagaaagggcctgtgcaagtgaggggtcctaaagcttatgccttatgagcttcatggtaactccacccctgccttcccagcatgccttctattcactcctgggtccactttaagaatctggagcttttttttttggccgtgcatggtgcctcacgactgtaatcccagcactttgggaggccaaagcgggtggatcacctgaggtcaggagtttgaggccagcctggccaacatggtgaaaccccgtctctactaaaaaaatacagaaaattagcccagcatggtggtgcacacctgtaatcccaactactcgggaggctgaggcaggagaattgcttgaactcgggagtctgaggttgcagtgagctgagactgggacactgcactccagcctgggcaacaaagtgagactctgtctcaaaaaataaaaataaaaaaaaagaatctggagctttttttaaagactccagaactgggctgtacgcagtggctcatgcctgtaatcccagcactttgggaggccgaggcaggcagatcacttgagcccaggagtttgagactagcctgggcaacacggtgaaagcctatctctacaaaaagatacaaaaattagccagccgtggtggcatgtgcctgtagtcccagctacttgggaggctgaagtgggaggatca

SEQ ID NO: 25888 - DNA, 1032 bp, Homo sapiens
agggctactgtctgtgtggagtttgcacgttctccccacatctgtgtgggttttctccaactattctggtttcttcccacatcccaaagatgtgcatgttaggtgaactggtgtgtctacatggtcccagtatgagtgtggatatgtgtgagtgtgccctgagatgggatggcggcctgtgcagggttggctcctgccttgtgccctgagctgccgggataagctctggtcaccagtgaacctgaactggaataagtgagtcaagaattatcttgtttttattaatcaatgtatgtacagctcacatttatttcagagtttaatattagaagtgttttgtttttaaaatttggtgatatttttgtgaccagaaataaactgtaggaactgaactcttgtttatatcaattagcctatggcaaaatgtgttacacattgttctgcttactgtggcagtttccaagaacatactgatgacactgaggatgtactgtacttgctattccacctgtctagaacactttttgcactagataccgatttgtcagactcaatcaactcaatgaggctgcctgtggccactcaatgtaaaattacaccatcaacaccaccccgccacctccccaggcattccctattctccacccttgctttgtttctccatagcattttccaccacttggtatatcatacatttacttacttatcatcctttccccactagaatgtcaattccgtgaagacaaagatttagtctgttttgtttactgctaaatccctagaacctagaacactgcccagtacatgataggcattcaataagtatttgttaagccagaattaaccttttcccactgatgaaagcagtactggtcttggaagagacagaagataaaatgccccaaaatttaaagattattttctactctccatatggcaatcatgtttcaaatgtgaagtaaaatatttatcttctatggtcaattccctttaaaaggtatcaaagacagaggaatacaacaggtcagtggt

SEQ ID NO: 25889 - DNA, 1050 bp, Homo sapiens
aaaaaggaagaaccagagaggcagggagaaatctagaacatagaagtaaaatgatgagagagttttcatgtggaagagatggctgggaaatatttttgtaccctagttcaggtggagtcatcatgtgataataatgtaaatttatttataatagtcctataagatttacaattatgaaattcttgagtatttctaatagagaaggtagttgaactatttcagattttatgcatttaatcaaagttttaaattgtatacttcacattcgcacaaaatgcaactagactacaagagaaagacttgagtaaaacaccaacagtaaccattagtttgatacatagatcatttgcaatctcagtaattcagtggagtgatagtcaaattgcagttcagtgcttagtaactggaaaagtgaggaagggtagacaagtatagcctactttttcaacagatttggcatgcaggaaaagtgagtgatgaaatagtagctaaagaagttagagagagagggtgatttacagggcaaggtgcatggaatcgaatctagagtttaagagaaaggctactacttctgcccctgtgacaaggggaagagggttaaggacaagtataaaatagatgagttgatatagggcagagaaaaattgaaggaattaagtaaatttttgtcatatgacagtttttaataggtaatagtgttgggtggtagagttttctacttgatggtatgatattggcacaactaaagcattcaagtagcaagagctgatggaaaaataaaactctgaccactccaaatcactagtttaaaattataagacttatcactcatctagtctttcaagctatatttaattgacttccctctatgtgaggtgctgtgctagatgactaggatatgttttctgtccctgaacagctcatggtcttttgattccactgttaagcaaacagaatgatttctgaattaaaatcataaatgtggaataattgaattactcatgtgttttgtttgaaacatgaactacttattttcacttctttggagga

SEQ ID NO: 25890 - DNA, 1076 bp, Homo sapiens
taaccagtaatgggattgctggattgaatggtatttctctctttaggtctttgaggaatcgctacactgtcttccacaatggttgaactaatttacactcccatcagcagtgtataagtgttcccttttctctacaaccttgccagcacctgttattgttgactttttagtaatagccattcttacttgtgtgagatggtatctcattgtggttttgatttgcatttctctaatgatcagttatgttggccacatgtatgtccttttttgaaaagtgtctgttcatatagtaagggcctttttaatgtacaaatggaacatggaatacttaggatttgaaagacaattaatcaaattgtttttgttttttcttaaattttgcagtgtgtgattaataaagtttcacaaacagaagaaatagacacagatgttgttgtgaagtaagtataaatatataggttggtggttatcagtcagagaaaagatgatagatgtaaattagaataattcgaagtagatttcgttaaggaattatttactaaggtgtgagcagggtgtaggaaaatcacaagtgacagtgtggaacgaagacagtgcttaacagaattgaggagaaaggtagttggaaaaaaagctgtgaccttgagtagagggaagcagtcaccctgaggcaacccttgagagagacaggagaaataggtacctttactagagagctagaggagtaggtacctttactccttccagtttttgtaagggctcctcaatggccaggcccacatgttagcttcccagagcagagagcaggatggacagggacagaacatagatatggagaggtgaaattggagataattcattacaggggcatagcaagcattatgtttaaatttgtagctatgtaattaaaatcaacttttaattggctttgagaagtttgagttaatgattttgaattgcccatgtttgtattttttttttgttttcaccctagaaattcctattcttggccaggcgcattgactcacacctgtaatcccagcactttgggaggccgaggtgggagaatcgcttga

SEQ ID NO: 25891 - DNA, 1031 bp, Homo sapiens
gtctgtccaattaagatggccagttggtccagataaacagacaaagtttttgacacagaatgaggaagaaaacaccactccgctaaatcattatgttgaactattagcccagtaggggagtgcaatgaggcgaaaaccagaagctgaaaaggctgaaacggctgtactctagataactggatggtctgaattctttacgaattccagttctagtgaagcctcaggggtcaaagtcctgggactgcggagattggaatctccccgcagcatagaaaacaagttagtgcataggtcggaatgcctaaagtaggtgttaaataattaatgttacccaaaagtttttggaagtcatttaaagttttcaaataatctctcctaatttgaactttttgaggttgaatatgtttatcgaccatgattcctaaatattgaacaggagtggtctgttgaattttgtcctgagcgatgtgtaatccagcctctaacacagcagctcaaaatttgataacagtcaattctttatcagtgggggcagcaattaaaatatcaatataatgaagaatataggcctggggaaactgggctcgaactggtgaaagcacttgcccaacataaagctggcagattgtagggctatttagcattccctgaggaagtactttccattgataatgagctgcaggctcttgattattgatagatggtacaataaaagcaaatttttcacaatctgatttatgtaaagcaatataaaaaaatcaataactatgagaggccaatttttaggtattaaagcaggggcaggcatgccgagttggaaggctcctataggtttaattacagcattaatggcccttaaattggttaccatccaccacttgcctgatttcttttttactagaaacacaggagaattccagcgggaaagaaggttccaaatttctaagttgtaactgttcagaaactaattgagttaaagcctccagtttttctttagagagcagccactgctgaatccaaatgggtgtgtc

SEQ ID NO: 25892 - DNA, 1023 bp, Homo sapiens
caacatggtgaaaccctgtctatactaaaaatacaaagattagccgggtgtggtgctgggtgccagtagtcttagctactcaggaggctgaggcaggagaatcgcttgaacccgggaggcggaggttgttatgaactgagatcttgccactgtactccagtctaggcgacacagcgagactccatctcaaaaaaaaagaaaagaaaatgtatagtatcttttttcttttggaatagtcctggtcttataaaattgtcacaattagatgttaattatttctatcattcaatagaagatgaacataagtaacagttatgagagtaaataattattgattcagtcattgatctgataaggagacaaagacagaagaggaaagcaccaggagcctgaaatgggtgggaaggagtagtgacataatttaaaatttttttattggtgcagagacagaggcatgaaacttagaatcagaaaatctgaattcagattccctcttcacagttaactcactgaatggtctgaaatcaagttactctagaacttgtttcttcattcatataatggagatcgttgattcattgattcattcagaaatatttttcttactaggttattttgaagatgaacaaaaacatctgaaagtaagctattatgaactgtatagtgttcactgtatttgactgtatagtcagatattagtgatgatgcaattcttcttgtctttccatttcattcttccctgtcatccttccttctttcattgatagcgtatttttacatgctcttgatctagcgcttcacagaaccttcagagcctgcagtcccagctgatttccactcctcctcccactcacacattgggcacaggagtagggtgtgaggcaacttttctaggtcagcctgcttattttctcactgttgactgacaaagtcctgtctttctcaaggtgtgacataaacctgaggtgccttttagtccctgggcttgatattctttctttctcactttgcctctccttttcc

SEQ ID NO: 25893 - DNA, 1032 bp, Homo sapiens
gaaacattctaggattgtctaccctgtaaactgaacaagaacatttattgttcaagtcatcagatattccaactccaactctatgccttgtttgtcactatgaagtacataagggagacattacaagctgattacatgcctaggtgctgtactgaccctgtaaatcttaagcacattgattgtgttgaagaaggatggagaaaagactttacactggtgccttttcatgtagatctttttatcaggttaagtaggatttttgccagcaaccggtagaaaagcattctagcaaaagagatggcaaagaagcaaagaagtagtacacagtgtggtgaaagattgacgaataagctgttgtagcttgtatacacaaatagcaggaaattcggctggattggtagatgggaggcaaatcttgagtcagtttctaactattatcagaaataataaactacaaattttggataagctataaggaaccattgagttttctcatgagggtaagggagagtaacaaaagagctgtatttttaatgctaataatagcaggggaagaattattaacaatcatattttggcatctgatcacattcatggtggtttttttctctttatagatacttaagtttcttccttctcattgtcattacaaatattgcttcagtgtcttaaatattctcttccaagacccagttgaaatgtcagctctctggaacagtctctttccaaataagtgctacttctgttgattctgaatattagttcaatccttggcctatatcttttagcttttaaagagcctttttatttgggggaatattttttgtttcaaagatctgaggccatttaaggtatctttatttttaagaataaagaaaaggaatatccaatcttatatttgttaactagtttccctctaaaactatccaatctaaataaaaagactttatacttgacagttggacaaaaacactaaagaggtttatctgaaagtgtgccgatatgaggaacttgaggctaaaatatgtaaag

SEQ ID NO: 25894 - DNA, 1035 bp, Homo sapiens
acaaagcctaaaatagctaaaataattattagctaaggggctgtactttggacttacagcaaggctagcaacattaccaagggctttctccaatacaaagtattttattttttataaagggtcaatgtagtttctatatatggcagtcattgagtaaactctcttctcagctttaaaacattcttccttgccagccacaattacaggccattttataatcacttcctcctccagcctcaaaactgtccctgttccctgcttcctttccccctagattgaccaactacatatggtagatcatcaaacccaagatttgtcagggggcgggggcaggggaggtggacggtgaatgaggaaagattattattaagctactgctcatgcctcaatgaagcagtaaagaatgacataaccacatgacaaacatacttaaattcaaattctggctttgccagtgtcacttcagaatataattcttctgagtctgtttcctaatgtacaaaaatggggacagtgatttcaatctagtagaatttttgcaagggtagatttagtgaggtgatgtgtatgggatagcattcaatagtgcctggtacatagtaaacacccaaatatttttattttgtttttaacttgtttccattggtttagtacttgcttacctttaggatgtatatgtgtgtgtgtgtgtatgtgtacatgttatggagaaatggtcataagatctgaacaacaaaagtatgtttactacttagcaaacatgtctgttggacaggttctgctaacataatgagagtgcatttgtacattcaggtagctaagacttaacaaatctaaaaattccttacttcaaaagttcagctatttaaagtgtttggttcacaattaaaggagattgtgttttaaacaatacatactgtactttttaaaggttgtattagcacatgcaaacagttcaccttaaaaaaacagaatgagtcataaggagtcagacatgccattaatcagctcttaattatcttccataaaagaggg

SEQ ID NO: 25895 - DNA, 1031 bp, Homo sapiens
ctttctgtttatagatttctagccatcttttccagattccctctgaatatattacacaggcaaagtaaatagaagtcattctttcaagggatttgggttcttggagatttttttacacttgtggtagtgggggaggggaagtgcttattatattttcttagttttaagtgtgacctgtgccatagaatatttccctagactaatgtgtgggaacctcaagacaagaattattggtcattgaaagatctggatatgatttcaagttctgcccctaggtttttttttgtttgtttgttttttttttttgcatgttgtcttgagtagatcacttctatttttccttcaaaggctgaaaataactgcctaacatactatgtttagtaggtcctaaatactttttgttgtttaatgaatttacaggtaataaagagaaagcacagtgtttcttgaatggatgtcagggaatttctaatttttttcttttttgatagaaaaaagtaatcaaaacataaacatctgattggagtctttcagttagcttacctaccttcagaaataagcctagagaaagagagcttcatctggtagtttaacagaaatgaattgtaaatgactcttaagaagaattgacaatttttcggaatgttgtactagatgttttagattctttttgccacataaactccacttcagagaaatggggttctacatagtactcttgtatcgcccctgtaatacctttacacctcaaaataccagttgcagaaaaatagaatgtgttgctgatgcctataaatgggaaaatcctgacatctgtcttcatcctccagttaatcttcatgtagtttttaaaaaaattaattcaacacacatgtaatttacttccttttcagaaaatttgttgctaatttttattttataatgagcctcttgggatgttgctaattctaaaaatatgtaatacccgcggtttcccaccatcttctgcagtttctttttctattatttttttggctacagttttctttttc

SEQ ID NO: 25896 - DNA, 1027 bp, Homo sapiens
gcttttctccaaaattctagttaaaagctgaggccgtcaccaaacaattgttgccaagagctcaggatgttgtggttggaggggcctgcgccagaggtccacttctgaaccaatcagcagggcccgggggctgggccatgttctgcttacctcacagcttccacacccacagggttttgggaaccggaggcaggcggacagccccaggagtcataatgagaagaaatgctacctcggtacagtggacgaacgtgcaaaccacacagaaagtttgaaaaaggtctactggaggctctgctttctggtaatggctccaaaatacaaagggcctcacactccggcactgacgaagtccatacggctcttaggctgacacccaccagccagtcaatgggagagctgggaccagagggctgacttgacctcttcagcaggagtgtccaaggcctttgtgggcggtggtgcaggttgtgcgtgtgaataatgaaggcaattcattattactcagaacacaacaccttggcgatctttagaaacatgagaaacagagcttccaaggtacctgctcacacgcctctctggaggtaatcgctgtgccgtggctcttaatgagccactctccacatggcctgaggcctggcaccgtgggaattccctctgtccctgagtcataggcctctgctactgaactgtaaatagggaccgggtcaatgacagcgggacagctggcccagggagcagggttggggtggggactgctgggaggctgccctgttaatctctctctaccatacaaggcactccttgggtgacccccgtgactgtgatgcagaacagggaaggagagtgggtgttaaccttgagcctaaggctcctcctccacctgtgggactgtaagccacctctcctgggctgagggctctggaaggaggcttggctgctcctcagcactcggggagcggtttttcaggcacacacacttgagctccatgacctcccagattcccaccgcccctgcttgactctt

SEQ ID NO: 25897 - DNA, 1070 bp, Homo sapiens
ggggccatagagctagatcttcccaccaaaggggcctttttgacagatgtgcaaactgaggcccagagagggaaaaggattattgtctggggcaaaatagtttatagcatcagagttcagtttggctctgctaccagatctcccaagcttgaatcctggcacctacaatcttgggcaagttcctgagcctctctgtgcctcagctttcttagctataaaacgggggaaataattgagcttgtctcagggcatggtggggatcaaatgagtcaatgtgaagcacgctcgagcatttctagggcactggaaagtccacaaatgtcagtacagctaacatgatggcagacaaggctaaaatccagctctccactctcagcgcggtgttttaggttaagcctcaaagcacaactggggtatcttaatgctggaggcatgtttgctgggcagaaccaagatttcctaataccttgcatgttgtggtggtcggccacttacagagaacactgtgctctgtgcttgcatggcaatatgtggtcccagaatctctattgcctcttccatcttcgttttaatgcccttttgttccccttggagaggaatatttgactgaatcaggagtaatagtttccagggttaccacttactgagcactcacatgtgccagacactgctatatactggtgtgtgtgagctcatgaactctttccagcactttgagctttatcttactacccccactttacagaagtggcagccggctcagagaggttaagcagcttgccaaaggtcacacagctggcaagtgggtagagctgggattgggcctctctgactcttagaacaccttccagcacatgtcttgtcttcagcctcgaagctgagcaaggtgttcgaatccgatcgttacctctataacttccctgaaccttggacctctcttcttcatggggtgtggatttctcctggcacgtgcacagcattgccctgaggaacaagaggaggaagatctcctactggggccagcagtagaccaggagttaggatagctctccagggctgaatgccccgtc

SEQ ID NO: 25898 - DNA, 1068 bp, Homo sapiens
ctcagtagggccagaattatctccatctttcatctctgcctctttctgcatgtttattccattccttctcagagcagacatttctccgtatggctggaaacatggccaccagcaatttatcctatagcttctgttactgaaaagttctgtgactgccaagttaaaaaaaattgtaagcaagtaactcatgaggtgagggtcacatagaaatatggtgacacgtgtgtttgcctatatgactataagtggctgggtggctatttccctggataagagatagttgctgggcagaaaattacccagcatgtatgctcagtacagtgtgcccaactagtgcctttcaaatgtttggacagaaacccacagtaagaaatgtattttacattgagacacacatatagacacaggtttgattgagaaaaattttcttgaaacaatactcatccttactatgtacaaggcattctgctattttctattatattcaaaggtagttcatttttaaaaaattctgactgtaactcatctaaatgatctcatgactcagtgtataatgatctgtagtttgaaaaatactgcacaagacattaaaagtatcaggtaagttcatgtgtcagtagatatttgggtatagatatttgttgagtcttgaaggaataacttacattctagaaagatactagggactcaagggtgacaaatatgtgacgtgaatgtccttcccagttcccacggtggagatggcagcagctttcctactgaggaatgttctggagcctctcctcagccctttataaagtcaagcaagttagaacaagtgccctgtgctatcagcttccctcctctttgttttggatttaccttttgctgagaaatagtgaaattctgtggacctagaaaatgtccgaaagtgctttcagttctctcttaaaacaaaacatcaatacagctttcttgaaagctttattgtggcagtattcgtgatcattgtgatattgtaaaaggatggatgatatctttacctatccaggaatcagttgaaaaactctggccaggcgcagtggctca

SEQ ID NO: 25899 - DNA, 1046 bp, Homo sapiens
tcaaagtctggggctgctgtgagcgtggagtggtgcgtgcagagagcggcccgtgcaatgcattgtgctggccttgctggagctgcccatgcaaggagcagccgtgccgcacgtaagctactcatgcagggagcagccatgcaggagctcaagcagagggcagcccttgcagtgctgtgggcaccttgtggaatgcagtgcagaaatcagccagtgcagcatgcatgccagtccgggtcttccccaacactgcccttggggaaacccacacctattcttacaggaatggcagcagggggtctgcccaaaccaaatttaagttaaaaacaaaacaaagcaaaacaattcctaaagtgccccagcttatcatctaacaggcaatggagtttctcagcactgcctgaggttgtttgtaattgtaaactaatagtagtaagggcagaggccagatgttagataaccgaagtcagtggtagaccagctggagagccacgctgggcttagattttaactcttaagttgtcttgctgtccactccacacctagatataatatgagcagaaaacaaagaatttcaattttagttcttcgggaaaacattagctttttattttaatacttcagagtttgttgaaaaaaccgtttttggcaggttggtacaaggaataataccatctgtatttgtatggtgccttgcagtttgtaagtgctctcatgagcattatcctatttaacacccacagccacaaccaccttgtgaggtattgtctcccattttacaaatgaggaaacagacttctgagagtttacagcttgtccaagggcatacagctagtagtcattagagccatcctgctccagtattccctccaccatgcaaccagcactttgatagcatctagcttcctgtcttccctgtcattctcatatttacacagaaaatcaccgtctaaaaatcttcctcagtggccattccatgttactcacaataagaacatatgtaccgtcaaagggtagcttcttgattgactttgaagtcaataatt

SEQ ID NO: 25900 - DNA, 1108 bp, Homo sapiens
acatcagatacactctttctgcatttgggaactcctagacaataaggtaacccactcctctgcttctgagagagcctttgaaaaatctaacataagcctacactcacaacttaattggaaagatttattaacaagatgatcctgttgctcatttggcttctgaaagctacataaaattgagaggatgaatcgtcgtaattcttttgtgttgttaactggaagagacaaaaccaacatgaaaggactgctctattagttagaaatcagaattttattgggggaggaggagaaagttgaatagccactggtgaaaatataacttatttgttatatgaaatagttgtcttttctcatgtgcccacttctggtttattttcaggcagttacaaaaagtagaaaaagaactattaccttccatgatttatatagttgcatatatgatttgggaatacttcaggctgtaggtagctcttggttttctgtttgtgactaagttagtttttcagggtgacattaagaataggcaggaagagtgcttagatatctgtggattatccatagtgaagtatgtggaccttctctgctgaatgcccggaacttggagcagctcacctgggaggtgtatgtttagggaatacaaatttatgttgattttagtttaccctagactgaaaatgtattaacatcctatacattaaagcaaatgtagttttaaaaaataaacggctttttaaaatgtactttggcagatagcaagcactcaaaaaaaagagttttaaataaagctgtgataatcagaagttaattatttagcaacctcagtaagctagcatctatacaatagttgactaaaatatacccaagagaaaaagtacatttgggctgggcgcggtggctcacgcctgtaatcctagcactttggggggccgaagcaggaggatcacctgaggtcaggagttcgacaccagcctggccaacatggtgaaaccccgcttctactaaaaatacaaaaattagctgggcctggtggcgtgtgtctgtagtcccagctactcgggaggctgaggcaggagaatcacttgaacctgggaggcggaggttgcagtga

SEQ ID NO: 25901 - DNA, 1026 bp, Homo sapiens
ataatgaattatctcaaggccctccaatgtcttgcatgacatacgtgtagataaaaaccttatctataattactcaagactaaactaattccaaaacaaggttctgtttttcacaatttgaacatacgctgaattttccagaagtgtaactccttgtaaattatggggtggtttttgttttgctttgttcagaatgtttccaaatattatttgtcttcctggaaaatcacaccaccagtgcaaattgtagaatctgagtccctaattccacacccagtgtcaagtaacagtctgcatttataactatttcattagcagtgattctgagttcaggagtaagcattcaaccactttattttagagcatgtatatattgagacacattgtttttgttataattattttccttttgtatattacagttacatcatattgatattttgaaattatgtgggcagggacattttatttatggatttcatcttagaattaaggatattataaacatttgttataaaagtagggcaatcgagctgatggagcccaaaatctgttcatgcaaatagttttactgagggctctgtgtaggatgctggtcttgatatacaagaaattctattccagctgacagtccatttgttctcacttcctgcaagaagagtaagtctagaagagcaaaagactctggatcattcttaacaatttgtgtcaaacttatccactaattcttacttctgtaagaagctgggttgctcaccaggatctccaggcaactatttgcagtgcattgggtttcagaggtaggcaggtctggctgcaacccagctgtggcaggcagagtctaagatggcctcctggtattcacacctttgggtaatccctttagtctgggtggacctatgacttgcttctaatgaacaaatgcagcaaaggtgatgggatgtcacatccacgatttggttacataaggttgtagcttccattgtgctagctgactcttcttattgtcttctgcttgcatacttt

SEQ ID NO: 25902 - DNA, 1049 bp, Homo sapiens
ctatgagagggtttgatgtattcgctcattcacaaagcctgcctttgtcatgtaataggcacttaggggaatccagagcttgtctggaatagggggatgcgtcctgcaaacagaagcagttccagaccctgcaggttggctagccaaagcccagctaactcccatcaggtgtaccttcctgagctgcacagacggaaaaccacaaactgctttttcagacttccttgcaggtctgccaagcagagcacctgtgtgaaactcagaagctgcagctgggaaggtgggcatgggccgtatggggtagagcttgctgggagatctgattggggtagctctgagggaggctccactgcccggttcctaatgtcacaggtgtgggcaagcacctgctgcggaaactcagcactcttaactacattgttcctggctattagccacccacctgtttccctatccgtcccagaaattctgtacattctttaattcttccctgtaatcagtgcttttctgctttgttgtctgtacttggaacacttaccaagaaattaaccaaatcagagatactcagcatgggcttgaggaagatgtgttttgacatcattttctccaaatctctcgaagtttgtgacaagtctttttctgctacactttcttctagttcctgttcacagttttgacctcttcctccattttctctgatgtttagctgatttttaccgtctgttccatcatccagttctccaaggtgttcattttgacatccagcctgacacttccttcgcacttttgtggcacctctagcactgccacttgcttggtttttgacagctggtaccatcaacaaacaaatgccttggggaagaaaacatgtcaattcgcatggcttgaaatgcaggaacaaaacagaagtgcacaccgacccggagcttacagtacagcgtgccatgagagcttgcattggccaaaagcatgcaagaatactcactgtagctgatgcatgttgtaaaagtctgcatgaactctgttcttcagtgctgcaatttctgatg

SEQ ID NO: 25903 - DNA, 1013 bp, Homo sapiens
aagcggagtgaaattgttgttttgtggtgaataaattgggtgggtgggtcgcaagagttttgctgattagtgattagaaaaattattcataatcattgaaaatataaaatatttttctatatgatgtatgtaaagaatttggcaagagatgatgtttggaaaaaataaagaatggctattgtagagatcttaaggaaagaaactacagttaagtagtgctttgtaatcagaatatgaagtaagtactgaaagtggatggagtggctgttgtcagcatgttatactttatacatttcattcataaatttggactgtagataaaagtaaactttttttttatttactcttgaacaacagtttttttttttccacttagacttgcatctgctccactgaacaatacatttaattgttaattatttcccccttcaggatgatacatatacagaaagctacatcagcacaattggtgtggatttcaaaataagaactatagagttagacgggaaaacaatcaagcttcaaatagtaagtgacttggctagtaatttttttgaaatttattttggtaaatttgtaatgtattgttattttgtatatatttactatgctaacaaaattgaatgtaaaatgtcttaagattcatgtacttaagatagaatggtagaataagaattacttagattaaaaataatattttcaagattacttaagcctcattgaattttctattcatgaagcagagaaactcatgttttaagtcaaacttggtcctcatctttttcttttatcagtggaaatctaagttcaagtttaccttgtcctacactgcaaatgttatagaccatttttgtttgtcttttactgtgctaagtgcatggaacattaaaggaaccctaggaagagattcttcatatgtggctcagttgaagagaagtacttatgtagttctaagtatttttattagatagtgtgcaccaactctgtagaaacacagaattttgttggaaaaa

SEQ ID NO: 25904 - DNA, 1050 bp, Homo sapiens
gtgtgagccaccgcgcccagccaaatttttattggtttctaaactagcataatttagtttttttcacttaagtcaaaattatattattgtaggataaaaacttagtgatccaaattcatgaggaatgaagaataaatacatttaaagtcttaccatttgctaaattagtcttggctctttgtaccaaaattctgtccttgtgctctgtaattttatatttgtatattttctatcaacatttttactgtgtggtgttttgtaaattataaaaacgttttaaagcaaactcagaacaatgaattctcacgaatattcagtatatttacagttgagaaataaactacttctgtagtaggtaatttaaaatgtcccaatgcaagttaacgtgtcactgatcacgctattcaagtgtgtgtctttgataaggggaggtggggaagtttgtgggtttgattttatttgcctttctcatgtgactgttgtcatgttagtaaacaaatggtttgcgagagaaccagtagtcttttgcaaagattgtcttatacagagcactcaattcttcatattatttataatggctttaatttaagccttaaattattagaaactcataaataatttttttatttgtttttttgagatggagtttcgcccttattgtccaggctgaagtacaatgatgtgatcttgactcactgcaacctccgcctctcgggttcaagtgattctcctgcctttgcctcccaagtagctgggattacaggcatgcgctaccatgcctggctaattttgtatttttagtaaagacgggattgcaccatgttggccaggctggtctcgaactcccaacctcaggtgatccacctgcttcggcctcccagagtgctgggattacaggctcactgagccactgtgcccagccataatgcgttaaaataagagtgttatatttgtaaaacttaaaaaaatgtagtggttgaaaaaggtaatttaaaaagaattgactattaatttcttgaaaccataatgtaacttgtagtgcaattagga

SEQ ID NO: 25905 - DNA, 1074 bp, Homo sapiens
tttagtagagatggggtttcactgtgttagccaggatgatctcctgaccttgtgatccacctgcctctgcctctcaaagtgctgagattacaggcgtgagccaccacgtctggccagaatagctttcttttgtggcaagctatatactttcctaatatatgaacatgtttagggtaaaataagatgcttcttaacgttttgagatttaaaaaaaatttgctaatcaactttgagtgtctgttttttgagatatagggtcttactctgtcacgcaggctacagtgcagtgatgcaatcataacttactatagcctccaactcctagccgggtttcagtgatcctcccacctcagcctcctgagtagctgagaatacaagcgcgtgccaccacacctggctaattttttttttttttttgtattttttgtagggatgggatttcaatatgttgccccaggctagtctcaaattcctggtctcgagatccacctgcctcagcttcccaaagtgctgggattataggcatgagccccacgcttggctgagtgtcttaagatgaagaaaaactgaaaatgggtgtagtgtgccagtgcatgaggtattttaaatgtgtagcttaccagcttttttttttttttttttttttttttttttgagatagagtcttgctctgtcacccaggctggagtgcagtggcacaatcttggcttactgcaacgtctgtctcccgggttccagcatttcttctgcctcagcctcctgagtaactgggactacaggcgtccaccaccacggccagctaatttttatattagtagagatggggtttcaccatgttggccaggctggtctccaactcctgacctcaggtgatccgcctgccttggtctcccaaagtgctaggattacaggcgtgagccactacgtttggctgcttatcagctttttaccactttgtcgccactacattttggaattttcctttgagaattaggcaaaatgcccagactcccccccggcccccgctttagagggagaggggagcaattagactattcctttgtttccctatag

SEQ ID NO: 25906 - DNA, 1105 bp, Homo sapiens
gaggccaaggcaggtgggtcacctgaggtcaggagtacgagaccagcctggtcaacatggtgaaactctatctctgctaaaaatacaaaaattagcttggtgtggtggcacgtgcctgtaatcctagctactccagaggctgaggcaggagaatcgcttgaaccaggagacagatgttgtagtgagctgagatggtgccactgcactccagtctgggtgacagagtgagactctgtctccaaaaaaaaaagagataataaaacaattacaatgcctttattataactaacaaaatttacagtaatttcttattggctaatagcccatatccagtttttcctaattgtctcaaaaatgttctaaacaatgtccaaaaattacatttgtttgatatgtctattttattttatcttattttattttatttttgagatagagtcttgctctgtcacccaggctggagtgcagtggcgctatctcggctcactacaatctccacctcgcaggttcaagcaattctgctgcgtcagcctcctcaatagctgagagtacaggcgcatgccaccacactcagctaatttctgtagttttagtagaaatgggttttcaccacattggccaggctcttgacctcaggtgatccacccgccttggcctcccaaagtgctgggattataggcatgagccactgctcccagccgatatgtctattttagtttacaaaatggtgcggccactttggaaagcagtcttgcagttccccaaaaggtttaatatagagttaccatatgactcagtaattttactcctaggtatacacccaagataaatgaaaaaagttttttttaaatcatattctaaacaagattcacaaattgcatttgcttgatatttgtattttagtttataacactttcttctctctctctctgtctcttcctgagacagggtctctctctgttgcttaggcaggagtgcagtggcatgatcataactcactgtaacgttgaactagactcaagcaatcctcccgcctcagcctcctgaatactaggactaccggcatgtaccaccatacccagctaatctttaaaaattattttgg

SEQ ID NO: 25907 - DNA, 1027 bp, Homo sapiens
tttattagatgaatgacattaaaattcacctttaaaatgccatcctttatgagaggtgagaaatagaacttttccttcgacatggctgtacatgttcaacaactagaataaaacagtcatcatgaaccctcaatccagtattctttttataatatagctgcctgtcagttttcactgttcttttattagaccagtgattttcaaacctttttaaaggcatacagtgctttattcaaatctaatcttatatggaaccctcaacacataaatattaagataaaaataaagctgccattgttgcaattagaagtttgagaggttagaataggtaggaagtctcggaggaacatttcttcgttttacctgctttaacagtcagagaagtacctcagccagcagaaaaatttatttgttcataaattccttgagtatagagtccgtatcttatttttgtggcctccaatgctagtgctgtgcagttttcttgaaagtgcattttattggtctcagcaaattgaactcaagcatttctgtgttcttttacttttcctctttgtggaattaaggggattgctaatttgtatttttaaagaaagaacattattccgggcgcggtggctcacgcctgtaatcccagcacttggggaggccaaggagggcaaatcacctgagatcaggagttcaagacaaggctgaccaacatggcaaaaccccgtctctactaaaaatacaaaaattagctgggcgtgttggcacgcgcctgtaatcccagccactcaggaagctgaggcaggagaatcgcttgaacccgggaagcagaggttgcagtgacagagatcgtgccactgcactccagcctggtgagagcaagactctgtctcaaaaaaaaaaaaaaaaaattggcaagtttggccctaaaatttatatgaaatgaaaaggaaccagaataaaaggatttcgaaacagaaaaagatggagaacttccactacctgaattcaaaacttattataaagctacagtaatgaa

SEQ ID NO: 25908 - DNA, 1034 bp, Homo sapiens
tccagtctgccaatcatattgggaaagtgctagctgtgctcaccttcatggggctgtttccagctcgtccacaagctcatcgattttctttagtagattaccggtgtaaatacccagtgtgcttatgagtcagttagtagacgtcttcattcattggagtaactggtttaggctttccagtttggaaaaggagcagagagctgtccatctggattgatggaagaaaagagaacctcatccatgcctggagaacatctagaaaaccttcagccagcctccagtgctgtcgagagaccaccttcccccgacccggaggcacttccttggggtctttctctagggtctcttctctacaaagcacaacactaatgttcgtttccttagacctcagttcaagtgcccctatttatttcaataagaacgcacatatcccagctgttttttgtttgtcacctctatttagttgttacctgtttctctcttctttcaccccttgtccttttccacccttttaagagttacgctagcagatcttactccacgtatactttttggtttgtgaaggcatcggttaagggcacaaagacagccatggggacatttatgtaaatacgtctctaattgccacactgcagctgaacagtgtgtagtattttcccagtcagctttgccatactgacgtcaatcatttgagagaaattattcagattttatttttgtatctgtggtaacaaaacattaaccaaaagattttctgtccagaagcctccccgaccccccaagctatttgctcacattaacaaattaaagtgcctgaagcataattcattctttacctgtatactaaaaaccctgttgtattgatttttttataataagcctttttacctctgtgtaaaaaatatatatacaagtgtatgatgtacattttagttcttaacttttttttatggtttctaatatgtatgaccaatgtagccattgctttaaaatgtaccgtgtaaatataaacacatcctatcagatcgctggct

SEQ ID NO: 25909 - DNA, 1041 bp, Homo sapiens
ggtcttgatccaccaacagtgcccagctttctttccactcccctcttctttatggggtacttttattgttaggcagttttctcatttcgctgtgttggagcttcaggtactaaactagtttaaaccctgcattttctagacaaggaatttgaagcacaaagaagttaagtgactctacctcaggttgtataactagtggcaaagctaggccaaagctactgcctctcaatagaataaatttgcaagatttctaactccattaattatgggctgtttacctaggagaatgattaaaaagtattgttgaaagttcttagaagacatttccatgtccacagctgtataggcatctgacaaacagatagcttccatgtgaaaggtttacttagctaggaagctgtcttggataagttttttgtggccagcatcaaggtgagtaatagatttctctgcttaagactattcttagaattttacagagcagcttcaggtctaattctggcttagaggtagggaaacagcagaatgggttgagttggcctgagtggcagatttgggtctagcatgcttagtccggttaatgatcctcttggtgcaagtgctccttaaggaataggtcattcaactttaagctgatttcaagctcagacctcattgttcagcctgtcagttgctaaatacattaaatggtcactccttaactccctttatctcatttccaggacttgagttaacccaatcccttgaacttcaaattccacttctagatctagacttggtctgtttgcaaccaggtctgaagccaggccttgtcctggttggtcctcaacactcttttgccaggctttaaggggaaactggtctcctctcatagacacctggcctcccatcagccacataatcagcaccctgaatgccgcaaccattcccttttcattgctaatcaagcccccggctcttcccatactttcccagagtgactttcccatatttctaatgtattttggattcttcctctctcatcaggcctgctgcatttgt

SEQ ID NO: 25910 - DNA, 1010 bp, Homo sapiens
ttgtctacttgaatgccatgtttggcatttcattttatttttccagccaaggaataaagtggacgatggagtgggaatacagacatagtgctagactagaggtttaatttatcaacatcccagtaattttactcatttttatagatcttttaaagcagcgtaagtgtgactatagtcttaatatagttattacatttctcccttttgcttaaaggttaagtcaagtttgatttttttctcaggctcagactcgcaaagcaaatctgccttgctagaatgatgtgcctgggctcaacagctcacctctggccctgaaggcctaataattggttgccttctcattgatctgtgtgtgagcacacttcagaacagtactctgctgtttgttaaaataaaaaacaacaacaaaaaacctttgaagaccttaccgtccattctaagatgtcttttgtactaaggaaaattggggatactagattataggtgttgatttggagtgtgatatactgtgaatcggaataacttgaatttagaatgtacttaggccccagttgcaaaattatgtgtaaattattgtattggataaaataaatgagtggaagtacagccagaggagagggagccactagccattgaatgcctaccatgtgccattcacttactgcaaatatagagcacctagcctgccatacaataccagagctgtggctcaggaagtccctgctctcggggcacttacattctaggatgctagacagtttcatctgctttaaggtgtgaggacagccctcttgatgactgactaactgattactaactagagttgttttcctttttcttcccctccttcctgctgggttcctcctagagctgcaaactagaaatgtgatgtgttggggttctcatatttggggtaggggaactcttcatgcacagcattgaaggacctacaggcccttgccagaatcttcaaacaagcaagcttttcaagtcgtttttaggtatgagag

SEQ ID NO: 25911 - DNA, 1046 bp, Homo sapiens
tgaacagaatgcctgaaggtcatgattttcacgtttttagaggcctggcaggtgacatgtaatgtgtcatgcggctaagtctaggacaataggaaatgatgaggctcgctgtaaactggagagggcacttcccacctaaaggccctccaattcttaccttttaaacacagtgcctgtcacacagaatgaacctgtgggctggattgcactcacaggcagcaagtttgcgacccaatatgatctccagaattacagtaaataccttttttgaagcagccaacttgtctgtcactgacctagaaaatttttttttaggagctttaggtcagtgagttccatttcaatcagatgtttcctatggcatctaaaagcagagagacaaagaggatagaattcacaggaaggagcttaaaaacttacagcccatctgaatcacctctaggtgcagcattaatttcaaagtttgttgtgctgctaaattgaaaaccttgtctgcagccaaaatgatctccaactgccttccaaacaatgtagtctctgggagctggggagagtctcataggactgtggcttttcagatgagagaatagtaggcaagaaaggagacttcttgctaagccccattaacgtcttaatagagcttaaagcaatagtcctctttgaaaatactttattcacaattgaccaattgtcattagatgtagttacactccatggcatcttattagaaggagcttttttgaaccacctcctcatgcattcatagtaaattcctaacagatgatgtcataacaggccgttacgatccataacatgtagataccattaaagcaatgtgtgtgactttttgatactgaaacatctgactttattgtgaagtttgctataaaacctgctatgatgtatttaacaatattaaagcgtttattctttaatattggagtcatactgcccctgtaaagcctgttactgctgccacaaatgaaaattgccaaatctatcagttcaacttttaaacgcttccttaagagattttttccttcttc

SEQ ID NO: 25912 - DNA, 1018 bp, Homo sapiens
gcagtctaagctactgagtaactcacagacatcactgacactgattatgtccaaagaaatcttatggagaatacactactgcacccattcagaatcaaaaccaaaataccccatccaatcaattctataaatacatgtataggaaaaaatcttttcctgtgaaagccaatctgtgaaattagaagaagtaactattacaccagatgttcagatatcaacatgagaacacaagaaacatgaaaaaaaaagacaaggaaacatgatatctccaaaggaacacaataattgtctgtctggtaatagaacccaaaggaaaggaaatttataaagtgtccaaaataatgatattaaagaactcagtaagatacaggagaactcagataaacaatataaatgaatcaggaaaacaatttgtgatctgaatgcgaaattcaacaaaaagataaatatcataaaaaagaaccaaatagaaatgttggaactgaagaattcaattaatgaaataagaaatacaaccaagagaatctgcaatagaatagatcaagcagaagaaaaaaatgtctgaacttgaggacaggtcttttaaaataacagaaaaccaaatactgcatgttctcactaataagtgggaactaaatgatgagaactcaggaacacaaagaagggaacaacagacattgggatatacttgagggtgaagggtggatggagggagaggaccagaagaaataactattgagtattaggcttaataccagagtgatgaaataatctgtacaacagacccctgtgacacaagtttacctgtataacaaaccttcttatgtacccccaaacctaaaataaaaattttttaaaaacctagttagaacacaaaggagaaaagaatgaaaaagaatgaagaatgcctgcacgacatatgggacattataaagtgacaaggattcaaattttggtgtcccagaagatgaagagtaaaccaaaggcttagaaaagctatgtaatgaaataatagctg

SEQ ID NO: 25913 - DNA, 1503 bp, Homo sapiens
cattcccatttgaagccgtatgcttacttgctggttggtatgtttaacactgtcattcttccatctagatggaaaactcatagggcaaagatcatgttggttttattgattgctggtattgcctggcacattctgggtgctcaataaggatttgagaaataaaagaataaatgaaaaagagaacattctggatatttttgaatagagagtggttagattggtcagcgctgtgtagggtagagtgaagagtaacaggaatgaagaggaacttcaggaagctcttgcttctatgtgaggcaaaagtgttacagaataactgtgatgaagggaggatggaaggaagaggcaactttatcactcttttctaattatatttttttgaccaggaaaacagcacaagaaacaaacctccaaggatgagtaagaagtttaacaagttggccattttcagaaatatgtgtactaaaatcatagcgttccaacacactaacaacagctagtttaaaaaatgcaagaaaaaaagcaatccattcaaagtagcaaacaaaatttttaaaatcataaactaataagaattatatgaaagaccttaagcatcagcaagattataaaaaagacttccacaaatcttaaaattaccatatttttaaatgagaaacctcatcttattaaaggtgagttatacctatattaatccgtaaatggaatgcaattctttttaaactgctgtatggatttttgtgaaatttgacaaacatgatatttaagatcacctgaataaataaatgtttcagtttgagacaagcctgggcaacacagtgagaccccaaatctaccaaaaatgctttaaacaaaaattaaccagtcatggtaatgtgtgcctgtagtatgatgtattcaggaggctgaggtgggaggattgtgtgagcccaggactctgaggttatagggagctaccattgcaccactgcactccagcctgggtgacagaatgacaccgtgtctcttaaaaaaacaaaaaagaaaaaagaaaagaaaatggcaaaaaagtgaagcaatgaggagaaaggtgtcatcccatatattaacaattttaagctatattaagtacggcagtatggtaaacagtgccagagaagccaaagaaactcattgagccaaatgaaacattcagaattagagccatttagaaaagattttaatatggtaaacaagctattttaaattactgaggcaaggatgaattattcaataaacaattttgatagttgaaaaaactgaaattaaatctacctcataaaacaccattttgtatttaaatataaaatgttatataagtatataatatgtataaataaaaacattaaaatattaagaggaaatcctcatatgatctttggatgggaaagtgctttccatgagactaaaagtagaaatcccaaaggaaaactgatttcttcaactacataaacatttaaaatttctttgttagacaactgtaac

SEQ ID NO: 25914 - DNA, 1056 bp, Homo sapiens
gatcctgggtaaaggatgcctgtacattacttatgcatatgttatccagcagagctatttccatagaacttaatcagaagcaaccaggctgggagagggaaggttctgcacaaaactgaaaacgagtgttaggtgtgtgggcttgcttctttaaaaaaaaaaaaaaaagtaataattgttttaaaacgccaggcccataatcattacaattacaaaaatatctagctctcagttccttaacctataaccttagtattttttccctcagtcacactggcccgggtggtttggtccattatgagaaaacgatccctctcacccccaccctcaagactgcatatgtgcttttacagccaaaaggcagggttggaggtggaggaggcttttagtgctgctgcctgaaagactgacttggagagaggctgtgtgcaaactgctacggcatagagggtgtctcaagtgaaagataggagagaaacagcatcacttatgtgaactgatacacggggacctacctctgccatattctaccagctcttctctctcactctgtcatacaaattgcttttcaaatagacttttattaattaatttttatggaggtaaaaattgcatagaagagaattaaccattttgaagtgaacaattcaatgacattcacaatgttgtgcaaccaccacctctgtctagttccaaaacatttccgtccccgccaaagagaagaaaatcttgtaaccattaagcagttaatctctatttttctcctcctgcccagcccatggcaaactgccattcctctttctgttcatgcatgttttcctattttgatatttcattttaatggaatcatacagtttgtaaccttttatgtctttcacctaacacgtttttgaggttcatctacattgtagcatatatcagtacttcatgcaattttatggctgaatactattccattgtatacttataccctagtttgtttatccaattatcccttgacagatattttggttggctactgtgaataatgttgctatgaacatccttggacaagta

SEQ ID NO: 25915 - DNA, 1049 bp, Homo sapiens
cagtgggtgcaagacagtgggtgcagcccaccaagcgtgagctgaagcagggcaaggcatcgcctcacctgggaagtgctagcaattaggaaattccctttcctagccaagggaagctgtgacagacggcacctggaaaatcaggtcactcccaccctaatactgcgcttttccaatggtcttagcaaacagcacaccaggagattatatcccgtgcatggctcggaaggtcccacgcccatggagcctcgcttattgctagcacagcagtctgagatggaactgcaaggcggcagcgaagctgagggaggagcgcctgccattgctgaggcttgagtaggtaaacaaagcagccaggaagctcgaactaggtggagcccaccgcagctcaaggaggcctgcctgcctctgtagactccacctctgagggcagggcatagctgaacaaaaggcagcagaaaactctgcagactcaaatgtacctgtctgacagctttgaagagagtagtggttctctcagcatggagtttgagatctgagaatggacaaactgctgctcaagtgggtccctgacccctgagtagcctaactgggaggtaccccccagtaggggcagactgaaaccttacatggccgggtagccctctgagatgaagcttccagaggaacaattaggcagcaacatttgctgttcagcaatatttgctgttcggcagcctccgctgctgatacccaggcaaacagggtctggagtgggcctccagcaaactccaacagacttgcagctgagggtcctgactgttagaaggaaaactaacaagcagaaaggacatccacaccaaaactccatctgtaggtcaccatcatcaaagacctaaggtagttaaaaccacaaagacggggaaaaaacagagcagaaaagcggaaaattctaaaaatcagagcgcctctccccctccaaagaaccagctcctcaccagcaatggaacaaagctggaaggagaatgactttgatgagttgagagaagaaggcttcagatgatcaaact

SEQ ID NO: 25916 - DNA, 1060 bp, Homo sapiens
ttcttcctgttttcactcacaaactgttctcaatatctatctatgttgtatatttgtcccatttgttaatcctatctgttgggcaaattctcacctcattttcttttagagttgaacttctagattgccttccgctcaccacctcaatgagcaatacagtggtgaatggtatgtgccctttaacgggcatgtgtgagaatttctctgggagacacatgggttttcagggtcataggacataaatactggcaggttgcttttctgaatggttcatcaacttacactcagtgtatgaggggtctcattcaccaatcagtagtatcctcccttccaactttttctcgtcctgatgggtacagaataaaatttcatgtttgctttaattcatatatatgttattaacaaccagtgtgtgagcatctcttaagtaagatcttagccattcaactttcccttctgtgaattgcctttgtttcaaagacaaaaaaagcagatcattcaattttcccataagctatatgggaaatcctgtaggaactgtgaaaaaaatgtatctcacctctttctgttgtccaacttacacttctctttaaataatgttacaggctgtcgataagctgatagatttgttcattccttttagaaatatgttcaggcaatatataatatgttcaggatgtagaggggggtataagtcacatgatacctgccctcatggttttcctgaattgatggaagagatgggccagtgttttgttgtcttactttctggaggagtaaacgtcaaggcgtgagctattcatacttcgataaatgatgaacttcctctgccacatttccttttctcagttgaatttgcagtgtccctggtaactttgaagtatgaattgctggtaacaactaacaaaaggacacatttactgcttccaatgtttattaactcaaaaactcactgaggcatcctttcttaaaaaaaaaggaagaacaacttaagtaccaaaatactttgccagtatatgccctccttagaaagaaagaagagagagagagctgtaatcta

SEQ ID NO: 25917 - DNA, 1239 bp, Homo sapiens
ctatattctaaggaatagatcccaagtgaataatcaaaatttagaaaattcctactactacaatagttcagttaaaggacactgatctacaagcattgaaattagggagccagacaaactaaaagttagcagaagaatgacaaaggaagatctattgctgtttaagatttactgaacttgtcagcataatactgctctgaagaaaacactgtaaaatacacagtatctgccttgaggggttaagatttaaattggacagatgagacaagctggacaggaaatcaccataagaaagcatatgttaacagagtaaaatatttttaaggtctatacaatttctgaattcgacaaacttaaagtggaatttggctgaaaggaaataaaaataaatggcttcattctccttacataaattttcttctatacaagcatcttagaaaatatcttttggtgtcaacaaatatgtgtctctgttccactccttatggtgagtttgagaaaataaaatttctgttttaatatacaggatcaagaatatatttcttcaaaatgcctctctgaaagcataaaccttggatccccaattggggtgatcattctctttgtggaaagaggttagtaggtaaaacaactgagttgtatgcatttgctcaggaaagattggcaattatgccaaattatgtctaatagttttagaatgtggaatagtgtttattaatgtctgaagggaggcccttaaatctccctttccccccaaacttcagcttttactttacctgtcattttaaaagatgaaagaactagcttcattaagcaaaggagccttgaatttcatttttaaatttaaaacacacacacacacacacacacacaccacccatttctatttgacaagactagttatctttttaagttttcatatcattttttcatgatattttattcgatgtgaaacatgaatatcattctatagttgaaatcagtttttctctttcttctttgctaacttgcacttcttggctactgtggagtttttcagtcttcttgggcttatacattaacatcaaatatgtctgaaattcgttattaattttaggtgttgaatttattctcacgaatagtgaacattaaactctggaaggagagaaggaagcacaaatacatcaatcaacaaagtaaaaagaattcatgcccttctggctttcttgtctgtggttttttgaatttgaaagtatttat

SEQ ID NO: 25918 - DNA, 1003 bp, Homo sapiens
gatatacacgtctctaaatgtttatcaactacctgatccatcagtcctcagtgacaaatgctgatatccccacaatagtgacaaacaggattaaataacatctctccaaggactgatcagaagagtcaaaactgcatgatattaatattttttctttacctataattttattgaatataagcactgaaaagtgatacaagtaatggtaatttttagtatttaatatggcatttttccatccgtaaaatgttttatcaccatcgggtagttaaccttctaacatcatcatgaattaattagttcagttaggttcatatctcatattactcagaaggaattttccttttgtatctatggctggaaaatgtactgaaatgttgcttttaatacaaaggtaatacttaactcttcagctttcatgtgatcttcttcattgaatagcctgggaaacggaagattgtgtactatttggggcagaaagcctcattttgagggcttaatatttctctcagaatttgtaactgtgtgacttttagtgaactgcctgagccttctgatcctcagtttccccatctgtaaagtggtgataataatacatcatatctactttgatattgccataaagagatcaaattaaaaatttactataaaattctgtaattataaaaatctagctgaaagggagagtggtcactttctccccacaatcgctttagcgttctttgattcagtgtggtctcatcttcagctattcacaaatcattttcatgattattgccatgtctttgcttccttatgctattagttgcataactttagttgcatagaagacttctctaaatcttctttaaagtataaataaatctattttaaaagggaattttatgtcattattgtaaatagaattgcaatattacagctatgaatagaaggtaacagcaaaaataaataaaataaaaacaaagtaataaccactgctctgaataacacggtgttgtggtgt

SEQ ID NO: 25919 - DNA, 1032 bp, Homo sapiens
ggtctctactaaaaatacaagaactagccgggcgtggtggcacacgtcccagctacttaggaggctgaggcacgagaattgcctgaatctgggaggtggaggtctcagtgagtcgagatcgcaccactgcactccaacctgggtgacagagtgagacagagcgacagagactttttctgtctcaacaaacaaacaaacaaacaaacaaccaatatggtttctgagtgaaaagcagaggaaaagtttgagtcgttctgggagaatgtggggtagagagatcacttgctactttcccttcttctagcacctctgcctgttgttcttccctgattcttccatcccggtctcctccccacgttagactctgccagtccccttagtgaagccatgtggtggcacatcactattttacttggtgaccaaactctttaggctgctcgcttgaagaactagtcccagttttctttgtaatctacacatggatttgtattccatgaggcacacgaacactttcgcagctggaattttttactacagcggatttagttccgtcagtaaagttaggtctgtatgcaaatttgaagtttagcgcaatgtaaactttacacctaaccagaacagatgtccagtctaatcttcaaatcggtttggagttttactgtcaagtattgtaccagcaaagggaattggtttaagtacaatgatatttagctttattttcatttgccagtctgtcttggtagtaatgcaattaaattgtaaatatttattgaccactgaacgaacagcttctacaagaaatcatctagttattcacgacttgttttttgaatgaaaaacttcaacatgctgattttttttccaagtatttgaatcatatacacatattcttttaaaacttcaacagataatatggagggttttaaaaattttttatgttatcttttgaatactaaataactgcagcctttgccaagagatatgtgaaaggtgtctgtatttaaaccatttattcatctgaatgttttattt

SEQ ID NO: 25920 - DNA, 1054 bp, Homo sapiens
aaaaaaaaatgttttttttttgagacagagtctcactctgtcgcccaggatggagtgcagtggcatgatcttagctcactgcaacctctgcctcccgggttcaagcaattctcctgcctcagcctcccaagtagctgggactacaggcgcacgccaccacgcctggctaatttttgtatttttagtagagacagggtttcaccatgtaggtcaggctggtcttgatctcctgacttcgtgatccacctgccttggcctcccaaagtgctgggattacaggcataagccaccgcgcctggctggaaaaaaatttttatgggaaaagttaaaagataaatgattgttggagtgctttcacattatctgaccattttaaagctgttttacttagtataaaagagcctcctgagtaatactggtgagactaccaataataagtattctctgttttcaggtgtgtagcttggagtttgacagaaaagacataagtatgaataagttagtagccacatctctggaaggaaagttccatgtttttgacatgagaacacagcatccaaccaaaggttttgcctctgtttcagaaaaggtaaatatgagggaaatgtctttctatgaagaagaatgatagcttggtttagactgataagtagaattagtcaccaaggtttcttccaggtctttatgtgaagggagctatttttgatatattcctgtgagatcttgacaagtttttctgtgcaaagagtacttccccaaagtttatcaactttagacttcttgattataataaagatctcaggtaggaatcttattttgtagtttaggagcaattagaagaaacctagctgatattaggaatttgatcaacaaaacccagcctggtgtttcctaataagtatataatatttgtgctaatacctggttatatatttttcaaaataaactatatgtacatgatgtcatttcattacactttgttttatattccagtttgctatattaaatgaaattatttgaatcactgagtactgtgattatagtaaatgttcaa

SEQ ID NO: 25921 - DNA, 1014 bp, Homo sapiens
gcttggtgtccttgcatgacatggagttttgcatgtagatcaatttaaaatgtacctcttgtttacataatttgcataattttaaaagataatgttgccaaactttggaaatgttaatgttcagactgaaaatctccactacatgtaactttcttcctctggatcagtggcatggcttataatcccagccagtggtttgaactgttccagtgtcaactgccatgtgctctgcttcaagggggaactagccttttgtgaattttttgtacataagtatttgttacaaatattttagcaaatgctttctatttctcttgcttgtgcatatcttggctggcgttacagaaaaatagtgtaaacattatttccttaccggggaatgagggttttttctttttctttttttttttttttttttttagtttgtgtgtgggggtgggtaagggaggggatggtttatgttgaatgtttagtttttcttctgcatgatacgtcatgttgtgggatctttagaaaacttcatactgtatgaataagaaaataaaatatttgaaacttgcttgaatgtattcagtggtctttgatggtttccatagctatgagaattttttttcctctcaggcttttaaattcttaaaaacagtctggtaaagtgacatttaatctctataaaaacctacaaattcctgtagtactctcccatcacctcctgccatgacttcccttactgctacccctctctctactccagccatgttagcctccggtggtacctggagtcttgggtttgtgtctcttaggcccttgcgctatcagtccctttttgcccctttcctttcccagtatctcatagctaatgccttcaggtgtttgttcagttacagcctagctcaaaaggaactgtcctggctaccctattaaaaaatacagatacgcctggctcttctttcctcctctatatttttccttctacaatggcatttattcttttctgacacagtttacttacgtatt

SEQ ID NO: 25922 - DNA, 1034 bp, Homo sapiens
aagtaattttttttttttttttttgagatggagtctcgctctgttgcccagtctggagtgcagtggcgcgatataggctcactgcagcctccaactcccgggttcaagcgattctcctgcatcagcctgcccagtagctgggactagaggcacacgccaccacacccggctaagtttttgtatttttttagtagagacaaggtttcaccgtgtgttagccaggatggtctcgatctcctgaccttgtgatccacctgccttggccttccaaagtgctgggattacaggtgtgagccaccacgcccagccccctagtaatattttttaaaatttgatgaagtagttagaccacgaatgaggagtttctcagacactgtgaagcttgatttgttcctgtctgttgcaggttgtaggtggcctagatatccacaaaaagatggtggtagatgtgtgactcttatcagagagtaccacccaacacttttgctttcttctccatctctgaagatctgctcaagacgtccagcaatgctctctgtgtatttaaatggaagtatttttctctgtgaagccacattttccaacatgagcctcatgaagccaactaagtgttattgaactgtaattctctcaataactcagtgtagcactttaaagtctgaaggacagcaacatgaaaagagcatatcaatgtggtggagaaagggaaggggttggctttttaatttatttttcttcatcttttataacaagaaagtatctatatatacatatgtaaatatttatatatagatatatgtagctttctatatatgtagtaggttggctttaatttaatatacttgattcagaaacaaaacaatagagtacaaaagtgccaagcagaacataaaacatccttacttttatttcacacagttttatatatagatagaagactgtacaatttgagccgggtgttaggccagctattttccttttcctgtgctttctcctttgagagattgacaaagcatttgttaacgtcctattat

SEQ ID NO: 25923 - DNA, 1071 bp, Homo sapiens
tcaagcgcttgtaactggcttcattgagttctttttatgttgacttctcaagctataacagtgaaagattggaagttattttaaaagattgcatactatatatgtactttaaaattttcagagtacttaatgtatacaaataattcttacagatgattagtgacaggcttaaagttggtgtattgaacccatgtataatttatttttacctcctccccaaactccaataaaatgcaatgaattagaaagggttatgtactcacaaggacaaaaatgaagagcagagaagagacagcatctaaatttggtaatttagaacgtttagaaagttgaatggttaactaacctagcagaatgattctaagctttatcagcttggaaatctgagaaacaagctgggttataatggagaatccgtgaaaggctcagaaattgatggcacaagcaactggaagtgaggatgaaagtgaggctaaaaacagaaagactggttaaagtctgttttaagaaggaactggaacacacaagatcgccttccctactctgttcccctggacagctctctctcctgcaccctatcaagagattggggagagtctctaggctgggaaacatgaggcagagatgaggtatatgtgttggggagctaagtggcagtaagcatatttgcatattggcatctgtgcccttgttctgtacctgacttcctgactccctagcagctggacttacactgtctaggtaagagatgggaaagagccctctttaggaaatcttatctccccaaagaaatggtgctaccagatcattcaaagtatagctctcacttaacagccccatcattcacccagagttccagtgccctttctacagaagcaaagccaaggatctcaccaaacactgaaggaaacctctgtgtatggaatataaagatgaaaccaggtccaaaaaaataagttcaaaacaaacagattagacaagaccagtaaaaattttaaaaggaaaactgaaacctgtcattatccttggggatattgtatattgaatttttgaaacaaaagttggataata

SEQ ID NO: 25924 - DNA, 1035 bp, Homo sapiens
aaatcttcatgatcaaggatgggtaaagacttttagtacacacaaaacaggaatcataaagggaaaaaattctatttcattaatattgaaaggttttggttttaaaaatacacctatgaaaaggcaagctcacagactgggagaaaatactattagaaaatacctaacaaaggacttggatcagtatatagagaatttcacaaatcttttacataacgctttttttttaaaagcacaattcactaataaaaatatatgaaaaaataggcaataccacttgttagcaaggatgtggagctactgaaataatcatatattgctgatgggagagtaaaatggtacattactttggaaaactgacagtttctgaaaacttaaccctgtgacccagcaattccaggaaaacgtttgtttacagaaatacacattaatatttatagtagctttacaggaatgtctgtcaacagatgaatgcataaacaaattgtggtatatccatataatggactatactgctctgcagtataaaggaacaaactgacacatgcaacaacatggattagtgtcaaaaacttggtgagtaaaagaagatagacgcgagtacctactgtatgatcctgtagacatgaaattctagatagaatttagttatagaaagaacagtggttgcctagggtggtaagaaaagggtgattgactgcaaaagggctcaagggagtgtttaggggtcatggaatgttcttttatcttgatggtagtgatgcttccataggtatatgcatttgtcaaaacttatataaccatatacttaataatgcatcatttgaaggtagttattcctcaaagttggcttaaattattttagcatttttaggccaggcgttgtgcctcacacctgtaattccagcactttgggaggccaaggtgggcagatcacctgaggtcagaagttcaagaccagactggccaacatggtgaaattccgtctctaccaaaaatacaaaaatcagcagggcgtggtggcgcacgcctgta

SEQ ID NO: 25925 - DNA, 1038 bp, Homo sapiens
tttcatagtcaatatttttaatcatagtattatatagtctgtcttcagtaaatcttacaaaattaatgttataattgtctacatgaataattctaggcaagactagatttgtctaagacataggtattctgatatatatatatcagaatatatatatatagtgtgtgtgtgtatatatatgtatatgtcattcaattcagtgttggatttttattgaatttattctaggccgttgtgactttatttctgtctgttggctaacctctctggactaggaaatgtatactctgttgaggtgatttgctcaaagtggaagccttagttctaacttggcatgataactttggaaaagtgactgagtgcaagatactaccttagataatttaagcagaagactagattggggcacaattgaaagtaagagtggaaaatcagattcagctaatttttgataaagccagtgtaattctgagtggtttagataaaattagtaaacacaagggctgttttgtagactaaatgtaggtgaaagattaaatcttttatctaaaaagatgtctcatctctcttttgttagaaggtcccctaagaagagcttggcagactctgaaggaacctctccttttgcataatgaactgccagtagaaacccttctagccgttagaacgctgtttctgtttttagtaaacagtttcacattcaggcagttttgtttctggtttgagtatttacaggtgatgtgaaagtttaaggataataactttgctgttaatgtctgctcttaatcacattcgtctcagggaggtttgctgttttgaaaacagtgttttcagagaaaaaggttatctgtagttaatttgatttcctctttcatttcagcatttttttttttttgagacagagtttctttcttgttgcccaggctggagtgcaatggcgcgatctcggcacactgcaacctctgcctcctgggttcaagctattcacctgcctcagcctcccgagtagctgggattacaagcatgtgccaccacacc

SEQ ID NO: 25926 - DNA, 1026 bp, Homo sapiens
acaacaaacatctatttctcagagttctggaagctgggaagaccaaacatcaaggcagtagtctggtgaggaccctctttttggtccatagacactttcttgatgtatcctcatacggcagaagaagagatcatctttctcatgtaccttatgagggcactgaacccattcatgtgggctccaccctcatgaccctcatacttcccaaaggccctacctccaaataccattacagttaggatttaggcttcaccacatgaattggggttggaggagggcataaacattcagtccatagcaatgccctaaagcattctacctgtgacaactcatgtaatttctcattcagggagaaaaaaaaactgtccactataaccatttatatcagcagttttgtacagtgataaatagctcctaagctaggaattaggagacctaggttcttgtcctgctcctatcattggctggctttggagtctagactgagggcaaatcatctaacctctctgaatcttagtttttttgtccataaactggagataataaaaccaggcacaagactaaagtggaatgatgtatgtgaaagtatcacataaaatagggtgctatacaaatatacagaattatacctgtgcataaattgtaccacccaggagcctgcctgggtacattctccttagaagggacagatgggcggggagggagtgaagagcctgtataattgttcctgttctttaagaagaatgtcagctttcaagaccccatctgtttctagccagacaagaagaaattatgagctaggtagtaagaggcccaggaaatagagctccaaaagaaagaataggaagacggctaatgagaagtataaacagctaaggcatcggggagaggaagacatatgcatagttaccagcagttacatttacttcaacgtgaccttaggtcccacattaataaaccaaatttgaaatattaatatgaacacttaaatatatctttagctatgactgttgctattggcagatt

SEQ ID NO: 25927 - DNA, 1033 bp, Homo sapiens
tcgattttttttgtatattgatattgaatcctgagacttagctaatctcactaatcctaatagctgtttttggaggatccctaggattttctaaatatgctatcatgtcatctgtaaatagtttctcttttctttccaatctgtattcattttatttatggcctaattgcaatggctaggaccttcgcagtatgctgctaaatagaaatggtgagagtggacattcttgtccctcagtctgagagagaaagcattctgtttttcaatacaaagtatagtagctgtaaggttctttattgtaaatctttttatcaggttaaaggagttctcttctattcctggtttactgaatgtttttttaatcatgaacgtattataacatgttttcaaatagtttttctgtatcttttgaaatgatcataaggtgttttattctgtttatggtagattaccttgctttttcaaagttaaaataaccttgaattcccaggttaaataccactggtcatggtttattctcggtatgtaaaactggatttgattcattaatattttgttaaggatttttgacatctatgttccgggggggatatttgtctatggtttgcttttcttataatgcctttgtctagttttgggtatcagagtaatgctggctacataaaatgattcggaaagtgttcattcttctattttctggaagagtttatatagaaatgatatttttcttaatgtcagaattcaccaatgaaggcatagattatactttatttgaagattttttattacaaattcaatttcgttaatagatatcgggctattcaggttttatttcctgagtttttgtaatttatcttagaagtcatttatttcaattaaattttcaactttattcccataaagttgtttataatctccgccattcttcagtgtcttaggatctctaataatgtctactcttttactctttgatccttttctttttttttttttttttttttttccccggagatggagtctcactctgtctctc

SEQ ID NO: 25928 - DNA, 1045 bp, Homo sapiens
tgtctaatgttttcttgatttctagaagaaatgtgcacgttaaggcattttataagactgcctcactgacctccagaaaagctaggcaatttacacgcctatcatctgtatttaagtatccatttctctctgcactaggtatagtttgtcatgtttacatatttttaatctgactgaaatacttcaatttttacttactgttaatttgaaatcctgacatattcatttactatttgtatttgcttcatggattatatgttcatagttttcacccatttttctgcttaagtgtatcttattgattttttgaaaaatctttataaatttaaaatcgtcatttttatcacatcttgagtgttcatttaatattttaatttttattttgtttacaatataaaatataaattttgtagtcaaacatgttagccttttcctttattattttgcagttaagatccagcttagaaagtcttccttgactcccagattaattaattatatatagacatatacacagtggcatttgtgtattttcatctgaactcttatggtctcatttgttaaattttagatgaattacagatttagatattatttcagttcttacttttatattggaaagtatttgcccacagtgtcctaatacaattatttaaataatctatgcttctccaaaggtcagtttcatagaaatttcttatattgcaaaaattttatctcctcctatactccctaatctattccattgatctatctattgttacaccaatactgcattgttttagatacactgtttttataatatgtattcatatactttgtaactgaccaccttactgaacttgcttactaaaatttttcagcaaatcatcttgggtttttcatatagatggtcagaatctgaatataactgtctttttttttcctggtcatattgcattgtctaatgtttctagaataatgttgactgctgctagcagtcaactacagctagtagcagtagttggagataatttatcttatttgatatatttgatgaattaca

SEQ ID NO: 25929 - DNA, 1020 bp, Homo sapiens
tcctttcaattctttcagtgtttattttgtatacttaggagctctgatgttggtgcatatatatttataattgttatatcctcttggtaaattaatctttttatcattaacaatgttctttttctctcttgtaacagtctttgacttaaagtctattctgtgtgatagtagtagtatgctattccatcacttttggttacaatttgcaaggaatattttttccgtgtgtttaatttcaacctatgcatgtccttaaatctaaaatgagtcttttttgtctctaaagtgagagagcatatagtagaatcatggtttgttattcattcagccaatctatgtattttggttggagagtttaaccacttacatttaatataattacggatagggaagaatttactactgctattttgttaattgttttctgtatgtcttatagctttttggttcctgagaaaagaattttctgatggagctcctacttataattagataattgtataccctgtgctggaatgaaatgaaattgaatgggcctatgatttatatatatatatatatatttttaaattatactttaagttctagtgtacatgtgcacaatgtgcaggtttgttacatatgtatacatgtgctatgttggtgtgctgcacccattaactcgtcatttacattaggtatatctcctaatgctatccctccccactcccccaaccctacaacaggtcccagtgtgtgatgttccccttcctgcatccaagtattctcactgttcaattcccacctatgagtgagaacatgtggtgtttggttttttgtccttgcggtagtttgctgagaatgatggtttccagcttcatccatgtccctgcaaaggacatgaactcatccttttttatggctgcatagtattccatggtgtatatgtgccacattttcttaatccagtctatcattgttggacatttgggttagttccaagtctttggtattgtgagtagtgctgcaataaacatacat

SEQ ID NO: 25930 - DNA, 1034 bp, Homo sapiens
aaatttccaaatggtaaacatgacaccttaaatgaccttccttttgtgccagctcacccagttttatcagaaacagtgggaaacacagtaggaatacaactgctgctgaaatgacagtgtgaggagctaattataacttccttccagttctggagtacaagaacttcaagtgtagagcagttggcaagttgcacacttgattccaattagttccttcctggcatccttgcttacatagcacattgtgaactgtggaagttggaggccaactgagtgggaccacagaaagactgtgctcaggcacagggtgcattttccagagaggagctaaattagacagggccaaatgggtccatattcttaattaaacagaggctaatctgcaaaaatatttaattagaaactttaaaaaagagtctatattgggagcagaattactgaaatacaagtaatgtcaaagttgctacaaagggtttccacatagcaggtgacttcctgcatgttttggaacagggactgtaaatacagtgacataagcaccatgctaaatggcagccacatgcttggcctgggtactggggtgacaatggagagtggtgaggagtatggtgaactggaaagtgtatacgtttcttttaaaggaagttattcagtcctcaataatcattaacttgtaataaatacaggttcagtgttgtcagttctgatttttcaagtcaagatgaaaatctgtatttttaggtgaaatccgattttctaaatgttagcaataaatttaagttaaaaaatgcagtatgaatcaagaagaatatatatgcagatcagataggacttgtaggctgccagtttataacctctgagagtggaggagttctgggaaggttctctctccctatatatgttcaccagtgcagtgattggattccttccttcctctctcccttcctccctccctccctccctccctctttctctctctctttctttctttcctgatggagtgtcactctgtttaccaatgcagtgattggaat

SEQ ID NO: 25931 - DNA, 1348 bp, Homo sapiens
ctttacactgataggcaccaaatttagtattgtatcctaagtatttttcctcttctgtattttctgtgctctacccctgaaatatatttaggaataaagaagatataaataaagtgatattggggtatgttcagcttgtaagtgtcagaaatggaagttgacaatttggattaaaatatttaaagtagaatgttattatttgatacccccaaaattgtgagtaataatttcttaatggagcttttctggccagatcttcagggctataggagagtgtgtttgtttttggtgaagtccttctttttcaaaggtttttacttttaaattgtgaagataagctatttagcacaattatttaagtaagctgttttttcctttcttttctttcttttcttgttttaacttctgggtgaggttaagattttctaatagttattgttgttgccagagaagcatagaattctgcttgtgtcttagggttagagaaagatttgttatattttgaggtaatttggaaggactttcatacatggtgactagaaacctgatctttttaagaataaaatagggtcactatttacattatatataatatatggctattatagctatattaatctactttaattgtttctaagattattttgtgtaagtcagctagcgtgtgtatagtgtcatttcttatgttttgtatattaacgttttacaaacacaatttgtgtgggtttgtagcatttcttatagtttaaagtatgattcagcattctaagttaaaactaatatgtgaagtcagtcattagtctgcataatctctgtctccctctgtgtgtgtctttctataaagcacatgtgtacacacacacacacaaatatactgaaagctagggtaagttctaaactgaatatcaaaaaccaaaatcaagaacaaagaagtgatattttccaaacaaacatggattctctgccgggtgcagtggctcagcctgtaataccagcctccactttgggagtctgaggtgggagtattgcttgagctcaagagttggagaacagcctgggcaacatggtgagacctggtctttacaaaaatttttttggccggacgcagtggctcacacctgtaatcccagcactttgggaggccgaggcaggttgatcatgaggtcaagagatcgagaccatcctggccaacatggtgaaaccccgtctttactaaaaatacaaaaattagctgggagtggtggcgtgcgcctgtagtcccaactacttgggaggctgaggcaggagaatcgcttgaacccaggaggcggaggttgcagtgaggcgagatcacgccactacactccag

SEQ ID NO: 25932 - DNA, 1075 bp, Homo sapiens
tcccaagtactggttcagttcactgttactaagatagtttatttttgttttttggagacagggtctcactctgtcccaggctgcagtgctgtggtgcgatcctggttcactgcaacctctgcctcccgggctcaagtgatcctcctgagtagctgggaccacaggtgcacaccaccacacccagctaatttttgtattttttttagagacagggtttcgctatgttgcccaggctggtctcgaactcctaagctcaagcgatccccctgccctggccttccaaagtgctgagattacaggcatgagccaccatgcttggccctaacgtagttttaagagatagagaatatatactgtaaaaccaatgggaattttattttcagctttttaaaattaaaagttctaaattcttcagatgcagctgcaactaattgtcctgcttttttgtgatgtttcaggcttataccagccagtttgtatcccttgtgatgtttgcccttatgatgtgtgatgatcggatctccatgcaagaaagacgcaaagagatcatgcttggattgaaacggctgcctggtacaaagacactcatatattacacttttgttgtctaagggagtgggtaataggtaaaattctcttatccttgaagctgtggcttgtagctatttagtcaataagatctttctacgtttgctccgatgtattaaaaaaatacccatactgattgatagcacagaggaatagaaacactggtcttttgttatttgctgccaatatattgttattttatttgtttggtttattgtccttttttgctaatattacttcttagatttgattaaggaagtactgagcatggatgacgaaattcagaaactagcaacagaactttatcatcagaagtcagttctgataatgggacgaggctatcattatgctacttgtcttgaaggggcactggtaagttttctcagttctaattagtatcagtccattgacctgcagacctgacacatagtcatacttttacattaaatgaatgaaataggtagaacttttgaaagtgcttctgtat

SEQ ID NO: 25933 - DNA, 1027 bp, Homo sapiens
agtgcaattttactttgtgggcacattactgcaaagaaaggtagtctgcttttttttttaaatcagattttattctttaaattgttcttttagaagctgaaattcagtatcaaaaatgtgtattgtcagtgcagaagcataggtgtatgagggtcttttattccaataaaagaccaatatttgcccacgtagtttccttagaaagagacagtttatgtgttgctgatgtcaactgttatgaacagaagacctttacattcaatttctgcttttaggattgacttccaaagttcctgacataacttatttatttgctgaggcataaatatttattaggagccatttatttaagcagtgagtgaaactatctggtcacctgcccttgcatctcaacaagctttgctcttttctaagactacaccaaatacctcctcccctcctcccccaaaattatatggtcctaaacagaaagtctatgtaatgttgaagggtagaggtctaaaaaagtgattgttttgtctgggtgttgtggctcacacctgtaatcccagcactttgggagggcaaagtgggaggatcagttgaccctaggagtttgagcctgggcaacatagcgagaccccgtctctaccaaaaaaaaaaaattatcggggtgtggtggcaactccctgtagtcctagctacttgggaggctgaggcaggaggatcgcttgagtccagaaggtgaggctgcagtgagcctagattgcaccgctgaactccaacctgggcgacaaaaccaggccctgtctcaaaaaaaaaaaaaaattttgaacacgggaagaagaaagatgtaaacacgttagtggtggcttagatctattactgaatgagccctgtattcagaaatagaaaatttgattaaacgcttcatctaacgctaagacaatttgggggcagaaattatatactctgttagaattctctaatgtaagattttttgttgttttgtggatgccaagactactgtagtaaacaaacattagaa

SEQ ID NO: 25934 - DNA, 1047 bp, Homo sapiens
ctttctgatctaatctgtttggtttagattgctatgcagagttccttttattttttgtccacaatgaccaccttccccatactttcctgtaggggttggcattagtaaccagaaaattctctgagatactgcagagtgatagagtttatattgaaatttggttcttgtatccaaatgatagtttcatttgtaataatgatccttggttatcgattgtaatatctccttgaaaactttatagtgctgtcatagaacacaccaatcgcgtcatctttctggaagatgatgatgttgcagcagtagtggatggacgtctttctatccatcgaattaaacgaactgcaggagatcaccccggacgagctgtgcaaacactccagatggaactccagcagatcatgaagggtgaaagtttttgtcatgttatagcttgctgtccttactggaaagaatatattctacttcctttcctagcatattaaatctagtaatgaatgatgagtggaatcttccacatgattagtgaagggacaacgctaggaaaagggatgattctttagagaaattatctgctgtttttacaatcgtcttcaaactaattaatgatttgttatttgtaacattataaaaaggttattaacacttgatactttaaagatactttataaacataaaaatagttaatgttctgttcctttttattctctttgtgctttagttttcttatatataacatgaggataatatagcctgcctcattaaggttgttttgaggattaagaagctactatatggctgggtgcggtggctcacacctgtaatcttagcactttgggaggccgaggtgggcagatcacctaaggtggggagtttgagaccagtctggccttgccaacgtggagaaaccccgactgtactaaaaaatacaaaattagctgggtgtggtggcgcatgcctgtaatcccagctactcgggaggctgaggcaggagaatggcttgaacccgggaggcagaggtttcagtgagccgagattgcgccattgcac

SEQ ID NO: 25935 - DNA, 1068 bp, Homo sapiens
gatcataacattattcttacacattttatttttttcacaagaaacttgaaaacaaagcaaactttgaagtagattgattgaaaaaatatttttaaaattctccacaaaacccaggaaaccgcaagtattttatgtacctactcatatgaatgccatcataatcattgtaaaagagtacaggtagaggaaaatgatggattttgtcttttttttttcccacataagccatacgtttagctctgtagtacttgtttaacgaattaaatcaatacttattttgcctgtattgtagtgtaagattagctaggggtaaagcagacacccaaataactatacttcaaaaacagtagtataaatatctactatgtgttctgcatcctgtataccaggctgattgtagcaggttctgtaggagagaacagacattgctgtgagattcaggggagagttcccacaagttgacgagactgggaatacatagggaatgggtgctgattatatttggtcagtgaagatgtgaagggaggaccttctgagtagatagcatagcaagataagaagagtaatggcaggcgtgttgatggaatgatagtagtcctttttatttacagtattggtagacaaataagggaggctagaaaggcagattgtgaacagaatcaccatttttcaatgtcagcatattgaaacatgcctcttcgtggtcaacttttttttttttttcttcccttcccagatggagtctcgctgtaacgcccaggctggagtgcaatggtgcaatcttggttcactgcaacttctgcctcccagattcaagcgattctcctgtttcagactcccgagtggctgggattaccaggcgtgtgccatcatgcccggctaatttttgtatttttggtagagatggggtttcaccatattggccaggctggtcttgaactcctgacctcaagtgattcgcctgcctcggcctctcaaagtagtgggattacaggcattagccactgagcctggccaactggtttgtttttgaagtgtagttatctgagtgtctactttactcacagc

SEQ ID NO: 25936 - DNA, 1032 bp, Homo sapiens
tgttgcccaggctagagtgcagtggcacgatctcagctcactgcaacctctgcctcccaggttcaagcaattctcctgcttcagccgcctgagtagctgcgattgcaggcacctgccatcatgcctggctaattttggtatttttgtggagacggagtttcagcgtgttgcccaggctggtcttgaactccttacctcatgtgatccactcgccttggcctccaagttgctgggattacaggcgtgagccacccagccctgccgcattaatctttaaaaaaaagtagagtctataaattgtcttaaaaacaattttatatcattagcatttaaatagttttaacacattcatatacatctttaatctttaaatcatttaccatccggcttacatttttatgtttttaccaactttcatttttatcatctggcttacatttttacttttactatcagacttagatttcttaaaaaagagagagtttaggagtgagtttttctggatgtgcttagaatttggcagctctggacaatctgcaaacaatcctcgacaggcttctgttttcaaataagctagattgtatcctcctttagtggactctagctgatgcagtcacagtggtgggaactagttcagattcagtttttttcacacttttttttttttcttttgagatggagtctcgctctgtctcccaggctggagtgcagcagtgcgatctcggctcactgcaacctccgcctcctgggttcaagggttcaagtgattctccccgtctcagcctaccaagtagctggagtacaggtgcacgccaccatgcccggccaatttttgtatttttagtagtaactatgggtttcgccatgttggccaggctggtcttgatttcctggcttcaggtgatgcgcctgccttagcttcccaaagttgggattacaggcgtgagccactgcacctggcccacatttgtattaaagtattgttttagaaaagatttgtgtgctgtgtattgtcttttaatgacctggtta

SEQ ID NO: 25937 - DNA, 1028 bp, Homo sapiens
tggtcggcaaagacaaaaatatttaccctatggccctttacagaaaactgatttgactcccgctgtaattcttgcaacctgctcctcttacctcctgcccctgataagtacattttactcagcaagctggggtccccttccctgctagcgcccctcattagcagaatccctccaggaaggctcaccctggcttgcttctgcagtgcccacttggcccatggaaagttttggcatccttgtcccaccaaatatgagagtgcaagcctgtctcctgtcccttctctctttgctgtgcctcttgtgggctacttggacccacctctcttctctggaattcatccccaaactcctgaggacactccaaggaccgtcttaccatattttaccccagtaattggggagactgacccaaaagtttctgcagggcaggaagcccgcagtcagggagtgagacctcacactcctctaatcataggcaacctagggcctttaaggatgattctcagttggcttgtcttacgtaacatggatgggttgggtggaggtgtcaccaatttttttttttaacatctttcaggaagcctaaccactttaaaatgttagaggcctttgatatcacccagtgtccttgacttggaggcttaagccaaaactccaagacagcaggaaagtcccattccatatcctgttccacagggctaccatgctggttaactccagggaacgattcacattgcatcttgttttattgtggcctctagagttaaacagggcacacccttcatagccagaagaggtagccttccagctacatatacatatacatagctacaaacccgaatgaccaggtgttcccaggtattctcttagatctcaaatctaggaacacctggctttggaggtaaaaggggagaagtagtttgatgaaggaaatcaaggttttgttggtttttggggtaatcattaggtaaaaaatagaagagcgccaggcgtgatggctcacgcctgtaatcccagcactttgggag

SEQ ID NO: 25938 - DNA, 1050 bp, Homo sapiens
aatgtcccacatttgatggcccaggccaaggggattagtagaggggatgctgagccccatgatttccaaattcaacccagcaccactcaggctgagaaggagggattcaggggtcattgagaaagacagggatgtccagggagcgagatgaaaagaggcagagagacatgagtggggtggggtggggtggggtggagggagaacagagcagagggtgtgggtggggtcccagagccagaggtatgggtgacatcggcactgaggggagaagaaaagaacagtagacacatgcacaaatagggccacgtaacaactggtgagcactgaggagcctagggccgcggtactgtgctggagtcggtgatctcaggctacagtttatataagacatcaccactgggggaagctggttgaagggttcacaggactgtatgtgcaggaacttcttgtggttctgtattacttcaaaataaaacgttttttaaaaacccactttatagaaacaaaatgaggcttttttttttctagaaagacagctgacaaacaaaatgagattttaattaacgaacaaactgaatactgaaatgcaaagtaaagaatgattatgtatggctgggcacggtggctcacgcctgtaatcccagcactttgggaggccgaggcagttggatcacaaggtcaggagttcaagagcagcctggccaacatggtaaaaccccgtctctactaaaaatacaaaaattagccaggtgtggtggtaggtgcctgtaatcccagctactcgggaggctgaggcagagaattgcttgaacctgggaggcagagcttgcagtgagccaaaattgcaccactgtactccagcctgggcaacagagcaagactccatctcaaaaaaaaaaaaaaaaaaaaaaaaagaatgataatgtaaagctgcatgtggtggtgcatgcctgtaatcctagctactaggctactaggctgaggtgggaggatcgcttgagcccaggagtttaagtccagcctagttaacatagcaagacctcagtctct

SEQ ID NO: 25939 - DNA, 1015 bp, Homo sapiens
atgcttgcatctcatcttccttgacaagatgcctgtcttaaagtgggccattggactgagggaggtgatgggcctcatgagacctcaaattacccacttacactgaattttcctggtctccagatctagagcttaggccatttcacatggctaaactgctttgttaaaatgctgctttcccctaaggacactgatatgtctaaaggtccagaagcctagtcagcacttctccaggtaatactttaactttgaccaaaacataaagttgacatcatagtagagtggaagacacagagcctttgaaggctttgactaactgggagattgtcattgacttgctttctgtaaactggctcatgtcttccatcttggtatgaatgtaccagtttttcattttccaaggattggcttgcctccttagacaacactgagacttccttggtaaaacttatacagcacatggtttagagttgaatggtgaaggaggcaaggaccatagagaagatgctagaaagaacctttatcataaaatatcaaacaatgtgaaaacattcttccctagataatgactccaaaatacaactgttgtcgttttctggtgaaacgtctagagccagctgtgccattctcatagcatcttcataataataagagctgacttttagtgcttatgtagcaagtgcctgttggaattatcttatttatctccacagccctactgttacctcattttacttccgagaaagtttaagcaacttgccacaaagttgtctgctaataggtagaaggactgctgactctaaacccaagcccttttttaaaagttgtggttacatacataatataacatttaccattttaatccttttttagtatacagttctatggcattaagtacattcacattattttttttctctctaacagatgaaatactttaatccatatattaataaatccccagttggataactttttttattatactttaagttctagggtacatgtgcacaac

SEQ ID NO: 25940 - DNA, 1033 bp, Homo sapiens
ctgcgagctctgcctcccgggttcacaccattctcctgcctcagcctcccgagtagctgggactacaggtgcccaccaccatgcccggctaattttttgcatttttagtagagacggggtttcaccgtgatagccaggacggtctcgatctcccgacctcgtgatccactcgcctcggcctcccaaagtgctgggattacaggcgtaagccaccgtgcccggcttttttttttgtatttttagtagagacggggtttcaccatgttagccaggatggtctcgatctcctgacctcgtgatctgcctgccttggtctcccaaagtgttgggattacaggcgtgagccatcgcgcctggcgctagttcattgattctaagaaaacaaatttgaaaattaggtgatttgcctaaagtcacaccgccaattaggcccttctgagcaactcccaactactgtctcttcccacattggtcaacagtcatttgtgctaccttggcactactaacattttggtctgggtaactctttgttgtggagggctgtcttgtgcactatgggatctttagcagtatccatggcctctacccactagttgccagaattatataatacatacacagcctactgtggcaatgaaaaatgtctcaacattgctaaatgtcacctgtggggcaaaattgcctgttttagagaacatgtctagttcagcatgtttgtatatgttctggtcttctgttggtaaagttgaagtaagtattgcaatatttttggtcttttttgaggaagaaaatggtctacataaataattcagatgttctgtgtttatacccaaagcaaaaaagccttttatttgctgtgaatttaatcactcaggaatgataaactattagcttgtaaggtgatactggctgtagcattttatacctcctttctcccttttttgtttttattattattgatctattatttttattatttagcctattatgtatactttatttatttttgagacagggtctcactttgtcaccc

SEQ ID NO: 25941 - DNA, 1033 bp, Homo sapiens
ttctggatctgttctttactagctgtggaactgtaggcaagacattccaaaccactcttgaatctctgtttccctgtggcagtggttctcaaagtggggcatacttatcacctgcgagcttgttggaaatggagattctcaggcctcactctgtaggctgtgggtgtggggcttaataagttcctggagagattctgacgcaaggtcaagtttgagaaccactgcttaatgggctggtcatgaagattaaatgaggcaatatatataattaacattttcaggtgttcaataaatggtagccattacttaccagcaacgttatacatcatatgtatatatgtggggggggagagagagagagagagagagagagagtgtgtgtgtgtgtgtgtgtgtgtgtgtgtgtgtgtgtgttaaaggggagtgggagcaatgtgaaagctagttgagctgcagcaatctgaagcaattcctttcccccattgttaggggacagagccagatgttctttgcagagtcctcaccagctccttaaaggcttaacagacgttttgggtagccatgctccttccctggactctcttctctgtgagtccccgagtgctgacttatctacagttctagccagagttgtttaaggaccacaggagttgtaccctgtgtgcccagagcggtggctaggcagtttagggaggagtggtgtgagaggcttcaaaacacagaccagattaccaccacattccgctgatgatctctttttctctagcgtgggtattggtctgtgctttttcataaggaattgcaagaaccccaaggagcaggtgctgggtaagacaaaaagatgtcgcactgccatacctcccctggtagcatcagccttcctggcctggtttcactaactagtccagcaggggctgtttgggggaagtgaaggctttaagttatgagtttagaggaatatggctatttctaggctgggtgccagggagaatattttctttctagctttctcagcaaagatgccatgatgaga

SEQ ID NO: 25942 - DNA, 1034 bp, Homo sapiens
catatcctcatgggggtcactgggcttggccagtctgcttatcaactcttgctcttctctcccctttgcctccctctgcaggggccttaatctgcccctggtaggggaggcttccactgaacaggcacaggtgagggagagcaggctggcttagagggacagggtccccatggtcatcaagctgctgttgatgacaaagactcaaaggctggaagagctcccaaggaagctagaaatgcttgtctttgaaagaactgtgggaccccttcagattccctgaggtatggcttggtcactctcaggtcctcaaagcctgtcttagttgggctgggtcctagctgcagggtctttgtgagggtcacagttgctctgggacacctccctgaagagcctttccacctgtacaatcgtattttctttctgtcatttgctttgaagcccattgtgccttatgccaataattcaattgctgcaaacaccaataaagattgattcatggaaaaaccatgtaatgtgttgattgaggatgagaggaatgtgagagggagtcagcatcaaagacaagggagattcacatgtctactgagtgcctagctggaggtataagaacatatacacagggatgacaggtcttggattttctaagacagtctcagcataaaatattttgacttattccctccagaattgctctcattattttgaatcgtcataattcctctacttatttcaatctgtagtattttagcatacaaattgcctctatacccaaaagtgaccctaaagttttatgtgagatgtcttgattggggattgggaaattatggttatgataaacaaacaggaaagtgtctgctgggcaaataggttcttacagctgtccaggagcgagaacttggaggcagaaagcagggccaggagacaagtgttgacctgtgtggggcagcccaagggcatgctggaggacgggggaggctgtggcaaggcagggtcccggcggtgggaggtcagcttcttcttggagggacttggaa

SEQ ID NO: 25943 - DNA, 1018 bp, Homo sapiens
gttggtcatgctgtaaaatggccatggccacagatgctgtgtcaggaggttgaagtctatagaacacactagacacgtaagagaaggatgccaggtcagggccagggacacaggctgcacatctcacctctcttgatctcatccctcttaatgggacctctcaggtctaggggtctcaccaacgctgctcatctagcagggccacacataacaaatagaagcagagcaagccctggaactcctgcctgacagtgacacgacgacagaaacatcttaccagtcagaggaccatgagaaatagattcaaggagcattccacgtgcaagtgagtcttggccccatctgcctttggattttagccgtgaactggaaggtattggaaagaagaccctcagaaatagcttaatcaaaatccctgcgtctgaaccaagtgccttatttctctgtgggcctcaagcttcgctgacatctgtggagcacactgtcctaacaggagtgctgtctgatttcccaacgctctgcaaaacaaacagcctggaagggtggctggtggaaggtggtttttagagagagacttgtagataacaggaaagtgaaggctgtaaggaaggttgtaattaaacagcacatggaaacacaatcacattattgtcccattccatagggataatgatgaccacttcagtgggaaaaggagaggttttaagtcattagggactatgggccaccttttaggaagatttattttcaaaggttaaaatagtgttttggcaattcaagtttcattttcagaaaatgtaattgatgggaacctcagtgactctggatgaataagatgctgttgagtggctctgacttgggccagccgtgcttctcacaggaccttggagaccaaggtcactgtgatctcaggttcagggggcaagtcctctccacacagccctagttggcctcacagctgaaaatgtctcccttactgttggactcctttgttcacccacatgagtttgtgaataaa

SEQ ID NO: 25944 - DNA, 1028 bp, Homo sapiens
agccttccctgctcctgtgtctttataaaatctatttaactggagtagtccaccctccctcaggctcttacaggaatatgttggaggctgtaggaaggtgggaaaccgagagggaaaggactgggccgctggagacttcactcattccctagcaagaaacaaaagcagtaaaaggtggcccgaggacaacctgaagctcactccttcagcacttttggctggaggtcacttgttggagccccactcagagctcagcacaccaccccaccagcagcctcctcctcccagctgaggctgcatttcatcccttcccccagcctgctttccctgagataggggagtgtttcccagggcccatgtgacttccactggcaagtgacgattaccaatggtttactagtcagtgaaactaccaaaggcttttgtgctgtagtaatccttttcctgtttaaaactctggggattttctaatgttgccaatagtttttcaagtcagcaattactgtgtggattatgtaatggctcggtattaaaaatagaaaagactggagtttgcatctattttaaccaaatcttgaaaacagagcaaagggaggggaagggtggagagggagagaccagaggaggagggagaaaaagagatcatgtgactggataagacagctcacaattcactgtgcctttctcccaccatttgtggcccaaggacctgtactccctcctcagcctcctctagggaggggtccttgatgagaattctgaggacacaagaccccttgtggatatttcttagctcagccttggtgtgcttacctgcttctgacaagcaaagtggccaagtaggggagggagttgaatctgatgtcctccactaagtccaggactcctattttgttttgttttgtttttgagacggagtcttgctctgtcaccagggtggagtgcagtggcacaatctcggctcactgcaacttctgctgcctgggttcaagtgattcccctgccttagcctcctgagtagctgggac

SEQ ID NO: 25945 - DNA, 1049 bp, Homo sapiens
gcagtggcgcgatctcggctcactgcaacctctgcctcccggatttaagcaattctcctgcctcagcctcctgagtagctgggattacaggcacacgccaccacgcccagctaatttttgtgcttttagtagagacggcatttcaccatgttggccaggatggtctcgatctcttgaccttgtgatccacctgccttagcctcccaaagtgctgggattacaggcatgagtcaccacgcctggcctatgacttgtttttctaacacaccaggccatagcctttcttaatgttttgcctgcttcatactgtaaatcagaaactcctctcgggaggcttctgactgtagcctgaccatctcacctgatctcttctccaatccctcttcccctctcccctttattttccctttgctatttttacttttcatgcagtgtcagagaagtgtagtgactatgtcgggggaggatcccccagctgcctctggtagttggttttatacttcccacttttggcgtgctgtaccttctagaatttctgtcagtagacaattttgtgtttttctttggagctttcaagatcttgcacatagcttatatagttacatggctgtgaacagagaacgggcagtttcatggtggcattggctgtgagggcacttacattgatgaattcaacccaccacagtggctgtctcccctgtcaaagtgagtgaggggatgagagcattttctgaaccagctcatcttcctgaatagcttcttgcatgcccctgggcttttctgttggcatttaattgctggctgtggaatcttgcctgttttccaatatagacctttggctttagatcctgttcttgttcttacccactctcactaaactgaactccaggaaccacatctcttttgtttgctgctgtatcccaggactgagcaaaggcctgatgcttactaacacctcaagaaatatttattgaatgaagaaatgaatattgacctggaaagttcaaactcttggttttccttgcttcttcctgaagtcaggggccaga

SEQ ID NO: 25946 - DNA, 1017 bp, Homo sapiens
tgggcatggtggcatgcgcctgtagtcccagctactcgggaggctgaggcaggagaatcgcttgaacctgggaggcagaggttgcagtgagctgagattgtgccactgcatttcagcctagccacagagcgagactctgtctaaaaaaaaaaaacaaaacaaaaaaatcgttttactggctgggcgcagtggctcatgcctataatcccagcactttgggaggccgaggcgggtgaatcacttgaggtcaggagttcaagaccagcctggctaaaatgatgaaaccccatctttactaaaactacaataattagctgggcgtggtggtgcatgcctgtaatcccagctacttgggaggctgaagcaagagaattgctggaacctgggaggcggaggttgcagtgagccgagatcacaccactgcactccagcccgggcaacagagcaagatcctgtttcaaaaaaaaaaagatacataatggatggttggttgcaggaaaaagaaaaatgacacagatatacataaacaagctgatgtggaacaatctccaagatctgtcattaagagaaaactaaagaaaagtgcaaaattgtatttatggttagtgtgctagtgttagcatttatatgtaaaaagaggagaaactctgtatacttgttatatacccatactgtttctgaaaattttctttttctttctttctttctttttttttaatagagatgggttttccctgtgttgcccaggctggtctagaacacgtggactcaagcaatccacctaccttggcctcccaaagtgctgggattacaggcatgagccaccatgcctggcctttttgttttttaatatccttctctgttgctgaatttttttttttcacatatgaacattacctttttaaaaagagtagttgtgagctgggcgcggtggctcacgcctataatcctagcactttgggaggctgaggcgggcagatcacctgaggtcaggagtttgagaccagcttgcctaac

SEQ ID NO: 25947 - DNA, 1047 bp, Homo sapiens
tcaccagaaagctgcccatgatctctgcctttggtttactgacgaaggaaaggctttttttttttttttttttttttgagacaagagttttgctcttgttgcccaggctggagtgcaatggcacaatctctgctcactgcaacctccgcctcctgggttcaagtgattctcctgcctcaacctcctgagtagctgggattataggcatgtgccaccacgactggctaattttgttattttttttttttttttagtagagacgcgttttctccatgttggtcaggctggtctcgaactcccgacctgagtcaggtgatccgcccgccttggcctcccaaagtgttgggattacaggcatgagccactgtgcctggctgaaggaaaggctttaacttgccttcatctttcctcatttgtagatcttccttacctcctttctattcacatctctagcttcctgctgctgctctagctactaaacctttacataatgtgccttttggaattggtgctttggaagtgactcctctagatacccctagaaacccccgttctccagccagactcacagaatgcagcttgccgcctcctttttctgtaaacctggtttccataagattgcagcacttcatttggaatctttacaagtgaaactagctctttcttcaacccactccttaccacttcacccctgactttgcctgactgtacttcagccccattcctcagcactccagagctgcctccaaatggccagatactttcagataccttttgctctttgaaatttctgctggccaggaggccagcaaggccacttgatcactgtccttgaagctggcatctatacccatttcccctgtgtgtgttgcgattttggtgtctgatctctcctcctggggctatagcccaggctcagagattggtgaccagggcttgcctggagccaaggatttgggatagagtgtggacttagggggcttggtgttaacatttcagaggtagacagatgagaagccagaatacgtgaacctcaaggccagtgga

SEQ ID NO: 25948 - DNA, 1113 bp, Homo sapiens
aaaaatacaaaaaatcccagctgctcaggcggctgaggtgggagaattgcttgaacctgggagacagaggttgcaatgagccaagatagcgccactgcactccagcctgggcaacagagcgagactctgtctcaaaaaaaaaaaaaaaaaaattagccaagcatggtggtgcatgtctgtaatcccaactactcaggaggctgaggcaggagaatcacttgaacctgggaggcggatgttgcagggagccaagatcgcaccactgcactccagcctgggtaacaagagggaaactctgtctccaacaaacaacagaaaattcactgggcgtggtggcacaagcctgtaatcccagctactcaagaggctgaggcaggagaatcgcttgaacctaggaggcagtggttgtagtgagccaagatggcactactgcactccagcctgggcaaagcgagactgtctcaaaaaacaaaccaacaaacaaaaagaaattaggaagccagacacagtgactcaggcctgtaatcccagcaatttgggaggccaaggtgggaggattgcttgagcccaggagtttgaaaccagcctgggcaacatagcaagacctcatgcctacaaaaaatgaaattagggcctggctgcggtggctcaaacctgtaatcccagcattttgggagagcgaggcaggtagatcacctgacgtcagaagatcgagaccaacctggtgaacatggcaaaactccgtctctactaaaaatacaaaaattatctgggcatggtggcacattcctgtaatcccagctacacaagaatcactttaactcaggaggctgagggtgccaagagcagagatcatcccattgcattctagcctgggcaacagagtgagactctgtctcaaaaaataaataaataaataaataaataaaatatggcagggcactgtggctcactcctgtaatctcagcactttggaaggctgaggcgggtggatcacccacttgaggccaggagtccaagaccagcctgaccaacgtggggaaatcctgtctctactaaaaatacaaaaattagccaggtgtggtggcacgtgcctgtaatcccaactattca

SEQ ID NO: 25949 - DNA, 1030 bp, Homo sapiens
gggagactaaggcaggcagattacttgagcctaggaatttgagagcagcctgggcaaaatggcaaaaccccttctctacaaaaaatgagccaggcatggtggcacacacctgtagtcccagttacttgagaggcagaggtgggggaatcacctgagcccaggaagttgaggatccagtgagctgagattgcaccactgcactccagcctggacgacagagaccctgtctcaaaaaaaaaaattttttttttaaagtatacaattcagtggtttctaggtaattcacagaattgtgcaactattaccaaaataaattttagaatatttttaccaccccaaaaagaagctacatgactcattagcagtcactatcctcctttcatgcccctcctgccagccctgaacaattgtcaatctactttctgtctctgtagatttccctgttctcaacatttcctataaatggaatcataatgtgctgttcttgttattactgctattctgtgtcatcactctattccttctctactggatcattctcatcaacctaggatctctcttttttttttggagagagggtctcactctgtcactcaggctggagtgcagtggtgtgatcatagctcactgcagcctcgaactcctggcctcaatccatcctcctgcctcagcctccagagtagctgggaccacaggtgtacaccaccatgcccacctaatttttttttaaaaaaaggccaggcatggtggctcacacttgtaatcccagcactttgggtggccgaggcaagcagatcatgaggtcagaagttcgagaccagcctgaccaacatggtgaaaccccgtctctactaaaaatagaaaaattagccaggcatggtggcacacgcctgtaatcacggctactcaggaggctgaggcaggagaatcgcttgaacctgggaggcaaaggttgcagtgagctgagattatgccactgcactccagcctgggcaacagagtgagactccgtctcaaaaatatatatata

SEQ ID NO: 25950 - DNA, 1033 bp, Homo sapiens
gttaaagaaagccattcatctaatgtcctgtgaactttataagtggttaagtagttcatgtgagtagctgctttcaccatgcttaatatttaaaagtttaaaaagttttttgaagagagaggcaatttctgtacaatataaatatacatatatacttaagttattgatttgcatgtctataaaattaagcctcatttcctaatacatgataaattttgtagaataaaaggtgaatttgcattaaaggttcactttaatgaaggtgaaacatgagaatgagttgtgtgtgaaattcttatttgatatccagaggatagtttgcaaacctaaacttctgattgtttctgatttcagagatgcccgagtggtaaaagacatggcaacaggaaagtctaagggatatggctttgtctcctttttcaacaaatgggtgagctcagtgagaagtgcatggataatgcttaaagagtaaagaatggaaacactccgttttaattactaatctttttttcgtctgctgtttattttactgatgattaaaataaaccctcactagaagatttcttctgttttgtctgtttaacatttattggcacctgaggcatgcagagtactgataagatgttttcagaatgtagaaagtaaagttgtttaaattatcagccaaaggtagatgttgaaaatctcatttatggatttaattcattatctccctagtttatattcccatggtagtttaaaagtagctaataaaatactgtgaggaggccggacgcagtggctcacacctgtaatcccaacactttgggaggctgaggcgggtggatcacctgaggtcaggactttgagaacagccaggtcaacctggtgaaaccctgtttctactaaaaatacaaaaattatccgggcgtggtggcaggcgcctgtagtcccagctactcgggaagctgaggcaggaggatcacttgaacccaggaggcacaggttgcagtgagccgagatcatgccacagcacagcctgggcgacagagtg

SEQ ID NO: 25951 - DNA, 1508 bp, Homo sapiens
catacattttaggcccttatgaataaataccttacttgagatagcattcatcatagaagaactttaaaattttgaaaagcatgccatattagagtaagaataacaagttgtttacagtactttctgtagagtaattagcttagaaaacttcttcagggtttctgcttgctctgttatttttccacctagaagaatagtaaaaaggaagtgctagctgtggtttggtttgaacagaccaacagcagagatgagatgaggagactggaaagtaaatgccagtagtattggtgaattttaggagctttcgtttgaagagttatcgttccttgattaggggatgtgaccaaggaattaccaactttaaaggtggtcacagaattagggcttataaatggacttctttcagatgacatttttctttgtgagacctgatcaggaaaataagtacagctttcatttcttgattgtccttcttaataatatcttagagtttcaataataattagcttgctttcgaatatctggacttagacagtcttagcctttggcctctcaagggctctaaatctctatgcacaattttgtgttttcattttggtgtggaaaatctttgtaaattttatcctattgtcagagtagtcatagaaccataaaaggataaagaagcctgatctagatctttgctgctgcttcagagaatcttttcagagagaaataaatgagttgaatatttttcaagactaacattttctgaaactttaagaagaaaaaattttctaacattgtgaacagattaagtagctattttattaaatgctttgattttaattgaggtagtttttttgaaaacacgggaattttagtttggaattaggcaaagattgtttaacagttggtgagtttaagttaagtgaccttcagattttagcaatttcatgatttacaaatcgtgggttatatttttttctcttaaatatatttctgtgtcatatttttagtctgtagattttcttatggtcccatgattattggtgtatactttttttttcttggtaagacctttaagttttatgattttcaattgagataatgtataatgtttgagttttaggctatataaggaattagctttcctgcatttaaaggaatcatttggcagtcagtagcatattttcctgattttttgttgttgttaaaggagataagttgataactgtatgttgaagggttctcatgatattctctaaaaagtgcaaatatcagtgcttgatttatagatgtgtaataaacagtggtctgtaaaagcatgtagtataaaaaatatggtattttcccttatatacagcctataaactcttcctattccttgagtttagggtagactaacaaattacagcgtagaagagagtcagctaccagattaaatgcatgcgtaccatacagataatttattaagtatttttgcatattgaacattgacttacattaattttcccttttcaccacca

SEQ ID NO: 25952 - DNA, 1027 bp, Homo sapiens
ctttcttgaggtcaccatttgggcttcatacccagatcttccaaatgcttgagttgctcctcaaattttgtttcccaaagagcaatccaaaatgttgtttaaggcctgtcaaatatgggtaacttttctttccaaatatgctttgtcaaattgatgtatgtgtccattttaaagtgttggtccaacaattttgcatttttaaagtgtttctttttttgataattgtcttttttaaaaacttcagatatgggttggttatttctctccaatgcttttttaatggttctgatataaagtgaagggattactgttttcattctgttgccttcagtcttagttcacttgcacatggattcacataaactgaatggtgtaatgtctgggcaaccaaaactgttggcttttgagaaaactgtcaaatactttaacatcaaactgttgcaatgcaaggtatttctttgattgttcttcacaaaatatggttaaaccaagtatatatcatgtagctagcttcagtaaattgtgttaactgaggcaaatctagtctacataattcacagtaccactattttattttaatttgtaaagccttaatatagtggtaaactgaataaaagtaaataattattattagaatggtaactaagtcattaaatttttttgcagaactgaaacttgtatgttattagtttattttcttagaccagtgtaataattgactgtaaatagaaatataaatgtcactttacagttagatgtatcacagtcgtttcaggagaatttttcctatattgttaccttgattcattgtttaaaattggtaggatttgtatagatataggatagtgttttatttatactttatcataagccataatcattttaagaatactttattggatagattttagtactttttaaattctaaagttctatttttcttttcacttccccttccttccccttataagatcatttccatgtctttgttggtgatctcagcccagaaattacaactgaagatata

SEQ ID NO: 25953 - DNA, 1038 bp, Homo sapiens
acattctaaaacttattctaaaattttacttaccagagaatctcttcagttttcagagcctatttacctatattttaaaacaggtttaagaaggttggctaagattttctgctactcagcaagctagtagcagcaaggagcaatgtacatttgtagcagtaaaaagtaacttataacagggaggggatagaaaaatcataaaaagccgaagtgagacttcagaacttaggagttcagtcaaacttaatctgtgtagcttgaacaaatggttatatgatgatggggtatgtgtagctatatatccagttaggatacctagtcattaatattaaattatagtactatagtataacctgttgaagaaaatagctatgtataaaagcagtgtgattttaagtgtttgcttttttttttttactttttaattattttagagacaggatcttgctgtgttgcccaggctggattcaaactcctgggctcaagcattcctcccacctcagcctcctaaagtagctgggactacaggagctggctgtttacttttttgtttgtttgtttttgagacggagtcttgctctgtcgcccaggctggagtgcagtggcgcagtctcagcttactgcaacctccacctcccgggttcaagcaattctcctgcctcagcctcccgagtaggtgggattacaggagcctgccaccatgcctggttaatttttgtatttttttttaatagagacagggtttcaccacgttggccaagttggtctcaaactgctgacctcatgatccacctgccttggcctcccaaagtgctgggattacaggtgtgagccacctcacccagcctacttttttaaatctaaaatttacttgtggaatagaccattcattctccatggcctgataacttagatgtataaaacttggtttaagatttttttttttacataattttaaggtaatgggtgaataaagcttaaaattggcttttgtgtttcttctcccacagacagctggaaatgatccctattgttttg

SEQ ID NO: 25954 - DNA, 1096 bp, Homo sapiens
aaccccgtctctactaaaaataccaaaattagccggacatggtggcaagcgcctgtaatcccagctactcaggaggctaaggcagtagaattgtttgaacccaggaggcgaaggttgcagtgagccgagattgcaccattgcactccagcctgggcgacagagggagactgtctcaaaaatatatatttatccaattggctttgatttgttgtcttagatcttaaaatgttgtcagacctttgttctgatgctgcaaaatcatctgcatattatatagatgaaatcaacaaagagttatgttcttttattctatcacatttaatatcggtatgcctttggataaaggagaaaaaatccatgtacccatagagaaagacaggagggaaagatggggaaagatgaagagaaatttaaaaccagtctttccttaatctagatctccttacttatcccaatggtagcatttatggaaaatttgctgcctgtcagttactttaatacattgtcataaatgctcaatagaaacataaagaaggtgttattttcatttcatgtatgaggaaatgaggcaaagcaaggctgtaaaccctaattgatttatccgaatataaatcttctctgttggtttgcctgctgctactctctctctggctggtcatatgtttccctggggaaagatcattagacaaaacgttaatgattgccttggctacagaaaaaaccaggttagcctttgccactttttatcatttgtggattctgatcgctcaaaagcttagatttttattattcaaatctaaattccagtctgttcacattctgagactaatgttcacatttataaattttatgctccctggactgataatatgtatatatgcttcgattcttatttaaaaagttagttttttctgcatataaattaagtaaagcatattctttttcatttatttactcttaaatgcaagtgactttttctttttttttttttagacagagtctcactctgttgcccaggctggagtgcaatggcatgatctcagctcactgcaaactctgcctcccaggttcaagctattctcctgcctcagcctc

SEQ ID NO: 25955 - DNA, 1080 bp, Homo sapiens
gcaatatagccagactatttctcttaaaaaaaaaaaccgggtgcagtggctcacacctgtaatttcagcactttgggaggctgaagcaggcgggtcacctgaggtcaggagttggagaccagcctgaccaacatggagaaaccccgtctctactaaaaatacaaaattagctgggtgtggtcacgcatgcctgtaatcccagctactcggggaggctgaggcaggggaatcacttgaaccctggaggcggaggttgtggtgagccgagatcgtgccattgcactctatcctgggcaacaagagtgaaactctgtctcaaaaaaaaaaaaaggtaaattgtttctctttgtgtttcagatacgtcggtaacctttccagagatgtgacagaagctctaattctgcaactctttagccagattggaccttgtaaaaactgcaaaatgattatggatgtaagggtattttacttagttaactttattctttttttttttacacattacttaaagccattgcttggaaggaattcttagtttaccatggtctaaatatagtataaattattagtttactgtagtctaaatatagtcttagtttaccatattctaagttaatagggattttagtgaatttgtaatgaacctgttttgacagctgaatttaatttgttttattacatgatggaagatgacaatagaactagttatttctagatcagatgggaacatatatatgggctctttcaggtgcattgaggcatcagaaatgtttatatgtggtgtcaactggttggctaataaattcagctcttacaattaaattggaaaacaggtttaaaaataataggcatttggtacagtgaaagtatttttaactttatttttaaaggtcatcattcaagtttttcttgtatttaggcaattcctatttatgagacaatgtattaaacacacacacatacacacacacacacacacacacacacacactcattcatctaattggtgttaaccctgaatcataataggtataaaaagacatttagggaacatttaccccatttccctggagtctttgt

SEQ ID NO: 25956 - DNA, 1037 bp, Homo sapiens
tatacctatttacttgtttatgcttaaatttttttaattggttatataatctttacccttttcctttttcagatttatggacaagaagttatcatgtaagtttgttgttgttttggggttttttttaattatttaattgctttttacatgtgtcttagcaatgtttggagcaactttataaaaatttaaagcagccaggcgcgatggctcacggctgtaatcccagcactttgggaggccgaggcaggcggatcgtgagatcaggagatcaagaccatcctggctaacacggtgaaaccccgtctctactaaaaatacaaaaaaaaattagccgggtgcagtggcgggcgcctgtagtcccagttactcgggaggctgagtcaggagaatggcatgaacccaggaggcggagtttgcagtgagccaagatggcggtactgcactccagcctgggctatagagctagactccgtctcaaaaaaaaaaaatttaaagcacacaggacctctaattcacatccgttagttaagcagattacttaatcctaactagacaattttatttacctaatttctgataattaatttaacagcacttcagactttatcttatgtaagcccttcctcactttggcaaaattaacaggatttatcaaccttttttctttaaacaagctacaaaggacttagacaaggaacagttatcttgtttcttgggaatatgtaggaataacatttgttcaatttatctaaaaatctgacccacacagtacttgaaatatatgtaggggaaaaaaccatgagcgttagaggtaagcagccttcagcttgaatctcacttctgtcgtacagtagctgtataaccatgaacccagttacttaaaagctcgggcacggtggtttacacctataatcccccagcactttgggaggccaaagcgggaggatcccttgagcccaggagttcgagaccagcctgggcaacatagggagcccccatctttataaaaattttaaaaaagctctgaagtttagttc

SEQ ID NO: 25957 - DNA, 1070 bp, Homo sapiens
ctggccttgaacattcccgcgatcccgacagattcccaggtggaataaagacctgggggccccagtggctgctagaaagggctgaccaggggtcttccccttttgactaacatgtcttggaaatatggggtctgtgttatataaggaattccactctccctctgcctactgggaagatattctccatatttcttggagttcctcactggtgtagaaaatgaaatgggtttgaggacatgtaatttccatgtttttattggtgaaactaaactggttacagcaatgcttagatgtctccaccaagctgtacacctcacgccttctcctttctctgtgtctgtttcttctttcttgcctagaaaaactctgagctggaccccagccgggcctcctgccacttcagacattaatatccatctaaattcatagacaagagcccagagctgccagcctgcaagggggtgttcccaggacaggccacatggaaggtgcagatcagaacccagtccttccatctgtctctggtagccatccctcaacatcaggctggccctcccctcgctctggattgattttatagaattccctagaaatggttctgttagccccaggtggaagctgtcacctgaatgaaatcttacaggtcatatcttttgatctttttctagaaggtactaagaagacagaaacaagcaaagccgccaccacagagcccgaaacaacccagccggaaggggtggtggtcaacgggagggaggaggagcagacggcagaggaaatcctcagcaaaggcctgagccagatgaccaccagtgctgacacggatgttgatacctctaaggacaaaaccgagtcggtcaccagcggccccatgtccccagagggctcaccttccaagtctccctcaaagaagaaaaagaaattccgaaccccctccttcctgaaaaagagcaaaaagaaggagaaagtggagtcctgattcatgacacccttgggctccctcctgcctcctctctctcctccccttcccttctcccatctctgtccctgcaagcacagggctaaggagg

SEQ ID NO: 25958 - DNA, 1063 bp, Homo sapiens
cactgaggctattcttgtcaagatcattgaagatgacctccatattgccaaatctaatggcctcttctctgttcttatcttacttgacctgtcagcagcactcaacactgttgaccacttcttgaaacatttggattatctggcctggaatactgcccttttctggttttcccttacctcacttgctgttcctccttttcttctgtgcagttccttttcctccaccagacctctaagtgtgagagagctttgccctgcaccactttgtcttccttatacactctttctggtgaactcttttgggccttggctttagacttcatttttgtgctgatgaatccaaagttcctatctccccagaactctacttcattgcttctggaactttactgtacacactgatcacctggggatcctgttaaaatgtagattccagtctcatttgtctggagtggggcctgagagtttgcatttccaataagctcccagcgatgctgatgttgctggtctccggatcttactttgggtagtgaggctgaaaacctgtatatccaactgcttccctgacatttctacatgcatgtcttacaggcgtctcagaccaaccctaaatgaccctcttagagctcttgatttctttactcaaacccatttctctctgcattttccttgtgtcatcatcccagttgcacaagccaaagattttggagttgtccttggtttctctttccttcactttttcatccagtctatcagcaaattctgctggctcagtcctccaaaacatatcccaaatctttctacttggctccattataatagtagtagctgatatttattcagtacttcctgcatgtcaggctgtgttaatgacatatatttatatttataagtatttaaagtctaatcatcacaataaccctgtgaggtaggtggtattattattctcatttcttggataagaaaagtggacacataaaaggcaataaataattatttgcagatggaatacatgaataaactttataacttataactaggtaaccctacatagacctgcagt

SEQ ID NO: 25959 - DNA, 1042 bp, Homo sapiens
tttctttttcttttttcttttttctttttttttttttttgagacggagtctcactcttattgcccaagctggagtgcaatggtgcaatcttggcacaccgcaacctctgcctcccaggttcaagcgattctcctgcctcagcctcccatgtagctgggattacagggatgtgccaccacagccggctaatttttttttttttttttttgtatttttagtagagatgcggtttctccatatcggtcaggctggtctcgaactctcgacctcaagtgatccgcccgcctcggcctcccaaagtgctgggattaacagatgtgagccaccgctcctggcccaagctatttcttaaggaagataattatctccctaagaaaaattttattgtcaactgttaagacattaatgcagctttttaaaaattaattaattaattaattaatatgagatggagttttactctgtcgcccaggctggagtgcagtggcgcgatctcagctcactgcaacctctgccccccgcgttcaagtgattctcctttctcaacctccctagtagctgggattacaggcgtgcgatatcacacccaactaattttttttgtattagtagagacgggggtttcgccatgttgaccaggctggtctcgaactccggacctcaagtgacccccgcctcggcctcccaaagtacttggattacaggcgtgagccaccgcgccgggcttaaatttaatttttatttttttttttaagagacagagtctcgctatgttgcccaggctgaagtgcagtggctattcccaggaacggttctgctattgatcagcactggagttatgacctgtttggtttcagacctggacttgttcacccctccttagggaacctaatggcccccgtctccgggaggtcaccatattgatgcccaacttagtgtggacaccatatcagcatagcgcacgacagaccagaactcctgagctcaagcgatcctcccgtctcagcctccagagtagctgggacaacagtctcagcatccg

SEQ ID NO: 25960 - DNA, 1019 bp, Homo sapiens
atcacgtttctccctttccagggtactgtcttctgagagcgcacttgtctgccaaccccagtagccaggactcagcatacctggcaaacaccttcaaaactagcaaatcatgctggctatctgccccaggtagggccttagcaactggcttcaagttgagataaagtgacagtgcttttcagggatacagtttgaagatttcctgggctattgttgcttctggggtgttaggattctaataattacaacaggaccctgtgtatgtggtggggttggagagagcatctcagtacctctccaagttcatcctcactatcttgaactggggtatcttacatctctataccagtgttttgcaaccctggctgtacaaacaccaatgcaggggtcttacccctacagattctgattaattcatctggtttggggcctgggcattggtatttgtaaagttctccaggtgattctcgtgtgtagccagggttgagaaccactttaaggcctttctgcctcagtcagggaggcaagaggctgcaggtgattttgagggagaagggtcaatagagtaagggaggaagaaacaggaaactagcagagtccccggggggagagaatgtgttatcctaaagacccttggtcacagccatgcagctgggcaaacagataacgcctggtggaacaacagaagctggaccatgagaagggcagacagcagaaaatgcccagagaagggttcaatttcttctttggaaggtgatggtaagggtgtggctccagattaactggttctacagctccaggcaagggagatggaaggctgaggggagcaggtccatcagggagcagttgggggagaacctagagaggcactgtctgtacactccagggccagtgcccaaggccagatgctcctcatctattctctaaaccaccccaggatcctcttgaagcttaagctagtttagattgagcttctgtcactttcaactgaagcttgactagtaaaaactcctgaggtt

SEQ ID NO: 25961 - DNA, 1047 bp, Homo sapiens
cttataatagtttgatacatttatcacaattagtgaaccaataccaattcattgttattagctaaagtctgtactttattctgattcctttagttcttacccagtgtcccttttctattccaggatcccatctaggatttcacatcacattttttttttttaattttattttaagttccaggatacaagtgtaggacatgcaggtttgctacataggtaaacgtatgccatggtggtttgctgcacctgacaatgcattacctagatattaagccttgtatgcattagctatttatcctgatgctctcccttcccccactcctccacccctagcacatcacatttagtcatcgtatctgctgaggctcctcttgcatgtggcagtttctcaaactttccttgtttttttgttttgttttgttttctaacctttttctaggatctcctttccttgtttctgatgaccttaacacttttgaagattactgttcagttattttgtaaactgtccctcagttgagatttgtgtgatatttttcttattagactcatgttattgattttgggaagaccatagaggtaaagtgtcattttcatcacatcatatcaaggattcatactatcaacatgacttactactgttgatattaaccttgatctcccaggtgaggaggtgttgtcaggtttctccactggaaagctgttctttttttctcctccatactatcctcttttggaaggaagtcattatgcaaggcccacacttaaggaatagagagttatatcagtatggacttgtggatatttattttatgacttgcattacaatctaatactactttttttcccctcagattgttccagctttggccattaggagctctttcagttgattcttatgtccctttgacataccccgatcatttttggttttgtgttttgtgtttgttttttaagcacttcctttctttttctggcactgtaagatactccaaattcatcttctatatgagatgctccaaattcatcttctttactctttgccct

SEQ ID NO: 25962 - DNA, 1048 bp, Homo sapiens
ccacccccggggtctcctgcaatgaactcggataaccaatgtgctgtcaagcccttgcctgtttgtcctgaaccccattcaagaaaacacagacttaaagtacttagtttacagtaacttttgatgattgttgaaagttgtaaatcagaaggtagggctgtgatggtggttgtcacttgagtcatttagttactgttgtcctgttcataagcctgtgttcaccaccaccatcagactcaccatttataagtagaagagcactagggttgatctgccacctcatctttcatgaagtctattccccagcctcctttttaagaaaagatactgctaccaaaggcataggggaggcctgctgtgctggcaattagcatgagcctgcagaagtcatccttgaatctgttgtgtcttaattttatttggacagtttttttttccagcctcatcaacacttggtcttcctggtgtcttaattccctcagacaagtttatgcacttttttaaggaaatatttttcaggacactagtaagaagctcagttcacagtttggatatttcttcccacattacagaattatggaaaggaactcaaaatcagcctaggaaagtgagtcctgcttgacccatgtgactgtgtacctgaccttctgggatcttttcagctattaaaacattttactgttcccacatacccagctttgcaagttttgtagattgacctcttagggtgtgtttctttgtctttcctgcctttaacttgctggggtcttttgttgctacccctaaggaactaaactgggtgccaggagctaccttcgtgtatagagatgtagatggcagtgtggggtacaggagagccatccaggccattctcccagggatgaggaattggagagccctgaagataatagtggcttctttctgattgctactgtgctgtgtgataggcctaatagggaaaagatatgtaacttgaaacaaagttggtataaattcagtatgtggctgtgggacagaggttggaaggaaaggactagggtatggaaag

SEQ ID NO: 25963 - DNA, 1032 bp, Homo sapiens
ctcctgcctcagactccaagtagctgggattataggctcacaccaccacacccaacgaatttttgtatttttagtagaaacagggtttcaccatgttggccaggctggtctcgatattctgacctcagggaatccacccatcttggcctccccgagtgctgggattacaggcgtgagcctctgcatccagcctcaaactctgctttaatctgtggtgaacaagctggagattaaggtcctgccctgtggattttatatttgcctaagaaagacagataagagctaagtcaggagctctggggaaaggcccaggttggaattatagattcacttgaccaaggtaaacctggtgtgcctgctcctacttcacatccccagacatacttccagaacatttccttttgtatttttgtgtacaaacttccttttgagcctctctccattgtcacatgtcaacctctacttgtcttttgttgattttgaggccacttgcccatgtaagtggcaggatattatagaagaatcatgctgacctgggtctttgaattctggttctgctacctaccaactgagttcctttggtcaagctcttggacttctgagcctgtttcctaattccaaaagtggtatatgatgtgttagtccctggtgggttgcaagaaagaggcacacacatatcagctttggtgatgagggctgaatgtaaacttggatggaaagtcatctaagcagccatattgtctcttggccctagtactttcaaaacttcacagaacattaatttagcagtatttagtatttgagctctgaagacctgccctcttttgctttgttcactcaacatttgtattttccaagagagaatatctgattggattagtctgtcaccttctaaaaacagaaggcccctactagagagaattttgagctgtgccatcatgtccttggtgattgatctccctgaagttcagcctatatgccgtcctcagctgaagcactgagccctggtccagtcacttgtggccacagaag

SEQ ID NO: 25964 - DNA, 1032 bp, Homo sapiens
aatacatcaagagctttttgttagtctctgtggagtttagtcacagtatgttgaggttctactgtgtgtcccttgctcaaagagttgacattctattctgggagatataagcataaaacacttgggtttctctgtatatcaacatctggtttactgacataatcaacagttcaactgtgaggcacaaacactggaagaatagaaaaatatgtgatatagtgcttcctgtgcaccatgaacaataggtacaaatggagttcagagaagggataaatctaaggaactgatagtagtgttcaaggaggtttcctaaaggagatgggtacttaagaagggtcttgaaggatggtgggaaaaggaggaggacactttattcagtctgcctagcatgaactttggtagatttccttgattctatgtttctaagattttactctcatatttaaagatgcattgaatcagatagacctggtttccgattctgacttccttgcttaatagcagtgtgattctgagcagttgcttaaattgtcctgtgcctcaattaccttatcggtaaaataggcctgagaaatagtatcttcctcttagaatcacactaattgagactgtaccaataatgcatttaatatatacctggcccatctggcttgcaatgaatgtacattttattatcctttttcccctgtgtttctacccaatagtctcgtctctcacagaactcacactgagaggcaggaatccattctgtttcttctccaagtccaggccagagttttgaacacaggttgcccctggggaccagagattgacttcagaactcccacgcaaaacttcaatatccccaatattgccctgacactggccatttcacttcctggctcatctctgtgtgtcagaggcaatgcctgagaatttccacaggcctgttttttgactcctggctgattcttaaaagcagcaagagatcttgctgagagtcagagctaagctaagccatcaaccgccttcctcatgtggatggaccctgga

SEQ ID NO: 25965 - DNA, 1058 bp, Homo sapiens
ccttgctccctcttgccactgtctgagccaagctttagaaagtgagaccagtaacggttatcagtgttcacacatggctaggcacttgatgattgcaatcgatgttcccttcagccttctcttctctggtcttaggaatcccagaccaatcctttatttcagtattatcactatggaatgccagtgcctcttgtcgcccatagaaagcaaggccccctgatacaaacaaccacaggtacaattaagttactaagacattggttgttattttcattctctccattttttttcctttgttcctttttttttttttaagaaatagcatattggccaggggtggtggctcatgcctgtaatcccagcactttgggaggccaaggtgggcagatcacgagtttcatcatggccaatgtgatgaaaccctgtctctactaaaaatacaaaaattagttgggcatggtggcacgtgcctgtaatcccagctactcaggaggctgaggcaggagaattgcttgaaccagggagtcggaggttgcagtgagcctagatcgccactgcactccagcctggtgacagaacgagactccatctcaaaaaacaaacaaaaaaagaaatggcatattaagagtagagctgacggatcaaggcaatataaaaactggagcaagcaatgagggataaatgcaaagaagaggttctgggaacaaatgaaaacttatcaatgtaaggaacagtgtcagaagacagtgaagaaataaatcattactaatcaggttaagttggttaattaaagtgattagtaattgttataaatacatacatatacatatgcacacatgcacacacacacatattatgttctgggacccttattgagtggcctctttattctaggttgagtccctagaaattaagacaggatcaaagaattcatgaatatgcataaatgctaaactgtaaatgactttatgcttaggattaaagttttgtagctactagaataggaagcaacctgaaacattcaccttgctgatgacttgaacgctaagttgccactt

SEQ ID NO: 25966 - DNA, 1208 bp, Homo sapiens
atttacactattcatgagattggaatgatctaattgttcacgtctctgcttagtttaagtatttatgtgtataagtgacgctgaagttttcctatttcaaaagaagtttcagttaggacacacatataaacctgctttgtcttcccaaactcctcccttaatagcagcctgtgttaaatactcttgtctttcctgtagaatacttaaatgaaaaagaaactttacaaggtactcactggtaacccaggctccttatctcaagtaaatgtcatttcacttggttggtgattaaggttcgacattgcaaaatactttgtatttgtccagtgtattttatctcaatcaaatgcacaagcttagaaatggactagaatctttacaccaattataggcatgatcatgtcagcttagtattttaaaaaattgactttacagtcccatttcaggatcctgtttagattttgttggacttctgtgttatatttctgtgtaacttggagtatttgtctaaatgtgtaggacctcaggtaattttatttctctgatttcaatgtctggtacatgttctccaacttacagacacattcagatagttagaagcatcatagtttatttgttctatttctatactctgggattaatttgtttctcagtacctgccttcctgtgaagccttccctcatcatttcattccaaacgctgaactcttattatattgtctatagcatgtgtaatggtggcagatatattataaaacttacatagatatccacattaacatcagcatgtatcataaactttatcatagttattttacatatttttctcagtgttcccactgctttcgcatagtagacccgtccccacccccattactgctaaagtggcctttctgaaagacaaattaaattgatcattcctctgcttaaaactcttcaaggtctatcacctccaaggaaggtcctaagcccttgcatataagtaccttctcaggccagcccctgcctgcctttccagtttaattttctaccattctcttggtatatccacatcaaatgtgttgctgttccccaagcatgacatagcaaagtttcttccctttaggcacttatttctctggcaaacatttactcaacttttaagattcaggtcagatgcttcctcccctgtgaacctttccctgactctcccagggagggactggccca

SEQ ID NO: 25967 - DNA, 1032 bp, Homo sapiens
caaggtactatttcagcgaggtcatactatatcacattagaaacttactgttttatattagaaactgccagaatgaagaaatattatcctatattcagcacttcaggattatatgctaatttattcaggaacaaatttattttaatatattattatttaatattattcaaaattgagacatacatgttcaggattctgttataacacttgctgggtatccttggacaaatccatagccactctagtccttgaattcttcatctttaaggggatgtccttgtatttatttcacagagaaattatgaagtagtacttactggaaacgctccttacaaaatgtttaacttcctcttttgtatgatctctttttctacattcggaaaaaaatacgtattttaagtctgtttttctcttcttaattttatgtacaataatctaatctgttataaaataaatatattagaaaggagtttaaaatgtgatatagtctaatggtcagcctttaggtagacagatgcttcaagaactcagcagagtcaccttttctctgcttgcaaaccttcaatcatacagcatgcagttcctgatattcagaaagtagttctttaagccttgttccacttcttactgtcttagtaaacactaactgtggtgttccttgaccatagacaacagctcagcatctattcatataaacactcattaaacttaagggacaattttaacttacctgttcagtacttgcaacagaaaaagaaagtgtggcatgcaaagcctaaaacagtcactctctggccctttacaggaaaagtttaccactccctgctctacagcattacatgcaagaaagtgaaaactcttataaaacttttaaaggagaaaagtctccataatcaacttgttcatgtttttaggcattagaaatatatgtatatagtttaaaagaaaaggatgtagttgtatagaagtactggtagatatcattaaaattttttaaaacatcttgaggtctgagtattttttttttttttt

SEQ ID NO: 25968 - DNA, 1719 bp, Homo sapiens
ccaagattggagaatggagaaaagcaaggcaggataaacgcccacctgggagtgacacagagacagagaaacctcccccacccagggaagcagctctgcagagttggcaggatcaggggctagtctgaacccctagcacagaacactcacctcacggaagagtggccagaatgttttccacataggtcctggtcctcacttctcctcactgagcagggctgcccaacgtgggacttctgcacaaccatcctgcccctgcctgaccacttcaatcagaggcagcctggcagttaaaggaacacccacacacagaggtgaaaaagaaccaattcaagaactccagcaacacaaatgaccagaatgtcttatgtccttcaaatgattacactacttctccaacaaggttcttaatcaagttgagttggctaaaatgacagaaatagaattcagaatatggataggaacacagatgaccaagattcaggagaatggcaaaacccaatccaaggaaactaagaataataataaaatgatacagaagcagaaagacaaaatagcctatataaaaaataatataactgatctgatagagatgaaaaaccaagctgaggaaagaatcttggaactggaagactggctctgtgaaataagacaggaaaaaaataaagagaaaataataaaaagaaatgaacaaaacctccatgaaatatgggattatgtaaagaggccaaatctacaaattattggcatccctgaattggatgggaagaaacgaaacaacttggaaaatacattttaggatatcatccttgaaaactccccaaacctcactatggaggccaacagtcaagtttaggaaacacagagagcccctgaaagacagagagaaagggcaggtcatctacaaagggaaccccatcaggctaacagcaaatctctcagcagaaaccctataagccagaagagattggaggcctatattcaacattcttaaagaaaaaaacttcaaccaagaatttcatatccagccaaaccaagcttccttagtaaaggagaaataagattcttttcagataagcaaatgctgagggggtctggtatcaccagacccactttataagagatcttgaaagaagcactaaatatggaaaggaaagactgttaccaaccaatacaaaaacagacttaagtacacagactaatgacactataaagcaatcacacaaataagctggcataacaaccggctaacaacacaatgacaagatcaaatccacacatataaaaaatgtaaatgggctaaatgccccattttaaaggcacggagtggcaagctgaaaaaaaaagaaagaagactcagtggtatgctgtctacctaagacccatctcacacacagtgacacccataggctcaaaataaaaggatggaggcaaatctaccaagcaaatggaaatcagaaaaaacaggcaccgcaatcctaattttagacaaaacagactttaaaccaacaaagatcaagaaagacaaagaaggacattacacaatggtaaagggttcaattcaacaagaagacctaattatcttaagtatatatgcacccaacacaggagcacctagattcataaagcaatttcttagagatctacaaagagacctagactcctgtgcaataacaacactccactgacagtaagtaacagatcattgcagcagaaaat

SEQ ID NO: 25969 - DNA, 1034 bp, Homo sapiens
ttctttgaggtctctgcggaagagatttctttacctattcaattatataatgctttcaaatgagtcaaatgctttaactcagaaattctaatgaattttcaacaatgaactctgaaagtcagtataactatgtctttgcgatggacggttatttcttctattttatattacaaacaaagagtatttgtctgatacagattttattaagtttactctttgtgttattcctctggagtactagaggaatccattaacctttattgaatgcaaggtatactaaactttgagtggaagagatgtataagaactggcctttaaccttggtttatagtctcatagggaaacattatatacagtatcatgttctaaaactcctgaggcaaagaatgcctgcttgctaatagcctgaaaaaaagggaacctttgctgtagaaaatggagttttatatagtttatcagagacagtagacattgaataagtaattttgaataaactgaactgggtagtgagagagctttagcctggtgacagatgttaatggcattcaagagtagatcagtaaaatgcagctggagtgaggggagtggaaatcttacggtgagtgcatttgaagacaccaaagagggaaagggcatgcgtggccagatgatctagaaccatatggatcaagttagaattttggactatacccatgcctgtaatcccagcactttgggaggccaaggcaggtggatcacaaggtcaggagatcgagaccatcctggccaacatggtgaaaacctgtctccattaaaatacaaaagaaaaaaaaaatagccggacgtggtagtgcacgcctgtagtcccggcaactcgggaggccgaggcaggggaatcgcttgaacctgggaggccgagattgcgccactgcactccagcctggcgacagagcaagactccgtctcaaaaaaaaaaaaactggactataccattgcagtcatggaaagccactgaagattttaagaaatgaatgtgatgagacttgagtatttaa

SEQ ID NO: 25970 - DNA, 1050 bp, Homo sapiens
aataaaaattaaagccaacattgacatatcttaggtatcaaaggaagcatcatacttaaatatgacatcaaaaaagcaagtaataaaagaaaaataaattggacttcatcaaattaaaaactttttgtttcttttgtttgctttttttttattaaaaacttttttatttcaaaggccatgatcaagaaagtgaaagacaatccatataatgggaaataatctttgtacatcataaaactggtaagagacttctgtccagaatatataaagaactcttacaatttaataataagaagacaacccaatttaaataaaggcaagggatttgaatagacatttcttcaaggaaagcatgcaaatgtacaataagcacatgataagatgcttaccatcattagtcattagggaaatgcatatcaaagccacaatgagataccactttatacccaccaggttggctataattttttgaaaaatggaaaataacaagttgacaaaggtgtagagaaattggatgcctcattcgttgttggtgggaatgtaatatggtgctgccactgtggaaaacagtttagtgtttcctcaaaaagttaaacagaattaccatatgacccaggaatgtccttcctggacatatactgaaaattattgaaaacaagtgttcaaacaaaaacttgcacatgaacgtttatagcagcgctgttcaccatagccaaaaggtagaaaccagccagatgtctatcaactgatgaatggataaacataatgtggaacatctctacaatggaatattattcagccatcaaaagaaatgaaatactgatacatggatgaaccttgaaaaaattatgctaagtgaaagaagtcaaacacaaaaagtcatatatgattccatttatatgaaatattcagaataggcaaatccatagagacagaaagtagattagtggatgtcagggacaggggaatgaggactgactgcttaatatgggtatggatttccttttaggctgatgaaaaagttgtgaaactagatgggtaatggtggtt

SEQ ID NO: 25971 - DNA, 1078 bp, Homo sapiens
ggcatccttcctttttcccctctggtaacttcattataatgtgaagattattagaaatataaaattatagcatatttttgaaaaattaatagtttttaaaaataattaccatatctcatatatatttgtgtgtatgagaatatgaagagttagatatttggcaagtaaagtatattagtgattttctttctcctctgatacatttactgacaatataccttctttcctgctattttgtatacctccttttaatttttttaagtgaagatgtttccttcataaatttcaaatgaattggcagtttcctcattgaaagattttgcacatttgcaaatggtatcttggagtcaggtcctgataccagctttgattctgtgagtttctaccatgcgtgcttggacaggggcagggcagaactgctgggaagagccaagctttctggagaatgggttggtacctgtcagaggctctcctatcctgaacaagtttcccaagaagaagccaccttgctagtctcactgaactttgattcagtctcccagtaacaggaattggtcaaaggtggggtttggttctgcattgagtggagcaagtaccttgctttccttgccaatgcttcagaatctctggtgctggcttggatcacttagatactgaaaacctactaaaaattctggattgcaaagataagtccacaaagcgaatttccattgtgacctatgtatccattggttctgcttggccaaaattgcatgtatttcccctttttattatgtcaaagaaggacaattttaattaacagctctaaagagaggcttcttgtgtgtacatataatcaatttgtggatgcatcagcatattacaagagtctgggagcctcttgcccctctctcatgtggtagttttcctcttttctttctatcaagcagcatctgagaatttgggtttacagaccaatcctagttgccaataatgctaaatcttgaacaaattatatctcttgttactagggaaagtactgcaatatgagcttcactacataatgtgtatgtgtatgtgtatgtatgtgtatgtgtat

SEQ ID NO: 25972 - DNA, 1025 bp, Homo sapiens
acacaggtctacaagaagttcccataacattttaatccatctactgcctttatgtagataacgccttacacatctcaaaaaaaaaaaaatgattacagtcctaacttttatctttttttttttaagtaagacatttttaaaaatatgcctttccatcattactcactccagcatgccaacatttaacagattctgatttggattctgctgttttaattaaatcatatatttaatctacttctagtattacagtattaaaatttgtcctctttctttctctttaatctatttgcatttatgtgcatgaaagaaagaaaaggagagagagaaaaaaacccaaatatcaccttagcattctcaatagcatatttctaagattgaaatttagaaaaattgaaggaaatatcattgccaacacttccatttagaaaacctgacgttccaaaagctagtaagtcaatgtataggctttttaaagccttgcctttaatgttctgtgctggtagttgactctattttccttctactctattttctactccttttctggaaggagcaggtggtatggtagggtcactagtgggataatgtacatttggatgggtgaattgaggcccatgtttttgtttttgtttaaccactaatagctatgaatttgtgcaactcagctaatcccttttagaattttttcagtaatttgttatatgtaaatgggttgcactaaaatccccaattggactagatgactaggtgttacccatcaagtgtggtgaagtaggtgaggaagtgtgttctgaaaggcaatagtatgtacaaattgtgagagaaaataaagagcatactgaagaggtctcttaaattagaggactaaaactagttcattttgactaaagaatagggtgaaatgaagtggggtggtcataaggaattcatggaaagataagttattgttagatcttgcaagatgtattaagaagcatatactttattctaagaacactgagagctgtttatgttatgagagt

SEQ ID NO: 25973 - DNA, 1031 bp, Homo sapiens
tgagatgaagtgaagagaattccagaagtcaacaattcacacattttaaattgtgcaccattctgagtggtgtgatgaaatcttgactgtcccacttagggaaatgaatcatccttttgtccagtgtattcatggtctatatgctacctacctgttaatcgttggtcacttagtggccgtctcacttctcagttctgctctcttagtatggcagtacttgtgttcaagtgactcttattttacaccaataatggccccacaatgcaagggcagcgatataatattttcagtcagtggttgaccatagatgactgaaaccatggaaagtgaaatggcagataaggggaagactactatatttagagtatatgcaagcagaaagcaagcgttgggtgtttgctatcaggggctcttgtaaagtcaatggctatgtaataaggtcaataattttttactaaaagaaactttatatgtgattctttaagttgggactctctcatatagtctgccttatactgtttactttggggtaatgttagttagttagtttgtttttttgtttgagatacaggatcttgctatgttgcccagactggagtatggtggctattcacaagggcaatcatagcacactacagccttgaattcctgggtttaagcaatcctcctgccttagcctcctgagtagctaggactacaggcatctaccaccatgcctggctggataatgttggtttcacaggaaaatcaaactgtctagttaagatctgaagcactgtggtattctggtagagacattagtgtggttatgagatcagagttgccatagtacaacatgttagctaggcagtcctgaacgtcagaagaaactaaagaatatgaataaatttattttggaaacctgggtatctgaacctgaacatactagtagaaatgtattttaaaaataaaagttggctttacgtgaaattaaataaatcttggaaatgtttaatcattgtagcaaacagcaccatttcatactaaggaat

SEQ ID NO: 25974 - DNA, 1057 bp, Homo sapiens
tggatttcatcttagatctcagtatgtttatatgttttatatttggttttaaacattagagcactggatcctggcagagaaactgagatttaaacaccagcaggtgttgattgcctaataacttctagatctaacttaggctattgtatccctcatgcactaggaatattcagtctgtgtctgggtttggaatttcctaagctttctctttgcatattcaaaatgaggaagtctagattcatattccagctcaaccacttgttaccagcattaattcagtaatctgctcattcagtcagcagatatatgtgggccctactctatgcaaaataccatggttggaggctggagttaagatgagaaatcatggattttaaataggagggtgactgtattagatttgtatttttggaaggaacttgcattttgcaggagcctcagagactagttagaaggctattgcagtaatctatggtagagttgatttggtagcctcagcatatatttgtatgataattcaagccacgagggtgaatgaatcaattcatttaacctctctgagcccatcaataaactagaaatactaattcctgctatatttgtctcacattattgttataaagtcaaatgagataatatatataaaatcatttgaaacagccatggaaatgttatttattataattaattataattatttctttatgtatatgcctttatgtgttttctttcatatttctactgatttatggtctacaatgttaaacattttcagttttcagttatctgcatagttccctaaattattcaaaagattggtacattaaaaatataattaaaccaaatccaggacacatttctttgcaaggaaatgtagcaacaattgcatctttttaaatgtaatgtaatccatcatttcccaggatccatgaatctttttcacagtatgaactggatccatgaaaaggagggatagaatgcatcttatcagattctctcagatcttgatggtcaattaaatatgctttggtttaattcttttgaaagggaacacggg

SEQ ID NO: 25975 - DNA, 1055 bp, Homo sapiens
tctgagtattgtgccctcataatattatgctcaatttagcacttaattgtctgttctccttgatttgcttcagaacaggaaatacattttccacttttttgcacatacagaattattagaataaaaaaacaaaatcatatgactataaaagatatactttgtaaaatatgatgcattcataaaatacttacattttaagcaaatatacctaatgtcattttcaattatttactatataggatcataggaataaaagttgtaataaatcagaagatattgactaagtacttaacatataatccaggtactgtattaaaaatgctacataagatttatttttatttagctattataataattctgtttggcagataaggaaattgagacaaaggttaaagtcagtgttctagagcatcacatttaaagtgtatattggtttttattaaaccacacatctgtaatttttctatttatctttatatatattttttctttgcttttgctctgacactattattagtccttgccagtagaacacattaggtgtttgttggtggtgttattgttgttttgaattgggcatgcactgattaatggctacaccctttatcctttactgtaaatttgggttcaaaagacacacatatataagcattttgtaaataaagcaaaaatgtttgcctagatgacaatggaaatcaagactaaagcttagaagattcttgaccagaaagaaattctttaaatatctattatagttttcttctggtttcatataaatttagtaaattaaaaagattcattttggtttctaattgtgataccatggtatcagttttatcctctaatcataaacaaccataaaaacctggagaaaatataaaattacactattgctaagtgaaagaagggatcaatgttttggatgtctgtaagtataggatttagataagcaggataccaaagaggagagaaaagatggagaagaaactcccctaaaaaaatctttggccagacatggtgactcacgcctgtaatcccagcactttgagagg

SEQ ID NO: 25976 - DNA, 1042 bp, Homo sapiens
ctccaaacaaataacacacaatgttggaaatcacagtacgtacttgcccccgggacctccctgtctttgaattagccgttgcaggcttcttggtctttagctccttggtgatagatgaagtccactctcttcctaaggaaaaactaccttcttaaaaagtgattagggatacacacacacacacacacacacacacacacacacaggcacaaagacaaaaagtgaattttctaccctgcaatacatccctgaatgcattatgttacatattttttaaagtgtttctgttaaggacatccacttgttatttttatgtcatgtaggattatcttattgcctttatagatttctgcaattgaatgatttaccgtctttaactgttctaagatggtaacaaaacaaggaagttttatttcatgtttttgtctatgtgttttgttttattggcctactattttttgtttttacttaagttgcctttaatcttcatcttgataactactttgaaaaataatcttaggattaggaggtgacagagatctgaaaatgggaagcagtctttcaacagacaaacaggccctaactctatactctcaagaagtttgacatgaaccttttgtaaggctaattttcttttgtgcctatttttcctagttgtgagcacgcattccatctggaagtatgtaaaatctaaggattcttcattgaaacaatattctttgtgccatattgacaatatctatatttttgctattgtaaaacagatacagtgagattattaaaagaatcacattgatatgctacgttgcaggtggtaaaggaaataggaggtatcggttccctagggtacaagtaattgtgatctttccttagggtttcccttcccttcagcagttgtccatggggatccttccagtgttttttgtttatctttttaccttcctggtggaacctggctcccttgagtagcgcagggaatgagtctaatgagcataaggtttatggcttcaatagtaatgcttaaaaattctagtcctagtct

SEQ ID NO: 25977 - DNA, 1013 bp, Homo sapiens
agaatacacattcttctcatcagcacaaggaacattctccaagatagaccatatattaagccacaaaacaaatctcaacaaatttttgaaattcaaaatcacatcaagtatattcccagatcacaatggtgtaaaactagaaatcaataccaagagaaacattggaaatgatacaaatacatggaaattaaacaacatgctcctgaacaaccattggttcaatgaagaaattaatatggaaataaatgttttttggaacaaatgaaatggaaacacaacatatcacaacctgtgggacacaacaaaagcagtactaaaagggaagttcatagcaataagcacctacatcaaaaagcagaaatatttcaaataaacaatctaacaatatacctcaaggaacaggaaagcagcaacaaaccaaatccacaatatcagaaggaaataatgcagatcatagtagaactgaaaagaaaaatatgaaaagatgaatgaaacaaaaagtcggttccttgaaaaggtaaaattgataacaaccactagctagactaaccaagaagagtacagtgaagactcaaataaaattataaatgaaaacagagacattataactgataccacagaaacagaaaagatcatcagggactgttatgaacaaatatatggtaaccagtggaaaatctgtaggaaatggatgaatacttggaaatgtacaacctactaagattgaatcaggaagaaatggaaaacctgaacagaccaataacgggcagtgattgaagcagtaataaatagtatctgaacaaagaaaagcccagaaccaggtggattcaccaccaaattccaccaaacatataagaataactcataccaatcctgaaactgttccaaaaaattagggagagaattctccgtaacttattctgtaagcctagcattaccctgataccaaaaccagaaaaaggaacaacaacaaaagaaaactacagaccaatattcttgatgaaaatagatgc

SEQ ID NO: 25978 - DNA, 1007 bp, Homo sapiens
tgccattggatttagcaatttggaataagttggtgaccttggtaagagcgcttttaataaaatggtggaaggaaactcctgattgagtaggttttaaagagaatggctcctgcagagaggaatttcaaataactaatatagatactattgccactacaaggtgattgtgaagtgtgcttagtgacttgtttccaaaaagtatagggtagaatgaggaaaaaagtaaccttacagtgaagaaaactggcagacgctgccttgctcaagtgttccaggttaacatcatcagtgatgttatgttgatagtatgtacctttcatatgatttgatgagagggcactttgcctctgtgttctccctccctaaacccatgagcccagtctaagcatgggaaaacattaaacaaacaaaaattgaaagacatgctataacatagttgaccagtactccttaaaactgtcagtgtaggattcggcacagtggctcacgcctgtgatcccaacactttgggaggctgaggcgggtgaatcacgagctcaggagttcgagaccatcctggccaacatggcgaaaccccgtctctactaaaaatataaaaattagctgggcatggtggcacgtgcctgtgatcctagctactcgggaggctgagccgggagaatcgcttgaaatagggagttggaggttgcagtgagccgagattgtgccactgcactgcagcctggtggcagagcgagactccatctcaaaaacaaaaacaaaaacaaaacaaaacaaaacaaaaaactgtcagtgtaatcaaaaagaaggaaaatctgataaactgtcacagaccagagactaagaagacgtgacaactaaatgtaatgtggtatcttagatggaatccagaaatagataaagaacgttaaggaaaaactagtgacatctgaataaagtatggcgttcaattagtagtaatgcgtttatgttggttccatagttgtggcaaatgtaccatagtaatg

SEQ ID NO: 25979 - DNA, 1043 bp, Homo sapiens
gttatttgtattttctattgttatcatcaatgttaaaatagcagattttgagaaatgtgatactacctcaaattccagacctgggaccttctcttttcccttgaaataaaagagtaattggtccaattgtgtcaacccattttcttttctttatttacagggtgcccgggaaacatttgagaattactaccgaaaacagaggcgaaaacaggctcgtttggtacttcaacctccatctaacatggtaggattaccatcttcacttttctcacatttttacttttcctccttgatgtcttttgatgcgtgtgtgtgtgtgtgtgtgtgtgtgtctgtgtgtgtgtgtttactgtcattctgagaccacttttggtggatgtgacttgcagtaagaaaacatttattgattgctgtgtgtctggcactgttctaagtactagatatgtgctgtcatatttcctcttcattggtagataatattattatttttaccttatcagatatcatctagggagctgagccttaagagattaagtgactgattttaacttagtcttaatgtaacaaaacagaaacaataactttttcttctttgctttgttgcagcatgaaactttagatggctacaggaagtattttaatcaaattgtagggtaggtatatatatatatatatatatatttatttatttatttatttatttatttattgaaatttatactctttccatacatagagttgtgaatgttggaaaaataaatcaggttttccttaggaaattcttttcattttcttttttttaatccttaagacaagatttgtttttgattttctaatgatttaaaaggaacaccctgctggtttcaactttatattgctggagggcatttttgtggataaagtgagaaaaacattgaattgtaatcttattacacttgatgttttgtttctttgtttttggtaaatggaaccaaataatcagcaaaagttggcaaactttttccaaaagggccagatagtaaaatattttaggcttagtaggc

SEQ ID NO: 25980 - DNA, 1028 bp, Homo sapiens
ccattcagcctctttgtctcctccaggaacacttttttccctttctctctttctggcttattcttctgactcattcgtcaattagaagtataaacatcatttttcgaagaagctttcgttgacacttcccccacccaccacacacacacacacacacacacacacacacacacaccctactttaatccataggattctgtagttcattttaatataattgcttgtttgtcagtcttccatagtctataaattcagtaagtacaggtactgttctcagtgtgccaatcacatggtaaccacttagtatatattaagtgacttggtttttggtgagattgtgtgtattaacacaaaacttttggagcagtgtaatactaatgatataaagtaggaaaaaatccaagttttacttgcctgcttattgttttatatctatttgcttatgtcttcagcagctttttaaaaaatgttaatgattgaaagagcttggagcttaagtgaaacctctgtagctcatctagtgacctctctgtgaatagacaggcactgcaccaattactcaactggactggtcaaacatctacgtctcaaattccacctttaagtattgagttgacaaaattggcagagggaatagaataatgaaaggtgaatttagcagccactaaggaaactccagctcatttttgtaaatgggaagccagacctattagataaattggtcttgtcttttgtttttatcctattgaggaatacttgaaaagcaaagctacacccagtttagaattaagtagaagttcatgatttggtttttatatagaattccatcttatgtattttctatcatttataacaaaaaattaaatgagtatagtgtggtataattagaggaatgctttctctaaattctcaagtaagtgtgtcttggctccaaagcatattgaatatgtaatgtcacactacaataataaaggtcctttagggctgttaaccttaaaataaaaagccctttagtgtatacagaatgt

SEQ ID NO: 25981 - DNA, 1021 bp, Homo sapiens
tattccctactgttgaagtattttatattcataaattttctatagcaattaataaggcattgattatatggcagaaacaggtctcttctcccattcacagtagttcctagttttgaaaaggtacagttagtggtagaaactcagttctattttctggagaatgtatgtttattttctggacattgattttctaggtctatagggactttaaataaatactcagatatctccattagaaaaggaaggaccaaagcatgtataacttctagtgctgactcttcatagcctttttggggctgtaatttgttacctctctttctttgttatcccattctcaagtcacaaattggcattactgcatggtaaaggatagttcctcataatattaattacaaagacttttaaaaaatggattacttaatataaatgtttgtaatttttttttcttattttgtaatataattaatattactgttggaacttaagaaaaaggatttaggaatagagaaacggggattgaggagaaaataaaccatatctctcgcattcctttacattctaatgcttgtctctacttcttcccttttcattctctcatcaaccctgtatatttatcttctgttcttagcactatcctgaaactgtattttcctggaccttttggctccaactttgttgatcatttttgccttataattcttaatctctgtcttcttttacagtatgtttttctaattctctaccagcctttctgatacttgttgcctgttttggtctttgtgagcttttcttcttcttagtgtccttcattgttcccagggttttacccttgtcccacttttctttgtgtcttgcctttcttgaatgatatactctattctcatgatttggaaccctaatgacttccaaacctatatctttagtcctcagctttcccttgagctttggacttatatgtattgcctagtgaacagaacctttcggatattcacaggcagcataaactctgtatctccctgtg

SEQ ID NO: 25982 - DNA, 1044 bp, Homo sapiens
attgctgatattgaggaaaactattgatttttataggttgatctcacatctagaaaccttgctcaactcttttattggttctaatagtcatttgggttcctaagttttctgtgtagtcaatcatattgtctgtagatagtgacttttttttcctatatctcattattctttttattgtcttactgtattgactggaatcatcattgctttgttgttcagtaaggtgatagtaagactctttgtctgatttctaatcttaaagagaatatatctgacttttttcattgattaatcattatatagctttttggtaaataatttttatttagttattcctagactcttgataatcttttaagaaaacataaatgtctgttgaattttattgaattagttttctatacatattaatatatttattctttagtttatgaatatggtgaatttcattgatagattttttttgatattaatatccttgtgtttattagataaactcaatttgatgagcatgtgttactacttttataacatcctgtagaatttaactcctttttgttgttgctttattttttatttttgtgtttgtggtttggccatatgtaatacagccctgaaattttcatttttggtgtgttgtccttagatgatttgtaagtcagtgttgttttagcctcattaaaattagttggacatctcccccttttttctattttatgaaacaacttatataagagttatctgttccttgaaagttgtgtagaactcacacatgcaataatatgcatttttcctttgccacacactgactcctttcttccttaacattttgtttctgtgcttcattattttgtttactctcttcaatcgtatgtttggataagggagttcacagttgtaattaagccaatagtctatagaaaaataatcatgtttattcacatcaagttttaaggttaagagtaagcctcataattaaaaatttaatgaatttttttccctcaaataacataaggtctgtgaaatggctagtttattttgttt

SEQ ID NO: 25983 - DNA, 1106 bp, Homo sapiens
tcttactgcaacctccgcctcctgaaattaagtgatcctcccaccccagcctccagaatagctgggatcacagccacaggtgcccagcctttttttatttttttgtttttttatggttagagatggagtttctccatgttgcccaggctggtctggaactcctgagctcaagcagtcagcccatcttggcctcccaaagtgctgggattacagccaggcataagccactgctcctggcctgtaatcatttttgtgtggatagaatttttaaatttttattttttgcccatatatatatatttccccttctctttcaccttccctaaggcctataactaccgagaatgttgggcagggtcttttggcttttcttctatggcctatgaacttctgtccgcagattttatattgagtttgtgattgaacttggaagccagtaggtggtgcatatgggtcagtgctgattgtgcccaatgtggttgggtatatatctgacccttgtttattgggagaagctctctgttgcctcaggcaatggtctgatctgtggagtgcaccctggtctcagctcccagctttgccctgggggttaggggagtgatgggtaagatgggaggggtcagacccagcaggcccacctacaggtctgccagtggaaggcacaagcactagtgctgaaggagaatccagtggggggccaccaagtgcccagaggtatgcctaggtgtggagcagggaaatcttggtcccaagttctctgccttggccagcaggggcagggtgcgggaggtggaggcaacccaaactccttgtccaggagatgagtgcttgaggaacttggagatctgcttgggcctcgggtaactatgagaactttaaagatggtatagtgaccaccttcctcgatttaaataaaaaaggtcctaagtataataaccttattgatggaaatcctttgggtcatgatgaaggtgtaagaaaactatttgtctatttatttgttttaaaatatcacatgaaacacacatgcatgtgttcacataaacacattcctacggacaataacatacaaataacttttttgagattatctgaagatggtcttt

SEQ ID NO: 25984 - DNA, 1036 bp, Homo sapiens
taatatttctattatgtattgattgggtctcttgatagcttttcttaaaatactcttggagtgtgaacatagattttcatttttataacttttctacttatgtttataaactacaatgttattcatattatttttctagatttgctttgttaccagtagcttatactactggtataatatgaatggatcataatcaaaatttctttgtatggagtttttgtctatgataagttgtcttatatgcgtttgaatcacccatccttcatctcattagcaacttatatagccagtgacttctatccacaacattaccaaaatcctaagattatgcccaattgtcaaggtaatttacaggataggagacgttatgtcctggcttttctagtaaaccacactaaaggtacatgtttcctctgctaaaaattggcttccttcatcattctcccctctttggagggcagcttggagtactgcccttcactttgatgtggtctttgaatttcttcttttcattgaacttcttacagaagcctttatttgaaacagaatgtttaaatccaaatgtggctttctaacacatcattttttttttccattcaatgccatgtcaactaagttatatcagatctgttatatcatttttttttggtgcaaacatatgaggagaaaaaaagagagtaagtagacatggggagataattttagtgacccactgtgcacactcacaacaaccttttagattccccttagttttgctaggtgaaaactaattttcatgtagacactacctcacagcagatcacttggagccaaattaccagatagacctgcatatcccgttcattgccaaaatttaaaacattactcttttaacaaaaaatacttttttttttcctggaatgtgttcttaatttaagtattctgaatactcagtacatactactgactgttttgcattttgataatgtttcagaaattcagagcacttcgtaatactttgttgaagatggtagaaggaaatgaaataaattaattt

SEQ ID NO: 25985 - DNA, 1067 bp, Homo sapiens
ttgctgctattgtgtggtagggtcctttgtgctgaatactggcttttccatcagaatcaaaatgttaaagagtatgctcactatatttccattcatagcaaatgaatatgataaataacagaaacaagattctgagggatctttacagaattttgaatctggcttcatctaatagaattaaattttatcttgagttattgtgaaatttctattcttatatcttaaataactaattgtaagtagaggttggaacagtttacaagcagtgcatgtggggaggtggaggaggcactgcaatgtggttattcaaaaaagccaaggctgtatgaatagtactgctctagtttctggatgagcgaggtgataggcctgttctgttctgtttggaatacatctggaatgttatatttagctttgtgtgtcacagttcaagggaatataagtgaagcagaatatctttggggacagaaaatagaatagcattctaacaagatactactgcatatgaaggactaaagatgtttttaacctagaacacagaaaacttttgtggccatcaaaatggcttcatattttaaaagggttaaacatggaaaattgattagacttgtattgttttgacaccaagagggtaatattatattacatggatagaggaagctttgccattggagaaagattagggcacaggcagaaagtaaagggattagatttttgagtgccttaagtatatatatgtactttatatacatttctgccttagtcatttctggctcttgtaacaacgtactgtatgtagtctcaatggcttataaacaacagaaatgtattgctcacagttctggaggcttaaagtccaagatcagagtgccagcatggttgggttctggtgagggccctcttctgggttgcagactaccatcttctcatatcctcatgtggctgaaagacagagagagaggtctctggggtttcttttataaaggcattaatcctattcatgaaagctccaccctcctaaacctcatcgctgccacagactccacctcctaataccatcatattgt

SEQ ID NO: 25986 - DNA, 1095 bp, Homo sapiens
atgatgggactgcaggtgtgagccaccatgcgtggtcctaatttttccttttttctttgtgattatatattatatataaaatatatgcctattatatattatcttatataattatattacgtatattatatattactacatattttatatattagatatagagtataattatatataatttcatagaaaaaagtaaaaatctcataatgtatacaatcatttatatatacatatatttatataagatgctttatatatatatattattgatggtgaatagttttctgactagtctttaagtagcctcactaatttcctctcaagatttcagaaatgttattcttcatctattgagaaataactaatgtcagaatctgagatgttaataatcaatatacagagagctatttttggtgtaacatgagcctagcaatgttgacttgaatgatcgatatgtatcctatataatcagcagaatgtaaggtttagctttctgtgcagctgcaggagacatatttaattaatactgaagcaattatcttgacaagtaaatcaaactcaattagatttcaattagaacactaacattttctcaaatactgcatggttgccagatggttacacatttttttggcctcctttctctttcaaaggttgacgttcctgctactgtgtttattaggtataattactcaggcttttttttttttcttatttgtggggaggagggtggaatttgaaatttaatacattatatgtcgtaattcttttacctggctctgtatggttttattttatagaaatttaggaaagtaaaaatattgactaatttgtaaaattaataaatttgaaactagagatcacagattatttagaaagagaattttagaaggcatttaattcttacccctaacagaggcaggccaaattattatactggatctgtgtatcattgtgtcatatatatatcttctctttcaatcgaatggatgtctaaatctttttaggctcagtaaaaaacgtaggtattccagccgaggtgggcggatcacaaggtcaggagatcgagaccaccctggataatgagaccaccct

SEQ ID NO: 25987 - DNA, 1045 bp, Homo sapiens
agtcaaaagactgtattgttttcatattgtggatattccagtttattaattcattgtatgtttctacctacttccaaaaataatttgagatactgtctgggaaaagacagactataaatactggagttaaatgaacagtaatatggtaatgaaaatgatggtggataggaggtacgactaagcggaagaggaaataaataccaggaaactgatttaagaaatgtactatatttcgtgctttactctgaattttctgtaaaaagacatcatggtttgtataatttttatcattatctgataaaaacaagtgtgtctttttcatctggccattttaagagaatgcagaggatttttgtttatttgtttttatctaaaagtaactcctgattatggagtggggtccattataattatggtataaaataataaaactatatttgtgaaaaatgaaaatactaactctcaatagaagtatatacgcttactagaaagtgtttttgtagctctcttctctttctcagtttcttgtcaattagaatgataacattcaaatggccagttgtgtagggaaggcaagtggaagctctatgttgactctagtactatagtgtcagagtgattagttatatataatttatatttagagatgatcactgatagaggaattagttgatttgctcttccttggatccattataatatttgaaaaacttagacttcagccatgacactaagaacaattacaaattattttaacagaaagaaaaatgtttggtgcacttaacattaagaaaagtatttttggtccctgtaaattattgagctttttttggttgttacattgttaagttgattttatcctttttttttttttttttttttttttactagtttttagtttttttcccctagtttttatatagtatgtaattatctttgatttctttcctttcctgtttcttctgtctgctccaattaattcagagtagattgatccttttaagatcaagggcatatctaaattggttctttgaagatgtttctc

SEQ ID NO: 25988 - DNA, 1035 bp, Homo sapiens
tacagaaaacttgcagaaatagcacaaacaagtccatatacactttatctggattccccaaatgttagcattttttccatatttgctttctccttttattatccatatatattttcctaaacaactttagaattcattatagagataatgacatctttaggaaaaaagcattctcttatataatcacattatgaaaatcaggaaatttatatttatgttgtattcttatttaatctataaatctcatccaaattttatgaaagaaaaaaatttgcttaggtctaggagtcaatccaggatcatttgttcagagtctgtgctcttaacctctaatccgtgcagccttcccttgactggtcaccattgctaataccaccagaatcattgtttccagccaagcattgtttatattccatttctcttttgaaaccttttgttgccatttccatcagcttctaagatttaacaattttatatttcctcttttctgttttcttcggagaatattttctccaattatgaatgcacactttgctttttctgttacctcctcccaattcattttacaactttatgccattggtgaaatctcatgggattaccagtttttaaatcagaaatgttattctttctgccaaacttccttccttttcttaatgaaaatacacttccaaaaaacataatcttgacagattacaactaagaaacccacatttctttggtttacctttaaatatatttgttttaatcaggggttcctaatctgaggcccattcaaaaggttcaggaggtctattaaccccttgaagttatatgcaagataggctgggcatggtggctgacgcctgtaaatcctggcactttgggaggctgaggcgagtggatcacttgaggtcaggagttcaagaccagcttggccaacatggtgaaaccctgtctttactaaaaaatacaaaaattagctgggtgtggtggcatgtgcctgtaatcccagctacttgggaagccgaggcaggagaatcgcttgaacccagg

SEQ ID NO: 25989 - DNA, 1061 bp, Homo sapiens
gtgcaacctctgccttccaggttcaagcaattctcctgcctcagcctcccgagtagctgggactacaggcgcccgccaccacgcccggctaattttttgtctttttagtagagatggggtttcactgtcttaggcaggatggtctccatctcctgacctcgtgatctgcctgcctcggcctcccaaagtgctgggattacagacatgagccaccgcccagctgaagcgaaggttttatgatttttagtatgtatgagatatgtactccctatttgtgtaggacatattgaatatcatttggaatgttggtgctatttatatgtattgtactgggcttcttcttttgtagtcagaaggaataagactcataccaataatacttattatggcttgcatgagaagttcaagtctttgaacataaataatttagaaagtttgattaactttattgacggggtaagtaaagaattcagtatcttgcttatggttatacagaagcctcaaaacagaacactaattctttatctctgaaacccggacttttcacatactacctgtttcaaaaaatctgtaccttattcataagttgttttgcttttaggaatatcagataataattgtacattctaagatatctattgaaaatagtacttcttctctaagagagtatctctctctttctctaccccatggtactgtttgttttattctatgttaaaccttattaactcagtgaattttatatgtagcatgtttgttaagttacagaattctgtgggtggttttcctatcatgcttctttcattccttggacttaaaagactgagcctacctaaggaaatccactttaccaaacttcagacttcatataccatggaacttaaaagaagaaaaactcttggctaagcctgaatgctgagaaccagctaagtggattcctctgtccggagaaaattggggaaaaaaaagggaattatcaagctcagcaaatgtagttgttgatggaaatgctgacagactggtcctgcttggtgccactgtcgtgagaagtcagtcaatgg

SEQ ID NO: 25990 - DNA, 1065 bp, Homo sapiens
tgggttccctgtgtatatttcctgggttcccagttccatgtgactttttctggctgataagatgtgagcagaagtgatatgtatcacttttgggcttagcatttaattttgctccagagttctcttattttcccttgttcttgaaaaatggcaactccaagatgctggttgagtccctgagtcacttcagggagcatagcatacctgccaacccattatgagtatataacatgagtaagttttaaatctttgttttaagtcactgagagtttgggagtggttattactataactatccttactgatactattagggacatttggtatgtttccagtagttatgacagacagtggtacaatgaatatccttgttcttgtctccttggactcacattcaaaatttcttgagagtgttgttttttagatgttgctatgcatggaaatgatatcatagggattagttaaatatagattctgattgaataggtctggctgggatcatttctgagattctgcattttctgccacgttcctaggtgatgccaattctgttggtctagggtctatatctagaaggagatcagctggatcaaagaaagggtttacattgtctttgatcttattgttgttctctatggtgatttcccatttatcctaccattgttattttgtgggaggtcctgttattctacctcttggtaacatctatattgtcaaactttttggtttttgccagtctctcgtgattgtgaaatgatagatcactattgtgatttttattttatttttattagattattagtgaatttaggttttaggcatgtgggttttctctcatctacttcctgaccacttttaggttgtttattgttttctttttcatttataggaattatatactttggatgccttttcctgttatatattgtcttccaatgcatggcttacctattaacattatataattagtagtttttgttgcgtagaagttttaagttttggtataatcaaatttattttgtgggtttcaaaaaattttagttttagaccttcttaagttcagta

SEQ ID NO: 25991 - DNA, 1040 bp, Homo sapiens
agacctatatatagcaagctaattacagtgctaagatgaaggccacatagtcaggcagctaaaatccacatttcctttcttaggtttttgattttttttttctttaaataggaagatcagagagcctagggaggcattattaatataagttctgcatttcttaactttggaatttgcttttctgtgaggttgtcttttgtgacgttaccgtagatctctggagggaagaaatgaaaagaagttttacccagtagaatgaactatacttgccatttaacttagaagtatattgagtcaagtcagggtgtactgaatttgaaaccaagagattgtctactattgaataatatatcagcttatgcaatttatattgaggagttttcggtgattcttcacgttctccaagtgtcaaggtaaatcagtatctttacatggaaacctttcttttcctttcctttgaaagggggaaaagttaagcttatttgagattacttgaaatgtcaacggtagattctcttatgtattccaaacagctttttcaggcaagtggttattctacagttttcctacttgtcaaagcagagattgtttataatttatttgacaatctccctttatttcaaaggaaggagaatgaatccagattgctctgccttttctgaagtaagtgttcagaatcttgactggaagccaaacatgtacagtcatatgttgcttagcagagaggatatgttctaaaaaatgtgtcattaggtgattttgttgttgtgtgaacatcatagagtatacttacacaagcctagatggtatatagtctactacacacctaggctatatggtatagcctattgctactaggctgcaaacctgtacagtatgttgctgtacttaatactgtaggcagttataacatactggtaagtatttgtatatctaaatgtagaaaaggtaatgtgttgcactacaatacaaagcctatgacttcactagataatacagtgggaccaccattatatatgtggtccatcgttaactaaaac

SEQ ID NO: 25992 - DNA, 1155 bp, Homo sapiens
aagctcattggtctcagggacacattgcaggggttggcactaattcatttggggagatagctgttgctaggcaactgtccaggtctgaatgtcttatctgaaatactgtaggccagaggaaattcctgtgataatctctgtttgctctgtgtacaagtactaacaagatgtccagatatttcaggaatgcaagggagagagtttctttatggccttccccgacttcattttggttaaagttttgacataagtgactccattttgttattgttaaccgccacattattgttttaagcatttattttattttagataattattgaaaattagacttgtagttacactgaatttttgttgttgtttggttttcattttaagtaatattttattgagcatctactatgaaccagttactattctagattcttaaatgcattttattttttcagttggaaaagcaatacatgtttatttaagtaatagataaagtaatacagaaatagaaaaaattcagaattgcatcatctaaacattgtattagtttgctggttttctttctgtccttgattgttttctatagaattgaattaaaatatttgaacatatttatctttatattgaatgtgtatatagttttacatctgtttcttcacctcaccttccttcttactctcctcttcctcttccttttactcatcttccttttcctttccctcatcctttttccttcattttattatactttatataactgtggcaacctgggaaaggtaaatgcttctatgtactggcaatgtgaaaaaggttgcttcatgtgcaaaatgatgataataactattctgctaggattatatttggggaataagtgagttagtgaatataaaatgtttaacaggatttggcacgtattttaaaaatgcttacttttactactattttataattttgggctgaatttaacctttaatggtatggatgatagtgcagtaataaaatagcatagattaaattactgggtggtcaaataattggtctctgtttttgtttgcttttcatatgagttggtactataagtaacttttttctgctaatgttcttgagccatcactccaaactcagaaatatatatcacaacttttttcagaaccatgatta

SEQ ID NO: 25993 - DNA, 1046 bp, Homo sapiens
ttttgctttctttcagcattgtatttagcatacaaggttggcacatattttgttagatttatctgcaagtaattcattttctttttttaagtgattttaaatgttattgtatttttaatttcggcgtctgtgtcttcattttctattatatagaaatgcaattcatctttgtatgtttaccttgtatctttgtgatcttgctggactcatttgttagtctaggagtttttgtgtagattccttggaattttctgtgtaaacaatagtgttatctgcaaatggagagagttttagttattttccaatttttatgccttttatttccttatttcactggctagaacatctaggactatgctaagactggtaaaagtggatatctttgcctttttcctgatcttagaaggaaagcattcagtcttttctcattaagtatcatgttaactttaggtttttttgtggatgctctttatcaatttgaggaaattttcctctattcctattttctgagagtttttattgtgaaagagtgaattttgttaaatgcttataatgcatcattttatatgatcatgtgatttaaaatatttagtctggtgaaatctgttttgaacattgaatgaaccttgcctctttggaataaaccctacttggtcattgtatacacttctttttatttgtctctgagttctatttgctgatatattgttaaggatttttgatctatacttatgagagatattggtctataattttatttattttttattgtcttatgtctggttttgatagagtaatagtaacttcttaaaatgaattgagaagtagcgcctcactcctcatctattttctggaagagattttagaattcatgctaattctgcttcaaatattttgtagaattcttcaatgaagccttctaggcttgaagattttaaattgcaaattcaattgactgtgtaaattactgtgtcatattggtgagttgtagtctgtattttttgaggaattggtttatttcatttaagttgttaaatttatcgtgc

SEQ ID NO: 25994 - DNA, 1034 bp, Homo sapiens
atccctactaaaaatacaaaaattagccaggtatggtggtgcgcacctgtaatcccagctactcgggaggctgagacaggagaatcatttgaacctgggaggcagaggttgaagtgagctgagatcacaccactgcactccagcctgggggacagagcaagactctgtctcaaaaaaaagaaagaaagaaagagagagagaggaaagaaagaaagagagaggaaagaaaaaaggaaggaaagaaagagggagggagggaaggaggaaggaaggaaggaaggaaaaaggagaccagtggctttttttgttgtttggaatgcagcttcctgagcaatcccatgaataaggccattcagacacacatgcgttgtggtggcacacacctagggctctgggtggtgtgctgtcctgtcaccagctgtcaggcccctctcacacagcttctgcctgcccctcaggccctgctggagacggcgctgacgcgagtggtcctgcccatgcccatcctggtgctacccccgatcgtcatgtccatgctggagaagtgagttggggcagccaggatggagaggccaccatgggggaggagggggagagggagggggaaccggctggcccaggcaagagatgagggggtggcaggaagcccaccccagtttgtgtagagggtggaaggtgtcttgctccatcttggactttccaggtagtgccacagaatcactctgtgagaattcttggacttttactatgcaggaccctgggctaggtgccacgagggataccaggataacagtgctggccctcccctgaggagctggcagttgtgtgtgtgtgtgtgtgtgtgtgtgtgtgtgtgtgtgtgtgtgtgttttcatgtgtgctcacatgctctcagtgaatagtatgtacaggaccatttgtgaaggcagagtctgaggattcaggtaggaagactagatttgggtaggcatctgctgtggggcaaatcaccaccttactgagcctcagtttctctgctcgtaaaatacaaatag

SEQ ID NO: 25995 - DNA, 1047 bp, Homo sapiens
ggaaggagatgacactttctcagacacgttggtcatagagaggagctggtgtggcacacatgagaaagcctgtgctctcgaaagatgaaagagcctaggagatggactggagtgacgaagaccccaggcaggggctggggtggggtgtctggcatcctgggccaggtgacaggtatgaaggcgatgacagtgagtccaggacatccgcctcaccctccatcctgccctgagctatgctgcttagtcctgcagcctgtgggcaggtgtcggggtctccctgtcctgagcccttatggtctggctgggcccacacctgcatgtaccatggggtttcagaaagatggtgcttagggctggggtgggaatgaggccttcctacacttcatttattcatggagtatgtattcttctacgagcaactgccacagcatcctatcccttttctcctctgcagtgtgtgtgtatgagtgtgtaaatgtgtgtgtatgtgtgtgtgtgtgtgtatgtctctgatgctttacctctctccctctttctcatgggccagttacctgggatgactgggcagtggtactttaagcagcgacgctggagctctgcaacctcaggtgacgctgaggattaggggtgtgaggtgcagttgtggggaaagatgacatccctcactctctgatgttcctccagttctgccccctcctcccacaagccactgcagcatcatgtactttttctgtgtttttatttttttctttcaaaggtgggccttaatgtcctggttcagaaagccaacaagttcaccccagccacccgccttctcatccagaggtttgtgccgttccctgctgtaggtaagacctgcacaccacatagatgtgtgctgtgggtgggtgtgggggaccgctgggctcccagggagacagatgacccttccacacctctcctgatgcccagggggcacccagctgggagaattggtgtaatatgtttagctaaaagacaagaccatggggtcccactgaccagctctgtgctgagattctgctttca

SEQ ID NO: 25996 - DNA, 1050 bp, Homo sapiens
ctgagtagctgggattacaggtgcgcaccaccatgccctgctaatttttgtatttttagtagagacggggtttcatcatgttggtcaggctggtcttgaactcctgaccgcgggatccaccaatctcggcctcccaaagtgctgggattacaggcatgagccatcatgtccagcccatagtttactttttaattactatataatagttatagtgtgcatatattgctgtttacttatccattctacaatgaattatttgcagtttggggctatataaatgctgctgctatgaacattcttatacaagtcttttggtggggacaaaggctaccttctgttactgttgctgtctctttagcttttagacttaaaaaatcatacggttttatcctttttttctctttctccccatcagttactctggccatatgtactttagtaggttaatctctgccagtgtttttaaaatgttgaaaatatataagtgctacttaaatatgttctcctggccgggcaccgtggctcacacctgtagtctcagcactttgggaagctgaggcaggcagatctcgcttgagcccaggagtttgagaccagcctgagcaacaatgcaaaaccccatctctacaaaaaataaattagccagatgcagtggcgtgtgtgtataatcccagctacttgggaagctgaggtgggaggatcacttgagcctgggatgttgaggctgcagtgtgttgagatcgtgccactgcactccagcctgggtgacaaaataagacgttgtctcaggaaaaagagaaaggaaaaatcctccttataaaggctttctatttttttcttttttagatggagtcttgcactgtcccccaggctcactgcaacccctgcctcctgggttcaggtgattttcctgcctcagcctcctgagtagctgggattacaggcatgcaccaccatgcccagctaatgtttgtatttttagtagagacagggtttcaccatgttggtcaggctggtctcgaactcctgacctcatgatcttcccgcctc

SEQ ID NO: 25997 - DNA, 1025 bp, Homo sapiens
ctcaaggagcttacattttagttccctgaaggaggaatactctttctcacttccttgcccttatacatgctgtttcatgtgctccgattgtctttcttctcctaccccaacctcataattgctcttcctcacctggcaattatattttgctcttcaagagtcagcttagatgccaccacctctgggggttccccagtcccccaattcctcaagttaagtgtagaatcccgtgcctgcctcttgcataatgtttatttcataattgtatactctaacacctcagtcagccctgggagacaacaaactgtttgcaggccaggactggatcttgtttgtctttgtcctcaacaaacctagcacagcacctggtatagctcatggcacagggtaggtactcagtaaatagatatagaataaattcgtgtttgaatagagcttaggagagaaatctaggctagaaatgcagatttgggagactattagttaggacacttgattgcaagggacagaaattcagcctgaactactttaagtaaatttaccaattcatataactggaaagaagggaaatgaatgagtcttagacacctaggtcctcacagatgtggtgaggactttacagctcttggctcagctttcctctgagtattgccaccttgttccccaccatgcatgggctttctccatgtgatgggtggaggttgcacaaggccatagacagcttcactgtcctagcatgggatcccagagggacaagaggactactttatctttcatataaactcccaatagaggactctgttggctcagcttgaggaatgtgctcaaccctgggtcaatcactgtggccaagaagatagaaatactgtgattagccaggcctgggtcatgtgcccacctactaggattgacaacccggccacaaccacataaagtacagaggggcagctcactaaagaaaggatgagatgttgctattaccaaaaggtgaagaagacttgctgagcagatgaaaatcgtaatgc

SEQ ID NO: 25998 - DNA, 1049 bp, Homo sapiens
ttccggaagttgtgagctttgtttcggagcgggagctcttccgagacgcactgggggccggatggtgagttttccttgcgctctaacgggcaggctcgggagcgggagggtccgggcagttttagtagtgtctttgggacaacggctgcggttggtatttctcaagcggcaacgaggccagcccctgggaatgcagcacgagaatgatagagtcaggctgtcccctcaagaaatagtttagtgaggagacatgcagcggataggcgcaggattcttcagagttgtgattgggcccaaaaaggagctagtcctcagactaaaaagagccgtagtgccggggttctgggcgctgtagtaaatggactccaaatggagttgaagggagggaggagtgcgtcaggcggagatgaaaggagagagggaactacctgtccgatagggcagaatcggggagaaaggttggtgacttgagcttagagaaggccattgcggcggtagcagaagaggagaggcagggaccagatcgtagagtgtggaacaccgtgacacaaagttggggctttatcataagagcagcagaatgacaagatctgatgtacattttgaaaggatcactgtaactgctggtgacgactggattataggagggcaggaattgtgagaaaccactcagaaggctactgctgtagatgagcgatgtgacctagcgtatgggagagaagtggacgaatcaaaagtatatttagcaggtgaaaattcaggactttacggattagatataggatttgagtgacaggttgggtctcaacgatgattccaagtttctgacctgagtgagtaaattacgctaaacaagaacaaactattttgaagttttctaagggttcttccccccactcagtgttaaaaagcacgtttttttcctttcttattatgtgtactcatgttttgtgtgcttactgtagaaaattcagaacatacataacaaaatattttcttttatataaaggacaataaaaatcacctcataacctcactacccaagatgg

SEQ ID NO: 25999 - DNA, 1145 bp, Homo sapiens
caggtttgggagtgttcccctcctgctccagacaatcccataaggaggtggaggtgctggagccatagctgactggggggcagaggatcaggatgattattcaggggattcaaagcaccaagcagtgccctgtcttccccacctaatggtgggagtctaaaaccttaggtttgggctgtttttccttttgcagcatcaaattatacctcttttgagtaggttcattctgataaaagagtataaaagcctggacatacaggattgcatcctattttctctgctcttacagaatagttgcagttgtattatagtagcataacttaaagaactgtttgtcagccattttttcccaaattctaaggcatattgaggccaagcagcgttacagttaaaaaaattttatttttcttcatgggctcatagctgaaagtggcccaattctggagaatgcagccaatgatgctactctctgggatcaattccaaatttgccctgttcagtcttttcacataacacacacaccacacacacacacacacacagatacacacacacacaccccccaaaccaaacaacaacaacaacaaaacaaaatcacaaacagaaaaccaaactccctacaggaaagcaaacaagaaaatgggcatagtccaccattctattactcccccaaaagggccctcttcacaatgcaagcagagagagtgagatatggctgtgtgcaccgcagtgacttacccttcaaaccaaaaccagaagtccagatagcagtctgagatgtttctctgctctaagcttctagagtaccaacagcagcctacactgacctagaagagcgactttagggccccctgaccaacacacttgggcagctgctgggacactcgttcgcctaacctggccagggcctattgccatgctagacctggcatggttgccaaaatctgttgcagaaccccaaaagttaggttcaagtacctgatgcgcagtaagccaaacactgacacatcggtgcttcagagcagagaaaggtttattcaatttgaccaaagcatgagggtgggagaggcaaattctcaaattcagcctccctttgcacgtaaccagtggcttttatgagtaaggtaggtatatgggaagtgaga

SEQ ID NO: 26000 - DNA, 1001 bp, Homo sapiens
tgagggtgggagaagcagattctcaaatatgaccttcctttgcatgtaattgggggctttccctgatgatcaaagctgctcgtgtcccttggccagtcaaatttctggatgccatcagggaggtcagtatgacctaaggatcattgttctttaaaagaaaaacaagtacgttaatcttgcaagcagcccctgggggttaggatataaagttaatcacttgttagtgactgctctctaccaaaatgactacgtgcgagcgatcctgcctggaggaagctaaggacagagaaagaaaaataagtaaaataaacacctgatgatttttctaatataggctgggttacagtatccccactgacactgttcctttcctcaatcttcagttggggtgttgactcagtctaactacttcccgctggcaaggggcattcctagggggctgaggaatggaacttacttacctgcagttgaaaatattcacatgtcccgggacttaggcaattttgttgtaacattgttgaacagggtgtcaggagcttgagaagggcgatcttgcaatcccacatatatagtgccacagcagtataatccacagccaaggagtattcctgttcctatagtcatagctagaattaccagtaattttttccaccaagagggtactgaccggaagtattaagataatcattggtttagtgacatcatgaggttggacacagcatcagtttgtacatatcttgaagggccagggtgatgtttcctgaattgtctggaatgtacacatagcattcagttttcattatggcacaagttctccttgtgtagctgtgaagacatcaagggccatgtggttctacaaaactgcttttttcatcatagtcatctgagaggtgactaaagagatgcctttgaatgcatccttcagcacatgctgggtataatttgttaggatctcaacatgtcagataacattttttaaactaacttggggaacaaaaatg

SEQ ID NO: 26001 - DNA, 1050 bp, Homo sapiens
tttaaaatattttatgaaaatataaatttaaaataaataaaaattattgtattaatcctagtaatggcttattactttttgttttgctttaagaaaattttcagagaatccacatgtttaccagagacaccatctccctcctcctggtccccctggagaggactattcacacaggaggtattcttggaatgtgaagcccaatgccagtcgggcagcccaggatagaagaaggtggtatccttataattactccagactctcctatccagcctgttgggaatggacccagtgatacaaacctgtcctggaattctacctggagaccagagctggcctgaaaattactggtgtgacttttaattagttcaggtctaatcaggtttctttattgttcccttatgtattcaagcttaaggaaaaattgcattgctgtttacctctttgctgataaatttgcagtaattacagcattgcaggaaaaacaatctgttattccagtcttaaatttttctaaaagaagacaatattttagaactgaagcattgagaacttcccttgcaaattatttttaaaattctatcttgtttttctatgtatttctttctgactagacttgtgatatgcgtgtgtttatgtacagaaatttttagtgtttttgttatgttctgttattgacccaaaggccatctttattttctataactgttcaaaatttatattaaaatctacttaggagataatttctttagaacctagttactacctgtaattaattgtggtatttttgtgattagatattactttctttggcagtcagttgtgggatttgaccaacttcctttgactgaattgtcagatatacggtctcacacaggaatggatgaacttttagggattgtcaattgagcaagagagactgactgataaaccagattgctggtttattcaattatagtgagtaagttacctggcagggtaattgccatcaactgagtagaactatccagaaaacttgaaaacttttataaaggtgataaacagagtagaata

SEQ ID NO: 26002 - DNA, 1049 bp, Homo sapiens
ccaggttcaagcaattctcctgcctcagcctcctgagtagctgggactacaggcacccgccaccatgcccagctaattttttgtatttttagtagagatggggtttcaccatgttagacaggatggtcttgatctcctgaccctgtgatctacccgcctcagcctcccaaagtgctgggattataggcgtgagccaccgcgcctggccgataaggaattcttgctgttcagtttgaaccaggagatattattctgctctgtattttgcatttagcactggaaaatcagttacaggacagggaatatgtgacttttcagaggcaattcggaaagggacttagaaattttgattgattttaaacttaagccaagagtttgatgtggctatcaaaaaggatcttatattcttaggctacattaatgtagtatagtttttagaataaggaagattgttatttaaggagttgatatgaattataagaaaaataataaaatcctaatagagaaatagcaaaggatctgaacagataaaacgacaaaagtattttcacttggaaaatggggaagacctcagtatggttaaagtggtacattagtatgagttctccagaatgatagaaccagtaggatggatggatggatggatggatggatggatggatagatggatgggtggatgggtgggtggatgggaggaggagcttttttattcggggtatcagcttatgcacttgtgaaagctgagaagtttcatagtaggctgtctgcaaactggagaaccagggaagctggtagcattcagtccaactcagaaagcctcagaaccacggaagccagtggagtaactctcaatccaaggctgaaggcctgggaatctggtaagggttggaggacactggtatgagtcctcaagtccagaggccatgaagcctggagttctaatgtccaagagtaggagaagaaggtaaggtattccagctccaggagagaacacaatttgcctttcctctgcctttttgttgtatccaggcccccagcctattggatgg

SEQ ID NO: 26003 - DNA, 1065 bp, Homo sapiens
aatgggaagttagtgacatctgagctaagacctgaacaagcttcatgacaaactccaaactctttaacatggtctgcaagacacaagaagatctgatccctgtgtatgcctctctggccttggctttcctttaggtagcctaccctcctgcaggaccaaactccaatcatgccatgttctcttgcaaatatgactttgcatatgctttcccatttcctgaagcgcctcctctcctcacctgaccaactcttactcaatcctcaaggttctgtttagatgaacctcctgtgtgaagcctttccagatcctgacacctctaagctggattagctagtcctcctttctgcatggttggtattctgggtgagactccatcactgcaattgtcattgtgtttctccagctacaggatggggctcctccagggtagaaaacaaattacaacctaatgacctagctgaatgaataaaatacacaatatattactaatttcagttccctctgaaacctacatttgtgaaaaataaaaaataaatcttaagactgtatctggacctcaatctcctctatcagaagtaatctttctcaagggaaagaaggggggcatccttccacttatggttactgattggggtgctgatgtctcagcataagaacccacacatttaatagatgacatttactacatgccaccccaactcctctctgaataggcaggataagaacaaacagcatgaatctgtggatttgtacagtcacgctcatctctcagtccccacctccacctaacttgtgtgtgcttcttcacatctgttcgatccctgctcttcccacactccaatgaataaatgccctcccctgctcttccaggcctgtgtctaaatcctttcccccagcaagcctaaggtgccacttcttcaggacttctctagctctgaattcctaccacactggtcaggtgcgaagtggttgaatgtgtatattatcagatacctgtctgccctgagtaagccctcgcttaaaatatttggcccagatggtcaatatttagattgtaggttgttt

SEQ ID NO: 26004 - DNA, 1007 bp, Homo sapiens
ttgaccagttcccatcctgaagctttataggagcctccagccaccagtcatctcattagcatacaagatactcttagcactctggtgattccaacaagggttttaggagctgtgtgtaaagaaaaaggaagaccaaatacttatatcacaatatcatacctatatttttaaaaagagagggctggacgtggtggcttacccctgtaatcctagcactttgggatttgggatgccaaggtgggcagatcacttgaggccaaagttcagtaccagccttggcaacatagaccacatctgtacaaaaaagaaaaaaaaaagaaaaagaataaatgcctactttaaaatgttcacagaggttatttcatcattcttttggacttcagaaaactagagttgggaatcccttctccaaaagacatttacagagtttcagttttagatccatttttaattgttatttttcttctctttttaggagtttaatctgattgataggcgtgagctggcacctcttcaagaattaatagagaaacttggatcaaaagacagataaatgtttcttctagaacacagttacccccttgcttcatctattgctagaactatctcattgctatctgttatagactagtgatacaaactttaagaaaacaggataaaaagatacccattgcctgtgtctactgataaaattatcccaaaggtaggttggtgtgatagtttccgagtaagaccttaaggacacagccaaatcttaagtactgtgtgaccactcttgttgttatcacatagtcatacttggttgtaatatgtgatggttaacctgtagcttataaatttacttattattcttttactcatttactcagtcatttctttacaagaaaatgattgaatctgttttaggtgacagcacaatggacattaagaatttccatcaataatttatgaataagtttccagaacaaatttcctaataacacaatcagattggttttattctttta

SEQ ID NO: 26005 - DNA, 1024 bp, Homo sapiens
ccaccactcccagctaatttgtgcatttttagtagaaatggggttttgccatgttccccagggctggtctcaaactcctggcctcaagtgatctgcccacctcggcctcgcaaagtgctgggattaaaggtgtgagccactgcacctggccagctattagttattattaaatactttagtatgtgggtactccctgttttcatttttatgttgcatcatagtaagtctgaatgttttattataggaataaacagaaatttgagttacatttgtcttgaattgcaaacattttattttttcaattttattaataacatttatgtttcctgtttctagtttttaaatgaatttcttggaagagtttttagttgatcttttaatatttgattattttttcttgtgcttatttagtatttaaagcagcacaatttagaagtaattatctggcttgaagatgctagatttaaaaacattttgactttaataaatttcaagaaatactgaaaaagatggaactctatcactcataatattaagtccatcatatgatgggattaatgtttgctgtgtttccttccagtttcttttttttttcttataataaatgactgattttatgtgatgatagatgttatcaagatgtttgcttcttagaaaagattgtcctttctgactttgctacaagtgtaaaggaaaaaagatccctaatgagtttgtagttctatttttattataatattttaggaagaatgtttttattttatattgtgttaagttttattattcaagctttaaaagaaatgaaaataaacaggaaaattaaacttacctatggctcaaatgctttacacagtgatgttttgtataactcttgttaatccttctagctcggcaaaggtaaggggggaaagtatgcatgcctaatgtatatctctaacacctggcccccaaaacagagttttataatcttgggtccattgatgataataaattgatgaccaagaatctcagaagaatgtagtgg

SEQ ID NO: 26006 - DNA, 1066 bp, Homo sapiens
atttaatgtctggcttaatagacacctggattcttatatccgtttctgtattcagtctgttgtgatattacacatcatggagcctctggaaaacaccattgtgccctcttgagagagtaagagtgaaaagaacaattaaaatggtttgaccttacagatcctccctcagataggggattcctggaccacgttttgagaatagctcttctagaccaaaccaacttccacctgggcatattttttgttttgagtgaatattgaatacctaagtgttactttcttagaaacatgactaagaggaagatttataagtgagggagttttgtataaaattccttttacaagatagcattttaaaaaaatctatttgttttttaagaaacttggaaaatacctagttgtttttaggtacttctttagacaggagactaaaactttttatttatttattttttcgagacagggttgtccaggctggactgcagtggtaccctcacagctctctgcaaccttgaactcctagtctcaagggatccttccacttcagcgtcctgagtagctgggactacaggcgtgtgccaccatggctaactaattttttaaaattttcaatagagaccggggtctagctgtgttgcccagactggtctcaaatcctggcctcttaaagtgctgtgattataggcgtgagccactgcacctagcctaaaacattttttgaaactttccaaggcttatgtggttctctttgcatagagtatactcactcagtaaagtttatttactcaccccctgcctcttccattttattctggatctagctgaagctccctcaggaagtaccccctgactacttccaactcttcatgactttgccttttctctgtagcatttatcgttggcctttggatcctgtcttcttatatcttgtactattattgctatttttattttgagacagtgtctctgtcacccaggctggagtgcagtagcaccatcacagctcacggcaacctcagcctcctgggctcaagcagtcctctcgcctcagcctcctacatagctg

SEQ ID NO: 26007 - DNA, 1050 bp, Homo sapiens
atggcgctgcatccagttatcagctcaagcagcttgaggagcagaatgcccgcctgaaggatgccctggtgaggtagggtcttcagtgcttgcctctgatgcttactcttgtgtctccaaatgtgttagagcacccatcgccagagactctgacacgtgctttcctccttctgccttcctcacatccctgcaggatgcgggatctttcttcctcagagaagcaggagcatgtgaagctccagaagctcatggaaaagaagaaccaagagctggaagttgtgaggcaacagcgggagcgtctgcaggaggagctaagccaggcagagagcaccattgatgagctcaaggagcaggtctggggagcccagcccctcacccagaatcccccacctgactctcctatcagttgatgcctcctctttctaggtaccttccagcagcccttctccctatcctccccgtaacacaggtggatgctgctctgggtgctgaggagatggtggagatgctgacagatcggaacctgaatctggaagagaaagtgcgcgagttgagggagactgtgggagacttggtaagagaagagcagacccctgacatctgacttggacctgctgagaaaaagattgacatgtgacccttggcctttgagcagggtgtgcggtgagggacccagcctgggcttgctaccctgaccctgccttttttttttttttttttttctgagatggaatctcgctctgttgccaggctggagcgcagtggcgcaataatctcggctcactgcaacctccgcctcccaggttcaagcgattctcctgcctcagcctcccgagtagctggtactacaggcatgcgccaccatacccagctaatttttgtatttttagtagagatggggtttcaccatgttggccagcatgatctcgatctcgacctcatgatccgcctgctttgacctcccaaagtgctgggattacaggtgtgaaccaccgccgctggccgaccctgcctttctttagcccaaactatggtgtggtgtcctaggaa

SEQ ID NO: 26008 - DNA, 1058 bp, Homo sapiens
tcctgctgcagccactgaagcatcatctctgtgtccttccttttgaggttgccatggatacgcctttgcatggtggtttgaggagattgatttccattatgatcagatgatgacgtgggtttaaaaagagaaaggatggaatgctctgcttttggggagtggccggcgagctgcccaaaaggcagagcccagtacagccgatagggctgtggctttgttggctgctttggcttttgctgaagttgtgaaatggtgcatctctctctttagagcgcaggctcagggttccctgtctacagggtcctagtgccaggaacttgctggttgattcagggggaggaatcagcaggaacttcgaacagcctaagtaggacttctgataccactgagaggattgaggttcttgagtgcagggctgagtgcctcttgccttcttgcagaagttcctatattgaagataagtgaagcatatagcatagcttttcttcttgacttttagaggtctgggcccttggaggtgggcctggaagtcactggatatttctggggaaaggggacattttgagatggagtagagctgcattcagagtgggagtgggtttgtagacgtttttttagggtaatgaggagctggagaagggaaggaagtccgttgagtgtgtaggccttatctatgaaatccgcaaggcagatactgagtaggacctaggaacaaaaagctctgtgtacgttgtcttctggggtcctgtgaatatctggaatccagctttccaagcttccagtctcccagcctccatttaccactcagtaagcagaccttttcctttctgactcctgaaggacttaggtccacgtttatctcttccttactagtgctttcagagatgtatagttttgccttgctgtcagactgcctgggtttcagacaagctcctctaggagtgggaaagcagggaaagcagacagttgggttagcccaggatcaaggtttgataaggtgagacaagaggagatcaaggtatcaaaggatgctggggtgccagtaaaaacaaggtaga

SEQ ID NO: 26009 - DNA, 1160 bp, Homo sapiens
agggaatgtgagacgatttggggttctggtttggggagggccactggtagctgacccagggcatcaagtcactcacgaaggtcaagcagtgaaccggtagggaaaggaccagccccatggcatgccccatgataggccaacaagttgatttcacgctgccgctgctgttgttgcagcctgagtttagctcgtcggtggcggaaggcgcaacagcagctaaagaggatgaggacagtccagagcagccagaaccctgcaagaggcaaggagggagcaactcaggcatctttcatgcagagaaggggccctgaaggccgaaattctgaggtccaagggagggtggacacagggacctggaaatagccctcttggagacttacaccagagctcatagtagtaggtgcagcagccagtctccccgcagcagtgaccactctcacagaggtagggctggttgttcactcctgggcacagctctcgaagctgcgggcaaggaggcacttagaactaagggggattccagcccagggcactgtccacccccacctcctgcatgcacatacacaatcccaccctgtgaaccaagttcagcttggagagatgggggaagtggaggatgctgagaggagtgttgaaatatctgaagggctgtcaacgtggaagaggatttggaatagcaagaatcagtctagagaacaagacaaaagtgtggacatacaaagagggagatttcagctctgcatatatgagacttccttcacactcaagcctcactctccccaacccccctacccccatcccctcggtgctttctgttaagggagtgttttggcagaagccagaagacagtctgagataatctcagtctcagacaacgggtagcggtaggtcatttccaaagcaagttgctttcattatcctgcgcggttcactaccccccacccgcaactggatctttccacccctgggcctcaggctccctaggatagaggaggggcagtgtgagacccagagcagtgctcccaaccagatgggattgctgtggatgataaaggatggcatccagggcgcgagtctgggttccagctcttctccaaattgctccctcaagagaagacgctgccggactctgttgtgacaataggcacatagaaaaagat

SEQ ID NO: 26010 - DNA, 1034 bp, Homo sapiens
gaaagtgagaccttgttttcaggccccagagtcatttctcccactagcatccctgcctcaggagtgtgagaaggagctggcatctttgtgtcacagactacttcatcagtcgcttatctggagctgggaccaaggtgagaaggaaggggcactgggggtgacataagtcccaggttaccgcttccccaccacactatactctctcatcctcaggtttctgccaggccttgggatcagctcttgggggtcagagcagccttcccacatcctctggcactgctgaacttttgcagcagctctttcctcctctcttggatgcccttcgagagcccaggttacgacggattttctgccagcctgcaggtgagacgaggggctggggctggggacacagagcagttgaggatatctcttttctttcactctgttctgaaatctgcctcttcccaaaggtactccatgacccctaagatactcactctgctgctcaaatccccagatcctgcgcctgtcgccctaggtctctgtacccttcagaccaccttgctctggttcctgggcagagctcagcagtacttggcagcatgggacccagcttccttcctgctcctgatccaaaaggacttacctgtgagtggctggggagtagggaggggagcagcctgagctaggctgagccctcactccctgtttccacccaaagcctctgttgcatgaggcagaagctttgtatagcctggcctcagaggaaagcttagctctggaagtggagcagcagctgggcctggagatccagaagctgactgcacagatccaggtgagaacaggggcctcaacagtggcagtgtaagaccctatgttctgtgccaagtatcgggggtgggaagagtagaacatctcagtaacttggaatctccttggagtctctgctaaatgtatctttttttgctctgttcattttttgttctctttaacttttttttttttttttttttgagacagggtctcactttgtcacccaggctggagtgcag

SEQ ID NO: 26011 - DNA, 1031 bp, Homo sapiens
ggccctgctcccatggtttctgatgtaggtcactgcagggggcctgagaaattgcatttcttttttttttttttttgagagttttgctcgttacccaggctggaatgcaatggcgcaatctcggctcaccgcaacctccgcctcccaggttcaagcgattctcctgcctcagcctcccgagtagctgggattacaggcatgtgacaccacacctggctaattttgtatttttagcagaggaggcgtttctccatgttggtcaggctggtctcaaactcctgacctcaggtgatccacccatcttggcctcccaaagtgctgagattacaggcgtgagccaccgtgcccagcctgagaaattgcatttctagtaagttcctggatgatgctgatgctgctagcctagaaagcacactttgagaatccagtcccagaactctggattttgtgaatttcagcaccaattcacccacactcctctcttcctattgtgggaagcatgactatgtaggacagttgcagacaaaaagtggtttatttagcacccactatgtaccaggcacttgggaggtattttctcacactttcgctttccatcctcacaatatcccttatgaggtagggactaccctcatttttacaggtgagggaactgaggcttagatgttgacagacccatccaaggtgacccagctggtaatggtagacttcatcctgctacacagtatttaaggggcctaaaccataaacaatttttaaaaatttgggaaagtcacacataaaggagatgtttcaataccttctctctccaggtatgaacagtattgagcaagacccacagggcagcaataatcatttatcctgatgaaaggttcctctgtgaaaggtaagggggttgggggagacctaaagccttctgcagacccacatttaaatgagctgacagtcccagcaggactacagaggaaccagctaggggaagctgccaggatcttagacgtgaaattaaaaggagatcatgcttcttaccc

SEQ ID NO: 26012 - DNA, 1246 bp, Homo sapiens
cacccaggacgcgagcaggcggacagtaggacgcggggcacgccggtacctgaagtccttcagaagtgcacgccgggaccaggattccgggaggccgactcctccctgccccacgaatgccgggaattgtggtctccgccggacgcgagttgtgagacggcccaaggggccgcggggtatgctgggaccgctagcccttccggcgcgcctcaggacttcgggtcccctcaccccgggcggatgcccaaagactccgccttcccaagagcccctgcggccgggcgcgaaaatggcggcggcggcgacggccgggcgctcctgaagcagcagttatggagcttccctcagggccggggccggagcggctctttgactcgcaccggtaagagacccggcgggaagagaccgatccccgcgtgctctcggccttcggcgcctgaccacttcgcctctcgcccccaggcttccgggtgactgcttcctactgctcgtgctgctgctctacgcgccagtcgggttctgcctcctcgtcctgcgcctctttctcgggatccacgtcttcctggtcagctgcgcgctgccagacagcgtccttcgcaggttccgacgcgggcgttcggggagtgtcagagctgggtctggcccgaggccacacagtcaccacctcctgtgtccccagattcgtagtgcggaccatgtgtgcggtgctagggctcgtggcccggcaggaggactccggactccgggatcacagtgtcagggtcctcatttccaaccatgtgacacctttcgaccacaacatagtcaatttgcttaccacctgtagcaccgtgagtgagagcgaggccgagagcgccacggggcggttccctggggcccagctgaaggcccccctgtccccactcgcgttccccatggaggatactgagccttacccctaaccccgatcctctacccaacatgtcagttttttttttcattttcctcaatatttttcttcttgctttctcttctcctggttcccagcctctactcaatagtccccccagctttgtgtgctggtctcggggcttcatggagatgaatgggcggggggagttggtggagtcactcaagagattctgtgcttccacgaggcttccccccactcctctgctgctattccctgaggaagaggccaccaatggccgggaggggctcctgcgcttcaggtgggtttagcacaggtatggggcgccagctgggt

SEQ ID NO: 26013 - DNA, 1025 bp, Homo sapiens
gggattatgggaactacaagatgagctttggttggggacacagagccaaatcatatcacaccactatatgagattggggtgcatgggggaagaaaggagagaaatttctgaattagaggagtgacagtgggatggagggttagaaaggataggaggtaggatttttccggacaacggagaggaaggatccggggtgatcctcaggtttgagcctgtgtgactggaatcctcaggatactatgaacactgtagagaaaagaggaggcaggtaagctgggggaatgaacttagaacatgttgagctggagggatctctgggaagtgcaagtggagactcctcccccaataacctcagtgttctggactccaggtcagcacagtctagcttcctcctccactcctcctagttaggaccagcccaccttgatgcccagacttatctgacttgaggcagtaaataactcagcaggtctccctgaccccatgagggcatagagattagggcatcaattctgatggactgatcttgagaaccttcctgcctatgtccatctcctgtgtcttacctcacaggactagcttttgattgtctctgaaaattagtggtccctttctgaggttccgactcgtatagtccctcttgggacagaaacctctgcctccaggctggtgctagggccctaatacttatggacagaatctagagtctgaaaactggtttttaaagataacttctgagttttctatctgttgcatcagccaaggggacatcttgtggttgccgattgttgacagttttaaagctctgcaggttggctcagctctattgtatgcaaggcccagtccatccccatgcctgtgttgtcctcagggaggggccctggccctctctgcacttccagatcctacttcacattcaatatcacaccatgcgagtgactcccaggaagtatgagatgtccagcaggtatacaacacactctgcatcttgtactcactcgggacctttgatgaaagcatcttgc

SEQ ID NO: 26014 - DNA, 1046 bp, Homo sapiens
gggaaaacaagtgcaaatgacattcaatagtaaagggtggttttaaaacttttaaaaagagtttacataacaaaacttgtaggatcttctgccttaggcagtcagtgtgtcagtatttttcctgaatagttgaaacaggtgattaaggagtagaattctttttcctcaaccatgttttaaatgctgaccaatcttagaaagagcgcattccagaacgtttatttaatatactgtataatatatagggtgcattttaattttttccccaactctctgctttctatattgatcttgatgttaccaaatgtagcataatctgtatgattatctaggaatttccttgaatagtgtgatattgtgacaggccaggtttccattagcaaacagaacgatcagtttccaagaacccgttactataacgttaatgaaagtgtaagctaaacattaaaaaactggagaaactggtgcctgagtacaaaactggaatgcaaaaaccaacccattaagaacctgcctgggttttctcagcccctgaaatctgatggaataataaaagcattcttacacatacacctcattctgtcttaagattaagaaactttccaagactctcgagaaagctttccagaccctagtccctagctaaagatgagatagagattgaatgcaacactcccacttgcagttacaatcccacacgtagcacggagctttaaatatatacaagcactagaaaaaagcttagaactttgagttggtctggtgagttactctgacctcccttctttcccaattgtctgcatctcgttttcggacctcaagagcaggcagccatactttgttctctccgggaacaatatcaagtttttttcctttctccccttttccctcccttctttacccttgtttctgctatgaggaagttttttttttttttactttttaaattttttctaacatttttctgtttttaccaaaacttttctcaaaatcttgtattactcttaggatgacaatgataaaatgtaatttccatttccaaaaga

SEQ ID NO: 26015 - DNA, 1767 bp, Homo sapiens
acaatttatttggaaatattaatactttgaaagaaaactttcatgaataagagtagtatttccatattccctttaccaagatttacttgtcattaatattttgccccattggctttatcattagcccttccattttaaatatatacatacaatatgttttctcctgagtactgagaacagggtgcatatttgttaagacaaggatattatgttatataaccagagtagttagcaatttcagtaaatttatcaacacttaatctaccatccatattccacttttgccagttgattcaataatgtcctttataacattttcaatagaactattttaagaaacaaaatttaaacaatatgggaacatttgtcaaggccagcatccaaaatcattaaaattaaatgaaaaaaatcaaagcagctttttttgtatcatgaacacctaactcagtaagttacataaactcagatgctattttttggagatactgtctagaaaatgcttttttttctttgaacagaattcagaatgtttaaagaatggagtaaaatacaactgagttttaatttttaacattaaataaatgttgatatatggccacttgaggaatatgttatagataattaagtggaaagagaaacgacttcaggtcatgctttttaagaaaaatatatttgaattctacatttatggataattcagttagtatatagtatgtgacagttgaatttgtgctgtatacattgtcattgacttaaaaattaacttttactctaatgtgtagtatgccatttttatttttcaaatatgaataagaatatcattatataaataatataaatattgctaatatatgaaaaaaataaacactcattgtctttcatcctagtacaaggattaataccatcgtaggatattttcatcctggcttttttttcaaagttataatcctaataggcatgtaagttagtatactacttctgcttaatgttatctcattgcgtatttatagttgtctgttactgtagtcatcataatcttcagctaaagtttatgatagattcactggagcgatgtaacatctccttaaaattccctgtgattgaatagtttggtcatttccaatttttttatgtacaaacaaaatggatttccctaagtggattttccaacaaaggacccacagctggagtatataaaagacttgtacaaatcagtaataaaaagacagaacctaatacaaaaaaatagcaatgttggcaagcagcttaattaggtactttgcaaaacggcttgccaagtggcaaataggaatatgaaaagatgcccaacagcacattactcaatgataattaaatgagaattaaaacaacaaaatgaaatatgactgcatacccactataattgcaaacattaaaaaacaagaaaatgccaattatcgtaagtatgtagtgaaacaggatttattttatactgcaggaatgatgtaaatgggatgccactattctagaaaccgtttggttttttgtacgtagttgaacgtatggacatgaactgtactccagccattccatttctatttatatacccattagaaatgtatgaccatgcatactaaatgacatgtacaagaatttttatggcagcattatttataatagccaccaaaccagaaatcacctaagtgttccatcaatagtattcatgcaacaaaatactatatagcaatgaaattgatccaactatacccatatgtagcaacatggata

SEQ ID NO: 26016 - DNA, 1025 bp, Homo sapiens
caataaacccagcgtgagtcagcagtgtcacttgagtaacagaaaacaggtacatgggagtttctcctagtatgtgtgtgctattttgagtaagaatggcatatttggtgataatacccacagattagaccttcctgggaatattgcatttaattttcggtgtaagcatattaagtggagagtgtcttaagatagtatgggaaagagaagatgtaaaaaaaaaaaaagtatgatattcatcttaaaatctagaaaattgtcatgtggaagtggggctagttctattctatatgatcccaagaagtaaaccaagaccaaggagtggaagctgtgggagggaaaagtttgttaactctcattgttaactgaaatctaatagtccaaagttatgggcagcctcaggagataatgatcccctatcagcaaatggttttagacatggctggtggaccatttagtagaaatgtgaaaataagtctaaacatcacttgggagttcagatagattttcagactcattttttgttttttcttttttatcaacagaatctatttcaaataaatcttacgcaatccgatacgcaaacacacatacagaagtaaaactgctcctactgttgtgagcacctgcctttattcttccccaaccatccccaacatttgtccaggccatcctgggattacctccatggatatagagaacagcataaaaaccattggcatcacacaagtgcctctttaaagctgtttcaaagtatatatatatacacaaagggttgtatgtgagtctgaaagtgtgattcagaatgcttgttaaaactgtttggagaaccttattttccatcaaacaaatgatgttatttaatacttagaaaagttaatatctcacggttttaaaatatgtgaatttatgggaggtttcttttcttttttttgtttttttttttttttttgacagaaccttactctgtcacccaggctggagtgcagtggtgcaatctcagctcactgcaacctccacctcct

SEQ ID NO: 26017 - DNA, 1592 bp, Homo sapiens
aaattaaaaaaaaagcctgcagctagtttgatgtctgcccaaacagccacccagttttgtgcatgaaacccacagccctggtggggtaggcactggagggaatctcctggtctgccggttgcgaagaccgtgggaaaaacacagtatctgggctggagtgcactgttcctcctggcacggtttctcgtggcatcccttagataagggagagaattccccaaccccttgtgcttcccaggtgaggcaacacccaaccttgcttcagctcaccctctgtgggctgcacccactgtccaaccaggcccaatgagatgaactgggtacctcagttggaaatgcagaaatcaccggccttctacgtccatctcgctgggagctgtagactggagctgttcctattcggccatcttggcagcctccttacactgagggggattatttttaatacaagataaatagttgtttgtagggtgatggaaaaaatctagtacaagtgatgtcaataccaaagtggaaggacagtgttctgggaacaggatcttagactaagccaaaaggcttgggatctcatccacaaaataaacagtttgcctgaagtggtgggagtgtgggtgcctcatccataggaataggagacaagttagagcatatcggcacagatgtaggtaggtgtgtagatgctgtggtaggagcttcatagtgctgcttttctgattgcttctattttcttagcaaattaggaagtaattagctgaaagagaatgcaagggagtagaaaaaataaagtaggaaataatcatctagaaggaaaaagtccatcaactgagagagagataacggagaggggagaaggtatgaagtaatcatctaggtgagagggagagtgaatggacctgagagacagagagagagagaggctcactcaagttgtatagtgatcaagttaatgtgtttgtttttccagccactttttatctgcatggttgcaggcagagactcagtgacaaggtgaacttaactataaagagctgtagtttagccagaggagtttaacaaagcccaagaagaacaaggaaattgaagatgtatgcaaatatgtaatggtaataattggccatggaacttaaactgaataaggagggaagtagtgtttgttaaaggtcttgattatttgtatatgaaaagcaaaacaatctagtaaatacattgtgtaccactgaaatatttgtttcagactttgtagaattcctttgggatcctttgtcaacctcacagacaacaagtttaataacacattgcagagtgattcttgaagaacattccacttgtgaaaatgaagttagtaaaagcagacaggtaataatttctagagttgcgaactccatgatctatctctaaatcattataattttcttacagatcttggtttataaaagatgcagaagtgattatcagaaaactgtttgggggaaaacatatttacttttgatttatagaaactagactttttctcagactgcactgagatgaaaaaaaaattttttaaactggacttggctattttttatctttataataataagatgaaagaa

SEQ ID NO: 26018 - DNA, 1044 bp, Homo sapiens
ggtatgggtgctcctcaaatgttgattgaatcaatgaacgaactcacatttcagtaccagatgataaccttgtctggcatcatacaggtttattgtcaggatggaatgtgatcaggaatttcacttccttgccattgaatacatttcttggatttgcctgtaagacgataatagtctgttagttccagcttatctagaagtgggtctgtatgagcccaggcctggtgtgtagatggggagatcacacatgcatgagcgcacacacatctacacctgtgcattagaggtttcccaagatttagttaattagatgctgcaggctctcaggggcattgcacaggctgagtaacactaaaaggctaggggattgggaggtaagctgctgtttatcacacttctgatacactttttatgagcaccaaagatctgatgttgtaaaatcttgagctccatagaattgatccaggagatctggagttactacgagaaagcagagatcttcgttggtctgttattggagctgtgctttagggacacagacagacctgccttttctcagggtgacttctgctcctgtggaaggagaagtgaattgtctgatctttgttaagttagtgagtataagagtacttgtgcagaaccaaactttacctacaaaaagtattttatgttaacaagtagggactccagatatcctgatcataacatctgatcttataatcaaatcttctaccttctggtctgaaaacatatggtatgatatgatatgatatgatatgagcatttgttgaagatgcaatgggagggactggtaaagccaattccactagtcagaaattgtagcagggtaggaaagggtgtagcttctacacaaataccatggttgtaggtgttcagctgggagaagtggaagccaagggcaagaatgggtctcgaatgcagcactggcaagggtgggctgtgctgcacagctcagtagggacagggtctcaggccataaatccctgctgtgtccactggcctagagtcagatgcttagctgtg

SEQ ID NO: 26019 - DNA, 1044 bp, Homo sapiens
gaagagtgtctaaaagatctagttccttactccacccttagcagtcctctcaatcctcttcccacagaactggaagtgtgttcttcctagactcccaggatcatttggccctagagtgaccatctggtttagttttgttactggagtgggcttgaattattcaagtcatgtgattaacttgttattacgggtctgagatttaaaccaagatgtattctatattaagaggggttacagacaacaatgcttaatgtgtaaacacctctaaattcacaaaactctaactcctctttcccatgccacatttccgagcccattttcactcccactagaaaaatagcagctacaacatcaccttgcaaactttttttttaaaaagggaccagaaattatttagtctgtgaagctaatagagctacagatgttagggaattttgttccctctgttaagtttcaacttatggtacattacttgctgaaggtcatagtgttgcaatattgattagagttaacagccacagaaaaaactcaagtgaacactggtagatgccttccggagccctgttttatagcttatgaaaaaaggaaaagtggcctggcacggtggctcatgcctgtaatcccagcactttgggaggctgaggcgggtagatcacaaggtcaggagttcaagaccagcctggccaagatggtgaaaccccgtctctactaaaaatacaaaaattagccaggtgtggtggcaggcgcctgtaatcccagctactcaggaggctaaggcaggagaattgcttgaacccgggaggtggagcttgcagtgagctgagatcgtgccactgtactccagcctgggcaacagagtgagactctgtctcagaaaaagagaaaaaaggaaaaggatccagttgaagtggagagagaaaatacaatgaaaaatgaggaagagttcttccatgagaaagtttaaggatttcataagcacccttgaagttgaaatagtgaagttttaagagaagcataaagtaatgcaaggtctttttaaaactg

SEQ ID NO: 26020 - DNA, 1032 bp, Homo sapiens
tcttgaactcctggctttaagtgattcttccacctcagcctcccaaagtgctggaattaataggtatgagccaccacgcctggcctaatccttgatgtttgcacttgctgttatggtttttgtttgtttttctgagacagagtcttactctgttgcccaggctggagtgcagtggcctgatctcagctcactgcaacctccgcctcctgggttcaagtgattctcctgcttcagcctcccgagtagctgggaatacaggcgcctgccaccacgcccggctaatttttatgtttttagtagaggcagggtttcaccatgttggccaggctggtcttgaactccccacctcaagtgatccatccgcctcggcctctcaaaatgctgggattacaggtgtaagccaccacgcccagccggttttttcttttgtttttccctttttaaccccattctctaccttatgcaactggtgccctgtggtcaactcagacttctcattcatgccctcagctccttaaacccctcatcctcaaactctaccagctttgcaagcttccaagcctgaattgcctgactcagtttatccctgtgtgtatctgcttggggtgtagaatataacaactaaaaatgatagaagtgtacagattgtggctgttatgaatctagggcattcaactgcggttggacctcagtgccattgagcaatctttgtctttggtcagaaccctcttctataaacattcaccacttggttccaactgcttactcacccacgtgcctaatagataacctcacctcctaattcacagagggaggaaagttcaaaatgcaggaactttcacttcccactgtgagcctccaagggagtgtgtacatctgcatcctgctgcctcatgcatggagatagcctttctgttcaacctgtcatctgttatgatcccacttcatcccatcaatgggatcttactccttcagccacccccttggcacctgtactttcagctgctcagcctctactggtccgttgccctc

SEQ ID NO: 26021 - DNA, 1293 bp, Homo sapiens
tcacagatttttaaaataaatatgatttgaagtagtgtgatctttcacacaatcatactcagtaggaactttttgaaatagggcaagtttatgtttcatgcgagaaaacatgaaggagggttttggttttggtctgcagtttttccaaagggcttttatgagatacatttcccacaaagtccattttgcctttgttgcctaaaacagacaaaatagacttagatttattaatagaaactatactctctgccaattttacctcagtgtatttaatggtcctttaatctgatataagatgccaagggtatttgataaaaattcttcttccatgccatgtcaggagttaatacaaatgaagaaattccgtgggttcccctgggataagtgagggtagtgtcttggacaacactattgtttgaaggtttatcttttctaatcatgctctaccgcattgtagagagcctaaagagagttgtttctgagctgatctcagggaaatacaaataacttgggagatgagggaaataagatgaattctgtgctgtcaaggcagtaagtctgaagaaaggaccatgcttcttatattatcttccaccttgcttaaaacagcccatagctttgagttgacattttcattcttggcggatagcctactttatgaaggtaaggaatgaactcctacccttcttgggtcattctctgtactgatgcgttagtcttataatactttgcaccaacctgaggaatcttctaggcttctctagcatcccctaagactgtggctatttcacgtctctctccctgcctgccttccttttcccttcctttcccctcctcatgttttctggttgtgcccatctgtaccagctcctttccatccaccttcgtatgcacccagatttttctgttcccatctgtcctatttgttattcatcccgctgctcaacttctccagtatgttgcttcccttaagttgccattcattctcttcatgacttttactaactcacttcggtctctgtctgtcaactaaacttttctaaaggttaccagttatccaatcaccaaatccatggctttttctcaaagcttagtcttgtccttggcagaactggacactattgaccatccaaatggaaattcccctttcttggtgtctctgacaaatggtcctttgccttatcttgtgctggtggtgaagaggccctcaaagccaggcctctctattcctttgactgtctcctcagccattaacccattcttcatcctcggagtgagtgattcccaagtctt

SEQ ID NO: 26022 - DNA, 1076 bp, Homo sapiens
tgaatgggaaagagtggaagagggaggggagccaggatctcacatgcctgccccaccctttctgccctcaggtggagagtgtgactgcaggatccccactcaccaaccagttctatctggctgctccccgaggtgcctgctacggggctgaccatgacctgggccgcctgcacccttgtgtgatggcctccttgagggcccagagccccatccccaacctctatctgacaggtatactcactgccccatgttgtcaggacctgagaccctgggcccctgtcgcccaacgtcctctgttcctgccctcaggccctgctgtcccctgcagcctcccatcccctgagcagggctgcctgggcaggctgtggcccctgtctgattggagccagctctgggtggccctcatgtggagggaagagcaccaaggccccaccctcccctgggcctgcctgggtgcacgctcaggggcctctgctcttgcctcctaggccaggatatcttcacctgtggactggtcggggccctgcaaggtgccctgctgtgcagcagcgccatcctgaagcggaacttgtactcagaccttaagaatcttgattctaggatccgggcacagaagaaaaagaattagttccatcagggaggagtcagaggaatttgcccaatggctggggcatctcccttgacttacccataatgtctttctgcattagttccttgcacgtataaagcactctaatttggttctgatgcctgaagagaggcctagtttaaatcacaattccgaatctggggcaatggaatcactgcttccagctggggcaggtgagatctttacgccttttataacatgccatccctactaataggatattgacttggatagcttgatgtctcatgacgagcggcgctctgcatccctcacccatgcctcctaactcagtgatcaaagcgaatattccatctgtggatagaacccctggcagtgttgtcagctcaacctggtgggttcagttctgtcctgaggcttctgctctcattcatttagtgctacgctgcacagttctacactgtcaagg

SEQ ID NO: 26023 - DNA, 1030 bp, Homo sapiens
caggtgggtacagagctagggaaagtaagcccaagcagttgtaggatagtgtgaaagcacctgaagatactcactcactgtgcattttcccaggggcctgccctgcctgagtctaggtagctggactccaaggtctgagaaatgggcacaggcagagagagatccatgggggccgtgggcctttctcttcatcccagagctcacagaccctcagccaagctcttgtgcctgcaggtgtcagtgtgaagaaggggcatgagctggtgaacatctattgccccatcgtggtctccaacgcaggactgttcaacacctatgaacacctactgccggggaacgcccgctgcctgccaggtaaaaggcgggtctgcactgcccctcttgcaggttccccaatgtgtccccttctggagccaacctgctccgtgtgggtcatgcttctcctcttcttggccggccctctgattgtccttaagcaacaaggtgagaacgctacctctaacatcatcctaaccctagcatttaatgttggggaaactgaggcccatacagattaattacagtcctgaggccactcagctgaaaggggcagggctgagcagagtagctggtctgatttgaaagctccgctcctcccacccttctgggctgagggggcttccagagaagaggcctcaggaagagaagcaggagagcaggcagcccacagggagcagagccgccgagccaacgcagctaagaggtcccgccaccttcatgtaactggatctgaggaagggaggccgctgggaagaggggaccagtaacccagcaggggtgagagagaggggcccagatgaaggactcaggatggggcgggagctggagagcatggagtagctccggatatggtatggcggaaaccttgactggtgcaggagctagagagcaggggaaggagccctgaccccagagggtgggcccgggagctgctccctgaggagccggggaaggggacagcagagcgggctggggggtaaagcgaggtcct

SEQ ID NO: 26024 - DNA, 1031 bp, Homo sapiens
atcctctaccagactgtataaagagtggtgtacccttccagctgggagatggagggtcacttggggggagattcccatatatgcctgtgtgggaggagtgaggaccaggtgccttctaagggctttagctgaaattcttctggtgaaacaggagtttgaacttggtcggctttttcctgtttttcagcttcctgatgacttgtatctcacttcgaaatctgatattaggccgtccttccctggagcagctggcccaggaggtgacttatgcaaacttgagaccctttgaggcagttggagaactgaatccctcaaacacggattcttcacattctaatcctcctgagtcaaatcctgatcctgtccactcagagttctgaagggggccagatgttgggtgcagatgtagaagcagccagtcacagacccattctatgcaatggacatttatttgaaaaaaattctcaaaagttttttttttttttttgggggggcggggttctaaagctgtttttaactccgagattacaacttagaggaaccaaggaaataaagcaaataagatttaacaacccaagattaagaggccaggaagaggttagacgcaatgtgaaactgtcctcctaggataaggtttaaagtggctttttgggggctgggtgccgtggctcacgcctgtaatcccagcattttgggaggctgaggtgggcagatcacttgaggccaggagttcgagaccagcctggccaacatggcaaaaccccttctctactaaaaatacaaaaattagccagacgtggtggtgggtgcctgtaatccaactacccaggaggctgaggcatgagaatcgcttgggcccaggaggtggaggttgcagtgagccgagatcgagccactgcactcctgggcaacagagcaagacttcgtctcaaaataaataaataaagtggctcttggggaaaagcaatttaatgtaccacgatgaatagctaactgttcccaagtgtttgctatgtgcaacacaccgcgtg

SEQ ID NO: 26025 - DNA, 1046 bp, Homo sapiens
cttggaacataggatttcactgcaagtctggctttttagtctggaaatacatttgaggtctgttttcgcacagctggatcacctgtttcctggttttattacacaattcagaaggctagaagaggagtttgggggcttggcacctgaaaatttagaccgcattcttattaagtaaaggaagaggtagggaggccgaggcgggcggatcatgaaatcaggagatccagaccgtcctggctaacacagaaaccccgtctctactaaaaatacaaaaaattagctgggcatggtgacatgtgcctgtagtccatcccagctactcgggaggccgaggcaagagaatcacctaaacctggaaggcggaggttgcagtgagccgagatcacaccactgcacttcaggctgggcagcagagcgagactccatctcaaaaaaaaaaaaaaaaggaagaggtaaaaggcaaggcagcatttaataagtacctgttgtatccttttaagtgtttgttgtggtaatcctcacaaagaccgggactgatggaaactccttgctattaaactttttttcttgaggaattttgcttttcaagtgcatatacactattaatattttttacccaagagagcattctaagctaatttatgcagtgtgactgtattaagcattaagcttccttcagagctggcctatcggagatgctactgccctctctacagatgtgtctgaaatgcctgcccaaggatggcccttagccagttaacagctttatagcccatcctcattgcttactgccacccctcagctggggtccaaggcagtactattcagtttattcaccagacctgcctccagacatctacttctttcaaaaattagtgttttccatcaaggagcatgttccagagcatttcccagagatgtcccaaagaacactgtccggtgctgtggcgtacagtggcaacagcattagactaagtggaacatcccagcaggctgctttagaatccgctcatttgactagatacgatgtaattggctgtctttaa

SEQ ID NO: 26026 - DNA, 1065 bp, Homo sapiens
aaagtgcttttagatcttacgtatattaattcattgagtctttatacaacctcataagaaagcttctgtctgtttcacagtcaggaaacaggcacagagaggttaaacaacttgcccaagatctcagctagtaaatggcagagcctggatttgaacccaggcagagctctatccacccttctgctttccagtactttttgctagacaaatgtgcattgtgtacctactgtgtgacaggattgtgctggcctcagagcagggatgcaaaggtaaataagtccttgattggcagcacaccaaatgcttacactggtccgggcgcggtgattcatgcctgtgatcctagcagtttgggaggccgaggtgggcggatcccttgaggccaggagttcgaaattaacctggacaacatggtgaaaccccatctctactaaaaatacaaaaattagccaggcatgatggcaggcggctgtaatcccagctacttgggaggctgaggaaggagaattgcttgaacctgggaggcagaggttgcggtgagccgagatttagccactgcactccagcctgggcaacagagcaagactccgtctcaaaaaaaaaaaaaaaaaaaccacttacactggacccataagaagattggggcagctgggtgcagtggctcacgcctgtaatcccagcactttgggaggccaaggtgggtggatcacctgaggtcaggagtttgagaccagcctggccaacatggtaaaaccccatctctactaaaaatatgaaaattagctggatgtggtggcacttgcctgtaatcccagctactcgggaggctgaggcaggagaatcgcttgaacctgggagcggaagttgcagtgagccgagattgcaccactgcactccagcctgggcgacagagtgagacttcgtctcaaaaaaaagaagactggggctttcctaaccgtatattttcctgcagcatctctatggacagggccttcagcagcaccccccctcttctttcttactgtggttcatccttccagatgtctctgcccacccacgcaaccc

SEQ ID NO: 26027 - DNA, 1050 bp, Homo sapiens
catagcattcctcccctggcccctccaaatctcatgtcctctcatttcaaaaccaatcgtgccttctcaacactcacccaaagtcttagctcatttcagcattaacccaaaagtccaccgaccaaagtctcatctgagacaagccaagtcccttctgcctatgggcctataaaatcaaaagcaagttagatacaataggggtacaggcattgggatagccattccaaatgggagaaattggccaaaacaaaggggctacaggcaccatgcaagtccgaaatccagtggagcagtcaatttttttttttttttgagacagagtctctctccgttgcacaggctggagtgcaatggcgtgcgatctcagctcactgcaacctccgcctcctgggttcaagtgattctcctgcctcagtctcccaagtagctgggattacaggtgtgtgccaccacatccggctaatttttttttgtatttttagtagagatggggtttcaccatgttggccaggctggtcttgaactcctgacctcaagtgatccacctcggcctcccaaagtgctaggattacaggtgtgagctactacacctggcccaaatcttaaagttccaaaatgatctcctttgactccatgtctctcatccaggtcatgctgatacaagaggtaagtttccatggtcttgggcagctctgcccctgtggctttgcaggttacgccctccctcctagccactttcatgggctggtgttgagtgtctacagcttttccaggcacacggtacaagctgtcagtggatctaccattctggggtctggaggacggtggccctcttctcacagctccactaggtagtgccccagtagggactctgtgtggctgctctgaccccacatttcccttctgcactgccctaacagaggttctccatgaggtccccgcccctgcagcaaacttttgcctgggcatccaggtgtttccatacatcttctgaaatctaggcagaggttcccaaacctcagttcttgactaggctgccaaggcttgggg

SEQ ID NO: 26028 - DNA, 1044 bp, Homo sapiens
cgtgctgggtgtcacagagaggaaggagactcatctcctgccctctggtgtttagctgccctcccccgggcttatggctgctaatccttttccacggaaggatacagctgctgaaactgtggaagaggaatccatttctgctgcatgaaggggcacagacttgaatacagtcaggacaggttgtggtttcacttgtgtaatcctgagagcttgacagcttcgaggagtgtctaacattgctagtaacagagcctagaagcacctgaattccagctgtcacttggagaaggagagattcatacgaactgcgagagcatataaccagcatgtcttgagtcttttacccatgtgcctgttatatggatgctgctgtttttgtaagatgaaatgacccttggatattctgggttatgatcagcatttcttcgtctaggcgagaaaagaaacaggtgagataggaaggcatgaaggggctcatggaagagagagggctgacaggcagaaattttgagagctcacatttacgactatttggacagttcttataattttggcataaattgtaaattgttgcatgttatcaaaatagattggtgatgaacgttaaggatatatccgtggcagaataagaacacactctttgttctttggtttgctcctctagttcttccctgcttgccttgtgggactatttgcagcaatgaggggaatttatctagcaggttggcctcgggaggcaatgaatgaaaagaggttggtgagtcctctgtgggagtccattccaggtcctggagggctgaggtgggtgtcttggagccagcagtttctgggagaagggataaagctcaccttccacaccctcctggctcctgaggagcgatttaatccgcactgcctgtggacacgatggaggactgagatcactcccgaagggcatgctccgtggttttagtctgctgggaagctctggcagaagtaaaacaactgggaatatacacatgttaatgatgctccaagctgcctaactgctgaggaaggaaaagc

SEQ ID NO: 26029 - DNA, 1039 bp, Homo sapiens
gggtttcaccatgttggccaggctagtctcgaactcctaatctcaggtgatccgcctgcctcagcctcccaaagtgctgggtttacaggcgtgagctactgtgccggccagagctatgagttctttcagaatcctcagatgccattagctagccactgtttggacatccttctcaccttgccctttggggtgatatccatacctacttgcttgcttctaacagtttttttatttgttttgtagagacgggttttggtttattgctcaggctggtttcaaactcctaggctcaagcggtcctcccactgtggcctcccaaagtgctgggtggtgtgagccaccgtgcctggccagttaattttttttagtgtctcttttttgggttctcaccagaaacactatcagcattcccacagatattcctgtgagtctttgaaacattttctatcctgcattgagtaagaataaaaccgaggaaggggtgaagcaccttgtctcatccccagtctggaacttgaaccttcttttctcttcactttgccctacccccaaataatatgtacaaatgtctgtatccattgagcactaactccctattccttccacctccccagcccctggcaaccactgttctacgttctgtctctacgaatttgacttctctaggtccctcatacaagtggaaaagtacagcatgtctttttgtgaccggcttatttcacttagcataatgtcctcaaggttcatccatgctgtagcatgtgtcagaattgccttcttgcttgaggctgctgatacctcctcatgtgtatataccgtattttgtttaatcactcatctgttggtggacacttgggttgcctccacctcttggctgttgcaaataacgctgtgaacatggatatacagatatctgaggccaggccaggcgttcacacctgtaatcccaatacgttgggaggccgaggcgggcagatcatctgaggtcaggattcgagaccaccctggccaacatggcaaaaccccatctctactaaaa

SEQ ID NO: 26030 - DNA, 1051 bp, Homo sapiens
agtccacaaagagtccccatcaagacttcttccctgagtcaagtacagcgtagcatagtcctccacccacccaacctctctgcctggccagggtcctggccctgccactgtgtggcgaggtgtccttctagaccacatcagccccaaggctgggagcagtcgctccagggccgcagcagttcactcccacacatagaacccaggtcactgctggggcgattgaacaggttgcctggcttttctctgctgtcagtttggtgtggaggcctatgttctgccccatacaccccacaggccctgcttatgggaaggaacacaggcctccagcccagaggactgtgccgccctgttcttggccgtccacgtttcctctccctctagcaccagcaatacatttccctggcatggacagaaaagacagagaggacttatacaaaggctttgtaaaaccagaggctagcttctatctttgtctactgttatttcagctcagggcgggtaattaacatcattggaactagctattaggaaagaaaaaaaacttggttttttttacaacaattttttcccttggtttgcagtttctgcatttggatttgagaacccagggcggggattttcttggcacagtcaggtcttgggtccctcttcctgtgctttcttgtctgaggccttagggggaagagctcagcctctgcagcctcctccacctctgcccctggcctgcctctgctgtgacctccttccagagctagctgctggccctgtggccaggagaagcagaggggagaagcctttatgcagaagctgtgctagccttggtctggggtggggaggctgctgctgtgaccttaggggtagggttggggatcaagggaggctttgtcaagggagagtgaccatgttgctccctacatccatgcaataggacccagcctgcacctcctaggcctacactggggaaagcctgacagaaatcagtacctcctaacggggtctgccaggttcaccaaggcatgggcacagaggaatatgacagttttgaggcagg

SEQ ID NO: 26031 - DNA, 1043 bp, Homo sapiens
atgaggggctggcctacaccagggaaaatgctaggtctctcctgctccgtgagttcacctgctagctcactcaagcacaagcgggtgtggactatctttagaatgctgcctggtcttgattcttaattcacccagaaggagagtataaaaaactaggagccaagttcaggaggagaaaggaagagatactcagtattctacaagataacccttccttctcatccccacctgcaactgggtttgatcaaaaatatttggaacaatatttgacaccatcttcttctaagaaagcaagtcctggcacttttttttttaatttttgggaatgaaactttgcaagtaagtggtgcatgtaaagatgaagactgaagggaaggaggcctgggttctgggactggacagagtagatgccagtagacgggttgggttgggtggcagtggatggagggtggtggctggatgggagaaggggttagaagggtggggcatggatggatggatgggttggtgggtggatggatggattcactgagcactagatattggagttaatctttttcttccttgcccacaaaccacagggagagcaggagggtgatgaggaagaggaggggcacattgtggatgctgaagctgaggagggggacgccgatgcctctgatgccaaacgcaaggagaagcaggaggaggaggtgagagaccctgtgtggggtgaaggagctgtggtcccagcccccttccctgttaacctggagggattatctcccggcacccaggccacacctctgtgtcatgaacccacaaggaaccctgaagcagcacctgcctgcccagcatacctctctcttgagaagatggggttcatagggtgggaatttggcacaggtccactccagggctgccttttagatgtggccatccctggacttaaatcggactcaaggatccagacaggcttctggcaagaaaaagtcaggctgcctctggtttttacaatgaaaatatacctctctctcctcccacaaaccagtctcctgctgtca

SEQ ID NO: 26032 - DNA, 1032 bp, Homo sapiens
aggcacagttacgaggttgaagctcgccacttcaggaagaccttgtaactagaagctcccatgtccggtcacaggtctttgtcaaggatacttgacctcaagtcagcgtgggtgggtgtggggagtaggggatataaaacacatggagagagagtgtgagtgtgtgtgtatgtctctgtggtatagtccctgaagggaagaaaaaaaactgctggtctgtatatgcttgcctctgttatattaaaaaataataataatatatatagagagaaaatactagtttcacatatgccctacttttttccatgaaggattctaggcgggtcacagtagagggacttgcacaacgagggtcacacatggagtagagggtgggtgactcccacaggaggcatcacccgcagcccggcattggtggccttgccctctgcaggtgatcatcagggaaggggagctgctctgcggagtgctggacaaggcgcactatgggagctccgcctacggcctggtccactgctgctatgagatctatggaggcgagaccagcggcaaggttctaacctgcctggcccgcctcttcaccgcctacctgcagctctacagaggcttcaccttgggtaagtgccgggctcgctgccctggggcagtgacccgtcagcgcagccgcctggccatctcccaggcccaggacagagagagccgtccacactgaagatttccaaggcttctgtgtgttcccagtggagaagtctttccaggtccccagtgcaccacgctttattacagggtcttaacagatagtccattcacccccaaaactgccaggtttcttttcctttgtagaccatatgcttcatgtgtgctacattacacagctagaaattcttttctgtgtcctctcgggaaggagctgggaagtaaccaggctcctcctacaaaggcgccctcacttggccacccctctcctccacagccagtgcttattcccgttcacagtgcagaatggcaccctcgtgcccatttccattctgt

SEQ ID NO: 26033 - DNA, 1035 bp, Homo sapiens
ctattaaattttctaattgtttatgattggtgtctagaaatacaattaattttgtatattgtccttatattcgacaagctttatgaattcagttattagatctctgtccttcaagttcttttaaactataaaagtaaacaagtttattgataaagataaaaggaaaaactccctccctccccaaccccactctccatatacacacatactctcatagaaaataaataagaatgaggccaggcatggtggattatgcctattatcccagcactttgggaggccaaggtgggtggatcacatgaggctagaagtttgacaccagcctggccaatatggcaaaaccccgtctctactaaaaatataaaaattagccaggggtggtagtgtacatttgtaatcccagctactcagaaggctgaggcacgaaaatcacttgaacgtgggaggcagaggttgcattgagctgagattgcaccactgcactccagcctgggcgacagaacgagactctgtttcaaaaaaaataaaagaaataataaaatcatatcataccttccctgggactgttcaggagaaccatgaaccacaattaaatctgacattcaaccacctgataaatctgatatttacaaccacctgtttgaccatgacatcctggtacctgaagcatgcattttcctgatggccaggcacatggacctcagatttggctggtctttaagatggcttactctgaacgagccaccaagtcctccaaagggaactccattatatcagacagtctgctttttcattgggaccacactaacacactctaaatatggcaagaagttcatttaaatgttttcataggctatgctgacaaatgtttttgtaattgtcttgtgactgatttcattcactggatgtactgggggctcattctgtgtctgtacatgtagatctgcctcgttctttttaacccctcctgtgttgtattcagtgatatgggtataccacagatgacttaactgtccctctattagtggatgttcc

SEQ ID NO: 26034 - DNA, 1021 bp, Homo sapiens
ctgaaagacacactacttacttgtcttaggtaatcatcttaaatgcctggtccctacctcctgaatggcagtcccaagcctcgttttctcatgtaacctgggtattgctggtagatggcatcccagagtgatcttgcttagtgtgagaaaccaagcccaatctattcctcacacaccagtatgatatttgtaaaaagaagtcagtatatatttacctataaaaatacttatttatccataattcaacttatatgaacttttctggtaaaaaacaggtagataaagatatttattataatgttacttataatagcaaaatatggaaatcaatccagatgtccaattatgagaatatggttaagtgaattaggaatcatccttaatggaatatcacatagccatgaaaaatggtgatcaggcaaaagctacatagcaacatgcagacatgctgatgagatgatactaaaagggcaaagtagtgtgcaaaataaatccacactgaagattacagttgtgtaaaatacgtgtatagacaaaaaggcctggaaaacaatatataaaagtgataggagttgttaatgtgatgggattatgggtaatgttttcttttactttgcttttttttttttttaggttttatacaatagccatatggtttttattactatagaaatgagattaagggccagagggaatccaggcctgataatatgctacccttgagattgatttttgtggtcaagttgcaggcttggggataaagaattgataaatcccattgcagaaagagtacctgtttctgatttattgcactttgattctcctccttggctccaggaattgaggaagctcagataggaaaacgaggatacttaacacccaccagtgcccgcgaacacctttctgccctgtggaagaatgaaggtgctgtatcaggctaaagaaatagccttgatcttctctaggcttttatttcctggactcattaaccctgccttattacttcttttaagttgtagtg

SEQ ID NO: 26035 - DNA, 1023 bp, Homo sapiens
tgggttttttctctcttcaatcacaactgtcctcctgcacaggaccgggcgatccgttgtccgaaaggaacacaacagcaagttgactatcacgtttccagccatggtgcacaggacagctggccagaaggactctgagcccctgggtgagcaggctgggtctggagaggagctccatgtgaggccagcagatgtgtcctaaaccctgggaatacctggttctcctcaccacgtgtttctctgctgcatttgggaggggccagcagaggcacagtgtgcaggcctctcaggcctgaggggaccctggcaagcgcccagctcaggcctctcacatgggagagctgatgggaggggctgttttatgaggcagtgccccacaggcgcctcttgccttaggtggtcgtttttctgaaaggtttttcaggaagaaattaagaaatttacctgacaaatattttgaaacattttactgtaaaacaagtgtggatctattttggaataaaatgtaggcgaataatttttaagaaaaactgcaagaattcagcaaaacatgagcgcctcctgcaggctactcctggctgtccacccagatccccccaggtagaattctttcctcagctctgccctacccaagctctgcttgggaaaaattttgagataacttaatactcccactttttaatttttatagtcataggcttatttaaaaatgttttttggtttttattctgaagtggtcagaagattaaatagagtattccaagagaagcactgagagcggtacctgctgtgtaatatgtgctatgtaaatgttaactgttcatttcttattatgtcatcagtgttccagggtagaaaatgcataacctggctgggcacggtagctcacacctgtaatcccagtactttgggaggctgaggcaggcagatcacttgaggtctggagttcaagaccggcctggccaacgtggtgaaaccccatctctgctaaaaacacaaaaattagccaggcgtggtggcggg

SEQ ID NO: 26036 - DNA, 1009 bp, Homo sapiens
ttaggtcattgatcaattttgagttgacttttgtagaggggagcagtggagatctagtttcattcttctgcatatggatatctagttttcccagcatcatttattaaaggcactgtccttttccccagtgtatgttcttggcaccttttgcaaaaatcagttggctgtagatatgcagattaatttttgggttccctgttttcattggcctttgtttctgttttcatgccagtatcctactgttttggttactacagctttgtagtatattttgaattctggtagtgtgatgcctccagctttgttctttttactcaagattgctttggccattcagggtcttttatggttctatacaaatgttacaatttttttttttctgtttctgcaaagaatgtcattggtattttgatagggattgtactgaatctgtaaattgctttgggtagtgtagtaattttaacaatattaattattctgatctataagtatgggatgtttttccatttgtatcctctccagtttctttcgtcactgttttgcagttttccaagagtctttcacatccttggttaaatttattcctaggtatttttttggtagctattataaacgggattgccttcttgatttctttttcagctaattcattgtttgtgtataaaagtgctactgattttttttatcctgcaactttactgagtttgtttatgagttctaagaggtttttggtagagtctaggtttttctatatatgagattatgtcggctgggtgcagtggctcacacctgtaatcccagcactttgggaggccgaggcaggtggatcacaaggtcaggagatcgagaccatcctagctaacacgaagaaaccccatctctactaaaaatacaaaaaaattagctgggggtggtggcaggcgcctgtagtcccagctactccggaggctgaggcaggagaatggcgtgaacccaggaggcagagcttgcagtgagccaagatcgcgcc

SEQ ID NO: 26037 - DNA, 1055 bp, Homo sapiens
gctttaaccgcagctatccctccagagtccctgacccgtggggtgtacagtgaagagacccttagagcccgtttctatgctgttcaaaaactggcccgaagggtagcaatgattgatgaaaccagaaatagcttgtaccagtacttcctctcctacctacagtccctgctcctattcccacctcagcaactgaagccgcccccagagctctgccctgaggatataaacacatttaaattactgtcatatgcttcctattgcattgagcatggtgatctggagctagcagcaaagtttgtcaatcagctgaagggggaatccagacgagtggcacaggactggctgaaggaagcccgaatgaccctagaaacgaaacagatagtggaaatcctgacagcatatgccagcgccgtaggaataggaaccactcaggtgcagccagagtgaggtttaggaagattttcataaagtcatatttcatgtcaaaggaaatcagcagtgatagatgaagggttcgcagcgagagtcccggacttgtctagaaatgagcaggtttacaagtactgttctaaatgttaacacctgttgcatttatattctttccatttgctatcatgtcagtgaacgccaggagtgctttctttgcaacttgtgtaacattttctgttttttcaggttttactgatgaggcttgtgaggccaatcaaaataatgtttgtgatctctactactgttgattttgccctcggagcaaactgaataaagcaacaagatgaaaactgagtatcttatcccttttcaaaaagtacagttctggccaggtgcagtagctcacgcctgtaatcccagcactttgggaggctgaggcgggtggatcacctgaggttgggagttcgagaccagcctgaccaacatggagaaacccatctctactaaaaatacaaaattaagctgggcgtggtggcgaatgcctgtaatcccagctactcgggaggctgaggcaggagaatcgcttgaacctgggaggtggaggttgcagtgagtcaggatcgcac

SEQ ID NO: 26038 - DNA, 1027 bp, Homo sapiens
caagccatcctcccacctcagcctcctgagtagctaggactgcaggcatgcaccaccacacccagctaacttttgtatttttttttctgtagagacaggctatattacccaggctggtctcaaactcctgggctcaagcaatccacccgcctttgcctcccaaagtgatgggattacaggagtgagccaccatgcctggccactagttcaccaattaaaatgttaatctcatccaaaaacacagtccaagttgacacataaaatgaaccatcacagatagtatctaccttattctttgcccaggctggaatgcagtggtgcaatctcggctcactgcaacctccgcctcctgggttctagcaattctcctgcctcagtctctcgagtaactgggactgcaggcacgtgccactgtgcccagctaatattttgtatttttagtagagacagggtttcaccatattagccgggatggtctcgatctcctgacgtcgtgatctgcccgccttgggctcccaaagtgctgggattacaggcttaagtcactgcacccgacacagtatctgccttattctttatgtttgggcttatcatccttgcattccttagatgtgggtattcagtaaatgtgctttagaactctggtccctctgtttttgttttcttcttttattcctcagacctaacaccatctttcttctcttagtcccaatactgcatcaccaggcccagcctttttgaagtggtcattgagtttggaggacatgggctttccgcctagcctagccttctctcaaactacaaacctggaagtggtcatttacatatggagtagtctttcctgcttataacttgaaagaagaagaagaaacattattattcttgaggatcaaccgctccagcttacttaagaccaagtttgataacccagctagtttaggattgaacttgtgtgtggacatgagctatcatcttctagaattccttctttctgttaggattatgaaacattatgttactcagtgat

SEQ ID NO: 26039 - DNA, 1059 bp, Homo sapiens
tgggtcccagcctttccattcataaaacaaagaggttgagggctagctaggtagcaaacttctcagtataagaaacagatggaatccagagaagctgggagaggagaaggaaacaaaggagaggtgatggcccaacaacttagcagaaagacattttaaaaggatctctagccttagtaacatagcaagaccttgtctctacacaccaaaaaaaaaaaaaagaaaagaaaagaaaaaccagccaggcatggtggtacatgcctgtagtcccagctactcagggtgtagggagcctgaggcgggaggatcacttgagcccaggtggttgaggctgcagtgagctgtgattgtgccactgcactccagcctgggtgacggagcaagactctgtctcagaataaaagaaaataaaataatttctgatattcttttaatccatttgcttttctgtgatataaacttgctctgtgtcccagaattttaagcaaaattggctgttcacactaaaaaagaaaaaaaaagcagaagaagaaggatggtagctaaatgctctctggggttcccgtctgaactgatgtctgtcactctgagtagtcattggcagtgtgctgctaggtgccagaggaacacaggatctgtgccttgattcccagacctaaaggcaaaacttagatccatttaccataataaaaataagtatgtttgttgacacataatttacaagtatgctttatgtcagatgttgcattgaaagtctgcatacattatttctcttaaccctgactgtagccccatggggtaggtactattatttccattttacagataagcaatcagaggtttagaaagggtaaggaatttgcccagctcttttttctttttttggagacagggtctcactttgtcatccaggctggagtgcagtggcatgatcagcactcactgcagcctcaaactcctgttgttcagttcttaaacattacatattagagccgtgaagcaaattcaaatctgtctgattttacagctcttgtgttgtctttgcctaagtgttgctgc

SEQ ID NO: 26040 - DNA, 1063 bp, Homo sapiens
gtagggttttcagaaatatattttgtcactctcaagtgatagtttgctaagagttttcataatgaatgatattatattttatctaacactttcattgagacaatgtgatttctttttggtctttagtctaagtggtaaattgcattaattaattttaccattaaaccaaacttgccttcctggataaacccaatttggtcatgaagttgttttttcttttttctagttaaaatgatcctggaggcgatttgctaatatttaggattttttttaagctatgtttgtgagtggtattggctatgttatttttgtatggttttggtatcaagattgtgctagcctcataaactaagctgggggtgtctcatctttttctgtactctgagatagtgtgtgtaatattggatgtctttcttaaatggttagtagaatttgccagtaaactgctcagagccaggggctttttcaacaggaagattttaaactactgattcaatgtatttaatagttataggtttatttgatcttttcagatcaatattattttaggacttaattcatttctgtaatttttcaaatttatttagttaacaatattgcttctgcaccctattccttctcccctcttcttctagcactctcattagacatgtgttagatgttcctactctgtctttcaagtctcttcattttggccgggtgcggtgtctcacacctgtaatcccagcacttctttgggaggccaaggtgggcagatcacctgaggtcaggagttcaagaccagcctggtcaacatggcaaaaccccatctctacaaaatagaaaaattagccagacttggtggcgggcacctgtaatcccagctactcaggaggctgaggcaggagaatcgcttgaacccaggaggcggaggttgccgtgagccgagatcgtgccattgcactccagcctgggcaacaagagtgaaactttctcaaaaagtctcttcatttcttatttctgatttatttttctgtcactgctgcattatgaataattgtgtgcacatctgtctcctcagcca

SEQ ID NO: 26041 - DNA, 1074 bp, Homo sapiens
gctgcctcctccctttcccctcccccttccgactcccgggcgacccccattaggttaaagtacacagagaataagcgagtgatccctccgccataggcctattctttccatttgttgcctcacagtatgcaaaaaaaaagtcccgcgaaatcggttatcaactttggggcccggaggaaaattgctgtggcgcatagataagactgaatggcgagaccctgagctataagtgcctactggattgttcttcaaccgcgtaggctgtcgaccgaagatgagccttccacttggcggaagaatctcacaggaaagggtgagggcggtgcagggttagcgggggagggcagggaagagaacgtgcggtttcaggcgtactcagctagagggaggagcgatagtgctctggaggctcgtgcgcaggcgcctcgccgagcttaggctgctgggcgaaatggctgcgggaggcgcaggcgcacgtggtactgatcgtggaacgtctaaagtccgccattttgaaggataaatgaagaaaggcgtggagttactggataatgacgttcattaaatttagagcaaaagagacctttaaatacaatgtataatgagatttttttttctccaaagtgggattgagaaggtattcagatacttacaaagaaatttaaagtagttgaaggccataatgaatgatggaagagatgaaagagaaggtgactttgaaggacaaaggagtttagaggtgattgtgtgctctggacctgaagtattttgattgaatgaaaaagaaatggaatgaagaaattgaagatatgttcataaaggctagtgtttgacattacatcacatttaatccttaagaagaactcatgcctcccattttacaagcgtggaaacgtataatcagagaatgtttggaaacatataagggattatagatgcaaatcaactctggatgttgattttcaatatacatattctgaatgtgattttaagtttttaaagttagtaacaagaattaaattggatttataatctgtagaccatttaaaggaagggggctgctaaatgagaaga

SEQ ID NO: 26042 - DNA, 1074 bp, Homo sapiens; identical to SEQ ID NO: 26041

SEQ ID NO: 26043 - DNA, 1074 bp, Homo sapiens; identical to SEQ ID NO: 26041

SEQ ID NO: 26044 - DNA, 1049 bp, Homo sapiens
gggttcagcataaattctgttctgttttatgatttatcagactcaagtgctgagaaaccttgttgatgtaataaaatggtaatggaaggagtttagttatagcagtgtcactcagttttttgagcttctgagtcatgtactaaaaagcacatagtaatttagcataaaattgacttttaatgattaattgactcataactcaggttttccttcagtgtttttgaaacgtgaagaattggaaaacagttcacttgcataataatttggtaatcattagagtaatttactactttctcaacacctccaccagcatttccagtccaccctatgtttagtgcttcagaaatttttgcctgtcaggaaactaccatggtaataagagacataggttaggggaatgtttttcttttgtaaaatggaaaagcattatttttaaagggaaaaagggaaagatgagttctcatgacacagacagagtagtttttgaaatgactacctgtgaaagatgaaaattttctgatgctcttaaagctaactgtgcacttggacctcttcaaatctttgtgtacctagacagtaccgtactctttccgaggttttatataaagtgctgcttacagcctgccctcggctacgaatctttgaataacttaaaactcctgtgcactgtgaataaaaagaggtgaaattaaaaaaaagtaaaatttgaccctaaagctctgtctttgaaaatggctttttaaattttgtgtctgtaataaatgtggagttaatacaaaattcttaaattagattgagttaggagtttcggcttttctcctcattccttttctaaaaattttcccaggtcaatgagtggtcattgaagataagaaaggaaatgagagttgttgacaggcaaataaggggtaagttatcattttatgtcttctatttttcaccctcttggtatattttgcttcagttcataaaaataaactgcatttatatatcataagacatagtttattcctatatcagttatttatagctgtctgactgattttgct

SEQ ID NO: 26045 - DNA, 1029 bp, Homo sapiens
agaagcaccgttttggactcatggatttttatatatttagtgtgttatagttctaaccattattctgtttgatactgaaaaacttatacatttggtcagtgggagctatttcaagccagttcctatctgcttttagcataactttactaatctttgaatacttccttgttttctagcatatatcctggtatgatttgtgaattcctagcctgagacctgaaatcggccatttctccaagatgcagtggtttcttttagcgggaatgctatttagataccaaaatttgagtgagcctgatgcttcttgctattcgagtatccctgcttctaagcctttttatggaacagaactgggaaacatgttctttaaaaaatcatgaaggtgtttatagactaagttgctttgaaccaaccctttgccaaaaataactaaaagagctaaacaaaaagtgtaactatttgaaatcactgaaagctaccagggcagtgagaaattgcaaaatcaagatctcagcaaagagggaagctcagttacatgaacccaatcatttgggactaccttccccctaaagagatcctctaattcctaatgcagtgggtgacaaatagaatttgagtagagtttttgacaaaccctgtggttggggagtataaaaattggagttcatggccgggcatggtggctcacacctgtaatcccagcactttgggaggccgaggtgggcagatcccctgaggtcagttgtttgagaccagcctggccaacatggtgaaaccccgtgcctactaagaatacaaaaagtagctgggcgtggtggcaggcatctatagtcccagctacttgggaggctgaggcaggagaattgcttgaacctgggaggcagaggttgcagtgagccgagatgggtgacagagagagactccatctcaaaaaaaaaaaaaaaattggagttcataagcagatattcagggcttgtggttgggactctgaaagaataccccttagcaataatagtgacctggaagtag

SEQ ID NO: 26046 - DNA, 1029 bp, Homo sapiens; identical to SEQ ID NO: 26045

SEQ ID NO: 26047 - DNA, 1029 bp, Homo sapiens; identical to SEQ ID NO: 26045

SEQ ID NO: 26048 - DNA, 1029 bp, Homo sapiens; identical to SEQ ID NO: 26045

SEQ ID NO: 26049 - DNA, 1029 bp, Homo sapiens; identical to SEQ ID NO: 26045

SEQ ID NO: 26050 - DNA, 1033 bp, Homo sapiens
gctaccttgggcctattttataagggcattaattccattcctaagggacctaataacctctcaaaaggcaccgcctcctgatactgtcactttgaggattaggatttcaacatacgaatttggggacatgcaccaacattcataccacagcagatcgtacagtgaaaacctgtataatcaaatgttgatagcactttgctattatttgatatatatttttcagctcggtcagtttgaaatagattataaatataacacattttgcaacatttcatattgcatctctggaatatatggaaattctgtataacaaaaataccttcatatcattgaatatctagtccatatttaaattttcccaggtgttcccagtatgtcttttataactttttaaaacttaggattcagcgaggtttgtgtttggctgttacttgattttatttaaaaatctgtttggggtcgggcgcggtggctcacgcctataattccagcactttgggaggccgaggcgggtggaacatgaggtcgggagattgagatcatcctggccaacatggcgaaaccccatctctactaaaaatacaaaaattagctgggcgtggtggcgtgcacctataatcccagctactcgggaggctgaggcaggagaattgctttaaccagggagtcggaggttgcagtgagcctagattgtgccactgcactccaggctggcgacagagcaagactccatctcaataaataaataaataaatatcccctgctttctacttatagcattgtaagaataaagactcgtttgtaaaatagagcatttgttttgtagaatgttccttgttatggttttgtctatgtcttgtggttatcgctttttttttttttcctccaacttttaagttcaagggtgtatgtgcaggatgtgccggtttgttacataggtaaacatgtgccatggtggtttgccgcgcacatcatcccatcacctaggtattaagcccagtatccattagctgttcttcctgatgctgttcct

SEQ ID NO: 26051 - DNA, 1075 bp, Homo sapiens
gggtgaggtgctaaagaaatttgtcagggaagataaattgtttgcattacagcctagctgtttatttacagtttcctctcttgtagatattgcaggagaagaggctgggtccgatccacactcattatgtctgttccacaaacaagtacttcaaaagggaaagtcatgcttaaagaatacagtggacgcaagattgaagtagagcacatttttaaatggataactgctcatgcagcttctcggatcaaaaccatttataatgctgaacacttgaaagaagaatggaataaaagtgatcagtattggttaaaaatatacctatttgcaaaccttgaccagcccccagctttcttctctgcactaagtataaagtttactggaagagttgagtttatttttgttaatgtagaaaattgggacaacaagagttatatgacagatattggcatatataatatgccatcatacatacttagaactcctgaaggaatttacaggtatggaaaccacacaggcgaatttatatcccttcaggccatggattcatttttgcgctcattacaacccgaggtaaatgatctgtttgttttgagcttggttctagttaatcttatggcttggatggacttatttattacacaaggagctaccataaagcgatttgtggttctcataagcactttagggacatataattctctattaattatttcctggctacctgtgttgggctttttacagctaccttacttagatagcttttatgaatatagcttaaaattgttgagatattccaatacaaccacactggcttcatgggtaagggcagactggatgttttactcttcacacccagccctgtttctcagtacataccttggtcatggtttactaattgattactttgagaagaagagaaggcgcaacaacaacaatgatgaagtcaatgccaataacttagaatggttatcaagtctgtgggactggtacaccagctacctcttccacccgattgcttcttttcagaactttcctgtagaatctgattgggacgaagaccctgacttattcttgg

SEQ ID NO: 26052 - DNA, 1022 bp, Homo sapiens
tctattagtaatgttatattttttaggaaagagaggaagtgatgaaaaataaattttttccattactaaaatattgaagaactagaagctatctcagtgatcaacagtagcagaaccagacaatcccctatacccaagttgctgaaagcttctggggcaaaccacaccactgagtagggtagtatttccacagattgatgattttcattttctattgggggtttcccccatctcagaggataaaatggcctcttctacctattcaatccctctatctctatgcataatccccaccccctgctcccaactccaggatctcattccatcaattattgtctcccttccatacttgttcagtcttttattctccacatcctataaacatgttcatatctctattgcttaaaaaataaacaaacaaaaaagttgatcttgcaggctgggcagcatagcgagaccccatctctacaaaaagtaaaaaatcagctggcatggtgtggtgtgcctatagtcctggctacttgggagcctgaggtgggagatgggaggatcacctgagcccaggaggtcaaggctgcagtgagctgtgattgtgccactactgcacttcagcctgggcaacacagaccctgggtcaaaaaaaaagaaaaaaagaagaagatgttgatctcggccgtgacaccatcatttttcttcttatctgcagctcagtttctgaaaaaggaaatctaatgacttgcttccatctcctcaactccctgcaatctggctcccactctgtgggtacttcctttttaaaattttctcccctggacttctaagacccacttctttcctgttacctccttcgttggcttcccttttcactgcctaccttcttgccctcagtgattttctaactaacctcatcaaccttccaggattttctaccatgtgctgatgaaatctctatctctaataggactgctttcccaaattctggagctacatatccagccgttatgtagctccacctggacatg

SEQ ID NO: 26053 - DNA, 1112 bp, Homo sapiens
tttttttttttttttgagacagagtctggttctgccacctggactggagtgcagtagcgtaattttgactcactgcaacctccacctcccagcctcaagcaatcctcctgcctcagcctcctgagtagtggggactacaggtgtgcaccaccatacccgctaattttttattttttgtagagacagagtttcactatgctgcccaggctggtcttgaacttctggactcaagcaatccagccacctcagcccccaacgtgctaggattacaggtgtgagccaccaggccaggcctataacctttttttttgaaacagaatctctgtctgttgcccagggtggagtgcaatggcgtgatctcggctcactgcagccttcacctcccgggttcaagcaattctcctgcctcagcctccgagtagctgggactacaggtgtgtgccaccacgcctggataatttttatattttttcatgcagacagatttcaccatgttggccaggctggtctcgaactattgacctcaagtgatccacccgcctcagcctcccaaagtgctgagattacaggtatgaaccactataatataaccttttcataaatgtgtccaccataaagctgttatatcatgagaattgttttgcaattttagacctttggagattaaatacgtctatgaaggggggagttagtcctgcagatgctgtacaactttaccaagtggtggtaaacagtgctacattttcttggaatccttgggaaaggtgcaggagcagaagatgtctttccttaattaaatggtgggtttctgcctgaccctataccaaagttagacttccaaaacacagcacagaaatcagctaaaacaatttgcaattaaagtcacctaaagcctatatctatctatctatctatctatctatctatctatctatatctatatctatctatctatctatctatctatatatttttgagacagagtctcactcttattgcccaggctggagtgcaatggcaccatctcagctcactgtaacctccacctctcaagtgattctcctgcgtcatcctcctgagtagttgggattatgggtgtacaccaccatgcc

SEQ ID NO: 26054 - DNA, 1034 bp, Homo sapiens
aaaaaaattagctgggtggccagtgcacatatgtagtcccagctactcgggaggctaaggttgaaagatcgcttgagtccaagaggtggaggttgcagggagccatgatcacaccactgtactccagcctgagtgacagagtaagaccctgtctcaaaaaaaaaaaaaaacttaataatgaaatccaaccatgatcctgtctattaaaagtagtaaagtaagaaagtatttcattgtgtgacttcccccaacccttggtgtatatcctttcaggcttttttccttctccttctattaatgaacagacaatatttaaattagcattattagcagtgactagtattcatattctacttgcaataatttcttttttaaaatgatcaggatgagttagatttttttttatagtttattcagaatatttctctgtttgtatccagccccttgactgttgtcctaaatttaaactctccccgtcatttccaaatatttccaagtaggcaatgtagtacttttgtttgtttgtttgttttgtttgtttgtttgtttgagacagaatctcactctgtcacccaggctggagtacagtggcacgatctcggctcactgcaacctttgcctcccgcgttcaagtgattctccagcctcagcctccccagtagctgggactacaggcgtgcgccactgtgtctggctagctaatttttgtatttttagtagagaccgggtttcaccatgttggccaggctggtctggaacccctggcctcgggtgatccgcccacctcggcctcccaaagtgctgggattacagagtgtgagccaccacacccggccagcaatatagtactttttagaaagatttgtagattagagtcccagtatacattgcggctccaacccatgcctgctttggaaaacatattttctctgtgctagtatagtcatgacacatcagcctatatatcctcatgttcagcaagtgcatgttaactgcttttgaaattattattacaataaagtctgttactcagg

SEQ ID NO: 26055 - DNA, 1035 bp, Homo sapiens
tctcaagcgtgccctgaagttcagggaaagacgccagcgccccctgctggttgcgctctcccatagcagggctcacattttgggagaaagaaatcagctgttagcagcttttgttcttcaccatgttaagcaaagcacaacattttataactgggtgaaaagccagatattctgtcagctgatttgattgttctgtacgcatatccctaagccattgtttgacggatatttgtactgagttgactttcttcataagatgataggactaatgaagagaaaaggcaatggagtttttaaaaccagcgtgatgaaccaaatgctgccactgactagctatgtacatgtaatccaaaggttccctccgttgaaacaaaataacagtgcttacctaaccaggtcagctgtgagctgggacttcacagacaggcatagagagacatggatgcaggaagggcttccttagctgagagggtcgtgaaactggaaggtagtagcaagcattttccagttggatcttttggccgacatttgtagtggggagacaaacatgtctaattttccccccaccctggcacatgggcaggtaggaagatgctggtgggtttggttcgacagtttggagaatgtcttgtggaaggggtgctttttttaatgcacactcaggcaccatgggagcctgttgtcaccctggatatctagctccatgcccttgcccttccactctgcctcgacaagaatcatggcacccaaaatacatgagttcaaatctaagtttcacaggctcagggatgaacccaagctaccaaatgcacaggcccctcctgtatacggttacagcaggtaagggagtaacttactcagtgcaagctgctgtaacaaaatagcacaagctgggtggctaatcaacaacaggcatttatttctcacaggtctggaggctggaagcccaagatcagggtgccagtgctggcatggtcgggttctggtgagggccctcttccaggtcacagacagctgtcttctcattgcatcctc

SEQ ID NO: 26056 - DNA, 1062 bp, Homo sapiens
ataaggacactttgtgatgacattgcgtatccacacagataacccacaatagtctccccgtcgcaaatctttgaagtaatctcatccacagagtctcttctgccaacatcccattcactagttctggaggttaggacgtggacatctttgggagttatcattccccctttcacaggctatctgggctgtatacagaaccagagatctgagaatcatcttggcggcctcactctgtgagcagagaaacgtgtctgtgctcagcagcaatccctggaggcagagactggaaattacacctgcaaccgtagtaagagcttgccagggggccggaatgggtgccatacctagagctgtacaggcatccacctcaattctctcagcggccctttgaggtcactctcttactgccaccaaggtgcagggtggtgaagttaactcagagcagagacctggccttgaagcctcgtctccctggggaacaaccaatcagcaggaatctgaacacaagcacgaggggcaatctgagcccttccccaaagcctcactcttcattcactctggctggaatcctgccctcccttcagggccaagcttagggaacaaggagcaaccagatcctacctccaaggacagagcccttacgtatttctgcaatctgtctgcagccggtggtctgaatgagcatcgtgtcatcacagcacttgtaaattttggaggggctcctccacactgagggaatatgcttgttcaggggagggcacactcccccatttctcccggaaccacacttctgccgtgggaccctgagaacacaagggccctccccttgccctgttgcttcatgtggcttagtcttgcttaacaaacatgctaggtgtggaagctgaggcctacatgtagtgttgagggcaagcagggaccgcctggaaatgctgaaagcattctcttaaagtggggccttcccatcatgattgctaggcccatgatgagaagatattgcaggaaagcacgacctggaccatagaaagggcagatcaatgtgtgggcctttatgtgcttatc

SEQ ID NO: 26057 - DNA, 1051 bp, Homo sapiens
ccgcctgtgcctccctccctgcgtgcctcgccccgggccgcctggggctgccgcggtgcgcgggtgccgggccctgccttgccggccatgggggaagggggcaccatggggcgccgccggcccttccccggggcgccgccgcggcgctggtggcggcggcagcagcagcagcagcggcagcggcagcggtggtggccgggccgcggcggcggcggcgagggtgcggggcgcgctgccatgggccttggccgggctgcaggcaagaagatgtccaagccccgcgcgctggaggcggcggcggcggcggcagcgacggccccgggcctggagatggtggagcggaggggcccggggaggccccgcaccgatggggagagcgtatttaccgggcagtcaaagatctattcctacatgagcccgaacaaatgctctggaatgcgtttcccccttcaagaagagaactcggttacacatcacgaagtcaaatgccaggggaaaccattagccggaatctacaggaaacgagaagagaaaagaaatactgggaacgcagtacagagcgccatgaagtccaagaaacagaagatcaaagacgccaggagaggtcccctggtaccttttccaaaccaaaaatctgaagcagcagaacctccaaaaactccaccctcatcttgtgattccaccaatgcagccatcgccaagcaagccctgaaaaagcccatcaagggcaaacaggccccccgaaaaaaagctcaaggaaaaacacaacagaatcacaaacttacggatttctaccctgtccgaaggagatccaggaagagcaaagccgagctgcagtctgaagaaaggaaaagaatagatgaattgattgaaagtgggaaggaagaaggaatgaagattgacctcatcgatggcaaaggcaggggtgtgattgccaccaagcatttctcccggggtgcctttgtggtggaataccacggggacctcatcgagatcaccgacgccaagaaacgggaggctctgtatgcacaggacccttccacgggctgct

SEQ ID NO: 26058 - DNA, 1013 bp, Homo sapiens
gtaatcccgtttccaacgaaatcctcaaacttagacaaatatccacttgcagattccacaaaaagagtgtttcaaaactgctctatcaaaagaaagcttctacactgttagttgagggcgcacatcacaaagaagtttctgagaatgcttctgtctagttttcaggggaagatatttcctttttcaccataggcctgaaagcgctccaaatgtccacatccagatactacaaaaagagtgtttcaaacctgctctatgaaagggaatgttcaactctgtgacttgaatgcaaacatcacaaagaagttcctgggaatgctgctgtctgctttttataagtaatcccgtttccaacgaaatcctcaaagctagacaaatatccacttgcagattccacaaaaagagtgtttcaaaactgctctctgaaaagaaaggttcaactctgttagctgagtagatacatcatgaaaaagtttctgacattgcttctatctagcttttattggaagatatttcctttttcaccgtattcctgagaactctcaaaatgtccacttccagatactacaaaaacagtgtttcaaacctgctctatgaaagggactgttcaacactgtgacttcaatttaaacatcccaatgaagcttctgagaatgcttctgcctagagtttatatgaagacaatcccgtttccaacgaaatcctcaaatctatccaaatatcctcttgcagattttacaaaaagtgtgtttcaaaactgctctatcaaaagaaagcttcaacactgttagttgagggcgcacatcacaaataagattctgagaatgcttctgtctagttttcaggggaagatatttcctttttcaccataggcctgaaagcgctccaaatgtccacatccagatactacaaaaagaatgtttcaaacctgttctatgaaagggaatgttcaactctgtgacttgaatgcaaacatcacaaagaagttactgggaatgctgctgtctgctttt

SEQ ID NO: 26059 - DNA, 1034 bp, Homo sapiens
ctcctactcctgccgtatggaacatcacattgtcgcttggccttctggtatgattgggaggcttcctgaatcctcccagaagcagaagccactatgctccctttacagcctgcaggaccatgagccatttaaaccttttttaaaaataatattacagagaatttgtactgtagagtggagctatgaaatgccctcaaggtttttttccttatttttttactattagcatttgccttcttttatatgcaaatatctgaagccttcttgaatttttcccctgaaaatgaacttttctttttccacattgccaggctgccacaatgatagctgaaaatgtagatgcagattcagaagtgggtaacgaccagacgctgcacagtttggagggcttggaagaagacagaaagatgagggaaagtttagactattgtagagacgtgctaaatagttacaattaaaagagtgactatagagacttattaaatagttacaattaaaatggtgactgaaggttggacagtgaaggccaggcttagaaggtctcagatgaaaatgaacaacttactgggaacaggagccaaggttacttttgttttgccttagcgaagaatttggctggatggtgcccctcccttggagacctccgaaactttgaacttgagggtgatgacttagggtatatctggtgaaatgaacttctaggcagcaaagctcaagaggtgtcttgtctgtatcgtacagcctgtggtcttctgtgtgactgaataaatgacctcaagttgaaacttatatttaaatgagatgcagggcttaaaagtttggaaaatttgcagcctggccaagtggtcaaaaagaaaagctgattttcagtgggaaaattcaagaaggcttcagaaatttgcataaaatggagcccagtgctaatagctaagacaatgtttaaaaggtcttgaaggcatttcagagacctttgcagcagagcttgctgtcataggccatggggactaggaccgaagaatggtttcctgggttag

SEQ ID NO: 26060 - DNA, 1043 bp, Homo sapiens
ggtgatttaatcatggagaagagtgggggttggaggtaggggtgtgaggagaatgggggagattattttgtgggtgggggtgaaagatgagggtgggggggccgatcattcacaaatgtttaaacagtatctccttaatgctgttcacatgacagtgagttctcttgatgacttttgcagctgtgagattgagtgaatactgtcctgctgggttttggacttgcattgggcctgtgggcccatttgtgttatttttctgggaaatttcttccctttggactgagaaagcttacccaatgcccataccatcattttaccttgaaagaaaagaagtctgttttaaattcagggactcataggcagaagggactgtagccttgtctcaggtgagactttgaattttttacatttggaatgagttaacacttttggaaacttttgaaaagtcatgattgcattttgctctgtgataaggacataagattctgggatatcagagtcagaataatatggttttgctgtgtgtccctatgaatctcatgtggaattgtaatccctaatgttgaagcgggtgacttaattatggacaggaagttggtggtggtggaaggcaaaagggatgggtaggattgggaggagtgggttggcagtagggtggtgggagggtgggtggtagtaggaagggggagtagcctgctgcagagtgagaggctcatggaaagcctctactagggcagtgcacctgtggctttgcagtgtttagcccctcagctgttctcatgggctggttggtattaagggcctgtagcttttccacactgagggtacaagctgttggtgggtccgtgaatctggggtctggagattggtggccacctgtgtgggggctccaagcccatattttctttctgtacttccataatagaagttttccaagaggctcttcatctgctggaggcttctgcctggtaacagtgggagttggggtgtgggtcatatccttcactaatgtttaggcaccatcttcatgatgctgaccttgt

SEQ ID NO: 26061 - DNA, 1035 bp, Homo sapiens
catgaactaaatcatgccatgaatgcctaaactaccattgtaaattttggaagaatgatcataccactttactgctttttgaagtatgaatattttagtgtatatgctatagaccacaaaccctgtaaagagtctcaaataagttggctggataaagcctgctgtgcatgtctttatactcaaagactgatgatgcaattcgaatatgtgtccccaccaaatctcatatttaattatatttcctaatgtggaaggtggatcctggtataaggcgattgatttatgaaggcaaatttctcatgaatggttcggcaccatccccttgtaccatcctcacaatcatgagtgacttctcatgagatctgaccactgaaaactctacgtcacctccctactctgcgtgttttcctcttgccatgtgagacaactcactctttctttgccttgtacaaagattgaaagatttctgaggcctcccagaatcagaagccctgtgcttcctgtcaaccctgcagaaccatgagccaattaaacctctttttcaaaatgaatcaaacagaaaatggcaaatgacgattgcagcattgctataaagatacctgaaaatgtggaagcagctttgtaactaggtaatgggcagaggttggaagagtttggagggctcaaaagaagacagatgagaaaatttttggactatcttagagactggttaaatggttgtgataaaaatcctggcagaaacatggacagtgaaggccaggttgaggaggtctcagatagaaataagaagctttctggaaaatgtcttccttttgaatatggaaagcttacacaatgcctgtaccatcattatacgttagaagctgtgaacttgctttttatttcagaggctcgtaagaaaaagagactgtagccttgactcagatgagactttggactttgtaagtttgagttaatgctgaaatgagttaagactcactctggcaaggcatgattgtattttgcaatgtgagaaggacatgccgttcatggggt

SEQ ID NO: 26062 - DNA, 1040 bp, Homo sapiens
tcagtaaaggcctcatcagtggggacctggtgacctagtcattggaagcctggtccatggggacctggtcagtggtggtcttcttagtgaggcctgatgggttggaacataaacaatgaaaaactggttggtggggcctatacagtatactaggtgcctggtcagtgttgggccttagtggcttggagcctggtcagtgagggcctggtcagagggggctcggtcagctggggactgatccatggaaaattgttcagtgggggtcaggtgagcagcaacctggtaaattgcggtcttgtcagtgggaacctggtcagtggggaccaggtcagtgggaaattggtcaatgaggtctggcctatgaggcctattaagtgtgagcctggttaggaagacatagtcagtggggacttggtcagtgggaactggtaaatggaggagtggtcattagaggcctcatcagtgggaacctggtcctgggcggctgatcagtaggaacctggccagctggccactgtgtggcctcaggcagggggtttgtctgtggagtctccttgcctccatctgcagagaaggtgagtcagggcaccttggagggtggctggaaagagaaggtgagaagatgtgtcgaatccagcactgcttggccgacctacaactttacacatgacctgtgtttcacctagaggtggtgccagccctctctgctgtgcctggtgcccctcctctgtctgcatccccaggaccaccatgggtggggaaggcagagattggggaacacctatagaagctctaatgctggccatgagccctcagtgatgacctgggtgcacccgtgagtggagaagctaggcctggccagagaagcaggagaaacacacacataagtgcacacatatacaggcacacacacatgcacaaacacactgcatccacacatgtcagttcaggggatagaggacattgactctgggccctgttgacccatgcaggctcccattgtggtgggttgtgtcaccccacaatgtcactgttgctaa

SEQ ID NO: 26063 - DNA, 1016 bp, Homo sapiens
agataacttaagtgccatctaaggaggaacaaaaatgaattatcagaaaaataaaagtaagatgaagtgcaaaagttctgtggcaaagatgatgatagtaaataatatatttctgtgactcatggtaactttaactttgttcttaaaattctgagtaatttaagggttcacatttgaagaatccactgcattacagataacattttattgcaagtaaatgcatttcaaaatttgctattggttttgtattagattattctcagcctacttcattatcaagctgtattattttattcatgcagtttgatgatcttacggcagagaaggaagctttatcttcaaaatgtgtcaatttggctaaagacaatcaagttcttcaacaggagtttttatctatgaaaaaagtacaacaggaatgaaaaacttgaggaggataaaaagatgttgaaagaagaaatattaaatcttaagacacatatggaaaacaatatggtagaacttagtaaactacaagaatataaatcggagctagatgaaaaggcaatgcaggcagtagaaaaattagtagaaatccacttacaggttagttttttaaatcaggtaagtttatctgtaatgtgctttcatttatttcaccgcaaattttattttggatatgtatatattatgtttcctctgcctttcttgcagcaatttgctttgtagagttctagaaaaaaaaatgacatctgttttttcttttaaatatttacatttccattattattataacaaaatcaatctttcagagtaacgactcactgtggagtcgtttgatgattaagatcagttggcataagaaaaaattgtgatttagaaattatgtgacacttttgaattggtcataagctacgttcattaatcactttttaaaattatgaatggattctattactttttatatgaccagattacattaatactaacataattatgattttgaatttttataaatcagacaattctgaattcagtta

SEQ ID NO: 26064 - DNA, 1051 bp, Homo sapiens
gtcttgaattcctgacctcgtgatctgcccgcctcggcctcccaaagtgacatgagccaccatgcccggccacttattctttaatgattttgaaaacaatgaccatgccttggacatatagtgtccggtgcactcttcattatctagtttgaatttttatttctgaagatattttttgctgtctgtggtcattttttcttccttttgtagtatcgtctgctgcactcaaattgtttaaagaagacctgtttgtgtcatacgttaacatcaaatttatcttgatatgtagcttatattttgtttctgcttctttttcttttagatataaaacatatggaaatttactcattgtacatgagtacgtctgttgtatacatgaagtatacatgttattaaacttgttttacataaataaatttcatatatataaaaatatatgtataacttaaagaaaaagtaaaatgaacattcatgttttgatcacagattttttttaaaacaatggaatctgtctttgaagccctgaacacagctactttcctattttatttactgagcacttaatttggttttctgattcgaatcaacatttttctgtcattgcctttctctacatggttttgtatctctttcattttgttgacattatgtcagcaaagatgtctagatctcttcttcaaagtctttaaatcgtcacacatctctctgcccctttccttttttctaaaactgcctgtatcctttttctcctcaactcagatattaaagatgttttcttctctttttctacattgaatgatctccttgatgctttttgtgtgtacttttttttcttctgatagactgtggtcaatgggtatcaaaatgtacttttgtgtctttttaaacgtatgtgttttacttttttatcttggttactcatctctgggttatggcttatatttagtaataggttattttacttggcataccaacatggatatgagtagtttatttacaaaaagtgtatggttaggccaggtgtggtggctcacacctgtaatcccagcac

SEQ ID NO: 26065 - DNA, 1047 bp, Homo sapiens
gccaagttggggaatttccaaagaagaattattccaggtagtatcagtggaaaaacacattcaagatgtgctgcagttctcgaagttgaaagcagcctgcggttgtgatggccagttagagatgcagcagataaaacaggagagacacctgaaacaaatgtcaaccattcacaaatctgccaccacccttagcagagattataaatggaatggatttgggagaagcttaggtttaagatcagtccttgttaaccaacacagcattctcatgggagaaggatcttataaatgtgatacagaattcaggcagactttagggggaaacaactctcagagaacccacccagaaaagaaatcttgtaaatgtaatgagtgtgggaagtcctttcacttccagtcagaacttaggcgccatcagcgatgtcacactggagaaaagccgtatgaatgcagtgactgtggaagagcctttggtcatatttcatcccttattaaacatcaaagaactcatactggagaaaagccctatgaatgcagtgaatgtgggagagccttcagccagagttcgtctcttgttctgcactatagatttcacactggagagaaaccctacaaatgtaatgaatgtggacgagcctttggtcacacttcatcccttattaagcatcagaggactcatactggagaaaagccctatgaatgccgggaatgtgggagaaccttcagccagagctcatcactcattgtgcattacagatttcatactggagagaaaccttacaaatgtaataaatgtgggagagccttcagccagagttcatctctcactcaacattacagatttcacactggagagaaaccctacaaatgtaatgagtgtggaagggcctttgctcatactgcatcccttattaaacatcagagaagtcatgctggaaaaaaaaccctataaattcagtgaatatagaagggctttcagctggagtgcagacatcactggaacttaaagaattcatatcagagagagatcctaaaggtgtaatgtat

SEQ ID NO: 26066 - DNA, 1366 bp, Homo sapiens
aagccaaggcaggcatgtgtgataacatataggaactgagggagaggacatttcaagatggaggggatgccatacaacaggactatgtgatggtttttggctgtgtccataggaagtcacaacaggcaagggaaagaaaccagaacccagtcatggagttaagaagtgagtcagagaggagatgggtagggacagtgaggtaaggcctctttctaaggaagtttggctgaaggatagactagctggacacatgctggctgtgtggggtagagggaggaatgatggagggtaggagagccttgagcctgcgagaagagtctcctagaatagagaagctgaggttaaagttgtggaagacagtggggataactgagtgacagataatcaggagaagaaaaggagatccagaatcatgacagagagatgacctttgccaagagcacagccatctttcactgtcacagagaggtaggacaaaacgattggtgttcaagaattggtttgtagcacaatattttaactatgtcctttaaaaagtttctccacagacactacccaaagcagtccttcactacagtggcagacagacctgaaaattttcatctgaagcagcagagtgaactgcagagtcaggtaatttctagaaggcttgctttgttccattgatactgaagattattcatgaggccagtcttctgagatttctgtcatttctctcatgccaggtcaccaaccagtgtggaggctaaaagcgggcctctttggggattccaggtggaagtgttggacatctgtagtattcctggtctcaaatcatcctgatattcttcattttgttattcacattggactagggcaaggaaatgagttctggtcagagtcaatgtttcccaacaatgttgatttatttggtcctaaatatttaaacacattttataaatagcttttccacaccacatatatagggaaaaacagggaattaacttggcccagcagcactgtttgtggggctaacaccctgtgtatctcacaccaaccctaagctttgtttccctcctgtcactttgctcctatttctttcatatgaaagaatgttcattttctttgaaaatgagctcatttcctcattttctttccatctttcagcaggaacaaagatcaccacaactggctccccttcaactatgttagatggcaacttgccttcagtatggtgaaacacatcagttaagactggggttgtgcatggcaggactttctacaaggacacccagtctccttaataaacatgagatgctctctttccagaagttctcttgcctgacacagcataggaagatgctgaacggccacacagtgacccatt

SEQ ID NO: 26067 - DNA, 1051 bp, Homo sapiens
gcttcaattcaacaagaagacctaactatcctaaatatatattcatccaacacaggagcacccagattcataagtaaagttcttagagacctacaaagtatgtttcacagtaatagtgggagactttcacactccaatgacagtattagatcattgaggcaaaaaaatgaacaaagatattcaggacctgaactcaacattggatcaaatggatctgatagacctttacagaactctgcactcaaaaacaacagaatatgcattcctcacatcatcatatgccacatactctaaaatcaaccacataattggacataaagcaatcctcagcaaatgcaaaacaactgaactcataccaaatacacactgagatcacagtgcagtaaaaatagaagactaagaaaattgctgaaaatcatgcaattacatggaaatcaatcaacatgctcctgaatgactttttaataaataatgaaattaaggcagaaaacaagaagttctttgaaaataatgagaacaaagttgcaacatactagagcctctggacatagctaaggcaatgttaggagggaaatttatagcactaaatcccacatcaaaaagttaggaagaactcaaattaataacctaacatcacaacggaaagaactagagaagcaagacaaaaccccaaagctagaggaagacaagaaataactgaaaatccgagctgaattcaaagaaaccgagacatgaagaaaaaaaaattcaaaagatctacgaattcagggtaggtttcttgaaaatattaataagaaagtctgctagcagactaatacagaggatgattgaaataaacacaattagaaatgacaaagggaatgtaattaccactgaccccacagaaatagaaacaaccatcagaaactactgcaaacacttctgtgcatacaaactagaaaacttcaaagagatggataaattcctggacaaatacaccctcccacaactgagccaggaagaaattgatttgctgaacagaccaataacaagctccgaaattgaatcagta

SEQ ID NO: 26068 - DNA, 1060 bp, Homo sapiens
agctgggactacaggttcgagccaccacgcccagctagtttttgtatttttagtagagacgggatttcaccatgttggccaggatggtcttgatctcttgacctcaagatccacccatatcagcctcccaaagtgctgagattatagatgtgagccaccgcacttggccaggattccctatttaaatggtgctgggaaaactgactagccatatgcagaaaactgaaactggacctcatccttacaccttatgcaaaaattaactcaagatggattaaaaacttaaatgtaaaaccccaaaccgtaaaaaaccctagaagaaaatctaggaagttccattcaggacataggcataggcaaagattttatgatgaaatcatcaatagcaattgcaacaaaagcaaaaattgacaaatgggatctaattaaacgtaagcacttctgcacagggaaagaaactatcatcagagtgaacaagcaacctatagaatgggagaatatttttgccatctaccaatctgacaaaggtctaatatccagaatctacaaggaacttaaacaaatttacaagaaaataataaccccatcaaaatgtgggcaaaggccatgaacagacattctgaaaagaagacatttatgcgtccaacaaacatatgaaaaaaaaaaagctcaacatcagtgtttattagagaaatgcaaatcaaaaccacaatgagataccatctcatgccagtcagaatggcaattattaaaaagtcaagaaacaacagatgctagagaggctatggagaaacaggaacacttttatactgttgggaacgtaaactagttcaaccattgtggaagacagtgtggcaattcctgaaggatctagaagcagaaataccatttgacccagcaatcccattactaggtttatatccaaagaaatctaaatcattctattttaaagatacatgcacacttatgtttattgcagcactattcacaatagcaaagacatggcatcaacccaaatttctatcaatgatagattggataaagaaaatgtgatacatat

SEQ ID NO: 26069 - DNA, 1614 bp, Homo sapiens
ccagccactgcaaaaatgtactgaagtacaaagaccaatgacactatgaagaaactgcagcaactagtgagcaaaataaccagctagcatcatggtgacaggatcaaatccacgcataacaatattaaccttaagtgtcaatgggctaaatgtaccaattaaaagacacagaccagcaatttggatataaagagtcaagattcaggtgtgctgtattcagggttcctatctcatgtggaaagacacacgtaggctcaaagggatggaggaaaatttaccaagcaaatggaaagcagaaataagcaggggttgcaatcctagtttctgacaaaacagactttgaatcaacaaagataaaaaaaagacaaagaatagcatcacacaatgataaaggaatcaattcaacaagaagagctaactatcctaaatatgtatgcacccaatacaggagaacccagattcataaaacaagtctttagagacctacaaagagactcaggctcccatacaacaatagtcggagacattaacaccccattgtaaatattggatcatctagacagaaaattaacaagaaaggactggaacacagctctggatcaagtgaatctcatagatatctacagaactctccaacacaaaacaacagactatatattattctcagtggcatatgacactctaaagttgatcacaaaattagaattaaaacactcctcagcaaatgcaaaataactgaaatcataacaatctctcagaccacagtgcaatcaaattagaactcaagattaagaaactcactcaaaaccacacaactacatggaaattgaacaacctgctcctgagtgacttctgggtaaataataaaattaaggcagaaatcaagaagttctttgaaaccaatgagaacaaagagacaatgtaccagaatctctgggaggcaactaaagcagtgttaagaggtaaatttatagcactaaatgcccgcatcataaagctagaaatatctcaaatcaataccctaacatcacaactaaaagaactagagaagcaagagcaaacaaatccaaaagctagcagaagagaaaaaaaaaatgactaagatcaaagtggaactgaaggagacagagacatgaaaaacccttcaaaaaaaaaaaaacaagaaataaaacgtgttcaaatagcaagagataaaatcaaattgtctctgtttgcagaaaacgtgattctatatctagaaaaccacattgtcacagcccaaaaactccttaagctgataagcaagttcagcaaagtctgaggatacaaaatcaatgtgcaaaaatcacaagcattcttatacaccagcaatagacaatattcttcaattcctatacaccaataatagacaagagagccaaatcatgaatgaactcccattcacaattgttacaaagagaataaaatacctaggaatacagctaatgatgggtgtgaagaacctcttcaaggagaactacaagccactgctcaaagaaataagagaggacacaaacaaatggaaaaatattccatgctcatgggtgggaagaatcagtctcatgaaaatggccatactgcccaaagtaatttata

SEQ ID NO: 26070 - DNA, 1138 bp, Homo sapiens
tcctcctcactgtttgggacttcccaactggggcctccagccacccccactggtgttctcctgctgacagtgatttcagttttttcttggctggagctccctgatggaggggcaggccatcatgtttgctgtttttgcaacttaaccacttcaaccttcagtctttggagtgtccaaggagaccaggggctgatgtggaccctcagcatagcacagatgctctataaaaatgtggtcagactgctttttaagcactttcccaatgtcattccgcctcactgggcaaaaccccctaactggggtctccagctacctcctacaggtgtgtttgggccagcaacaagttcattcatacctccctagggcaaagcttccaaagggagcagtaggctgccaacttttctgtttcacagccttcactgatgataactccaggtactggaaaatctgaggctactagagactgaagtgggccctgggcatactgcagcagccctatggaaaagtggccagactgttacctgggttcccattcctgtatcttctcactaggcaagtcttgcaggcctgggcctctacctaacccccctgccagagctgtcgagccagtagcaactcagccactccctggacagagcctccaggggcaactgaaagcctctctgccactgcttctgcagtggaactgtccttgctaccctcagactgatgaaggagctaacacccttatctacaccttcaacaagctttaattgaccaaagcccatctcccacgggttttacacactccccactgctcataacagacagggaacccctggattggcccccacagcatgaattctccatcctgcttgctgattgcaataaacagttgctgacctgtattctccgggggtagaaccctgaggagacaaacaaaagacccttggctacaaccactactaatgtcccttcctcttcttccccaaagttagggaagaaatataaacactgagattgccccagagctgcagtgggcagcctaggagtgccaagccatgatctacagccagcactcaaggaggagagaagcacattttcagatcattgagagtgaacatggctgcaactgtgaggaaacataggggagccacat

SEQ ID NO: 26071 - DNA, 1812 bp, Homo sapiens
actgggcaggacctccagacctccatgccagggagaattcaaatctctgtcagcccgagaacactggtgggggtggctggaggccctggttgggaggtcctgcccagtgaggaggaatggatcacagaccttcttaaagacccagtgtggccacattttggtagagcaccttgctatgccaaccccgccagtgttctcaggatgacagatttggattctccctggcatggaggtcttgaggtcctgccaagagagggacctcccaactgaggcctccagccacccctgccagtgttctggggctgacagagttttgaattctccctggcatggaggcctcaaggtctggcccagtgagggacctcccaaccgtggcctccagccacccccgctggtgttctggggctgacagagatctgaattctccctggcatgtagttctcaaggtcctgcccaatgagggtccctttagctggggtctccagccacccccaccggtgttctcagtctgacagagatttgagttctccctggcatggaggtctcaggatcttgcccagtgagggacctcccaactggggcctccagccacctccgccagtgttccggggctgacagagatttgaattctccctggcatggaggtcttgaggtcctgcccagtgaggaaactctcaaccgtggcctccagccacccgcccctgctgttctcaggctgagagagatctgaattctccctggcatgtagttctcaagatcctgtccaatgagggtccttttagctggggtctccagccaatcccaccggtgttctcaggctgacagagatttgagttctccctggcatggaggtctttaggtcctgcctgcccagtgagggacctcccaactggggcctccagccacctccaccagtgttctggggctgacagaggtttgagttctccctggcatggcggtcttggggtcccgcccagtgagggacctcccaaccggggcctccagccacctccgccagtgttctggggctgacagagatttgaattctcccaggcatggagttcttgaggtcccacccagttagggttctcctaactgggacctctggccacccccacctgtgttctcatgctgacagaggtttgaattcttcctggcatggaggtctccagttcctgcccagtgagtgtcctttcaactcaggcctctagccaactccccccacccctgccagtgttctggggctgacagagatttgaattctccttggcatggaggtatcagggtcctgctcagtgagggacctcccaacaggggcctgcaaccacccccgccagtgttctggggctgacagagatttgaattctccctggcatggaggtcttggggtctggcccactgagggatctcctaaccagggcctccagccacccccgccagtgttctggggctgacagagatttgaattctcccaggtaagcagttcttggttcttgaagtcccgcccagtaagggttctcctaactggggcctctggccacccccacctgtgttctcatgctgacagagatttgaattcttcctggcatggaggtctccacttcctgcccagtgtgggtcttttcaactcaggcctccagccacccgcccctggtgttctcaggctgacagatttgaattctccctggcacatagttcttgaggtcctgcccaatgagggtccttttatctggggtctccagccaaccccactggtgttctggggctgacagaggtttgagttctccctggcatggcagtcttggggtcccg

SEQ ID NO: 26072 - DNA, 1053 bp, Homo sapiens
ttcagtcacaggctcaggctccaattttacttagttctctcgctagttccaccacactcacagttacttcctccactgaagtcttgaaaccctccaagctatctatgagggctgaaatcaacttcttccaaacttcatattttgacctcctccaaggaatcacaaatatctttaatttcatctagaatagtgattgctttctaaaaaaatccaaatgatttttaatttgccttgtgcagatacgcagaagaatcattgtctatggcagctataggcttacaaaatgtattcttaaataataaaatgtccttgatccatgggcttcagaatgaatgctgtgttagcaggcatgaaaacaatattaatctatttgtacaactccatcagagctcttgggttatgagtgcattgtcaatgagcagtaatattttaaaagatatatatatatatacatatatatatacacatatatatatacatacacacacacacatacacgtatacacacacacaaacacacacacatgttttctggacaataggtctcaacagtgtgcttaagatatttggtaaaccatactgtaaacagatgtgttttcatccaggctttgttgtttcatttatagagtataggtagcataggtttagaagaacttaaaaatgtagcagaatggtaaatgagtacttcctttaatgttttaatgtaaccagctgcattagccagtacatagaaagtcagcctgtcctctgaagattagaagccaggcattgacttctcctctatagctgtgaaagttttaggtatcctcttcttccagtataatgctgttttgtctacattgaaaatctgttatttagcataactgcccttatcaatgatcttagctagatcttctggataacttgatgcagcttctctatcagcactggctgcttcaccttgcacttttatgttatgaagattcttttcttaaacctcatgaaccaacctctgctagtttaaacttgtcttctgcagcctcctcacctgtctcagacttcatagaattaaag

SEQ ID NO: 26073 - DNA, 1028 bp, Homo sapiens
cacccctatagaactatcagcctgcaaactgaaactgttctcacaaaacaaaggcatcgtcaacttctcaaggttaaggtagtgatttaaggctaacagaccccacactcgtgataataattagttaagcaattacaggtcacaagcagtcacttgaccagtgacattttaaatctctagtcattgactttgtcattggtttacttttgcccgtgggaaaagttgaaaattccttagcatggaatcaaaactctcacatcagtgtggttcttgtcaagttattcagccttatctttcgccacttaccatactctgcacctttgttctagcatccagccaaactagactacatggagctccacagtgatcgtcttcacctccagctgtttgcatttacttcttccctctatcctacatgtgttttccttccccttcagatatcaacctatgaattgcctctaccaaaaagcctacaatattgacacaaacctgggctagtatcccttctatgtcttccaataagtgctgtcttatgcctgtcattgtatgtatgactctgtacgggaattgcctgtttgttttttcagattatagcatacagttgttgaggggtggactgtatcatctttatcttgtaattccagtgcttgtcctagtaccttagcacatggttgctgaatacatgaatgaagagtgagaaaccagaagctctgatacttaactgccatgataatgaattcagtgtgcaactatgggcaaattatatttaatagtaattgcatattgtacatatttttcattcttattaacactgataaacttttcaacatatactgactttctcttagttaactgtgaaatcatttagataaagaatataattctttttcattgtaacttctgaatttaaatctgaatcctctatagcaggggtccccaacccccaggtcacagacaggtccatgacctgttaggaaccaggctgcacagcaggaggtgagtggcaggcaagcgagtgaagcttcatc

SEQ ID NO: 26074 - DNA, 1054 bp, Homo sapiens
cttttgaactttggggaatttatgctgtatgaggtttgaggttttgactcaacttcttttttcccagttagatatccagttatggcaacctctcattgtataaatgttcgggttattatttaatttcagaagcaatcacaatatgttatcctattggatactagttacaagtttgctttgttttacttaggtttctgaaactgatgaaaaagaagacctgctgcatgaaaaccgcttgatgcaagatgaaattgccaggctcaggctggaaaaagacacaataaaaaaccaaaacctggaaaagaaatacttaaaagactttgaaattgtgaaaagaaagcatgaagaccttcaaaaggctctaaaacggaatgaggaaacattagcagaaacgatagcctgttatagtggacagcttgctgctctgacggatgaaaacacaacgctccgttctaaactggagaagcaaagagagagcgggcaaagactggaaacagaaatgcaatcataccgttgtagactgaatgctgctctatgtgatcatgatcaaagtcactcatcaaaaagagaccaagagcttgctttccagggcacagtagataaatgttgtcatttacaggaaaatttgaattctcatgttctgattctttctctgcaactttctaaagctgagagtaagttcagagtcctcgaaactgagctccattacacaggagaggctctgaaagaaaaggctttggtttttgaacacgtgcaaagtgagctaaagcaaaaacagagtcaaatgaaggacattgaaaaaatgtacaaaagtggatacaatacaatggaaaaatgcatagaaaagcaggaaagattttgtcaactaaaaaaacaaaatatgttgcttcaacagcaactggatgatgctcgcaacaaagctgacaatcaagaaaaagcaatacttaatattcaagccagatgtgatgctagagtagaaaaccttcaagctgagtgcagaaagcaccgtctcttactagaagaagacaataaaatgttggtgaatgaattgaat

SEQ ID NO: 26075 - DNA, 1039 bp, Homo sapiens
tgtgccctcttgtgccagttttcaaagggaatgcttccagtttttgcccattcagtatgatattggctgtgggtttgtcatagatagctcttattattttgaaatacatcccatcaatacctaatttattgagagtttttagcatgaagggttgttgaattttgtcaaaggccttttctgcatctattgagataatcatgtggtttttgtctttggttttgtttataagctggattacatttatttatttgcgtatattgaagcagccttgcatcccagggatgaagcccacttgatcatggtggataagctttttgatgtgctgctggatttggtttgcccatattttatcgaggatttttgcatcaatgttcattaaggatactggtctaaaattctcttttttggttgtgtctctgcccggctttggtatcaggatgatgctggcctcataaaatgagttagggagggttccctctttttctattgattggaatagtttcagaaggaagggtatcacttcctccttgtacctctggtagaattcggctgtggatccatctggtcctggactctttttggttggtaagctattgattattgccacaatttcagagcctgttattggtctattcagagattcaacttcttcctggtttagtcttgggagggtgtatgtttccaggaatttatccatttcttctagattttctagtttatttgcgtagaggtgtttgtagtattctttgatggtagtttgtatttctgtgggatcggtggtgatatcccctttatcattttgtattgcatctatttgattcttctctcttttcttcttttttagtcttgctagctgtctatcaattttgttgatcctttcaaaaaaccagctcctggattcattaattttttgaagggttttttgtgtctctatttccttcagttctgttctgattttagttatttcttgccttctgctagcttttgaatgtgtttgctcttgcttttctagttcttttaattgtgatgttagggtgtc

SEQ ID NO: 26076 - DNA, 1044 bp, Homo sapiens
gcttttcagtgtcttctcagaaacaactggcctggaaggtaattaaacactcatatatattttgaactattaactgtatagtctatgaatatatactttatgtattgattattttgtttcaaatcccattcaggctacaagtgtcaagaaagattctgtttcgaatatagccacagagataaaggatggacaaatacgtgggacaggtattttggaatacacctttaatgtaatgttcgatcaaatagaagagaaattcacttccccaaataaatcagcggggggttcattgaagctttatgtttggattcagcatgcttgagattcttcatttgtaataagtcctcgggtgaccctgatggtgctggtccttgaccatgatctgagtagtaagattgtagacttccctacattgaaattgggaagaagagccataggagagcggttcagcacataacagcctcaggggacagcatcattttgctttaattctacagcaagtttccatcaagaggggaaggagaacgagacgaagtaatagatattataggcgtcagatcatattgttataaacggagggaaaagtgatcctaatacctcaaaaacagcgtagaatgagaacaaacaagatcactgaagtagcaattattttccacaaggaagagggattgtgaggcaggaaggagagaaaagaagaagttatttatgtaattttggggtttctgttgaggaaagctgagtgaactcacttcagataaatttggaatatttgcataaaagaatattaaattttggcttctccaagaactactggaagcaggaaacaatgctagaattgggataaagcacactgactcgttactcctctttgttactgttaggcatcagagatacacgttttgttgattttagttataaaaatgagataaacttgaatatgaatacattggcttcattgttcaaggagctaactcttgggtaaaatagctattggatgaaacttctttagagaatagcatgatactcccaacaagactattatag

SEQ ID NO: 26077 - DNA, 1054 bp, Homo sapiens
tatattttacaaatgttgaccttctcaacaacatatggtttttttgagtaaggtcatctatttctactccaaatgtatttacccagatcagtcttctaagtcccctttgtgcctcaaatttgacaggtctcaaactgccttccagattctttcctgactctttgtaatctactctgtcatctggcgtcccaattttagtaaataacaccaagaaagtagcaatgaaacattgaagcagaaaaactgcactccaggtttccctcacattgccaatccagtgactcaccaaattttgtattttctacctttaaccatttctcgtatcttattactgtaatacactgtctgccctatacttttggaatgttcgtttttgtttctctcttctccccatgtttatctatctatatatgtctttcagggtgacctttcttaaacatgtttactttgatctaactcatctgcttacggctggaccctcattacacgaaagaaacatttacattctagcataacacttattttgtggtttggcctgtttctcccattttatctctccactccactttctctgtctgtgcccaagttttaccacgttattgtggtagttcttattggctatgctgtttcatttttttgcacatgctgccctcactagaaacacttcacattcttagtcttcacttgtctattttaaaaataggaccctaaatttacagtgtctcagaagcttcccaagtagaaataagtgttattgcctttgtgctgtcactgtattttattgacttgaattgtagaaataatgaattgtgtctttctgcttttgtttgtttttatgtttcttttttcacttgataaataaataaaattggtattttattcatattatcagattttccagtatagaccttatgaatttatagacacagaaaatgtttcttgaattactgaccgattgagtagtaaatataacattttctgaagatttcttttttttttttttaataggaaggaaaagcactaccagcaactggacaaaaagcaaatggtattg

SEQ ID NO: 26078 - DNA, 1051 bp, Homo sapiens
agactcccattttccagtgacacagattagtctttgaatcagaaatagataatggagaagagaccgtgccttttctaccttgttttaggttatcaggtttactgcagttcagtaacaaaagttgtgacagatatcaattggattttcagtttagtctttagggtagataatttataaggataaattattgtctggctgtgccattataatgcctgtcactaattgttatgggtttaagggtgagtctgcattggatatttcataggttgggagaagtggcagcagaaataggtaactgaaatgttttctaaaatggaagccatatcttaattataccaagaaatattatttaatataaggataactgaccttcctcagactttgttttaccatttgttttggaggggacctgcatgtatagactgacggtttttgttttcttttaagaaatgaacgtgctcatttttttcatatctttttgctctgtaggtgtctctacctactggaccgttttgcacaggctgtgacaaaggataagtttgctttggaatctgaggtagagtactctcttgtgaaattaattttctcactccgaatctcattttttatattattttcttctaaaacttagcaattgtctacctatcattgttttatgttagtattaaaacttttattagagataaccattttaaagaaatagggggggttaattttaatttttttttactttgcaaataagaaatagttgataaatactttgagaggtgtgatctgaaaaaaaaattgctggaaaatacatagtgacagaaaaatgtggttctggaacgctttcccacaacagaggagatacaaattttggtctaggcttatctgagtaagtgtttttactctgagttgtatatcatatgagtatgactaataatacctctgtttaaatgaatctttgttacatcagatgacttattatgggaatcatggaatcaccctgttacacatagcatatagtttcttttcatttcttgtacacctattttaacatcatacagta

SEQ ID NO: 26079 - DNA, 1025 bp, Homo sapiens
ttaacattgacacatgtaagggtcaatttttcatatttggaagctcaaacattccttgaatgaaaatattttgaaatgccttaactgtctaagattttactttaaattttggaacttttaaagaagcattataaggaacagctatttttcatgcacttatggtaaataattatacaaacatgaattacaataaatttggaattcatgacaactgaatttgggaaaggtaatagttaagtgtttttccactaaattactctttttctaatcagtgtgaagtgacacaggaaagtaaaattggcccttataaataggctttattttaaatttcaaagaaaattaaagaatttcacaataaatgtacatcttgttgctgttgacaagtattgtatgtgaaggtgatttcatctgaaagtgattcctctgtggaaaggcttaagagggaaaaatgaagaaaaggagagcaatcagaaatgcacaagctaatttggaaattaggtaatgagggaaaatactgtggagagtgtttttgtgtgttttgttgtttgttttcaatttatatgtttagacaaggatcgcttcagttttggggatgattattcttactttgggaaagagtttgtgagttgtgaaattgcccagggatcaattttggtaggactctgaggaaaccaggttggcagtgaatagtggtgatgaagcggcacacagttcagcagagagaagaacacataattaatggacattattcaattctggcagaaacagccactcagataagcatctaaactctactctcaagtccagaatgtcttgatgggcaggtgggagatacggagcttataaatagtaaaatcaagttggattttgagcttactagtctcttccctacccctacccaggaaaagtaaatgaagttttcagtgaatggctctatcttttgctctttcctcttttcagccaaatcccaaacgataaagggaatttgccatgtgagtgagagatgagactgaagtgattatcaa

SEQ ID NO: 26080 - DNA, 1066 bp, Homo sapiens
ccagttgagtctctcaaatgaggggctactgggagtgctcttggtaacaatcatgatgtgaatgggtgtgaacgatacttggctatgttaagtgccttgtccgcaccttgcttttatctctagagacatgaagttattattaattttttttttttttaagtagagatggagtttcactctgtttcccaggctggtcttgaactcctgggccatgcctggccagggacatgaatttgtacaaagaaatttccctccctgcctgcacaatatcacccattgactcaccttatccaaagcaagtttcctgtgaatcggccagttcttctatattcattggatcattgcctccttcctaaccttccccatttaccaagaacactgggagactaatccttttagatagtagctttttgatgctcaaaacatcacatttaaatttagtttaaaaattttttaacttttgtgtcaaataggagttgaggaattgagcaggattctaccctagtccgattgtatagaaaacaccattttgattcaggtattatttttcatatttcaggtttgacttgttcttttcagaaggctaaagtcagaggaatgggggctgggccactcccttggagctctcagatctacagacaagctgtgtgaatgcatagatgtaatcttgtctcaaatactaatacagtggagatttggtttatgttaccattaagttcctctaaaaagtttttcttcctctcttcagagccaaaataaaagtgaactacactgttcagataaggtcacaatctgatgctgtcagtttgaccgagctggttttgcttatggtcatgctgcaatttgttagaataatagggatcaagttttaaatcctcctccttcccttttttctggagtcttgagggccagagtttttgtttttgtttttgtttttgttttcctgcttgctactgttttgtggtgttgaaaagtggtttaaacctgagactaacttaaacacttccttgaccttcttgttgcctgttcatttttgtgccaaggaagtagctgccccagtgtatgt

SEQ ID NO: 26081 - DNA, 1021 bp, Homo sapiens
aagtgctgttgtttttgacccacagcctagtgagccgtaaattaccaaaggaactcacttcatttttaattaattcatttgtttgttgtagacgcagggtttcacagtgtggtccaggctggtcttggactcctggcctcaagtgatcttccttccttggcttcccagtgttgggattacaggcatgagccaccacgtctggccttcgcttcatttttagaacttagtttgtatttattcatcttagtgactcctttgttttgtgtatttaaaaatatcagagccagctttttaggccttccccttaacttagctctcctgttgttttatatatagacattactaagagtttgcttctcctttcctccttaccagtgctgtggagcatccgagtgtgccagagtctccagaattcgtcagggtcagatcatatgaatcccaaatggttatccgtccccacaagtcatttgatgaggtgagttttacctcatccaagagataacatgtcatggctgtggaattttctcaagggatgtcttacctgaactagggaggagggggtgtggcgcaggaacagttctcgctcgggggagtctgatgctactggtctgggaaccattttttgggaactcctgacgtaggtgatgtacctggaagttccccaaggacaaagtagtggcaatccattggttccctcttatctgagagatagttaaaagaatcatagccactgacgcattagcctgtatcagtagcattcttcaggaactagagcgagtacctcctgtcaacattttactacagtgggcagagcactggatggaaacttttctggatttctgcttccttgccagagtaatgggaagattggactcatgctgtctgccttctttaaaattctgtgacctttctttgaaaagaatatttatttcagcctaatgaggtgttttgtgtttattttttatctttttaagctaaatctccactgagagtatagatattgatgctagtggctgctggt

SEQ ID NO: 26082 - DNA, 1020 bp, Homo sapiens
tttgggttccatagttgcacaggtgcatgggatttctgttcttcatacttctctaaactgttctggttgtttctcagaaaatttgccgtagttttttgtttattgtttttcttctcccagatgacaaatgtctcagtgttgtctttgcttacatcctctttgtctttctttgttgctctactaagacttctagtttctgaacctgcctttaagatctcttagtactttagatctgaaacgccgctaggtgaaagaaacaaggcgagtgactggagtatggccagcatcccttattctttcttttcattctagtttttggaacctacacagatgtgacacctcggcagttcttcaatgttcaggtgagttaatttttctctccagatttggagcctcctagcatatcaattgctactgtctacatgaatcatttatctgactcaggtgacattggcttaagtacatccatctatctacctgtcatccacattgcatagcatttaggtaaacatttgacttagaatttctttatctgtcccatggggatgagatcagttttaccctcccacaggactgttgggaatatcagatagaggaatggatatgaatactttaatgtattttatgaggctttattgtttttttccccaaacaacttaagagtaagttacatacatcatagtcctttactcctaaattcttccagtgtgtatttcctaaaactagccatatgccgtatttcttaactaatcatgataccattattgaaattagtaaatttaacactgatggaacactttcatgtagtcctctgtttgtatttatcagttttatcagttgactcaatgtcctttatagcattttccacttcagtacagataggattatatttagttgtcacatctgtttaacctcaaatcaagaacatttccatagtggagggtttttttttttctttcctctccctgagacagggtcctgctgtgttacccaggctggagtacagtggtgtgatcatgt

SEQ ID NO: 26083 - DNA, 1032 bp, Homo sapiens
ctacagaaagcaattagagctgataaatgagttcatcaagtttgcaggatacaagatcaatacacggaagtcatgtttatgtacactaacaatgaatctgaaaataaaattaacaatttcatttacagtagcataaaaggaataaatacatacgaataaattaacaagtgtacaactaaaactgtaacactaaaaacaacaaaacatcattggaagaaatttaaaaagacataagtgaaagacatcccgtgttcatggattagattagaacacttaatattgctaagatggcaataccacttaaagtgatctacaaattcagtgtagtctttatcaaaatcctaggcagttctgcagaaattggcaagccacttctgatagtcatatggaaatgaaaggaactcagaatagcaaaaacagtcttgaaaaaagagaacaaagtttggaggactcactgttcccaatttcaaaacttattacaaagctacagtaatgacattgtggtactggcataaggatagacatctagattgttagaataaaattgagagtctagaaataaacctttacatttttggtcagttttcaacaaggatgccaggatagttcactggggaaggaataggcttttcgacaaatgacactgggtcacctggagaagcagatgcaaaagaatgagtttagactcctacctcattatcatacacaaacattaacttgaaatggggtaaagacctaatgtaagctaaaattctaaaactcttagaagaaaatataggcataagttcttatgaccttggattaggcagtggtttcttggctataacaccaaaaacaagcaatcaaagaaaaaataaacatcaaaattaaaaacttttatgcatgaaaggatactatcaagactagtataagcacatgaaaaggttagggaaataccagtcaagacgcaatgagataccatttcacacccactaagttggctggaataacaaagatggacaataacaagtggggcaattggaaccaaggatg

SEQ ID NO: 26084 - DNA, 1028 bp, Homo sapiens
atagctagcttagaacatcttggatttcgtttgttctagtgagatgatttttgggtagcttccataatggagcacagttggagtgtgtctcaagtgcatttctttcattgttaatggaaaaagagcatgattgtcacatggcccctaaatcacagcctttggctcatctgtgctgattctgtaccaacttgtcctggcacaaactaattctaacatagctgttttggttaagcgggtggaatgtgcagggtgtctttttgaatgtgtgccttaaagtggcatgtgttttccttatgttatttgagtcctattcagaatgacaaagcataacttgtcttctcgtcttttgtgcttaagaacatcttaccaaatagcgtcttattaatcaagcaacagcaagaaaatttgagaagtgattttgactggctgctgtggccagatgtagaaatcagatcttttaatacttgctctagtacccagttgtcttaaattaaacaacgaaaatatcttgggattgctgtttttggtgctagctggcattctgtgattccagggcaaatctaatggaaaaatacagtagtcatgtttttgattgctttggaacagttaaaaagaaaagttacaggaacaaagagaggaaggatgttaagaaatgaaaggctaggggaaaatgttccattaacctcctcatagttttttaaaagttacagttcattgctccagaaatttgagtaaataagtgccattaaagttgcataaagaaaattggccattttctcttttctgtctttcagggcattcgggatatgttaaacttcagtgtgttattgactagataaatgatccgcataaagtccttttgccttaaaggaacttttttttttttttttggccattgtcacttcagggtatcttactggtaaacccttaaaccccttgttagatcttcagagctacataaaattagatctcaattttttgaggttgtcttcattattttaccattaactagttgccctagaactgca

SEQ ID NO: 26085 - DNA, 1963 bp, Homo sapiens
gtcagatctctttcactgtctcagttttaattctgcaatggcggttatcactgggagcccccagcccccgcagagacatgcggagccccgcccccaccctgcactctaataaagaagggggccagcgtgccggcctcttaaaacaagttaacacctggcaggattctaacaggaacctggccaggtttctccgcggggcggggctgggacggccggaagatggcggcgacggcggcagccgggtccgagggtcactctccaatgcgcccttgacggctctcgccgccgagccacctaccttgctagcaggcggcctccgcgcatgcatgaaggggcaggagggggcggtgacgagcacttcacggcgccaatgagcacccaggagcccaggtcgcgcccaatcacggcccaggtggcggagaaaaagtagggtgcgcgcgcgccgcgcgtgtggcagtcgcggaaggcgcgggagcttgcgtgctgctgggcctgagctgtctgtctcgtttctgtccgcgcgccctgcatcccggccccgggcgcccgctggaggtcgccgaggagccacagggctgactggtctgctgcccgggcccaggagtgcctggtgtagcagtcgcggagccatcccggcgtctgctgccatgaccgactctcccctcagaggagactcttcctcagcggtggctgcagagacagatgagcggcggctcctggccgcgggaccgtgagacgggttcgtggccggccatttagggggacgctgcgaccaccgcctgcgcccctccggactggttccttgggccccggaagctcgcggcgggccctgcgggaggcggcatgctcccgcggaggctgctggccgcctggctggcggggacgcggggcgggggcctgctggcgcttctggccaatcagtgccgcttcgtcacgggcctgcgcgtgcggcgcgcgcagcagatcgcgcagctctacggccgcctctactccgagagctcacgccgcgttctcctcggccgcctctggcgccggctgcacggccgtcctggccatgcctctgccttgatggcggcgttagccggcgtcttcgtttgggacgaggagaggatccaggaggaggagttgcagaggtgggcgctgcggcgagctctttctgggccgtggggtgggggggcttgtgaaccctggggcctgccctgtggtcgttggcccttgtttacccggtggtcttttaattggcaatacagtcgattgaacctgcttcagcaaaccgcgttgttatttgtctctgtgtgtcaatttgcatttgtcgggttataaaatagaactgaaagtgtgtaggctggtgtgtaggagggagactttgagtggggcgagcaagacagtaaagaaacaacactgtagaaatcaattagatagcgaaggcatggaggcccttgttcatgtaatctgtaatctttaacacaaccagaaaggtgcaaattcaaaacaaattttaaatttggcctaagggtggtgggctgctatttgcaaaatgacttcaatccagatgggactcaggcctgtgagaaaagccaggagagccctctgtcatcgtgactcgtggcaaaattgagagcctggaagcgattttgtccaggttacacaaaccagcagcccagacatttgaacctgtaagaattaggtcagatttttgcgacgttaactagaactttgggaatagtgtcccattagactctgaagtcatgctgtcgtcatcaaaactgtgaaaagcccagtaccattgattacgtttgttaatctgtagttctgagactgtagtttccaggtaatgtcatggggaaactttgctttggtttttggtttaccttgtgtctgtattttctttgcaacagatattcttaaactgtgccctccctgcacagaaagtactttgccgtgatttcgggaaccagagaca

SEQ ID NO: 26086 - DNA, 1055 bp, Homo sapiens
ggagatgccaagtccaatagcctcatctccatcaagaggctgaccttgcagcagaaggccaaggtgagtgtgtccactggccctagcatttgttctggcatgggggaagggtgagaatgcttcctgtgtccatgctcatcttgatttctgcctgctctttctaggtgaagttggactttgtggccccagccactggtgcccacaactacactctgtacttcatgagtgacgcttacatgggatgtgaccaggagtacaaattcagcgtggatgtgaaagaagctgagacagacagtgattcagattgagtcctgaggcatttacttttgggtaaaggagagttgagcctgaattaggaatgtgtacattgtaggaatcctggttgtggggaccaggtctgtgggcctcaggtctggccagccagggctggtgctgtccccgcctacctccacttcctttcccttgctcactctggatccagtgacagcaggtgtcatgggtcaagcataaatcatatatagcattttcaggcatgttcctggtagttcttttgagtctgacattctaataaaataatttgtagaaaccatttgtctttgtagtgattccaaattaaaagttttctttctccaacctgagggcacggccaaaaagatctggttattttttagccaggaacgtgcttgttaatgagtatgtctggaggacagacctgctcattaggtgtgctgtcccctgtagcctcgtgagtcagcccagaggagggtacatgcgactgtggcctggcctcagtggtacccacacatcagcactaccacaagaaccaacactgagcctcggaagctagatcacaggttaggggtttctctagatgggggttctgaaatttgcagtgtctgctcctgggaggcagcaccagaaagggcactgaaatgtactagctggatgtgacccagtcttaataaacaggttttctaatccagatcttccgactgtcttcaaattcttaccttctgttctttagattaaatgcacacaaaattgaaagatgattc

SEQ ID NO: 26087 - DNA, 1649 bp, Homo sapiens
gagccgtggctgtgccactgcactccagtatggacagcagagcaagaccctgtatcaaaaaacaaataaaaacaataataattttttttaattaaaggagaaaagtttgggaagtttgacttacatatttgatcctcgaatagggagttattttggttttggcattagatagttttgtagcttggttcatggcacttgagcagcaaattcatggcccttacactgaatactaaaatgttatacaggccagccagtgaagctagttgtaagtgcagagattcataaacagagtcgtcccgtgatttgtccgtgtctccccgtattaacattttactcttacttggcgaagggagttgggcttcctgagcatggtctccgtgttgaggtggcttttccttctttccctgcttctgtcaccagctatgtggattaccccatctatgacgtgcttcagatggtgggccacgccaaccgccctttgcaggacgatgaggggcgctgtgtcatcatgtgtcagggctccaagaaggtcagtcctagactcatggagcctcttggatccgtagcctcagaatggattctttaatctttcttttgatagatgtcttcagtaactttagtctcttaacttctgcctctcttatttacacaattcttttgtgacgagcctgccacccacatggaattttgctgccttttgcttttgctgctgccgttggctccacgtgttgaggtcttcaccctctacttggttctctccttcctccttgggctgctcactgctctgccctcgtgacttgctgtacctctgttcccactgcgtattgtcaccagtgatgcactttctaaatgtgtggcttcttccattttggtattagttaggtctcacacagggaccatgccctgttgatttgcccttggccctctgtgaccgtgttgtcactaattctttattactccttctccctctccaacccacaggatttcttcaagaagttcttatatgagccattgccagtagaatctcacctggaccactgtatgcatgaccacttcaatgctgagatcgtcaccaagaccattgagaacaagcaggatgctgtggactacctcacctggacctttctgtaccgccgcatgacacagaaccccaattactacaacctgcagggtcagtgggcttgggagcacacgtgatcctttggtggttctcacagtctttgctgggcatcttcttgaggctccccactcacctctcgcctccataggcatctcccatcgtcacttgtcggaccacttgtcagagctggtggagcagaccctgagtgacctggagcagtccaagtgcatcagcatcgaggacgagatggacgtggcgcctctgaacctaggcatgatcgccgcctactattacatcaactacaccaccattggtgaggcccggcatggcccgtgtcctgtctgtgggagcctttttacacgggtcaggagcccactgggatgagaggtgcgcccgtgtttgtcagcgggatgacactgcaggggacagcaggggagcccgggcagttctgctccttctctgcctggttttagcttctctcacatttcctttttctgtcagagctcttcagcatgtccctcaatgccaa

SEQ ID NO: 26088 - DNA, 1050 bp, Homo sapiens
acttcattccctacaacagtgtactagtctcagacttatttcctaaatccttttataagtagtgtaatgttttagttgttattttgcagacacattttcatgcagctttgactcttgttaggtgcttgaacataaattctgagttgagaggcccgaatttgtagttgtagtctatttaaagttgctgttcaagataggatgttgaagttggtttaatttctcagctccaggactgtgaacttggtgggtgcattcccttaaaagtctttccagccgtgtttaggcttcctctgagcctgcacacattcctgcccttgcccctctccaggaccttggcttctggtggtgatggtgcaacttctgcttcctgctgcaggtgccctggggctgtgagtatctcgtgactgtagcaaactgtggcttctccttaggtgctggtgtttgtccactcccggaaggagactggaaagacagccagggccatccgggacatgtgcctagaaaaggacactctgggtctgtttctgagggagggctcagcctccacagaagtcctgcgaacagaagctgagcagtgcaaggtgaggaggggccagctgggttctctcattcctacctggcagctgtgtccatctcaggccccagacagctcctctaggactgtactgtggtattgttgtttcccatgggttaaggttgattgtctggatgtgattattactattccacataatagttaaggggcagggtctcatgggaggagatttccttagtccttggatgagtcctacaggaaggctcgcctcatccccggttctttgttccacagaacctagagctgaaggatcttctgccttatggctttgctattcatcacgcaggcatgaccagggttgaccgaacactcgtggaggatctttttgctgataaacatattcaggtgagggggtgcaaagcgtttggaggagcaggtgggacatacttcagaagatgggcaatgtcaagtttgtgccatgtttgctcctggtactttattgcttctggcccagc

SEQ ID NO: 26089 - DNA, 1049 bp, Homo sapiens
aggtaatttctgtcctccaattccgtaggatgagattcatcttctccacgatgacagaggtcctgtcttagaagctttagtggccagggccatccgaaacattgagatgacccaagaggatgtccgactcattggtctcagtgccaccctacccaactatgaagatgtagccacctttctacgtgttgaccctgccaagggtctcttttactttgacaacaggtatcaggaaagactgggcaaagttctgccaaggtgaccatcctgctctctttcctcttttccaaggagtgctactgggttgggttttagaagggcctttgggttttgatgtggtgtgaatcataaaggaggaatattgctcttggggcagtgaaaaagactgtttattcccacagtattttctgccaaagcctcatttgtctaactgttgaacttctagcttccgtccagtgcctctggaacagacatatgtgggtatcacagagaaaaaagctatcaagcgtttccagatcatgaatgaaatcgtctatgaaaaaatcatggaacatgctggaaaaaatcaggtttgcccgtggtttatggttactcttgaaccccattctttcgaatgtttgattcaccaataattggggaagattgacagaaattaaaagagagaagacacaacataaatcaccaatatcagctatgaaatgggatattactacagaacctatagccactggaaggataataagggaatactatgagtaattttatgctcataactttaaaaattcagaagaaatggaccagttctccaacaactaccagttaactagcaaaactcagcccagatgaaatagataacatgaagagccctacaactattagagagttggagaattaaaaatccccccagcaagcaatccccagtcccagataattgttttgtgcattcgcattatccagggtccctccataaaagatttggggtcacttacactaaaaatgcaagacaataaaaagaggaaaatgaaaaactagagggcattttactagacagt

SEQ ID NO: 26090 - DNA, 1076 bp, Homo sapiens
ccactgtttttcagagtagttgtactattttacattcctatcagcagtgtatgcgagattcattttctcggcattcctgccagcattctatattgtctcttttattatttatttatttttattttatttttgggagactgagtctcattctgtcgcccaggctggagtgcaatgcgcaatcttggctcactgcaacctctgcctcccaggttcaagcaattctgcctcagcctccctagtagctgggattacaggcatccaccaccacacctgtctaattttttttttttttttgtatttttagtagagatggggtttcaccacgtcggccaggctggtcttgaactcctgacctcaggtaatccacccgcctcagcctcccaaagtgctgggattacaggtgtgagccactgcgcctggcctcttttattttttattttagccattctaataggtgtgtagtggtatctcattgtggtcttttaaatttgttgaggtttatggcccaggggtgatctatcttggtatgtattctgtgggtgcttaaatgtgttctgctgtagggtggagtgttccataaatgtcgataaaattgttggctgatggtgttgtcaggttcttgtatatccttgctgattttctgtcaagttgttctgtcaactgtaaagagtggtgttgaaatttccaactataattgtggaattgtctatgtctcctttcagttctgtcagtttttattacacatatttttcagttctgttatttggtacatacacttttaggatttctgtgtctttttggtggattgacccttttatcattatgtaatgtccctctgtccctgttggttttctttgccatgaagtctactttatttgacactatacccattctacttgtttttgatttatgtttgcatgacatattttttattcttttgttttcaccctacctatgtcattatatttcaagtgaatttcttgtagactgcatgtagcatatgatttttcttctataccaatatcattcttttaattagagtttttagactgttttcttacatgtaattataggta

SEQ ID NO: 26091 - DNA, 1022 bp, Homo sapiens
gagctgagattgtaccattgcactccagcctgggcaacagagccagactctgtctcaaaaaaataaaataaataaataaaataaagtggatatgtaattgctaggaggagtcaggtggtgattcttttccaacaagcaaggggatgttattagattaaggcttcttgctgattcagaagcttctaatagctctgttcagattgccagacagagcactggactatgggtcaggtcatctgttttcagccagctgtgtgatcctgggcaaatcacctatccttctgggctttggttttcttacctggtttagagaggaagttgacttaattcagtgactgttgtggtggcaggatcagaatctcctcaggctttggaaaccgacgttttttaatgcttagaaacaaactacccatttttttgacatttatgaggcaattggaaattttaacactgactggatagttgttgatattacggaattgttaacctttttaatgtgtgataatggtattgttaggattttaaaacagtcattttttattttggggttccatactgcaatatttttggatggaatgaatttaaaaagaaaagtgaacaccaactagacttctctaagatctgtataagcacttaattatctgttttgtttctggcactgattggtgtttactatgtgtttccttcatgggaatggactattgtgtactcatcacagctgagaagctgcagggaggaagaggacagacagagactatgttgtgccctgcatcagggtccaaaaaatggactccctgcctgtggttataagttctctctcctctctgtcctgctggccataccaggaccttgtcagcctggcaagcagcacctctagctggaggcctctggcagtgggcctcactgtagccttgtagcaggctgtgggcaagctggctcactctaaggtgtattcataatcagaacagagtgatcatctgtgtacagccctgcctttgggcagggaagcccatgaggttttg

SEQ ID NO: 26092 - DNA, 1045 bp, Homo sapiens
ggagccgtgaggttgcctggttgaggtactctctctcctagtagctactcatagccagcttttagtcctggtgacactcctcttcattgcctccatttggcaagtggatcctcaactgtgggctcttagggcagggtgggactcttgagagcctttggaaaactctactttttagagaggactggatgacctgctcctccatgagttctcatagaatgtttgatgtctccaactgtgtgatgatgtggggagggcttcagacaggaagatgatcacattttttgagtctgagaaggactgtttactcattctgttgaatcctctatttttgttgttgttgccattggccttggctaggcagggtcaggatgtcttctgtcttttaattcctaccaactcagggccccttctcttccgattccagtgcaggatgagggatgagaagggtgccatcctctaagaagggcaaagtggggtcccccacggacagggcctgagtgaagtggtcctgaagcatgggcagtctcctttgaggggtggccctgtacgtagagtggttatcctgtgtgttctacattctacacatggctgtgttggtgctggtattgactgagtgtctgttgggattttttggattgtggaggatctcaactcagctccatgtcttagttcccatttcatcagaaccaccagaggaaggagagaaagaggatcttagggttcagctgaagcgacaccatccctcgagtccccttcctggcagtaagacctccaaacgaccgaagatcaaggtgtcccttatctcccaaggggacacagctggagggccttgtgctccttcccaaggaagtgctccagaaggtgagtttctcttggtacgttaaatgagaactgagctctctcaggtacacagcattgccctttggtggccattcaccagcatgtcagcctttgctttattttgagagatgcccggagcaaagaagacatgagtctgtacatgtgggtaaagttggcatgagtccatctgaatgaggaccaggca

SEQ ID NO: 26093 - DNA, 1025 bp, Homo sapiens
gagtggtggcccagaagtatcgtaggcatcttcacatatgttctcctcagcattctacctacggtaaaagtgtaacattggtgaatacactgtaggagatgagtgttggtagtggccagggtctcagttctctggtgaccctgcttcactcactgtggctagcataatttccctttaaggaggaatttgtactgctgccctatttaagttactgactggacatctcctgggtgcatgtcggatattatgagcatggcagaccactggggggactccatagcatgcatagttgggtgttttcctcccatgctgctgggccacggtgtgggttgactggaatagtggaaggctcgctggtacaccagtcagcaagggcctcagactcaaggcaacatcctctctgggctgtgctctccgcagtggttcctctgccatcggactcttattttcccatgactatatttagattcacaacaaatactttggttgtttcccaaaggatataaatgattataggattgttttacttttaaagtgcctgctggatgtgaaagcgcaggtggatgggatcatgctcttcacccagctactttcactattagatccattatgataaagagggcagagaaggtatagaccttagccttttaattggctgttgagagtgaatgcaatgctggaagggccagggaagcttggtcttcccagctccaagtggaaaagtcagtattgattttttatcccttgttgacaggaagcaagtgtcaaggctttttggtttcaaagctatatactactgttagataaagcttaacccagggtcacatcctttgcctcaaagtgttgagtggctcacagttctagagtgagttacaaagaacatgaagatcctttgcagtttggtcttatcctttgcggtttggtcctatccttcctactggctttttacatcctcctccttccttacttgcatccttgacttttgtccatctgtgcctggaataagctctacacattcttgcctc

SEQ ID NO: 26094 - DNA, 1109 bp, Homo sapiens
gtacaaacatatcattatagttccctgctttcttacttagtattgcacaaagttaaactgtttttcttggtgattccagtgattgcatcaggctatcgtcaatgtggtagaatgcggatgctggaggcagattgcctggctgatctcagctttgttactgattagctgtgtaagcttggactggtgtctcatctctaaaatgtggctgataataatagctatctaggatttttatgaaaattaaattagttaattcaggtagggggcttaacacaaaattgggcacatagtaagcagtgagcccacagtaattattattactaatattaacagttatttaagtagtaccctcataggttcttgaaatatttggggtgttttgctccaatacaaaatggcctcacggccgggcatagtagctcatgcctattatcctagcacttcgggaggctgaggcaggaggatcgctttagctcaggagtttgagaccagcctgagcaacatagcaagaccttgtctctactaaaaataaaataattagccaggcatggtggcacacgtctgtagtcccagctagttaggaggctggtgggaggaggctgtagtgagttcagtcccaccactgcactccagcctgggtgacagagggagtccctgtctctaagaaagagagagagagagaagagaaagaaccaaatcaatccaagttgtctgaggccttttttttttttctttggagacaggatcttcctctctcactcaggctggagtgcagtggcactatcattgcttgctataacttcgaactcctgggctcaagcaatccgtctgcctcagcctcccaagtactgggactagaggtgtgtgctaccaccacacccagcaaagaaattttttttttttttttttttgagacaaagtctcactctgtcgcccaggctggaatgcagtggcacgatctcggctcactgcaacttctgcctcctgggttgaagcaattctgcctcagcctcctgagtagctgagactacaggcgtgtgccaccccgcccagctaattttttttgtatttttagtagagatagggtttcaccatgtctcgatctcctg

SEQ ID NO: 26095 - DNA, 1462 bp, Homo sapiens
tgtgacttagaggacctttgaaaatgatttctatttgctggcatagtgatgtagtcctgaagatgttgggccagcttttttttccctccagatgtttgtcaaatgtgaagtttcattagttgcatagcttttgaaagacatttaataaaattttcctgacacatgatacttctcagaattgctcaaatggattttaggacatttccaacattttagtgaaagaatgtagtagtatccaaaagcaggctttcttatcttagaaatcagaacttctgaattccagccaaaaacaccccattttccttttctgagccttctttagttttatattcaatattgtatgtatctgtataaatcttaggttggatgtttgaaattttaagtccaaggtctttgagttatcgtccctccttcccctcccccaccctctttatttccccttccttcattccttcccttcttctagtgtttagacaaagaattttataatctgaaaaaggaaagtatgactgttgagtttatctgatgtactttgtgtctccttgtttgacttctggttaaaaaaaaatcctttagatattttaatgttgaattaattagtcttctttgaaacagtatccaaaataatgattacctttgaaaataccagatattttcaggaccaatgttatattttggctgctttgaatagaatgagccagaggtcagcatatcattcaggttcagtcagagcagggagaacaaaagattttctgatctcatctaagaaaggaagaaaagacatttttgccctcatgaaaattgaataggcgggtggggcacggggtggggagtgccagttggctcaccacagttcccatcagctatttgactgtttaggcttgtatttaaaattctgtctcctgtttttaaaatttttgctaattatatctcttgcatgctctttatcttaatcttggtttagatcattttttttctgcccacttaattttctagcctcccacgaagctgacaaaatatagagatcatgtttcaattcttggagtcactttgttatatatccagcagcaatcctaagaactttttctgggattttggactctcaacgttgtggttttaaaatttaatttcagctgtcattggtgtatggtaataatttctaaatagctttctaaccctctgcatcttgcattcacatcattttccttactcccataattttggattgcagaattaatacagagtaagaaaaacaaatagggaaagcatcattatgtaataaaaacaggataattttggaaatgctgttgatatttcataaataaattataccttattctctgttgttggaattaaagtttgcaacgtgatcaataggctttgagaaagctccagagattgttgaacatgaaaaattgtattcgttgcttaacctggttgattataaattagcatgattgct

SEQ ID NO: 26096 - DNA, 1028 bp, Homo sapiens
ttagctgggtgtggtggcgcatgcctgtaatcccagctactcgggaggctgaggcaggagaatcacttgaacctgggaggcggaggttgtggtgagccgagatcgtgccattgcactccagtctgggcaccaagagtgaaacaccatctcaaaaaaagaaaaaaaagctcttttgagcttcagataaagaagaaaactgctacgaatgaagatcaactactggaatattgctagagtcagtatattcagcaaaaggatttatcactatttttacagttaataataaaaaataacgacgatggtaataacaaaaaggagctaccgtttgttgagtgctttctaggtgccagacattgtatcaatgtctcttcaaatgcattgtctcttaatcctcccaatgactcttggaggtatatccccccttcatctctgctcaacaggatgaagaaactgagctcagggtgtttaagaaaccttaattaggaagtgatggagaaggattttgttcaaaccaagcagcctgactccagaacccagtgttctcaactaccataccctctgccttaattaagggcagtaagaagagattaagaccagttagtggtggctgaacaaggtggcctggtatggttatgtatccctttgtggtattttctactaccttgtcctttgcaatttcagaaagtacataggagaactgtgtgattttttttttttttgtcagtttatccatggttatgattaagaggtttttgtggacaattcatacttatcaaagtcattagagacttaataatactataaataccagtttgtttcttttttcttttttttgagacagggtctcactctgtcacccagactgcagtgcagtggcacgatctcagctcactacaagccttgacctccaggactcaggtgattctcccgggtgggaaccttaacctcccaagtagctgggactacaggagtacgtcaccatttcttaatttttgtagtttttgtagagattgggtttcaccatgttg

SEQ ID NO: 26097 - DNA, 1093 bp, Homo sapiens
gccaggatagtctcgatctgacctcgtgatccacctgcctcaatttaagtagtcgtgtgtggcttatacctactgtattgaacagtatctaggcaatcaacttgttagccacttttctccatttgtactgttcttgtccctaaacgagctctcatgatttctggcccatctcagtcaactgcagtggctgcctagctggtcttctaaattccactcctgagctgtagcctactaaacaaaaattgaaagtgatcttttaaaaatattagcttgagccaaatcaacttgcttatggaatatattgtccttttttttgagactgggtcttgccgtgtcacccagactggagtgcagtggcatgatcagagctgactgtagcctcaacctcctgggctcaagcaagccatcctcccacttcagtttctgggactgcaggcgcataccaccatgcctggctaatttttgtgtttgttttagagacggggttttgccatattgccaaactggtcttgaacttctgggcttaaacaatcctccttcagccttccaaagtactgggattacaagtatgaatcactgtgcctggctatatttgtcatttatttatttattttttgagaccagctcactcctgggcttaagtgatcctcctgcttcagcctcccaagtgctgggattacaggtgtgaatcactgtgtctggctgtatttgtcatttatttatttatttttgagaccaggtcttgctctgtcacccaggctggagtgcagtgatgcaatcatggctcactgcagccttgacttcccgggttccagcagtcctcccaccttagcctccttagtagctgggatcacaggtgtgtgccacatgcccagctaatttttgtatttttggtagagacagggtttcctcatgttgcccaggctggtcttgaactcctgagttcaagcaatccacctgcctcggcttcccaaagtggtggtattacaggtgtgagccagtgcacctggcccatatttatcttaaaaaaaaaatagatgtttatcattttttatatagactcattgaaaaaatgactttgtgttcttccagt

SEQ ID NO: 26098 - DNA, 1025 bp, Homo sapiens
gttcatatgctgtcctgtgcaatttctttttttttttttttttgagacggagtcttgctctgttgcccaggctggagtgcagtggtgcgatctcagctcactgcaaggtccgcctcctgggttcaggccattctcctgcctcagcctccggaatagctgggtagctgggactacaggcacctgcaaccacgcccggctaattttttgtatttttagtagagacgggttttcaccgtgttggccaggatggtctcgatctcctctcgatctcctgacctcgtgatccgcccgcctcggtctcccaaagtgctgggattacaggcgtgagccaccgcgcctggccagtgcaatttcagttcttagatcttatattcagtccagagagtatggaaagtatcttcctttctacatcccaacaccctacaactatctaagagggtaaaatcaaatgtgtttgtcagtggcatggtttacttcaatatacataaaggcgccaggcattgttctaagcactttcacatacattatttacttatcataacaaccttttggggtagatgatagtattatctctattttgtgggtaagaaactgaagtgcatgtagaaaggttacagaacttgttagtgtcacacacgtagtgggtctgactccagagactccagtctgattattattgctttattattttgagctcattaaaagagggtgacaaatactgtaccttttgagaacttacaaatgaccgtggtatgtgtgcagaagatgtcctagacaaggaagacaaggagcaggtaggagggcgtgtggaacaattcatgaaattcctcaagacagtggtaaaaacatttttctggtttcttgtttccttgtcacgagagtccacatgaccctgttgctcaacctcttaccacatttgttcatgagaaaatattgggaaaatcatagcaaccagtaatgcatctgagaagagggtgagagacttcagtatataggctcaatcctcctacctcagcctccttccc

SEQ ID NO: 26099 - DNA, 1050 bp, Homo sapiens
gtagaatcagagacagatgaggctagaatgaaaagcagggccagtagtcttgttatgttgcacagttcctagggctgctgttcaccttgcattctacaatattaacactgtagcctcggcatgttaactagccgctgagactgactggcatctgcttgggtggttggtggctgaactgtttagatgagagccagagcagactgaatgtatgtgactcatgctcaccatataccacttggggccaagttctgaaggattgtgttcctgttgaggagtctggacttgattctgaaggggtaggtacattaaaggattttattgaagagaggatcatgactggatttgtagtcatgctgaggaaatagtggtagttagaaatggatctgaataagagttatcagctttagggcctgacaagagttttaaacttgtctctctgtttcttccagaaacaaattgttcaaactctgttagcttccatttcaccatgagatagtagtaattctggtttgagaaagtagaaattctgacttgggtttattttgtaaggattttgtagatgttaattaaaaaaaatttattttagatggtaaaaattgagacatcttttctggctagctattgtggttcttacttccaagtgcacattgtaattccctggagaacttttaaaaatattgacatccagtcccaaccccagagcttctgattcagttcgtctgaagtgcagtctaggcagccttcctcttttaaagctttccaggagattcacatgtatagccgaggttgagaacccttggactaacatgggttccttttatccttataaaactaaatttaaggccgggcgcggtggctcacacccgtaatcccagcactttgggaggctgaggcgggcagatcacaaggtcaggagttcgagaccagcctggccaacatagtgaaaccctgtctctactaaaaatacaaaattagccaggtgtggtggcgggcgcctgtagtcccagctacttgggaggctgaggcaggagaatcacttgaacctgggag

SEQ ID NO: 26100 - DNA, 1228 bp, Homo sapiens
cctataattccagcactttggtaggctgaggcgggcagatcatctgaggtcaggagtttgagaccagcctgaccaacatggagaaaccccatctctactgaaaatacaaaattagccaggcgtggtggcacatgcctgtaatcccagctactcgggaggctgaggcagtagaatcacttgaactgggaggcggaggttgcagtgagccgagaccacgccattgaactccagcctgggcaacaagagtgaaactacatctcaaaaaaaaaaaaaaaaaaaattagctgggtgtggtgatagtcccatctacatggggagctgaagagggagaactgcttgagtccagaagtcaagtatacagtgagccaagattgtgccactgcactccaccatgggtgacaaagtgagactctgtctcaggaaaaaaaaaagggggggagggggaggggtgaaaaagataagctacagaccaatggaaaccaaaaatcccataaaggaatctcaaagaactctcaaaactcaacagaagaaacaatccaatcagaaaatgggtgaaagacaggaatattccactgaagcgaaacacaggtgtccaccactgggaaatgcaaatgaaaaaccaccgtgaggcatcacgacacacctgtcagaacggctgaagtaaaaacatgtggacaccactaagtgctgtggaggattcagggaaactgatcatcctaggttgccggtgaggacatgagtttgacagtttgtggccaggtgcggtggctcacgcctgtaatcccagaactttgggaggctgaggcgggcagatcacgaagtcaggagatcgagaccatcctggctaacatggtgaaaccccgtctctactaaaaatacaaaaaactagccgggcgtggtggcgggcgcctgtagtcccagctatggggaggctgaggcaggagaatggcatgaacccgggaggcagagcttgcagtgagccgagactgcgccactgcactccagcctgggcaaaagagtgagactccgtctcaaaaaaaaaaaaaaaaagtttgattgtttaaaaaacgaaacatgcaacaaccctatgaccaagcatttacactcctcgaaaactaatcctgacacagaaacctgtacatgaatagtcgtagcagctttatttggaatagccccaaactggaaacatcccaggtgtccttcagggggccaatgcatacaccacgga

SEQ ID NO: 26101 - DNA, 1048 bp, Homo sapiens
actcaactcttggggcagtggcccgtaaccctagtttgcctgaggcccttatgtccccttatgttcctggtactggagcttgagctcttgcctggaacgctgcagctgcacccaccctgcttgatcccacctgggaggccaggacactgaggagctctgaacccagcccacagggaagcagaggaaggtgagcccccgccgccccccagcccttcccatcccttccctgctccctggtggtctaaggacccaagctccctagacttcctcttccaccgtctgtacgtttcaaattacactggtgtaggcctgtactgctggtggggctgggcccctaaacgccagaaagtgaatcttaagaagctctgccctaaactgagaaccacatgctgagggaagggctgaaaggtgaaggctcagcctccctcacatgggtcctgggttacattaggtaccgggctgattgataggcatttggccatggttccttttcgtctacctttgggggccttctcaggcccagaacaaggctgttgttactatgtggaaaagctgaccagtgctgcacactaggggcacacacctttccatgagcagctcctgccctgtggcgacagccagcgtgcacccagacgctggtgccatggcgaagcaggcgttcaagaccatggagaagacaactcctcatctagaaaatgaggacacctcagtgacaaacacacctttttataccaatcagtatcctctgttcattaaaactggctatccattacagcctagccgtctttcctgggccgagaggagcccatgcttcagtcaccagggactgtctgatagggcccacgcctgttagccatgccggccgacagcaagataggccgagtgcagagtgggcgggatgcggggtcctggcactaggcttttgtgcttaaggcacctctgctcactgacgacaaggtcaaagagcagtggttctccacctcagctgcttatcagaatcaccaggaaggtttaaaaagtcctgatgtccagaccctaagtcagaagc

SEQ ID NO: 26102 - DNA, 1052 bp, Homo sapiens
cacagcccagccctgaaggccatccgggaccgaaaggcacggctagcatgtgacctgctgccttgcaacagtgacctgcgggacctgctatccagctgagccgccaccctatctccagctgcctttaaagggtacacagaccagttctccaagcccctgccttggtcagcatccatgctgctgggcagggaactgaggccagaccacccaggaagagccccagtctggtcactgtggaagcgagggagtagatttggtgtggctaaaagtgtttaagactggacagatgatcatattctaaattagttcatatgagacatctatttatttggaaaaaaataaagttatatccttacctcatcccacacccaaagataaattgcaagattaaagatctaaatataaaaacacaaaactatgtaagtattagaagaaagtagggactatgtgagaagctgctttctagctgaatgcccttggtaaaagtcactttagctgtctgcccctccatttcctcttctgtaatgagagtggttatcatagggcccgcctcagagtcattgtgggaggaggtcagtgtgcactgggagagccctcgagagagtgcctggcacgtggcaagcagcctgagggaggcccgcttcccgagctcctcatcagcactttgcgcataccatgatttcattgattgcaacggtccgatgggagaaaagtgctgtttcatctgtttcgtttttcattgctggttactagtgaggttgagcacctgtgtcttctgtgagctgcctacccatgccgattttagaaacacttcttattgattcataggagtgttgatattctagatcctgatcctttgttctatatatgtacatttaattttttccctttttttcttttatgctctttcttttattctttcttttttttttttttttttttgagacgcagtctcgctctgtcacccaggctggagtgcaatgacgtgatctcggctcactgcaagctccgcctcccaggttcacgccattctcctgcctcagcctcccgag

SEQ ID NO: 26103 - DNA, 1070 bp, Homo sapiens
aggctgccgcgcggccctcgtggttctcaccaggccccggcccaaggaggaggcgtggggccaaggagaggcggatgaacggggccccgagagcttggggcttggggcttggggcctggtgcgggaaggcgggcgggacccacggttcccgtgtactgagagcctcccagggccccgcacgagctcggccaggagacacctgtcccgcgggcggcggggaagcggaagcactggtttccgtaaccctcccgagtagcgggggacgacctcccctgggagacacaagcctgctcaggtgtttgagagagggcccggggagcagaatctgcaccaggggcattgcacccaacctgaggggcatggagctgcaggcctgggggctgcgcggtgaaggagagcagtggcctttgtttagccccgggtgccaggcagcctgcatgctttaaagatggcaagagcttcgcacgggcagccttcgaggcagggcacagtatctcatctgtgggacccagagaggtaacacgtttggcccagattatacagagattatggtgccaataggaacagaggaaggcgggaaaccagggtgcttcttgtgagcgttgggaaccactgtgctgtgtcatctgcccttgcggatgcagccctcgattgccactgctgtgtaagcattctcatggaactcttcctttaccgtggttctggcacctgcctacttccctccgcccctcctaccgctgtcctctgcactgctgaagtggttgcctcagagggtctttctgcttccacgcttgccttcctacagggttttctactctcacatagcagccagagcggctttttgaaaattagaaatcacatcattccctgttatggcctacaaagctctgtagacccacccctgccggttctacttctcctcctcattttatttctcatgcttttcttcccccaatcactacgccgcagccacactggtcttgttttggtgtctcaaatatgcaagaccttttcctgagttaaggccgttggacttgctgtcccatctccttagaatgaacttcctacaa

SEQ ID NO: 26104 - DNA, 1084 bp, Homo sapiens
agtacattcaagtttgatcatgaaactgcagaaattcagtcacaggctcaggctccagttttactcttagttctctccctagttccatcacactcacagttacttcctccactgaagtcttgaaaccctgcaagctatctatgagggctgaaatcaatttcttccaaacttcatattttgacctcctccaaggaatcacaaatatctttaatttcatctagaatagtgattgctttctaaaaaaatccagatgatttttaatttgccttgtgcagatacacagaagaatcattgtctatggcaggtataggcttacaaaatgtattcttaaataataaaatgtccttgatccatgggcttcagaatgaatgctgtgttagcaggcatgaaaacaacattaatctatttgtacaactccatcagagctcttgggttatgagtgcattgtcaatgagcagtaatattttaaaagatatatatatatatatatatatatatacacacacatatatacatacacacacatacacgtatacacacacacaaacacacacacacacacgttttctggacaataggtctcaacagtgtgcttaagatatttggtaaaccatactgtaaacgatgtgttttcatccaggctttgttgtttcatttatagagtataggtagcataggtttagaagaacttaaaaatgtagcagaatggtaaatgagtactgcctttaatgttttaatgtaaccagctgcattagccagtacataaagagtcagcctgtcctctgaagattagaagccaggcattgacttctcctctatagctgtgaaagttttaggtatcctcttcttccagtataatgctgttttgtctacattgaaaatctgttatttagcataactgccctcatcaatgatcttagctagatcttctggataacttgctgcagcttctctatcagcactggctgctttaccttgcacttttatgttatgaagattcttttcttaaacctcatgaaccaacctctgctagctttaaacttgtcttctgcagcctcctcacctgtgtcagacttcatagaat

SEQ ID NO: 26105 - DNA, 1032 bp, Homo sapiens
ctattttagaaacaaaaattatgctggattctaattaactcctaaaatggtcattttcaatgaatattgcagtgatttctgaaagagaaactgatcagtatctaatgcttgtagcagttttactttgtataggtatgtcaaaattgataattgatgatatttttattgaggctaatatattatcctttggtgccacgactggatgaagaaacttttggaaggctaaactagtggatacaagaaacttaggcagattattacaccatatgggtgtgagagataatgaatattatctacttggtatcagcaaacaggtgtccaaggtgatcaattcaggactcttccactgaagagatgtgaagtgtaagtttaactgaagtatcattgcaattgtgtgccttctcagttattgggcaatttaaagagcatgatgaatgtttgtagtataatggtgtaaatccttttgatttgttgcatgaaagacatgtgggatcatgtagcacctgctttcacgttgattctcaggtgtatgagtttctcctctgattttagatcactttgtcctcatcactcagcatatccacgttgatattgacacggttttattttagtttttggcatataacaaatcataccctgtttgaaattataagagtatttttcatggagcctgtattcccttttctcagcgtatttctgtcatgttctagtccccagacacaaagtagaagccatcaaagcctatgctaatacaggcaggaagacagaggttgatgctaacactgcgtgaatgtgtggataattttgtcatttttacatatgagtgattatgaatcccttttacttttcagtgtcttttgagcaaccaccaggcttgaaggtaatgaaactgtcatttatattgtgaactagtaaatgtatagtctatgaaacatactttattaatttattatttcatttcaaattccattcaggctacaagagacgagaaagattctcttttgaatatagccagaggaaaaaaagatggag

SEQ ID NO: 26106 - DNA, 1009 bp, Homo sapiens
aacctgtatttcttttttttcagtgtatttctgtcatgttccagtccccagacacaaaaatcaaagcctatactaatacaggcaggaagatacagcttgatgctaacatttcatgaatgtatggataactttatcatatttacatatgagtgattatgtatcccttttgcttttcagtgtcttctcagaaacaaccagcctcaaaggtaattaaattctcatttatattttgtattagtaactgtatagtccatgaaacatactttctttattgataatttgcttcaaattactttcagactgcaagtgacaagacagattctgctttgaatacagctacagaaataaaggatggactacaatgtgggacaggtaattttgcaaaacacatttaatgtcatgttcagtccagatagaaaagaacttctcttccccaaataaatcagtgggggggctcatcaaagctgcacattctgattcagcaggccagagattcttcatctgtaataagttctcgggtgatgctgatgctgctggtcttggacatgatcttcacagtaagattatagacttccccacattgaaattgggaagaagaaacattggagagcagatcaagacataaggggctcaggggacagcataattttgctttaattctacagcatgttttcaccaagggtggaaggagaatgagttgaagtatagattttacaaacgtcacatcgtattgataaaaacagacggaaaactgatcgtaataaccagtaaaaattgtagaacgagaactaacgagaccactgatgtagcaattattttcctcaaggaagagggttgtgaggcaggaaggagggaaaagatgaagttatttatgtaattttggggtttctgctgaggagacctgagtgaactcacttcggatgcatttagcatatttacacaaaaaagatttgattttggcagctccaggaactactggatgaagcaaagaaagctagaattgggataa

SEQ ID NO: 26107 - DNA, 1048 bp, Homo sapiens
tggacacgacctggggtgaggaaagggtggcaccaaggcacaggtgtcccaggtgcagccttctgagggctgtgtccctgtccccgcagcgagcgtgctacctgtccatcaacccacagaaggatgaggctctggagacggagaaggtgcagtacacgttgccagacggcagcacgcttgatgtaagtggccgggcctggcactggagtggcagccgatgcccagcctgggggaaggggtagcccgcttctccaggaagcctgtctgcctcaatcttgtacactaaaggtggggcctgcacgattccgggcccccgagctgctgttccagccggaccttgtcggggatgagagtgaggggctccatgaggtggtggccttcgccatacacaagtccgacatggacctgcgccggacgctgttcgccaacatcgtgctctcaggtggctcaacgcttttcaaaggtactgtggcttgagagttggtggtggtgagacgaggcccagggcagctggaccctcagagagtatacccctacccagagccatattctgttggctttttggtggtgctcaatgaacattttttttaacagaccaaaatttaaaattaaattttgtttactctgtgaatagaggagaagtttacacaagctctaaagtgtattgtgagagtcgagcaaggagcatgtgcggcttcatctcacgctgcctctgtgaggacgcagggcccgcaggcagccatggggctggatcatttctcagccttgcccttcatcctgggaagagctgctgatagaggaccagcagtagctgggggccctgaaggctgggtgcgggagctagcagcgaggaggccgggtgcagaccccaggctcagccagctttgtgttcacaggcttcggagaccgattactcagtgaagtgaagaagcttgccccaaaggatatcaaaatcaaggtgaggttacagaaactccccctggggcactagggcgctggcagccttggcatggggaggaaggttgaatgctgcccccagacccgctca

SEQ ID NO: 26108 - DNA, 1028 bp, Homo sapiens
tccaagaactgaatctctgatccagaagcgctggcagtggggtagggcgcttgactgagtgagagcagggtgcacaagggagccccgacccagcttcctggggttgtcctccctcagtctgtggatggtgacggcagccctgccccaccgaagtcaggagcgtgggctgagtcactgtggctgcaggaagccgaccctctgcaagggctgggccatggagggctgggttctggcgctcagacatgcagctgtctctgctgaccgtgccttctgaccctgagcttctcgtcctgcctaggccccctctctagccccgaaccccataggccccagttccaacctgtgccccccagccacatcctggtgtttggaggccaggtaccctctgggcgactatggttggatttcggtttttctggacacaagctctgccatgctccctgcccaccttgctgacgttatccgtcctaacagtgtcgggcggccgaagcacatgcgggtgatggctggagccctggagggggacctcttcatcggaccaaaagcagaggtaacaccgaggagcctgcctttccctgggggtggggtcctcagttgcaggaacatggcatgtgttcttgggcctctgctggtgacctcccgggtacctcctccaggctccagctgggaagtgctgtgcaggggcacctccccctgagatggggcagcagttcctcttctagggagcatgggtagagctcatcgtgtcctgtcttttagaagctatttggaagctacagaaccaagaactgatcaaaaagtgatataagagtcagaatcacacacacttcacgtctgctctaatgagggccatggggccgcctctcacagtgaagccggagtgtcccaccaaggggctgcatggcctgatcagaccctcaggagagcatgtgtgggtgtggggagagcagcaagctgagcttggccaagggcagtttaggcgcctgaggagcattgtgtcgggtgccggggcgtggggcatgcgtggt

SEQ ID NO: 26109 - DNA, 1036 bp, Homo sapiens
tgtgggttccctgagtcacagcaggggatgtttaataaggaggttagcactgagcttggggacgtgctgtcacaccagcaggacgctgcaggaaggagcaggctacttcctttcttgacgtgcaaataactcgtataggctaatcaacaggcttataagttaaaagggctaccgctcggccccttggggattccatcccctcctctgtaacttggagatgtttgtttctgctgcagactcagagggttgcgatgaagagtggtgggactgagttgagaagcttatcccttcgctgggtgggaggtttctaattgccccgttctttgggggatccttaagtccagcttccaggtgggggcagcgataggaccaagttctcctagtagtctctgggaagccacttgagggaagctgccggtcatcccatgcacccattggtcttctccagcaggccctgtaggtcgtccatgttccatgccttctgggttcttgggggagaaggaagctgttgaaaaaaaaaaaaaaagacccacacagaggggtttcttctagcttttgggagtagcatgtgctatggaatcctgctggagccaaccattagttgtgcagaggaaggtgcccttcgtggtttctctatctctatattattgacattctgggctagctccttgttggtagtgcaggctcgcctgtgcatcgtaggatgttgagcagcatccttggcctctgcccactagatgccaatagcatcccccactgcatgtcccctctccccagctgccagacattgccaaatgttgccagagcagggggatacaaaattgcccccaatcttgaaccataggtgtacttgtaaatgatcctggcagggtccctggcttcctccttggcctgccttgacggggcagccagctctctccattgcgggggactggcttcatctggtggtgcatgtgggcagctcaactttgtttttccttgcagggttcgggggtgattaaagctggctttgcaggagaccagattcccaaatact

SEQ ID NO: 26110 - DNA, 1046 bp, Homo sapiens
agaagctcggacccttggtctaattcgcactttcctcacgagaattaaattaagcaaaaaacaaacaaacatagtgggccctcgtctagatcatgatgtgccagtttctgagacatctttttaaggctcttactgcagctcccctccccaccctcctcttctttgcaaaacagacccaagcagggcaggctcagaccactcgcttctttcagatctttcttgcaattatgataacatgagatttgctgttgtgcttttagagaaaagtctggactcagccacaaactctaataagacctgtacatctgagaacctttcccgttactgcgttttcaccacctgtcttccccatgctttatttatctgtatgaacacagatttgacattacagctaaggaaataatttgagttgattcagaaatcctggcatgtgacaattttgttaaattaccaagtttggtttttaataatttctcaatattatgcgccaagatctaattttaaaactgtatgaggactttgtgctgaaaatagagtatttttttaaagtaaggctgtcttggtttaaaagcagattacagaaatgtaagtcaacttaagaacggtgaatgaatgtaaaaacattcagttgagaccatatgcattttctgtgctgtttgtacttgaggtatgtaacatttgtatacctgaacttattttaaagatgaactgaaatgcacatagccaagtcttgagatacaagattgaatgtgtatttcttaaaaatacaactttgtgttgtactttgaaataaatgatgcttttttcaaaagccttgttttgtggttttttttacacacaaggtgtatttattaggattttctcacaccaaagtaaaccaccttatccttgccttactctgtggagctgacaggttaagacggggtttgccttctcattgctggaacttcctgcagtctaatggagttctgtgtgttcccatggcaatcatggagggtccttgatcgaaaacaacttgaaagcctgtttggattcatccagtaagc

SEQ ID NO: 26111 - DNA, 1029 bp, Homo sapiens
tgccaaggaatgggaatcagatctcaggcactgaaggtttctgcagaaccaggaagggcccagggcatccctggtttaggaccctgagtattcactgatccttttgtttttctatttgtttatcaacagtatatgtttacataaatgtaataatctaaaataagcaaaagaagtagattaatcatattatctgtaaaaatctgcttaaataacactctcaactcaggcccaagggctgtgaacaccacactgcacacgccagccccagacctgtcagcactcagaaaaccctgctccacagctggtcatgtccctagctgtgtcctcagctctgcctctctcctccccagacagaaatgtgtactgtgtattacaggaataaaaataggccaggcttgagtcaggtgtaacgttgtgaaaagcaaaaataaaaagaatacgaaatctcagaatattaagaaaaagaaaaacattattattaaaaaatggaggaaaatatattataaaaataagccaggtgtggtagctcacatctataatcccagcactttgggaggtcaaggcaggaggattgcttgagcccaggagttcaagatcagcctggaaaatatagcaagaccttatcttacaaaaagtttttcttttaaattagccaggtgtgatggcacacacctgtagtcccaactactagggaggctgaggcaggagttagagactgcatagagcccaggagttagagactcaggagttgagcccaggagttagagactgcagagagccgtgattgcaccactgcactctagcctgagcaacagactgagaccctgtcagtaaataaataaataaagcctggcatctgaaccacctgtttttcctttttaaaaagaatcacttcagtctgggcacggtggctcacacctgtaatcccactgtaatcccagcactttgggaggccaaggacggcagatcaccggaggtcaggacttcgagaccagcctcaccaacatcgtgaaaccccatctctgttaa

SEQ ID NO: 26112 - DNA, 1057 bp, Homo sapiens
agccagcaccatgcccacagcccgctggagcagcaccctcagcctcctctgccaccgccagtgcctcagccccaggagccgcagcctgaaaggctgtctcccgcccccctcgcacacccttcccacccagaacgtgccagcagcgcgaggcacagttccgaggactcggacatcaccagtctcatagaagccatggacaaagacttcgaccaccatgactccccagccctagaagtgtttacagagcagcctccatcgccattgccaaaaagcaaaggtaatcatctcccactgccggagatccgtgatgtgtgagggaaaagccagtgcgtgcttaaggagctattaagattatagttgtggtaaacaactaattcagtaggttcctctggctcagatttatctccagtgttggacttcaacttttccataaaaatgcaattagaggtatctgtcataaaagatatatttgtatttcttagattgtttaccaaaatcagaaattctgtggacatctgcttttcttttcagctgcctgagattgtgttattgtgatagatttagcttttgttttattgttaaaataattttgagcacaggagtaaaatggagatcatctgccttttaactccaaattaggatttctttactttagagcaggggttggcagactacagttagcgggccaaatcaccacctggttttataaataaagttttattggaatagaaccatgctcatttgttggtatatcctcagctttcatgcttctatggcacagttaagtaattgtgaccaaaacaatatggcccacagagctgaaaatatttgctatctggccctttgcaaaaaaagccaaccctgctttagagttctgcttactgtattaattacctatttctgagtaacagatgacctcaaaacccaggggcttaaaagaacgtatactcttatctcacagtttctgtggtcagggacatgagtacagcttagcggggtcccatggccctcacaggacacaggactgcagtcaaggtgttggccaaggctgatgtca

SEQ ID NO: 26113 - DNA, 1050 bp, Homo sapiens
acaacagactatgaggtaaggactttatggggattcatggcagtggggtttttctgaataagtcagtcctttcttgtctttatgaaaccaaagaattaagtttactcagagttacagtttaccagtttcataccttaaaaactgagctttcgagaatagtttatagaatattgatgttcataggctcatagttttttgataaaacccaaccctcctaacctaaaaagcaacttcagaagaatgcctttagcacgtttagaattgctttgttagaaacctgcttaaacagatggttatatcattgcacagaccccagctgagtgtcctgagttagatacctctgattgttcctacaatcataaatagcagtcagggtctaacatttctgaaaaggaagataaaatcaggagatcatgtcctaatctgagtgctcacatttatattttcatgagtcattcaaagtcaagggactaaaggttactaagcttttaattaaaatattctgtgtggagcttattttgcattcagtaagattttgaatggatgtatttctgccagacctaaatgtttttaattgtatatctaaaagctcttaggaaagtcaagcactgttaaattcaacaacttaccacctttgccctcatagatgttttcagtggacacaactcccacgtggaaaaaaaatgtaattataaaataaacagaattggccatttaataataaatgatttgttgagagtatgtcaggtgaggaattcatggttatcactcatgacagaaataagtacatttcagaattcagataaatttttgttaatatgggtgaaaataagaattaagaaaaataccctagagaagtagctttgagagttactaacagtatgggatgggattctaactctagaatgttcagtgcatttttaaaaattaggttgatgtctatttctgtatcaaaaaaaaagctatataactctagatatgctggattttacatacattgttttaggagtacagtttgactttcttttttaaaataatctatttttatag

SEQ ID NO: 26114 - DNA, 1207 bp, Homo sapiens
cttatgacatggaattaaataggcccatgtttgtcctttttcttattcactaaggagttttaggatatattgtaagtgaacatttttgctcttactgggtcaggcactatgctagtactgctatgtaataaatgtattacttaatacctatatggtgcagtggtcctagttttctagataggaaagctgagttagagctgcttttttttttttttttttttttggaagtgacttacacaactataaaaaatgcaaaaataggccaggcatggtggcctcacgcctgtaatcccagcactttgggaggctgaggctggtggatcacttgaagtcaggaattcaagaccagactggccaacatggcgaaaccctgtctctaccaaaaatacaaaaattagctgggcatggtggcatgtgcctgtagtaccagctactcaagctgaagcaggagaattgcctgaacctcagaggtggaggctgcagtgagccaagatcacgccgctgtgctccagcctgggcaacagaccgagactgtctcaaaaaaaaaaaaaaaaaaaaaaaaagaggtatgtgaaacatgaaagtatattatacagtgtcacttagcaatcacatctttatgaatatatcattttaattgcatagtctatttctgttaaaaacctatatatctgttaatataatacatctgtacctacatctgtacctacctatgtgtgtatcttttataatatccaaagcccaaactctgccagtgttttggtagttttctcttattcccgccttcattcacccattcaataaatatttaatgaacatcaactgtatgctagctgctatgctgactgagaatacagcagtgaatcagaccactggggttccctaccccatcaagctcactgtttatcagggctctctggaactctgggagatatttagattttattctaagtgtaatgggaaattattacaggattttaaacgagagtgacatcatctgatttatgtgttgtaaaaggtcactgtagctactttgtggagagtgaacttacagacatggaagggcagaaagcaaaggagaccacttgggatctgatttagcaatcagcctgagaaatgatggtggcttagatttcccaccttatcagctatggggcaagcccacctaccgtggaaactgagttttcagagctcttcttaaggtttt

SEQ ID NO: 26115 - DNA, 1023 bp, Homo sapiens
agaaccaaatatagattgtttacctgggaagacactcttacccttgtagtccagtgttactgtgtgtcactagtcttgtcaatattacagtaagaaaagattgtaaagcgagaaaatgtatatcgtttgttgattatacaacataaacacatgagtatgttctcctcaggaaaaaaatgttaacaattcaaacatgaatgaagcaaaaacgtccctttgaacttcctacttcccagtccagctgtccagcagaactttctgtgatgatggaatagttcctttcctgctttgtccaaaacagtagccgctagctacgtgtgactgttgagctctttaattcagctagggtggccaaaatgttatttcaactaatttaaatgtaaataaccacatgtagctgatagctattgcatagacagcatagttgcagtccaagcccttcctcgtggacaccacttttgccaccttgtatgtatcattctagacctttctcttgtgcatgcgtgtatgtgggcacagaaacatttattgtgggaatttgtttacacataatatattctgtacataatgtttggcttcctttttttcctaaactatactaaattagaacaaatagcactggactaaaaataaagaatgtgtcaggttcctagttttagtgtaattatttgtttgactttgtaatttagactttttctgtctctatttctttattcattttctctgttatcagtaggcgactttttaatcttctgggggtttttttggttggttggttggttggttggttggttggttggttggttggttggttttccagacaccaggctggagtgcagtggtgccatcttggcttactgcagtcttgacctcccaggctcaaccaatccttttacctcagtctcctgagtagttgggactacaggtgcacgccaccacacctggctaatgttttttatttttttgtagagacagactctcactatgttgcctaggctggcctacaactcctgggctcaagtg

SEQ ID NO: 26116 - DNA, 1046 bp, Homo sapiens
agtgccaggcacttttgtttttaccagtgaaaacagagatgcttatcatacatactctggggagtttgggtgaagtcagcagcagagggaaggcaagcatgataaataagtaaattttataagatcttagaagatgttacaaggtcagaagaaaagtataagatcagagacttaggtgtgcacagggaaggcggtaccattttaaatagggtggtcagggtaggctttattcagaaggtgacatttgaacaaagactcgaagggcgtgaggtaggactgtttggaggaaagtgaaatatatggaagaagagcattctagccggaaggaccaagcagtataaagtctccattgttgaaagcaggcctgttgtgcaaagacagccagaccagagtgagcatgggtgagaggagaagtaagggggcagactatgaagggtcttacaaactatggtttgacttgactctttttcctgaatgatgtggaaagccatcaaagggttttgaacagaggaatgaaattgtagctttaggttttaataggatcattgttcatcaaaaataggacaagggacaccagtcacattggctgttgtcatactccagggtaagaagatgattagatgattactctgaccagagtggtacgtggaagaggtgaagaaaggagttggacttgggatacagggataccttggagatattatgggttccgttccagaccactgcagtaagccagtcacagaatttttttgtttccccatatatataaaagttatgtttatactatactgtggcctattaagtgcagtagcattgtgtctaaaaaatgtacataccttaatttcaaaaatactttattgctaaaaactgctgatgatcatgtcagccttctgcaagtcgtcatctttttgctggtggagggccttccctcaatgttgacagccactgactgatcagggtagtggttgctgaaggttgggatggccgtgacagttgcttaaaataagacagcagtaaagtttgccacattcattgattcttctttt

SEQ ID NO: 26117 - DNA, 1014 bp, Homo sapiens
aacacttcaagcttcacctgtgttaaaggccagggtttttatttttttcattgctaccgtaatacagagactagaacaagagttgcaaacagattcttaaactgggctaggtaaacaatataaatgagggaagcaagccaagtgggatgtgggggtgtcctagagaacatgtgacccattcgaagagatcagcccccaccgggctccagcccagtggttaccatgttgggagtctaagcccatgtgcagttctgctgattcccaagaagagtcagaaataagaagtttcatgtatctgccagtctttacacattgaaaatcagttcaattttagaaagacagtatgggccaaacaacataggctaaaggctactaacttgacgtttctgaactagactctcccagggactatttctatatatgaatgttaggcaaagagaatagtttctctggaaattttttaaaagataaactaaatgtgtaggtaatcaaggaacaagttaaccaatctgttttgtgctgtcagatgatggaattaaacaataaaaataattacacctatcaaaatccacatttaaatagtcaagatttagctcaaaggagatagccaaaatctttactctctcctcttatccttttttcttcttcttgctttgcatctttttttccctacaataagacactgacttaagctcgagacgtagaggggagagatagaatgaactcttgggggaagaaataacctatttcctctccacttcagctttatgccaacaataagagccttggggaaagatgaatagagtttcttatgtcgaggagagcaaaatctttctgtatgtttactctaattgcctttgtcatgctcggaattcctggtcaggtcttatttctttgacaataaaacattgtctataactcagagtttttagttattaactgttatctgtacgttaaccaaaaagtaggaaatacagaaaagactattttttaattattgttcaaactaagttt

SEQ ID NO: 26118 - DNA, 1048 bp, Homo sapiens
gatcatttgaggtcaggagtttgagaccagcctgaccaacatggtgaaactccatctctactaaaaattaaaaaaaattagctgggcgtgctggcacatgcctgtagtcccagctacttgggaggctgaggcaggagaattgcttgatctcgtgaggcagaggttgcagtgagttgagatcactccactgcattccagcctgggcaacaggcaaaattttattttattaaaataaaataagaaacagccttaaaaactaggaataaagaataccacagaatactaaaatggtatgcaaagtctgaatatagaaagatctcacaccttaaacaaaaactaactcaaaatggatcatggacttaatgtaaaactataataaaacctttagggagaataaaactaagaggaaagcttcagcttacagggctaggcaaagagttcttgacaccaaagaattaataccagatgtgcaatgtataaaggaaagatcgatgaatttaaaacttgctctgggccagacgcagtacctcatgcctgtaattctagcactttgggaggccaagggaagaggagccattgagcccaggagtttaattaagaccagcttaggcaacatagtgagaccttgtctctagtaaaataaaaagtaagtaaataaaataaataaaaaattgtccaggtgtggtggtgtgcacctgtagtcccagctactcaggagtcagaagcagagaatcttttgagcctgggacatcaagcctgcagtgagccatgatcacactgctgcactccagcctgggcaacagagccagactggtctcacaaaaacaaacaaacaaaacctttctctgcaaaagaccatgtgaagatgtaaagataaatatagactaggagaaaatatttgcaagtcacacacctgacaatggacctagtttctggaatatagaaagaactctcgaaactcaatagtataaaaataaaggaaacagggaaaagagatgagcacacatttccctgaaggggaaatacagatggtaaaaacgacatgaaa

SEQ ID NO: 26119 - DNA, 1048 bp, Homo sapiens
actatctcaaaattctttttatgaattatctattacaaagggaaaaatacatctttgtgatgcaaagatctggtggatactacattaagcaagtgatccaatttaatatcaccagtagtgacaaattgaaatatcagtctcttgttagggttgcatgtcatttctatattattcttaccaaaaatatttgccctgaatctaatcatgaggaaacaataaagcaaatcaagattgtgggatattctgtaaaacactaggtcttgattctccaaaaattatgtcatgaaagacaaaaacttttgagggggactgttgtaatttaaaggagactaaagtgacaaccaaatataatgctgtaatgcatgatccttgattggatgctggactgaaaaaaaaggttataaaggacattttggggtggaaacttaaataccgactgtattttttaaatgttatatgtcagtattaaaatggttggctgtggtaataaaattgtgattatgtaggagaatgtctttgttcttaagggatctgtgctgaaagtatttactgggaagtgttgtggtgtctgtagcctgctttcaaatggtttgaccatatatagatacacacacacacacacacgcagacatatatatatttttttctcatatatatgagagagagagaaagggagaatgtgctgaaacaaatctgataaatacagttgttttaactattctgtaggttaaccttttctacagtaaaaggtgcgccaagaaaatacttccctgtttgagagtcaggaccacagtggctcttccaggccttgaccatggggctgaagcagttggttcttcaaacctgtccagctcttccccacctccccagagacacagatgaccttgtatcttagctcattgaaacagaccctccagcgtcagctccttctatttctcccttcttgtaacctcagtttgtgtctccccccacgtttctttacttcagtcttcagatagagcttttcttctcctttctcttctcctgttttcttgactttccaaggcat

SEQ ID NO: 26120 - DNA, 1024 bp, Homo sapiens
ccatgttttattaggctattttcttatttttgagatttgagagttctttatatgttctgggtaccagtattctggagatacatatttacaaggattccttccaagtctgaggtttgtgtttttattctcataacagtcttttgaagagcagaagtttttaattgattgaatcaactttaccaatttgctcttttatagatcatgtttttggtatcgtatctaagaaatctctgcctaatgcaaggtcacaaagattttctcctgtattcttttctggaagttttatagtggtaggtctttcatttagatctgtgattgattttgagttcattttacatatgatatgagttttgtacccaagttcttttttttttttttttttgcatataaataaccagttcttctagtgtctattaaaaagtcaattaaaaagactactacccttttcccactgtattgtgcttgtacttgttgaaaagcaattgcatgtacatgtgtgagtttatttctggttgtctgtctctcttttgttctgttaatctatttttctgccttgatgccagtaccacactgtcttgactgcagctgtattatagttaccgaaacagtgtcagttcaccaactttgttctgtttcagagttttgcctattcaagatccttcacatttcattatgaattttagaatcagcttatcaatttgtacaacagagccttcttgggtattgattgggactgtgttgaatctatagatgaatttgtggggggaactgacttcttaacagtatttagttttctgacacatgaacagggatattttcaccatttatttaggtctttaatgtagttttcagtataaaatttttaaagtatcttttgtcatatttatctctaagtatttcatatttttgatactagtttattaataaatgatatttttttaaaatctcaatttctggttcattgctagtatatagaagtaaattttatgttgatcttgtattctgtaatcttgctaaactgact

SEQ ID NO: 26121 - DNA, 1065 bp, Homo sapiens
tatttttatattgtggttttgtttttaactaaaactctttttaaaaagctattatatcgatatgatccctcatgagtattgatgtatcaatatatagtaattattatagtaatatatcattatatataatatatattaataatccctcatgaatagattaatgccctccccagggggatggggaactaagttctcacatttaatttccaagagagttcacctgagacctggtattaaaatgagcctgtcaccaccccccttgccgccatgtgatctgcacactcctttgccttctaggagtggaagcagcctgaggccctcagcagaagcagatgttggtaccacacttcctgtacagcctgcagaaccatgagtcaagtaaacctcttttctttataaattacccagcctccagtactcctttaaagcaactcaaatggactgagacatcagtttgctgtcaattaatttgatatttaaaaaaaaaataccaagaaaacttcttatggaattaggaaagttgctgttaaattttctatgaaaaaatgaaaatgtagaaatactgggaaaattctggaaaagttatgaggaatgactagcacaagcagttattaaaacttgctcttaaactattatgtaattggtataattagaataagtactggtatataaatagacaaattaatggaatagaatagaaattctagtaatagacctaagtatatatggtttatgttaacctacttttcttctgggagtctggaactttggtatgtgttaggcagaggggtaccgtgtggctagccccaagtaaaaaccttgggactctgtgttagtttcctattgtgcctgtagctaattatcacaagttgagtgggttaaaacacaagtctattctcttatcattccaaagggcagaagtctaaagtcagggtgtgtggctgactgccacagttatggtttgagacaatcattacagcagttaactcctgttattgcttgagactgtcattactgcagttactactggagaccatcattacaagactgaacgaagggacgaac

SEQ ID NO: 26122 - DNA, 1083 bp, Homo sapiens
cagtggcctgggtgaatcagatatcctttgtggcccatgcttttctgtatgaacaatttgtgtgtgcggttatccaagatattaatggagatgatgctgatatagaacataggcctctacccatcataaacagatctggttctaatcaaatattctgtgaaggtatctccagaaatggcttctcctttaaaactgatcatattccagtattgtttctgagtaagtaggggaaaagcaatttattttcttacgtgattgtgacactgtgagtctggcatctgatgaggcacaaatacagtatttgtcctaaaaggtactgttgagtttttcagcaagtttgggcagatttctgaagatggctgagttcagtttgatcattcacacccggaggaattttgtgtctattgaagtagcataaactagtttaaaatttcaaagttaagatttacctgcagttttaatgatgattctgcaggtattttgtatgtttgtatttcttttccttcattactgtataatttcactgcaaaatctttaaaagacaataaaactcattgtctcctgaagaaaagctgcagaaataaattacctaatgtagtttttcatgtttggacttgatgttgattttcttgagtcagaagcatggaccattccttgtcttaacatcctatatgacttaactgagctatgggagtgtgctatcactagtccagaggaaaggtacctttgagatggttttggctgtgatgtaaagtttgtaaggactttgaaagagtttccagagatagaagttgttataatcactacaaataactagttctagattggtggcaagattttgtcttgaggctaacatctagatactgagaatagcaaaaatgtgtgtgagttgtgaaaatatatttttaaaatatatagtgaaaatacatgtgtatgtgtatatattaaatgtatacttttagtagtcttttgaattataaagcagcccattatgactggcaaataagaccttttttaaaaaagcattatatatcatgtaatataatttcattgtgaagtgggtttttggaaggcatttattat

SEQ ID NO: 26123 - DNA, 1045 bp, Homo sapiens
ggagagagagaacttcctttttcagggtccacaaatcaaatctataaaaggactctggtcttcccaggatcacctgcccttgcattggaccagtccctgtggaagaggggatgggggcctgtgatcttggccaggcctgggctatctatctgcactgtcattgctaactcctgtcagaatcacatggatgagtagtgggctgaatcccaaaaggaaaggggtttagagcaagtggaaacaacagatgttcactatagaaagcaagaatgaaaaccatgaagtggttgaagattagccttacagtaattttattctgatcacttaatacagtagagtcaaacaggaatccaagtttccaactttattatttttggcactgaagaattacaaagaactctagcgtctttatacctccgtggttcactggagttaaagcaatcggggcgttgtacagctcacttgagtttttaaaggttctactaaaaagtgagaattccacagcaatatgggtcattgttgcagaatatcacaaaggtctgttgtgtatactccttttcaccaggaaagggacaataatagtttttttcaatgtatatatatataagtgatctaactttttattaataaaagtaaacaactctaaaatgtatattataaagccctgtcatctttgttgagtaatagctttattgagctttatttggagaaatacacataccgtaaaattcacactgaaacttaccaattcagtgttttttattatatctacagagttgtgcaaccatcaccactaattccagaacatttgcatcactacaaagagcaacctgtacccattagcagtcacttcccttctccctcagcctctaaaaaccactaagacactttttatataacatgtagccttttgtgactggcttctttcacttttaccataatgttttcaaggctcatccacatgtagaatctatctgtacttcattaccttttgtgaataatattccatagtatagatgcaccacatttttttatccattcatcagtt

SEQ ID NO: 26124 - DNA, 1026 bp, Homo sapiens
agaaagtacactgagtaggactgaggaaagaaactccaagtggaggacaatagcagcagcacagagaattccaagctggctttctgcagcggttgatacagcaaacatgtacggagcgccaggctccagttcagggaacaaatactgatgaatggaacatggtctctccagtatagaaagcggagctgtttggctagaatgctgtaggcagagattatggttgggacagctggtacagactttgcttttcccgccattgaatatgtggccttaccagtgctcagtttggtcagccagaaaacgtgatgcttataagcagttctttagatggaagttcgtatacagtttgtgttaaattcattctgaatgctgacttcagctggattgtaaaagggcaatagtgaggaggtttgcaggtccagaacaatctcctacaatctgttggcagctactgcccactgctcctcactggggactctgaaagaccaaggaaagctctgctgaggtctgtgcttgctctgtgtggcaaccttaattatgatggaaatttttgatttcttaagttcttgaataaaaaggttaatctgatcctatggcaggttggtgctgtagtctcttcttgccagtctttaacccacctgaaacctgcagcacctcgctctagggaggaattcaacataaacatgtatttagttctaggtgctgctttgggagactgtcaaggagttagagggcctcagagaaactcagggtaatggtaaggatgtaaattccagtggggctggaggaaagcagggaaaaagcagattcaaaaggcatctcttgaagagacttcttaggatttaatgactcctggatgatcaggacaatgaaactctgccagaggaacttcactcatcatagggtatcttcgtctccactaacagcttccagatccactgactcttcatcagaatcacctagaagtggtgtggctttttaaaagtacagattccactgctgccctcaccctacccccaataagtt

SEQ ID NO: 26125 - DNA, 1029 bp, Homo sapiens
tttttcgtgtatatgtgtttctgtgatgacttatgtgtggacttcagatggactctggagaaatctttgagctatttgaagcaattcgtgctcttaaaccttatttataatacagaacatacatagtttcctagtggatactttaggagtatctggcctgtttcttctctgagaaatcctggtcagagtaagatgagggcaagtgatctctctttctgtgctcttctttatctgataattaaattgacatatgtatctaattgattgcctctaaatttgcataatttttctagattagcatactttttcatttagcttcacctgttttaaaaacacatgaattcctctcatctccagatccactgcctcaccttatttataaagttgcgtgctccttctcctcctgctgataaactttgcattatgtcaccctgatgttgaaactcatggactagtgtagataaaaaataaatcaccgataaacctgatgccaagtgatttctactaacattttttgtttccttctagtattttttccgtgaatgtttttcttcaaaattgttattgtgtatgatggcctgattttcactcttgaaattatactatgagcattttaaaactttgtcattaatcttcaaaatattatttttagtggctgtgaatgtgccagctatatataccacaatatattaaacatttttttctacagttattcaaatgggtttttctgggttgtttttcccccctagtttataactctgatgaacatatttgtatataaagcaatcatatttctggtaacctttaagttattttcattagattatgatcttcttagaaataggatctgtgttttgatgacttcatttttgaacaaatgatacatttgctggaataaaatagataatcactaaatatttgttgaatgcatagaagctaaattcttaaaagggaaattactgagtaataggacagaaatgttttaaggtttttgctgctgttttgaatagttggaacatttatcttgtt

SEQ ID NO: 26126 - DNA, 1065 bp, Homo sapiens
tttgatgttgcaagattccttcctttatcatttcctttcttttttaagaacttcctttagccattcttttcagataggtttgctgatggcaaattccatcagttttcttttttataagaatatcttgattttccctttattccttacagatagttttgccagagatggtatttgagattgacagttctttttcttttcttttagtgcttaaaaaatgtgccatttccttctgatctccatggtttctgatgagaaatttgctgtaattcaaaatcttttccccagtaggtcatgtgtgttttccctctggttgatttcaagatttcttctttgtctctagttttctaacgttcaattgtggtgtttcttttcatgggtttcttcaggtttatcctgtttgggttttgctcagcttcttgaatctttatgtaggtttatgtgttttaccaaatttgggaaattctagctattatttctccaagtacagtcatgtgtcactaaatgatggggatgtgttctgagaaatgcatcgttaggtggttttgttgtgtgaacatcatagggtatacttacacaaacctagatggtacagcccactacacacctacgtactgctcctaggctacaaacctatatagcatgttactgtactgaattccataggcaattataacacaatggtaagtatttgtgtatctaaatatatttaaacatagaaaagataaagtaaaaataccgtataaaaggcgaaacagtatacctgtagagagcacttaccatgaatggagcttgcaggagtagaagttgctctggatgagtcagtgagtgagtggggagtgaatgtgaaggtctaagacattactgtacaccactgtagactgccatagccttcacaaatactgaactaaggatatactcagtttataaaaatattattctttcttcaaaaataaattaacctggctaggggtagtggctcacatatggaatcctagcactttgggaggctgaggcgggaggatcacttgagcccaggagttcaagaccagcctgggcaatatagtg

SEQ ID NO: 26127 - DNA, 1047 bp, Homo sapiens
tatactagcttaattttagtaatatataggagtgttgctcctatgtaggtctgttcctttttacccttttggggggtattgttgtacttattacatctgttaatgttgcaaaccaaacaatatattgttataattattatttttatgtgttattatttccttagcccattacagttttatttccacctacctcctctgtgctattactggcaattatattactgatatatttccacacgttatagacccagcaatgaattacataaatattttataccattgactttttaaatcgttaacagaaagaagaaaaaaatacattaatagtgtatattctaatttcataattattgctgctttttgtgtggatttgaaccaccatctggggtaacttcctttcagcctgaagaatttcccttagtgtttcttataaggcatgtctgctaacaatgaattccctcagtttttgtttatttaggtatgtctttatttcacctttatttttgaaagatagcttttctggacataggattcttggttaacaaggacttttgttggttttgaacactgtgtgattgcattgcctttgtcctctattatttctgctgagaagtcagctattaatcttatggaagttcccttgtaagtaatgtcatttttctcttgcagctttcaagattttcttgtgtttgacttttttcatttccaccatgtgtttgtgggtctcttttattgaccctgtttggagtctgttgagcttcctggatgaatagcttattgttcttcagtaaatttgggaagtattaagtcattatttctttgaattattttcttctcctttctctctcctttccttctggtattcccattacacatgtggtggtgtgcttattggtgttccacctttctctgaggctgtgttcatttttcatttttttctccctcttgagcttatataatctctaccgacctgccttcaagtttgctaattctttctccattgtgtacaaatctattcttgaggcatgtattagttagggttcatca

SEQ ID NO: 26128 - DNA, 1038 bp, Homo sapiens
agggtccaggtcttttgacccttatatattgtattctgtcaattttcttattaaaaaaatttcctattattgtgcaataggaaaactggagagagtgaagattatgttactcaggaaccattgtgtgatcattagagttctcatcttggaatctgtgagctccacttttccctttaaaatcagtcaccataactttctttttacagacaaaacaaaaccaatgaggagggaatatagtttgaagctgttttgtatttttttccaggaggagaaggaccatataattccagtatgttaaatgagtagtttcgatgtagggataatctttatagatgcaatttagccctgccaaaagtctgtttataatgatgaatagtaaatgaagaaacttacattttgcattaccgaatgagcttgactttctcttttcccctgaataggaagggaaaaggccgaggcatcagcgtgtgaagaccgcaaagacgatcccgagtacagttgtgaacagcattgctgctaggctcctcctgcagatcatctgaaatgaacctctcttattgatttttattggcctagagccaggagtactgcattcagttgactttcagggtaaaaagaaaacagtcctggttgttgtcatcataaacatatggaccagtgtgatggtgaaatgagatgaggctccgcaatggaactgtagccactgctttagcatttatcacttccttccttactttgtcttggtatactacatggcaaaatgggaaaggtaaggaaaatgactcggaaaatgtgcatgaaatgtactagggtttttgcttggttaaggtgcctaaatgcttaggtcaaataccctggcaatctgcatgttacatgctatctgctggcagtttctttctgatataaaaatgaaacagtattcttggacagaggacacagaatttctaattccagtggggcttgttttgttttcagtttcttataattgtacttggagaaacagatactgatcagtgttttatattctaaaagacagcc

SEQ ID NO: 26129 - DNA, 1032 bp, Homo sapiens
cacgcacgcatgcacacgcccacacacatgcacaaacgtgtgcacacagaggggacaggccctactcccacccctgttctttttctcacctagtcccccagactcctttgaaaagccagaggaggagggtattggaggtgtggttgctgggtgggttttgtggcctgcctctgccacaggggtaccagggcactcctcccactgagcctccatcctcctgcctcccctcccactgagcctccatccccctgcctcccctcccactgagcctccatcctctgcctcccctcctactgagcctttgtccccctgcctcccctcctactgagcctctgtcccctacctcccctcccactgagcctctgtcccctgccttccctcctactgagcctctgtcccctgcctcccctcccactgagcctctgtccccctgcctcccctcctactgagcctctgtccatctgcctccccttcccactgagcctctgtccccctgcctcccctcctgctgagcctctgtccatctgcctcccctcctgctgagcctctgtccatctgcctcccctcctactgagcctctgtccatctgcctcccctcctgctgagcctctgtcctcctgcctcccctcctgctgagcctctgtccatctgtgtcccctcctactgagcctctgtccatctgcctcccctcctactgagcctctgtccatctgcctcccctcctgctgagcctctgtccatctgcctcccctcccactgagcctccattccctgcctcccctcctgctgagcctctgtccatctgcctcccctcccactgagcctccattccctgcctcccctcctgctgagcctctgtccacctgcttccccactgagctaagacttctcagacatacttcttaacagcgccagcctcgggcctccagcatcaggccaccctggcctttcagcccttttctctcatttcctccatagatgcctttttttttcactccagtctcactgggcccctctgactgctgagcacat

SEQ ID NO: 26130 - DNA, 1018 bp, Homo sapiens
tctactaaaaatagaaaaaaattagccgggcatggtggtgggtgcctgtagtcccagctacttaggaggccgaggcaggagaattgtgtgaacccgggaggcagaggttgcagtgagccaagatcatgccgctgcactccagcctgggcgacagaccgagattctgtctcaaaaaaatatatatatataatgtaacagtattatttcatcaattgtaacaaatataccacattaatacaaaatgtaaataatagaggaaactgtgttgaggaagagagagaggagtgtgtgggaactctttgtacttcctaatcaattttttgtaaacctaaaactactccaaaaacttagtctgttaactacatgagagaaaatatttccaaattacatatctgaaaagggcttaatatctagaatatacaaaggactcctacaattagcccctttccccccagaaaaatctaattcaaaaatgggcaaaggacttgaacagacatttctccaaagaagatatacaaatgtcaataaatacatgaaaaagatgctcaacatcatcaaccattaaagaaatgcaaatcaaaaccatgagataccacttcatacccattagggtggttgttataatggaaaataacaagtgttggtgaggatgtgaagaaattggaacacttgcattgccgatgggaatgtaaaatggagccaccttggtgaaaatcatttgatggtttctcaaaattttaaagacagactaataatatgatccagctattccactcctaggtatatatcctaaagagttgaaaacacggactccagtagatacgtatatacaaatgctcatagcagcattattcacagtagccaagaggtagaaaaaacccaaatgtcaacaaatgaatggataaacaaaatatggcatgtgcttacaatggaatataactcagattcaaaaaggaatgacattctgatacatgctgcaaaatgaatgaacctcaaaaacatactaagtacaataagc

SEQ ID NO: 26131 - DNA, 1043 bp, Homo sapiens
ggagaaaatatttgcaatctacccatctgacaaaaggttaatatctagaatctataaggaacttaaacaaatttacaagaaaaaaacagacgaccccatcaaaaagtgggcaaaggatatgaacagacacttctcaaaagaagacatttatgcagcgaacaaacatgaaaaaaagctcatcattggtcattagagaaatgcaaatcaaaaccacaatgagataccatctcataccagtttgaatggcgatcattaaaaagtcgggaaacagcagatgctggagaagttgtggagaaataggaacgcttttacactgttggtgggagtgtaaattcaactaatttgtggaagacagtgtggcgattcctcagggatctagaatcagaaataccatttgacacagcaatcccattactgggtatatacccaaaggattataagtcactctaaagacatattcacatgtatgtttattgcagcactgttcataatagtaaagacttggaaccaacctaaatgcccaccaatgatagactagataaagaaaatgtggcacatatacaccatggatactgtgcagccattaagaaggatgagttcatgtcctttgcagggacatggatgaagctggaaaccatcattctcagcaaactaacacaagaacagaaaaccaaacacagcatgttcttactcataagtgggagttaaacagtgagaactcatggacacagggaggggaacatcatataccagggcctgtcagggagttgggggcctaggggagggatagcataaaaaagaaaaaataattttttttaagaaggaacattgtttcacttgccttctctgagaacggtacaggagcacaagttccattctaatgatgagattgcagcaaggttgaggatatttatgtggcctgaggtagggaagctggcagaccaggcatgggaatttcagatacactgatgtgtctttcctctagtgatattgcccccaaagctggtggagggaggatagcaactccagcatgattggttagg

SEQ ID NO: 26132 - DNA, 1024 bp, Homo sapiens
acatggctcaaggtgataaagggggtctgtgattccaggctggggttagagcagtgggaaacgtcttccaaccagtgtacattccagggcactgaggaaagcgtggtctttcctcaaacctgaagaagaagggacctaaattccaagaagtcaccaatacaaaattctccttttgataatggagataataaaaaggctcttgggatgaggtatgggcatcagaaatttgcttttcagggtctggagccaggtcagtatgtttcttggtggttgagattcaaagtgtcttgccttcttgaaataaagtagttagtaacttgactgtatgttgagttcctgtgggctgagtaagagtcttctcatttttagattaattgaaaggatgaatggagcacttacttgtcctacttttgcttttttttcactatgattcaaataattcattttcttaggtcagatatggggaaatttgttcttttcacccctgcttctgtggaaatattacatgtggttatgatgatgactgatatttttgtattctcaagctaatttttgttttaaaagtgtttcaggagccgtagagccagatcgtcatcatgtctgcattgtggctgctgctgggcctccttgccctgatgggtgagtgtggctgatttttacaaatgactttggagatgggaaggataagcacaggaacacaatggcacttctaatacttgaaaatgcaacaaaaaagattattttttccctaaactgtccaacaaatcctggagttaggaacagccaccaacaatcagcctctccccaaatgtcccacaaaagattggggttctctggaatgcaaggtgggcttaaaacagcactgcttgaagccagactttaaatatacaccatcaatagctgctcattgtccactataaaaaatgccaaattgaatttattcctaaagcatttatttccatagaagaattgaggtggttgccagaataagactaatgaataagactaattcaaatagaaaacc

SEQ ID NO: 26133 - DNA, 1030 bp, Homo sapiens
taccaaaaatgcagcacatttagttattacgtctttagttaccattgttattctttggttcttaagactgatgtttttgaagagtacaaactgtttattttggagaacatctcccagtttgggtttgtcttaaatttcctcaagattagattcagattatcgatttttgacgggcatattatggaagtgatgcatcatatcgggaggtgtgtgatggtttctctcatttccggtgacaactgagcactgtgttaaccaaatgttaatccataattaatgataaaaaggaaaataggtctggtgcagtggctcatacctataatcccagcactttgggatgccaaagcaggaggattgcttgagcctaagagttcaagacaagcctgggcaatgtagtgagatgtcatcactacaaaaaatgtaaaaattaactgagcatggtggcacacgcctgtagtccaagctactcgggaggctgaggtgggaggatcgcttgagcccaggaactggaggttgcagtgagctgtgatcacaccactgcacatcagcctgggccacagagtgagaccctgtctcaaaaagaaaggaaaataaaattgatctaaaacattcagtaggacacaataaggtttaaggctattaaccatcaatatcaatataagcattatacctcttccctgacaccagcattttaaagaaattttattctatgttacaggaagaaaacaaagatagatttttgtgcagtttagtatactagtactaaatcataaagaataaaatgcttttttttttttttaagtggaaatttaatggagccaccatttcagaaccaaaagaaatttggaacaaacttcacaaagctggaaaagaaaactatccgaggaaagaaatatgattcagactctgatgatgattagagctcaataattctttgtaaattgtctttttttttctgcttcagatttaaatgtgtttttaaaattctattaatgtctatacattggtcacctaaatactcatattctcg

SEQ ID NO: 26134 - DNA, 1059 bp, Homo sapiens
tggcagtccccagaagttaattgatgggtttctaaaacatgaaggacctcctgcagagaaacccctggtaattccttaactttgacctttatgagatcttaatatacctggataatgtgtgaatatagcaattttatcctttgttttcttaacaggaagaactctctgcttctacttcaggtgtgccaggcctttctagtttgcagtctgacccagctggctgtgtgagacctccagcacccaatctagctggagctgttgaattcaatgatgtgaagaccttgctcagagaatggataactacaatttcaggttggcttggcctgtgttagatggcccaaggctgagatgtagtcgtctcatgatttgagaacataaacagactaaactatgcagatttaacccatttctctaactctgataagcttaaagcagctacccccaaatcttttaaattctgggacttgctttgaaaagtaacaaagcccattcctttgatagctgttagtgacatagttgtagaaatgcagttttcctttatccatgcagatctctgactttctccttcaaaaagactggtcctcatttgaagtttttcccccttcctagatccaatggaagaagacattctccaagttgtgaaatactgtactgatctaatagaagaaaaagatttggaaaaactggatctagttataaaatacatgaaaaggtagtaattcatcacttttatcaaatgggaaaaaatggcatgtcacaatggctgagggtgtactgagttgttttaaactttctgggaaactgtactcattagggttaatgagaaagtgatatcctttattttgccatgttgactaagtagcaaataaggttccaaatatgttgccctcaaggtcttacatgtgattaaaaaaccataggaagtgggctgggcacagtggctcacgcctgtacttcacttcgggaggctggggtgggtggatcgtttgagaccagcctggccaaaatggcataaccccatctctactgaaaaatacaaaaaataaataatctgggggg

SEQ ID NO: 26135 - DNA, 1033 bp, Homo sapiens
aaattagagtttttctttctccctatagggatcttcagggaagaatattcatcttcagctgaaggatatgtcatcgaagactaatgtaggcaggatctgtattgggcattttctaaatttttatctgtatttattccttgttaatgaatggaaattttatggtggctcttgtctttgagacttgggtcactatgctttctcttgagcaaataacttgattaactgtcctgatgcccatgaacatcccaactttttgattgtaggatagttttgcattattgaatattgctaaaatgtgttaagtcgtctggacagtctttgtcttagtgaaattgcagatatttgtgaactagtcagtattttaaaaagcatacattctgggtttttcagtgtttacctctgtctgaaagagataacttagtgttttcttctgagaatcaattcttcccttaaataaggaatcactatggcacagaagctgctgtgttaaaaccaggactttatttttgtcatgggtagtagttcctcagctctgaaaggagtttttagaatgttaaataattgattttcatagagtagctttttaatgcattgttgattttatttcttggtcctcagaataatgcattaagtaaatatatatttatccctgctattgctttacaaatttatagtaatcttgtaacttaacatgcatacaaaaggaaatgatacaggaaagtaagtttatactaaagcaaaaattgaggggctgtatgctcatgtttgataatgtggtaggtcagattgtgattcctatgcatatgtatttagtttctgttgcgtaaaattgagagataagtatagatgttaactctagaaatacaaaaaaaaatttagtttttctttccccactacttaagtctgaatctagactcttgagttgcctctttcctacagtacgaaatcaaacaaaaaccatggaaggctgagttgactgctgctttcaggttgaataaatgtatcaaaatggtcacaaataattggcttttct

SEQ ID NO: 26136 - DNA, 1032 bp, Homo sapiens
cttggtgaaaccctgtctctgctaaaaatacaaaattagctgggcgtggtggcgcgcgcctgtagtcccagctacccgggaggctgaggcaggagaatcgcttgaacctgggaggcagaggttgcagtagacaaaggttacaatgagctgagatcacgccactgcactccagcctggcgacaaagtgagactctgtctaaaaaaaaaaaaaagtcaaataaataacattttacatattaaggattttttaaacctggagggataaagtcaaaggctcgtccctataacatcccactgattccttcctttgcactgtggtctcatgacctaaccactgtctatcaatgatatagtattgattaaaatggcttttaggtatgtgtctcttcaaaggacttggtcttagtatatgaagttggatcactcagagttgagctgtgttgtcactagagctagagtttttatctgggggcaatagttaggctttggagggaatggggaatttctgtggacaggaggagagttgaggggaaagcgatcttgctggggggaattgatttacttagaaaaatggtgttttccggccgggtgcgatagctcatgcatgtaatccccccactttgggaggccaaggtgggtggatcacgaggtcaggagttcaagaccagcctggccaatatggtgaaagcctgtctctactaaaaatacaaaaattagccaggcatggtgttgggtgcctgtaatcccagctactcaggaggctgaggcaggagaattgcttgaacctgggaggtggaggttgcagtgagccgagatcacgccagtacactccagcctgggtggtagagcgagactgtctcaaaaaaaagaaaaagaaaagaaaatgctattttccattacagttgcttgttttgcacgtgttctttttgccagatgcgcctagggagatcataagatagaaaaagcaacttagatagttaaaattcactttaatggattttatcttagtctggactgaggtttaatcatttg

SEQ ID NO: 26137 - DNA, 1185 bp, Homo sapiens
gatctcctgacctcgtgatctgcccgcctcggccccccagagtgctaggaaatatcatttttacatgaaaatgaatgttcctggtgataaacataattctcggggtagatagtaaaatctaccaataactatagtaaaaagaaagcagaataaagtttagaatgaactgatagtagtgtgttccagcaaaagataaaacattaggaaaaatgcatgcataagtagtcttgttatatttttaaataagcatgtccttgatgagactcttgatagagttttgaacatccctattgagagaatggaaagaggaagtcttgtgtaggcattcaggatccctgggctcctcatagacagagctgctctcccatttgccttaaccttacctcacctggctagttgttactgcatgttagcactggggactggacatggctgtattgacagcctgtaattcagttggtctttataatttgattacttgagttttagctggtaggtgagttttagcttgtgaacctttcgagggttgggagatttccacatgtgactgtcttacagagtcacatggaaacagaaaagaaccaagaaattttgtacttagtttttagttcattactcttagttatcagtctttttcaagttgtcgtgctttttcttcaagaacaatcttgttcagaccctaaacctaaaacttacgggggaaaaaaagcatggctgctaaaattgaaggtgggcttagagactggaaccttgcttgcttgctgtttttacccccaacttttttcttctccccaccatatccacccttcatccagtcatggccccacaaagattctgcagtcgaactttgttttatagatgaagaaatgttaggctcagtgctgttagactcactctgaatcacattgttaggcagtcgtagaattgggatttgagtccgtatctagtctactgttatcattatgttgtagaccatggataactgacttaaaataatgatgttctctgtgttatagttttcaaagggtttccacgtgtgtagtctcactcgattttcactctgtagactggcagagtagattactataacagtagttaatgtttattgaaggtgtaccctaaatgttaagggtaagggtacttttgcattcatgtattcactcttcatccgttttttaaactaat

SEQ ID NO: 26138 - DNA, 1033 bp, Homo sapiens
aagttctagaatgttgtcctaaacatctttttgtattttttatgaggcagagtcttgctctatagtctaggcctgagtgcagtgacgtgatgatggctcactacagtcttaacctcccaggctcaagcagttctcccatcccactctcccaagtagctgtggccatgggcgtgcaccaccatgactggctaattaaaaacaaattttttgtggagacaagggtctcacttcattgcccaggctgatctcgaattcctgggcttgagcagtcctcctgccgtaaccccgcaaagtgctgagatacaggtgtgagccactgcactcggcccttttatgtttttaattatgaatttttcttcttcctgaaatctttgccttcatgtcaccccttcccacctaccttctatcctaccttctatcctgtaaaatcctactgattgttcttagttcagatctacctctcagtgatgctttcttgggtgtcttctcgaacatgagatttatggctgttttctctgtgcatttattgcattccattagtgcctataatgcaggatcttgtattattattattattattattatttttacttttttggtcttgttctgtctcccaggccaagtgcagtggttcactgcagccttgaccttccaggctcaagcgatcctcccacctcagcctcctgactacaggtgtgtgccaccatgcctggctctttttattatttttattttttttgtagagatgaggtcttgctgtgttgctcaggctggtctcacgcaagagatcttcccaccttggcctccaaaaatgctgggattacagatctcatattatagttatatgcaaatctctgataaccttggattgtggtttattctcattttactcaccttgaaaactatagattatagtaaattctaagtgaatggagaaaaaccattagctcagacctggaatttggggtaaggggaagtggggggcaggacaggcgagattttgttgcctgtaatctttttgtttttttttttt

SEQ ID NO: 26139 - DNA, 1034 bp, Homo sapiens
agttgggagactccaagagtagagttttccaggaatcagacaatggccagtcaaatttttttgtttttgtttttttagggacggggtctcactgtgtcacagtggtgctatcatagctcactgtagcctccagctttcaggccaaagtgatcctcctgcctcagcctccccagtagctaggactacaggcacacaccaccgcacctggctaatttaaatttttgtgtgtgtgtgtgtgtagggatctccccatgttgcccaggctggtttcagactcctggcctcaagtgatcctcctgccttggcctcccagagtgctggtatacaggcatgtgccactgtgcctgggccccaaattctttattacacaatgctggctaaagaagtgagaacagacacttgctcaatttatgacagctaaaactagtagtagtgatagtaacccagttacctctgttgtattaaaaattggaacaggttgcatttgaatatggatagaaggattgccttctgttgagaattactacataacattttttttattgatacaatataatttaaaacttgggttattcacttgagttaaatgttttaattacataaattttgtagcttgggttataaactgtatacttgatactttaaagcttaataattggctgtaaaaaatctgaattttggtattggtcttgaatttgtacttttagatgtacgtaattattcattagttatttggaagaagaaattatgaagtgagatatttatgggtagggtggaggcattgataatctatttgtgttagggttgtaaaatgtttcagtaacttaattgctgttttgaattttagcacttgagtcaaagttactaacacttcaagtttactgtgttggaggttaatattcttttgcatattatttatgcctaatcttatttcagattgtcacttgaagattatattgaattatcttggaactcactgttcctcagagattatagtgtgctaaattgttacattgaataagacttctggtgtc

SEQ ID NO: 26140 - DNA, 1033 bp, Homo sapiens
aaaataaactgttgagaatggtgactggtgtttggtcttaatgtgtaagtcaggttttttatttttcaatctgtagaagatgctaagagtgattatctcaacaaccgcccaccagagtggcttttatagagttccctttgaagttcagctggagatctgattgtggtgatgaaaggacttgctggaggcttcgtgtcttcagacaggaaagtccttgaagatccagttgaaatatgagtcttgtagtatttgggaaggaaatttttatcatctttagttgtgttcagtttctcccttctttcactgggtttttcccctcagattatatttggttattaattggaacttaaagtaacccagctgtgctctgtatctttctgttcttttcataatgatttatttttctttagcagatacagaaataagagaagaaagaattgatggagacagtgactttgtaataatagatattttcagctaatacaacttgaattattctcataaactaagattctgcctgtggtaattgaacttgcataataccagttattttaaattcacttgtccttagtaaaatgcttctttgtaggattgttatttcatttctcagtctgaactttaacaagtaataggatcctaaaccctaggtgtaaatttttttttaaaagtcaaagggctgctgctttgtgtaacatttcttccaaaatttaataattgtgagttattatttactgtgtgctaggctctttcctaggtgcagtgtcttaattaatatctacagctaccgtataaggttggcaccattataaagaaacagatttagagaggtgttgttatttggctggttacacaagaaaggaggcaagatttcaggccagttcccgaggtcataaccggtctgctgtgggacaccttaaaatgacaaggtttttgtttggaagcttgccgttaaatttatctcattatttgtgagtgtgtgttgttaactactggcagcttcatcattatttatggctaattttttgtttttttt

SEQ ID NO: 26141 - DNA, 1019 bp, Homo sapiens
actagattgaacacatggaatgcaatgcaatgagactttctgcactaaaacttatcctcatatgtacaacaatgatgtgtgtattatataacagtgatgtgtacatttctgacaccccatacataatatacacagtttgtataaatgcatacatttaaaaatatatatgtacaatacagctaacataaaactgtagtacgcctgaaggatattactagtgcctaatattgagtatgagtcactgcgtgttcgcatcaacttggaagtgcagtaattgttataaaattaatcagtgcagccaacattatttatgaatcacatctttgaaactgtgcagtagcatatacatatatatttttaaataacatttttcacagttttccagagttactgttgaaatctgcatcaccaaaaaaaaaaaaaagcaagatttttttaacaatgtagacactcttcagacccagtaatctgcgtgtgatttcctatttgtagattcccaagagactttagcagtcaccagccttaatgcatgtacaggatattattgtgacttaatttatctgcagtttttaatccatgtgaaattggaatttataaacggacttggattaaacatgtctgcctttctaaggttgcaaatgttacattaaatgatttatgttgtaaatgagagaagttgagttgtacgtaaaagacatccaccaatttctgtgaatatttttacacggaaacttgagaatcaaaatacgttcaagtcagttgttctggctcccagtttataatctcgaaaagcaatctttttgtttcataaatggcttaaatgtagctcccacagattatcagtatgaagtctgacatttttcatggaaaagaagtatgtttttcttcattataactatagtttactatttgtctttgctatttcctgatacatacacatacgcacacacgcgcgcacatgcatgcacgtatgcacatgcacgctcccagtgtcccagtgaaggctcaacaggaagctt

SEQ ID NO: 26142 - DNA, 1058 bp, Homo sapiens
gctaactggaatcctggaaagcccattacctcacagatatactgagagaatgtttcactatgaacataacatttaaagcactcaactttctatccttaacatttttacagcctcatttcatttgagtcatttttctcacgaggctgtgtacattcttggtaacatgtccttttcaggtttggtatacacccttgtaaaatctgagcttaattctcataatagcagtttttaaatgaatgaattaatgcctaatttgactaggtgataaaatgggcaggaactatagcagagacttttgtaattgtttcattcgtcagcttttgagataattaactagagctggaggttggaagtattgagagagggttcctttctacttgctaaataccaagtgggtggttgcctgttctgggacaagatgttaatgcactttttcctcttcctcctgctaagtacagctaaactccatggatgttacatataaaacaaacataataaggctgaaaggcggggagaaggcaaatcagcttgggccttcgggcctgaggaaaagacatggtggtgacttccccaggtttccttttttccttgtatagcacagagtggatgctggagaagctggcaacctggcagtaggcacagacggaagccacaggaaagccagttctctgtagtgaaagggtcaggaaattcatatcctagcaagaataaatttttttttttttgagatgatatctcactctgtcgcccaggctggagtgcagtaacgcaacctcagctcactgcaacctctgcctttcatgttcaagcgattctcctgcctcagccttccaagtagctgggattacaggcgcgcgccaccacacccagctaatttttgtatttttagtagagatggggttttaccatgttggccaggctgctctcgaactcctgacctcaagtgatccaccagcctcggcctccccagtgtgttgggattacaggtgtgagccaccgtgggaaacttgtagacaataaccaccctattccagacaaacaccgtggggggaaaaaaa

SEQ ID NO: 26143 - DNA, 1029 bp, Homo sapiens
atgtgtcagccccagattcagaatttgggaaattctctcagtgcccctcaaatgttttaattttttttttgcttgtcaaaaaaagcatttttaaaatttaaaatcaggccaattattgcttctcatcatgagcacgagatttgaaggagtgccagaaactagcaggtgtctgtatattgcagcagggactccgtggtgaagttggagtcacctgggtttaacaagagtcactcagtccatgcagctgtatactcagcagcaaaaccatcttcctaaaattctgaagacccaatctaaatgttactactttgaatattttaatgcaatgctcagttctaagaacaatctgcaagttaaagaatgagaatcatattattttttaaacacaagtaataaaatgaacattgaaaaccaggtggatcgaagaataaatttttttaatgtttcatttttattgttcaaaaaagtttcaagtaaataaatagaacaggaatgtacttgacacagagagataataagacaggtgactctcatcctctgccccaaaagaaagctggaaaaatgcaaaacgagaacaagaattctccagaaaggtccaaaattaagggatctagcatgaaacaaacttttaaggtgaagactgtatcttgacttttctcaatgttctaatcctctctgtggagagttcagtttccagggaagctgaagtcaaggaggtgaaaggtagggtctccagtggcatggaattgacttccctgcaataaggagtgcttttgatgatgcaaaggaagtaatgaaaggccagatgccctgtggcctctgcttttagataagtgagaatctacagaccaaggagcaagtgggatgcacaggtctgagttaccctcagtgtttccagtttgaatggctactttcgtacttgtcagtctgcaaaacctgaactgaaagctgcctctcaaactgattctattgattgttacccccattttatcctttgatgattaacctcatcgcaggcaggggcagagt

SEQ ID NO: 26144 - DNA, 1058 bp, Homo sapiens
ttttttcttgtaaatttgtttaagttctttatagatgctggatgttaaacctttgtcagaggcatagattgcaaaaattttctcccattctgtaggttgtctgtttactctgttggtagtttcttttgctgtacagaagctttttagtttaattagatcccgtttgtcaatttttgcttttgttgcaattgcttttggcatctttgtcatgaaatttttgctcatgcctatgtcctgaatggtattgcttaggtttttttctagagcttttttagttttgggttttgcatttaagtctttaatccatcttgagttgattttttgtatatggtgtaaggaaggggtccagtttcagttttctgcatatcgctagtcagttctctcagcacaatttattaaatagggaatcctttctccgttgcttgtttttgtcaggtttgtcaaagatcagatgattgtgggtgtgtggtcttatttctgggttctctattctgttccattggtctgtatgtctgttcttgtaccagtaccatgctgttttggttactgtagtcttgtattatagtttaaagttgggcagtgtgatgcctccagctttattctttttgcttaggattaggattgccttggctatttgggctcttttttggttccatatgaattttaaaatagttttttctaattctgtgaagaatgtcaatggtagtttaatgggaatagcattgaatctataaattgctttgggcagtgtggccattttcatgatatcgattcttcctgtgcatgagcatggaatgtttttccatttgtttgtgtcatctctgatttctttgaacagtggtttgtagttcttcttgaagaggtccttcacttcccctgttagctatattcctaggtattttattctctttgtggcagttgtgaatgggaatgggaattctttcatgatttggttctcagcttgcctgttgttggtgtataggaatccttgtgatttctgcacattgattttatatgctgagactttgctgaaattgcttatcagcttaagaagcttt

SEQ ID NO: 26145 - DNA, 1051 bp, Homo sapiens
agatactaaacaatcttctaaattgcccctgttcctcatcctttatccaatttttcacaaatattgtttctggattaatttttctaaaacagatttcttgatttttctctcactttctcaaaaacctagtctagaagaggaggcaacatgcaaataaattaatagaatagcatgaggtgcaagccaaatcaggtgcaaagcaccgtgtagacctagaggaagttaatgtttcaaccacctggagggcagaagaggagtttactagatgaacaggagaggagagttgctacacgtaagaaatacagcactgtagaggcattcaagctaaaggaatgaaggtgggagggaaatgaggaggggaagtaatgagagcctagaagccgagccgaggagtttagcagtgacagaagtgctagttttcctgtgatcatcctggtttatgctcattatccccacacctttttcttggataaatttaaggactacaagtgctgttttgttatgggagtatattgtgtagtggtaaaatctgggcgtttagtgtatccaccatctgaataatgtagattatgcccattagtaatttcgcatccctcactgccctcccacctgccccccagccattgcccttctgagtccccagtgtctgtcattccacatactgtgtccatgtgtgcacattatttagttcccacttataagtgagactatcagtatttgactttctgtattgtttcacttaagataatggcctccagtgcagccagggatgttgctgcaaaagacatgatttcattctttttcatggctgagtagtgttccatggtgtgtgtgtgtgtgtttatatgcacactactttttctctgtccaatcatccattgatgggcacttaggttgattccatatcattgctattgtgaatcaccagcacttcttctggttagcattttagcacttcagaaatataccagtatagacagcaaattatatagtcagcatggaagggttttaagctggagagtgatatcatcaggttcgtacttttgagtga

SEQ ID NO: 26146 - DNA, 1033 bp, Homo sapiens
ttcttatcaatacataacaagaaattgcaactaatttggctcatgaccttcttcttttatcattaatggttgaactggtgtttgcttagccattaatgcattcagttcagtaaactaaagctgtttgaaattttcactaatccttttccattgagggtttccctggaccaaatcacttctgaataaaacaaaaaagtgaatgcgtgcacaggtttctcagattttccggatcaaacatcatttacagggcataccattttaaaatgcgattttttttttcttttcaaatcaccaatcccatagtactggagaatgaatgaactgtttactgaaaatatgaattgcatgaacttaccccataaagtgttcaagtactgagggctttttttcaatgaaaaaatgaaacaatatatagaataaaagtagaaaaaatggtttaacacctagctttttttttttttttgaaaagatgcttttcaaatgaatccgtctttgctatttaatttacattttgagggctcattaggatgatgaatgatgaggcaggagaataaaatatacttcctgaacaaaagacaatctctgtagcctaataacattttatgccagcacttacatttgtcagaagtggatgctatttatccctatgattatttaaaaatcatttttattgtcctttgtgctgtgtcctcttctgggaattttaattcagagtttgacacctacttattaacttccatgaagtatagagtacaaaggcctatactctataaagaattctaaatagccgtgtttatattgcctgcagctgtacacaaattagctcagtttggatttgtttctatcagaaatagaaagcctgttggaatagcgggtagcctctgcttcctccgtgaagtaagtgctctctgctgtctgcccccatctgaaccaagtgggacttgcggggtagacagaaggggaattttcctaattatgatacagcccttatgcataagtacattacttccatttcctttgcctcctccaactg

SEQ ID NO: 26147 - DNA, 1048 bp, Homo sapiens
agggggaaaatgagggaaaggcctttgtgtgtgaggtagggtaaagtggatgaatttgaatcacattttgaaaggcattgcaggtgggatggatgagcagatgttcccaataggaacgcctgtagactgttcagaagaaattgcccaaatgagccagatgagaaggctgagggcagggctgcttttggctctgaggactatagatttatcctctaggtgatgaggggctattaacggctggtgagtctggagaactgaacagtggaagctctattttaagattcacgtggcagtagaggatagaggtgtttggaagcggtgggcagttggcaagctatatgggagacatttctggcttaagaacacaaaaaatgtgggaatacaaatggatggttccagtgaatcccccaggtagagggagaggctgggattggaggatggtagaagcgaatatggtgaacccagccaccccctcaccagaatgtgtctcctctgggagctggctaatgtggtcttcacagtgaaaattgttggatgagtggtatagacatattatcctttaattaaacatctaactttgaaaatcttgattaataagcaggccgggtgcagtggctcatgcctgtaattccagcactttgggaggccaaggctggcagatcacttgaggccaggagtttgagactagcctggccaacatggtgaaaccccatctctaccaaaaaaaaaatacaaaaattagccaggtgtggtgttatgtgcctgtagtcccagctactggggaggctggggcaggagaatctcttgaaccccataggcagaggttgcagtgagccgagatcatgccactgcactccagcctgggagacagggtgagagtctgtctcaaaaataaatacatacatacataagcaaataagcgtggtaactatagttaatagcaatgtatatatcaaaattgctaagcagattttaaatgttcaagccgtacaacgaaagtacgtgaggtgatggatgtgttaaatagcttgatttaatcattccataa

SEQ ID NO: 26148 - DNA, 1026 bp, Homo sapiens
ttttagaatacaaataatggagatttttttaaagatttatgtttgaatttatattcttacttcctacctcctcctgcttttattcagtgattcatcatgaaactcccttaactgaggacgagtaaccgggttacttactgggaagaccttttatttgaagttgtattgtttcacgtagacggtctcagttccttcctccatgtcgctggggactctgatgtcttactctcctagctcctttaagtggaatggaaaaaactgaagtgtattcaaattgtgaggggatgcccaggtgatgctcaacaaccacagcttctcttgagggcagaccctgccaaaatagaaaagtggcactagagtattcaggtagataatagctctttgatatggtctatttatggggtcctagaaacactgatggtggagccaaggtctcaggaagttgtcagtcatcatatggaatgtaagattgtcacagtccatcattgggatggcccaccatctctgcacactttggaatgtttcagtccccttcttcctaaattgtacatgctactgtagtgagaatgtgtcttctcagtaaggttcatggtactttgttcttagtacttccttatttcagagaagatccttaaagaaaatacctgctcccctctcccttaaaagagttataaagtgcttatgaaatatttgtagaatggctgaatgagaataatgactataggtaaattgtttggctaagcacagtaagaaggggttcttccgaaagtgacatggccagtgtcccataggcaaaggtcagccataacaaataggtgatatttcatgttgcagtggtggccaccaagtagctgccccgccatgaataccatgttgacagggattctgatgggtcttcatggctctggagaatgccacatgtgcaagagaaggcagtagacatttgccatccctgtgctaatgcgaaacattagatgacctcccatgttcagacatgaatgtgctgggattttaagaggctcataa

SEQ ID NO: 26149 - DNA, 1077 bp, Homo sapiens
caatatatttttaaagcatctttgcagccaaaaaaaaaaaaagactaaatgaggaggaagatgaaatacaattggatttttgaaggctgttctccacacacagttctcagtttttctgcttttatttttcctttctgatgcctgtacatgataattttacctactaaagtcatgttcattttccagtggttaaaacatttgtcagtataaaaatatattctattctcctctcacccccagcagcagtgtaaagaagtttatgtttacaactgcctctatgtagagaattctcaatactctctgaatatgctagaaaaaggccaaaaggagagatttttgtacccttttaaagacattatgcttcccataagacactggaatgatttcatggaacagtgtcccgcttccttaaatgatgaagaaacaaacttgtataaaaaatttggcctgataattattcataaaaatatattctgtcactctttctgcagaatgttatttttgcattaacattaaatttttcttcaatattagactgtgctcagatttggctatagaagaattagacattttcaactggagcaaaagtcaatcctgtggacaccagaaatatgacaaatatagcagagtcctaagcatcttaaaattcatcttttttttgtatataacacacatatttaaatttatggcagtacttcttgttaagatgttaaacaatcataagaattttttggaggcaattctcactcaaaacatcttgagttcacagtagtaaagcgtcacagaagaaacttaacagttttctataaatttaattgctgccttggaataattatgtctagaggacagaatactctatatattttattatccatcagtttccttttaataggagtgctgtgctttgtacaggtcaattatttttgatagtttctgtaatgaatgtttaattatattttattatccttatttaactacatcaccttggtgataattgaagcatttctaaacactatacttccctacagtgttttgtatgttatacaattaccttgttaacatttccacaaagtttca

SEQ ID NO: 26150 - DNA, 1066 bp, Homo sapiens
agcctgacagtggtttattgtctgtcacagacagcactagtgaaagatctttctaacctggatgggccagttggtccttttaaaacttcatgccatctttggagactgtgctgcctcgtgagtgctctgtaggccaacaccaaagggccggtgtctttgtgactgcaccgtgtcattttgattctgtaaagaaatacaatgactccctctgtgttctgttttctcccccttccacagcacacacacatacataaatgaattttctaatttgacaggctgtggaggttcatttaagtgaaatatcatgctggattattgtctttagattttaattgatttctgcatgcaaccctaaggtgttaagcattacttcctttccagtaagagtgataaattgtttaacaataacaggggaatgacctcccagattttcaggggtctatgttgaattgaataaggtatctaattggtctctacctaaaaatgcgcgcgcgcgcacacacacacacgcacacacacacgtacatgcacacacacacacacacgtatgtccacacacagcctgtgaatgtgagggtgtctttgcagttcatgcagttacagacccctttcagatttcacaggcaacagaatgtatgttatcttcataacccaaggctttagcacaaggcctgggatttattaagcaccactctcagctgtttctgccgaatcttccataaattttaatttttgtgggtaggtgcttatattattttgttttatgcttaacctattttacattatgattcttatggcatagaactcacgttgcctcttcagtcacggcagcaacagtggtgaatttccatatagtatcaatgacttccttattccattttctgttcctctctcagaaactccttgccagaattacctagtgctgcactccaggtataaaaaattgcctcttgctcagttattgctgaaatgttctgtcatgaatagagatggatgatgaacacacatgtctctggaatttctttagtggtataattttgagttgtcaaaatctggcatatttaag

SEQ ID NO: 26151 - DNA, 1022 bp, Homo sapiens
atttccagtatgcaaatgcctcacatctgtgtatttgttttgctgcagacataaccaggaagagtttagtgatgaaatctgttcttaattacgagagcagctgttagagtggtagccattttttttcctcctgatgtgaagttgcctgatttactcatttttgcctgcatttttcaggcttgctagtgcagaacggggctgctttgtgagaggttgcaatttgttttctgtctgagagccagtgcaaatggactaaatctacacagcagggtggttttatctgtcctcctcacacactgcaagctgtcctacctcagctcagcaccagagacctataaaaccacccaacaaatgagggggctgttaagtgttctggcaagaatttcaggcagcaagcagttcctgtgaattaactagatccttgtgatggggttggggggttggtggggtgggcagacttggaccatatagaactggaacagatggtattaatacactattttgtctttagatttgtagatttttaatatgcatctttccatttctattccattatttttacgttcttagagctgtagcatgtttttgatcctataggttacccaaacaaagcaaaaacacatttagatgatctttcaggttagttcttaagcaaccttaatacttggtccaggctgccacagaaggggactatatttatttcctctcaatatgtttcctagcatactaaagtaaggacttcgcataaaactggaaatggaagctgagtgaaagtgatctctttcactgttataattttctactcaggactggatttagaagctcatagattcctttcctgtagagaagtcaatgaactgtttcactggaagcaattgatacctacatatcaatcttggatacattgtgtatttcttcactgtccatattatgttcagctctagccacaattgccttaacacttgaagtttcacattttaaattttaatttacactatgttgtgaaattaaaaaataaaaga

SEQ ID NO: 26152 - DNA, 1027 bp, Homo sapiens
tccatccctagcttcaaaacccagcctggtccagcagaaaccgaccgcgtatgtgaggccaatggacggccaagatcaggcccctgatgagtctcctaagctgaagtcgtcttcggaaaccagcgtgcactgcacatcatacaggggagtccctgccagcaagccggagcctgccagagccaaggccaagctctccaagttcagcatccccaagcagggggaggtgagtctttatcagcaccgttcacatgcaactgcatagttacaagtgacaatttgaccctcgtgaattcagtttccatgtttcttttttttcagtgatgtggttaacttcatgtggtaggatttgtagcagtcactgaaaggggaggcagacttaaatagtgatttcttaaaatctcaaatttattataatttgaatttttagagttccagcaaatgcagttgtgtgtgtatgtattagttagggaaggaatgtccccttcactatagtttgagaattttcttctgaatagctagtgttcactgagggtataaataaaattaagaaataagtgaataagtgattcagaagtaagaaaagcacttaaaggctataatttcagtatctatttacctatttaaggtaaatttttatgtaaaagagttccaaaactcttaacattttcgtgttttgaaatattttaacacaaactttaccaaataaacctcataatagtttttaaattaattgtttaaattattcaactttgaatatggtgaactattcaaatgttttggaaatcctgtcctgtctcagaccatattccaaattgatgatggttgtgaagagtacatgaagaaaaaaatatgaccatgcatacatattttttgctgtgatattgtatactaactaaaattaaatgtgagttctagaacattatacttaggaactgttcagttttttctctttttaacatattctttaaagactgagtaacagtgtggccagaatattctttgtatcttaatttgatttaataaccaa

SEQ ID NO: 26153 - DNA, 1047 bp, Homo sapiens
tttgcttatttcttagactccccacaaccctggagacatatcagtagtttggatagttttttaaaaataagaataaaacattttgatgattctagtcaagggatacaattggcttcatatacccttgcctaaaagtctcctccatgggaaatgcagtttgcttggagcgagtgctccaagcaaactgcatttcatcagatttcatcaggctgcatgtggatgagtgcagtgggaaggaggtcatccccccctggctggctgggtctgctgaatcaacctgtgactcagccagagggcaggctgtcctggctccagcacctttctcaccagtagggcagcctagggagagattggagcaggctaatgaatgggtagcacttgataaaaatagtgacatcagtagccctcgctgggcaactttagaatcttatcattttttatttttttattcacttctctatcttccattccacaattctaggttacataggtctgctttgtgtgtgagctgtggaaagagactgatttctatcctttgtcagttgggggctgtaaaaaattataacagctgagactttattccagaattctccttatggttctctctgtctgactgggaaatagcttgccttatttcatttattcctgttttgcctctggggctcatgttaactacttctcactactgggcttgtcagacatcagggtttaagaggtgccaccacttcttggctccaggatagctcctgttctctgggcagagctgagtaaggtactttggacattgctgttccttttacacagtgtgtctttatgacattgttttgatgatcaaactcttatcctaagtttcttgatctttaaaagagttaacctagtcataatattcaccatcagtgtctttctccaaggggcattgtgaggataattaagggacatataggtgaaatgttttgagctcaatggaagagaaaagccatcgggctcatagatgttacttttatttagtttcatgctgttaccgtatgatcaagaatagatgaattt

SEQ ID NO: 26154 - DNA, 1058 bp, Homo sapiens
gtcctcttgacccgctgagacttccagctaagctgacaaactgcctgtaccaaaacaggtcattctctcttcacacagggtgtcctttcctctcaggtacattagtgagcttattctgttggtttccacctgtgttgtctccgtggagaaccgtgatggttggcctgtcagggtgattagctatcatgaggcatttggggccatacatctccttttaattcttcctttttgaaaagtcggttccatttatcttctttctagcctagggcttgttctctacctcacaggtaagttgattcagttcaatggatagcagtagttcaaggtgactcttagtccttttcagaaaccccatttcaaccacagcctatctccttagtagtcctgggagaaaaagaagtcgagttggattcgggaagagcatgagcctttttttacggctaacgttgagggtctctgggctttctgggtccgtgagactgaccaacctgaagtatggggattggatgagaggactcagacacccttctcccttctgacttcaggcaccagcccatgagcctgagtggccacagcaaggattgcagggaagggcatcatggttaaaacataagcatgttataaaatatgactcattgtgtagatagcttttaaaattcctaggagctgaagttcagaaactggtgctgtaaagtgaaaatgaaatttaactgagcatttgttggaggaaaaatagtttattggctctcccatgaaaagccctgagagtcagcatccttctcatcgcagacacctgtgattgatgacggccctgtgctgctgccgggaagggagctctttgaaatagcatagtagggactttgcaagtgggtctcatttggttaagttactgcctttgtgaggctctgctgcatctttatattctaccaaggagaagatggtaaatcagagtaattgcttcatcccaaggcacttttatattgtaaaggaaaaaggtcctgttaagaaactcaaattaacttctgctgtttatactatatagaaagactctgaaagct

SEQ ID NO: 26155 - DNA, 1048 bp, Homo sapiens
gtgggctcagctcgtattctccagctctctttcaaaatactttttacctcccttattagggctggtctaccccaggggtttcatccagggctggggtgggagtgggtgcgcatttaaacaaaggggcttgatgtctgccctaaccggcaggataaccacatttaaagaagactacctgaatgactatttgaggtggaagaaatgggctttgccgtggggagaaatcaggactcttgtaaataacttccccagcatttctaaaaacgacataggttgctggaaagctttgtgtcagtcacaaggattagcggagagcatgttgggcagtttctctgtctgggtaggagaggatgggagacagggaacctggaatgtggcattcttctggcaggtcttctttccgcgggactgttcccttgttggctgttactccacattagtcaatagcagcatccccagaagaggttgtcagcatcagctcctgcatggaaattggtgcatcagtcaagcccatctgcatctgcaggggcagtgtggaaatgtgaagcagggactgctgggagatgagggggtaatgatctgccctttagggtgcttggggatttctctcggtcagacaaaatcctacgtgcactgacgtttactttcctttaagaaagtgtgtttttgcacacttgtgcacagtgctgtgtagtggaccttatagtaaggatcttaaaattgaaacacactctgcagttacatcttttctagacagcaagtacaggaactctcacctaagctggcaagatgcatgagtctttatacaagaaacatcttggctgctctgtggcatggattctttctgggatctaaaaacaagaatattcgatccaggagtcttgaactgcaagacggcagtgagctatgatcaagacttcagtgagctatgatcgtgccactgcactctagcctgggtgacagagcaagaccctatcccaaaaataaaaagtaaaataaaacataagaatgtttatgtgacaatgtgaagaatgtgcttcatgggaat

SEQ ID NO: 26156 - DNA, 1030 bp, Homo sapiens
tttgctttgcatgctaacctgtccacaaaccagatttaacactacctggaatggcagagagacactggccagggtcttaaaggagaatctgagctgcctttgggtgtggctgtgtcttaagtagccaggtcacaccaagctccatcctacgggccccaaagcatttggacagcactatgcctccaaaggcacaaaacatctcatcgagggtgggaactatggagaaacaagcagtgcaaacaactgaaatataatattctgtgtttgccatcacttgagacatcatcagataaatgcattctgggaatttggccagaacctatcagaaaaagtaaaagctggaaacataaaatacagaatttgagattttccctaattatagtgaaatttccataattatttccctaataaacagtttttttggccactgttgttgccgtttctagaaatgggattattctggtctgacagtttctaggaaatataagtacttattctccaagctcttgtctggtggtgctctgtggaagggcattctttagtgaagaatcttaatagaatgttctgagaaagagaagcacacagcctggataataatttgttgcactttctgcatattgtttttctttaattctcagggctttaatataaagaaatgccccctcactagagggggcaaaatgattgccccaaacacgagctgtggttcttgaagacgtctttgctaaatgaagacactgatcatggtgtttcttaagagagttttagaagaggtggattggggagtcagggatgtttgccctggtttacctgggggccttgaattttaacttagttcatggtctgcttctgtttgcccatggtccccgtaaatgggtcttctgcaaacttatcccatcgcccacctacaaacatgagaagttagctcaggtccttcttgtgaaagctgtaatactctttggagcagagagctcctgtcttttctttctagagtggttgtatttatactcattgtcatctaagtacatgc

SEQ ID NO: 26157 - DNA, 1029 bp, Homo sapiens
cttaatgacagaatcagagggcatgagtactgaggtcccatgcgaccttaaaatatatgtgatataggctgggcgtggtggctcacgcctgtaatcccagcactttgggaggccgaggtgggtagatcacctgaggtcaggagttccagaccagcctggccaatgtggtgaaaccctgcctactaaaaatacaaaatttaaaaatacaaaaattagctaggcgtggtggtggacgcctgtaatcccagctcatcgggatcctgaggcaggagaatcacttgaacctgggaagcagaggttgcagtgagcctagatcgcaccattgcactccagcctgggtgtcacagcgagactccttctcaaaaacaaacatatatatatatatgtatgtatgtatgtaaatggtctccagcaggtacagtgaggtatatatggaaaaacatcttgagatttattttgaactttcaaactcagaatgaatagtatattgtgttcaagctattacagattttagactagtggaattctaattaaacaggcttcactgtgcatggattgtctgtagttcactgtcattaagtcctgctgtttttgttagtatttaaaatgttaaaaatacactgcctatataatttcttgcaattagttgtatactccataaaacctctaatttgacaaattttatggatgaagacaatggtaacaactgtttgccacatctggtcaaatctaccataacacctaaatgtaacttcattaataacaataatgatggtacagcaatacaatttataaaaccacttcatgaaagtcatctgaaattgtaaggtgattttttttttcatgtagatcattttgctgtttcttcttagaaatggaactacacatggtgtacaaatggtctgtacaaagtcagaccatctcttctagttgtatgactctaattctagaaagaagcattgcttcagtgacctggaaagagtaaacaggcttaatttatatcacgagatagttgggtaaagtaaaaat

SEQ ID NO: 26158 - DNA, 1038 bp, Homo sapiens
cctacatactctggttagtttgtttgtttatttatttatttattttcttcttgggggacatggtcttgctgtgtcatccaggctggagggcagtggtacaagcatagctcactgcagcctcaacctcttgggttcaaaggattgtcctgcctcaaccttctgagtagctgggaccacaggtgcatgccgctatacccggctaatttttttactttctatggagacgaggtctagctgtgttgcccaagctggtctcaaattcctgggctcaagcagttctcccaccttggcctcccaaagtgtgagattgcaggcataagccactgcacctaaccctgcatactctttgatcatctttttcttcttaggacaatcttgtgttggttactaaagagagaatgatatttaagttcttcctctaacatggatatggggcaaaaatcatagactaaaagtttcagttttcacaagtcattattggtaatgtcatttaaataggatggttgtcaaatctgggaaaacctctgatgaagtcttttatatgtgagttgtaaggatcaggcattttcccgcttcctcatgcagtgactaatcttaactccttcagcactgttggatgaaactttctgtgatgacggacattgttggaaataaagctcggagtcataaggaaaatgagtacttagacatgctctgtatttgtgctgtacagtatggtagccaccagccacatgtcacttttgagcactgacgatgtggttagtgtggctgagaaactaaattttttatttaatttgattttaacatttggcttttcctccagaaagctgccccctcccggccccgtggcccacctctgtgtccccagctgggcctccctccaggcccagtgactgtgtccactgactggggcctgagccagtggatttggtgaaaactaaccaaggtttattataaacaaaactgtccacctcactcacccacctgaatatgcttggaatgactattgaatcaatatgtttaaaaatgaacaggcgt

SEQ ID NO: 26159 - DNA, 1778 bp, Homo sapiens
aattatacaattatacccagaaggtcctgtgtaggggactgcgattgacatcaccctagtctgcagcaccaaggactgaatgagctcagtcctcttataatttaggctggactgtcacagacactggcagacacagcatacgtggtgcagccaaagtgcaaacatgccagcagcggccatgctccccagggtgggggtccagttagtaagccacgcgcagccaagaggcgaggcatgccctgtgccacacacggactcaccctgctcactgtgcccgtggtatcgaaatgtacccacgtttaattcataaaggagaggctgctgtcattgaaagaaaagtttgttacttgcatttctggagaaaaggagcgcaccaggccacgcagggccacaggaggaggacgcaccagagtggtcaggaggcagaactaggcgagcagctttccactgtgtctccatggcaaaggcgaagatgggcgggggcagagtgtaggattggcaggtttgaatgtcttgggcagtagctacaggggtggtctccagctgcctggtgcctggccctgggtgatcagggtgaggggatactgccttctgcagtggaagagtcaaatcgaggagatggactctgagttggttagtgtgcaaaggtgcactcccaagggacccctttgctatctctaagaattggcctgccctgggaagggcagtctctccccagtcagtgaggtccccaagatgtgaaaacattatacattataaaaaagcatgattaatataagctcattctagcatttcaggttacagcttctagaagaggtttgtagtctcaaatgagtaggtttttcctctagagaggggcgggcctggaccttcaagcaccccttggtgtgtttaggagctcaggagcagaagcacctgcctgcagccctgcagctaaggaagttctctcagtcactcagagcagggaggggctgagagagtcatgtgaggctcccggggtactacgacagccctcgaggtgaaggattggccctgatcataatagagaaccctgaggaagtttactgtcatgagtctcggctggttggcgcatgtgacctttgaaggatgaagatggagtttgcaacatgagtatctctaaccttttgcttttcagggatcattttcaaaaattgcattggggccttcgttatttaccatagtattttcactttcatagttttgtcacctttttgtactgtgaacagttcaaccagtgaccgacttctctctcatgctgtttaccccacacacaatttcccactcaattctgaaaataagaacctgttaataggttggaaagctgtgtactctattcatatattgttctttcatgctagtggagagtggtgtcattagcatcttaattttagagttgtgaaatgattttaccaattaggaattgaatgtgtattttttttctgtttaataagaagagcaaatttgaataaataagctggtgtagataaacttaataatcatgctttttcttgtttggagataggtgatgtgttgtcatatcctgtgatacaggtcactcatctggccttctgtttctgaagtttaagtctggtttgaatatgtaataatactactcagcatttcttgttgcctaagtgagacgaaacttaaatgttatgatatttacttcatgtattcttgtactgttcatttcaattaattggtattgtatatctaatatgtgatatttgaactgaataaaacttacagtgttgtaa

SEQ ID NO: 26160 - DNA, 1038 bp, Homo sapiens
ttgtggattccgagaagtggcatgtgtgtctcagtgacttccagtgatgcctgccactctgaagagatgaaggagtgtcctggcaagacctggaatcccagctgtagcacctgtggagagatgtgatttagatttggatttggggtatctgtgaggaagagtcccagagtttttcatcctgaagggggcaactcttgggcagtggtccaacagttggccataaatgtgaagctggggcgctgtgctgaccagggcatccagcgttaagacgactgcctaactttggccacatgcgttgttttttgggttccgtttcgtatcagggcatgctggctaaaagatgggaagcagcaacattctcttgggctccatcatttatatgagggttggcaatgccatctgtaccctctgtgaactcccactgctgttcactcagttaatctaagggacaccaaggggtctgcgggaggatgacctcacaagggactgaggacatgggagaccaccctcctgtgggtagaatacaccagagggcccaggcttgactctgtcctgtgttaaggaggcatcggtagttttgctgagcttgtcaggtgtttataatggacagttggagattggggtcctaggcttaggtctttgagagcctctgtgtccaggagagcccagtaggcatccagccatttactgctttaatagggtagcatgaggctgagagggatagtttcttgcatccaaagcccttaggcaccttatgtccatcctaagtgggccagagactccagggctgcatagagcttgccagagcttctataatgaaggggtctctgagggcaccaacaggagtgcccatggattttaaggtttgattatagaggttgtttatggagggtgccccatttaaagcaagctgatttgtaagcagcagcaagaagattaagtaaaatttgtaaatgaggactacattgccatcagaacctcgaaagtatctaaagatgttggacttgtatgtccttaatgagtgtgacaatgagtttc

SEQ ID NO: 26161 - DNA, 1033 bp, Homo sapiens
gttgtaaattgcatgttgtaatcaaacgaatgtcaaaacataagaaagtataccttggatatagaaaaacctgagaacagtatcattcacttgaggatatatatatatatatttacacacaataaagtgagttaaaattgtatatgcattgggatgtcaaacataaaaccaccaagtgcaaagaatgctttgaaagtagaaccttgtctcattgatcagtggttactaagcatttaggaaacagtcatctttttctattgggatttgcattagaaattagccccatcagtaaatttcagtttactatccatttattaatatacaaaaacattaaaaaatctgccatgccatggtaatctatctattccaggaaaatagatcagaatatatgaagggaggatggccggtatgggatgtaaatattcagtaagtttttctccaacaccaacctaaaattatctttatttttttgaaagaaagttttacggtgatcagaccaggtgttatctgttaaaggacagtagtatgacttccatcctgtaatgcacgttggtgatattgattggaataactgaatctgagatactcatatgttctctctggcccaaccagctggtgcatttggttggcttcctcgtctgtaaggtggacattcttaaccagagggtcacgaccacatcacagctgcaagttttgctttgttcattgaaggtgattttttagttttaaaatatatatatctcataatatacaatgttgatggtatatcaatccatcaagcattttattagaaagactttataatattattaatttttctttagttttcagtagataaagtagtttcagtagataaagactttataatattattaatttttcttttagttttcagtctcatcatgggagttagaaaataccagcatcacttaattgtaaagagaaaatgtgaaagtattttccaatccaatgtttcaagtgcctcacttattgtgaatctcaaatatcatcttgagatggtttaatggcagtt

SEQ ID NO: 26162 - DNA, 1030 bp, Homo sapiens
acactcatttgccacattgagtatgtcactcaaacttgtacacatacttttagcctttataatattatgctttatatggcatgcttaagacataaaaaataatagcacagaacattggaaagtgaaggttaaagtgatagtattctcctctgactggtatatactcttaactgaaagcttgagagaacagaagcaactaattcatagaatctccccatggaagatgcttctctttgcaggctcttccttttgtgagttcccccacctttaaatgtgtaccataaaagtaaactatgtattttgagagctgaatgaattgtgaattagccctaaaatacaaggtggcatttaattcttgctcacgtgtctgttggtggagcaaaagactgtgttggggaacaggcttgcatttccagtgttaaccttgctttcccctcatctcttttgcagagtaatcccagcggccctgcctggtcctggtggatcctggccgtgctgcccctggagcgcaaggctcagctggccatcctcggcatgacctcgctcaaagagcggctccttgccatccgacggatattagtcatcatcacgcgtaagatgaatagtcggcaagagctggctaatgccagggagagaaataattgatttttctctctgtcaaggtttctggcagcccttgtgcttttataaatgtcaggcatggacgaatagccgtccattcattgtgcttcatcaagtgcttgtggatgaggttccaaaatgggacgcttgccaaacattgagtcctcctcaaaaatgacaattctgtgtctggtgggatctgaccttgtgtgaggttagcctgaagtctgaatggagcccatagttggaaaacaacctaagaaaatctcttagaagcaggtgcttggggaatgcagttcactgacagcacaggaccctgcagatggtttacatgtggtttgggtttcacgagaaagaaggattcacttcccagtcagcatctggctctgccagatggtaaaggcgtgct

SEQ ID NO: 26163 - DNA, 1034 bp, Homo sapiens
ctaaggattggggaagaagtgccattggaaggtaaggtaaggggatgggaagtaagttcactgaggggaagactaaggtggctgagtgtgatcaagctgagatggaagctgttttagaaccaagcactttgagaagcacttctagattctggggggaggtgggttacagcagtgtgtctcactcaagcaaaactgccctttcaagcatccaggcatggctaatattcatcatggctaatgattcaaagcttttggagcaactggagataatccattgccagcaaaatatttgcccatttgcagaaatagatataggcacatgattagtttgatcttacccaaacagcgaacttataagacttaaaattacttaaaagccagttaattcagttaataaatatttactgatacactgtggtataaaaaatgcaaatctcaattgagattctgtgcacatgtatgaaaaacttgaaactttacgtgaagttctttgtgcgtataagacagtattattttctcagaacttttgataatcgaagcaaatttagacactactgaaacatgaaagttggggacttttataaggcctgaaaggggccctagcaactttgtattcttaattttgtacttttcctgaccaggtgtggtggctcacacctgtaatcccagcactttgggaggctgaggcagaaggatcacttgaggtcaggagttcaagaccagcctggccaacatggtgaaaccccgcctctactaaaaatacacacacacacaaaaaatagccaagaaaaaattagccaggtgtggtggtgcacagctataatcccagctactccggaggctgaggcaggagaatcacttgaacctgggaggtggaggttgcagtgagccgagatggcaccacttcactccagcctgggcgacagagcgagactccatctcaaaaaataataataataacaattttgtacttttccttaaacagactttccaaattatgtaagattcaggctccacaaaagctgaatcttttg

SEQ ID NO: 26164 - DNA, 1020 bp, Homo sapiens
cacagatggctagaccttcagtttggggaccacatcattcactgggtgacgtatgtagagctctgtgctccctgtgagataatgtacagtgtgattggacaccacgagaccctggaggacgatgccccatacatcttaaaagaggctggcattgaccacctggtgtcatacccgactatccctccgggcattaccgtgtataacagaaccaaggtggagcactatttcctgggcatcagcaaacgagacatccgacgcctgtatgcccgtttcgaaggggactttaagctctttgggtaccagaaaccagactttttgctaaactaatgcataagacctatgaattcaaatatctttattagacctggggctaaccaggtgaagatctgagcccagaaatgacccttcctccaccacacccctcctttgaggacgcccggggtctcccacaggcctgtgagttgcctcggcatatgacgcagaaccccaactgttacaacttagtttggatgtaagatgctctgaggaccctgcccacacccctgcgtgcattaggatgtcgctggcctttgctcacctcagaggggagaaaaggctaaagatttgcagtttgacagcccagcagggaggaagcatcacacagcgttaggagccgtttccttcaggtgttaaggaaggggatgcccctgaggttctcctggctagtcagggtggcttcacccatcactggtgggttgcaggaacagcacccaggactctgaggagggacagagaagcaagggggctgctgaaatcgcagagacttttgcagcatcagatctgaggagtaaaacggcacctctggccttcatcttggtgctgcgacaattgtggaggcaaagcattctttctgtgactattttgttcctgtagacagtcagcgatggccagagggtggtgtggtgtccaggggtccatctttccagaatccatgcctgtgtaatgctggtccatgcttctgaacctgtgtctgccaagcgc

SEQ ID NO: 26165 - DNA, 1035 bp, Homo sapiens
ggattcatgtaggcattaaaatttaagaaggggtgaggtcctggaccagcaattctcagtcccagctgctcattagagtcacgaacagagctcttaaaaaatgcctgggtactgcctccagagatttgtgttgtcttggctggggtattcttggggcccggggtatcactgtatttcttggaagtttcccaggtaccgccccagacataaagccagacaccttcaggtagatgtctagattcagaaggcacataatcccgaagcaaatgacaccatgcttagctgggcacaccactctttaggattcatcaaaacccaccacaccagataatgtggatcctcgtagctcatccgctggcttctagagccacagccagagatgatgggatgtggagcacccaaccggggttgcttgtgccgggttagaattctccctcctccatgaatgaaaatgaccttgagactgggcagtggctgagtgggcatttgctttttgtacctctgactctgctgctgaagaaactgtttcaaaatttaaatcagatcatgacatcaccacccctcttttcatgtaaaactctcttcaggggctcccattgcttgcaaagaaaagaccataatagccctggcaggccccatgttgtctggcctgcatctgcctcagcctgtgccccagaactccagccacatgggcctgcgtttagttactcaggggcccattcccttggcctggaaccctgcccttcaccttaggtaactgtgctgtcccagaccactctgcccaaggcacatcccattgtattttctccccacagcaccatgtccctctcacaccatcaagtaccactcctcagatagcttctttccttcgtgtgggcctgttagacgacaagctctgtaaggacaagaactgtgtgtgtttagttagggactcagggtcatatccttggcagctgttttactgcatgaatgaatacactggatactggataatgaataatgagcttgaagtcattatttttaggttattttgtc

SEQ ID NO: 26166 - DNA, 1025 bp, Homo sapiens
tagggctggtcttcagcggaggaggggtggggctgggtggaggaggagcccggggccgtgtgccttttccagctgccggcccaaacctgtaaagacgtctcgctctgactagcctaacaagtcagaaatagaaaattgcctctaggccgggcgcggtggcacacgcctgtgatcccaggccgaggcgggcggatcacttgaggtcaggagttcgagatcagcctggccaacatggtgaaaccccgtctctactaaaaatacaaaaaaattagccgggcgtagtggtggttgcctgtaatcccagctactctggaggctgaggcagaagaattgcttgaacgggggaggcggagcttgcagtgagctgagatctctccactgcactccagcctgggttacagagcgagactccgtcttaaataaataaataaataaaaatgatgcagggtcttctggaattcacccacgatcacttcagccttggaaaaggcaactcattaataagacattgagagcctgctgtgtaccaggcaccattctaggctctgcagatgcagcagtgagcaaaacactaaaacaaaggtgaaagtcatctgccgtgcctgagtatcaggagacccatgtatgcaggcacacaggcactgagcaaaaagcagcaatctgacttgtaaaatgcaggtattgggctccagagcttctgcccaggcacactccaagtttaagagagcaatattcctacctggtatggaaggaagcatcttgcacacgtgggctaacttgctgcctcctggcaactaagcggacacagagagtagagacccacacacctgtgagataggcgcagggcttccaaccgtggctatgcattagaatcacctggaagccctcaaaaactaggaatgtcctggggctccatccccagacaaattaaatccttggaaatgaggcctagcacagatactttcttaaagatcctcaggtgatgctaaagtgcacagtcgttgatatagagtgaatcaaatgat

SEQ ID NO: 26167 - DNA, 1062 bp, Homo sapiens
agaaaaaaaccttaataaaaaaaccaacgtgaaaattacatgttcatgtgggtaaggatgtcagggtaacaagggaacacttttacgtatccagttagagtggtgagattgtgagtaatttattattgtatttgtttgtgttaataacgtggcttgttcaataagtggtaagaactccctttccccctcttgtttgaagagagaacatatgatgagctgttactgggagcagcccaggcccatggcctcacgccacgaccccagccggccctatgctgagcagtaccgcatagatgcccggcagtttgcacacctgtttcagctagtctcgccctggacctgcggggcccacacggagatcctcgccgaaaggacgttcaggctcttggatgacaacatggaccagctcatcgagttcaaagcgtttgtgagctgcctcggtatgcctctgtgggatttcgcagtgatgtgctttggggtgtgggtctgtgagcagaacacaaagtggatcttcggagcaggcagatgcacatggtgtaacacttttgtgactggcctgacatgaacttatgattttgaaatatcactctgcaggcccctctcaggatctactttctgaagggggatgggagaggggcccacgctctcaacatacgaggctgttcaccttgctttccttggcatccacgatgtggtggtggcttgttgggagccatgttcctaacttttgtccataaaattaaaatgttttggaaggtatgaggccagacaacattcacaaagttccgtggagctcacatagtcaccagcccagtctttaacactttcattgctaccatggtgtgtgtctggggcaggagagttgggggtggcaggtattgaccttccccagtgttctctccacagtgagtttgtgtcctgacaaatggactttcagcattggcatcaactcactctttttaaactttttgcagatattatgtataatggagaaatgaatgagaagattaaactattatacaggcttcatatccctccaggtaagaaagtccaagtagcaaa

SEQ ID NO: 26168 - DNA, 1031 bp, Homo sapiens
atccaccctcctcggcctcccagagtgctgggattacaagtgtgagccactgcctggcccctgtggaagttttctgttcgtctcagcctcttgacattctgtggcctcccaagccagtttgccatgtggcactgtcccaggcatggggtgaagggtgccattgtccctcactcctttccacagtgagaaactccaggaagagcagggccatagatgcttttctttaagaagattaaatgtcttgcatttagatggactcacagtggccttgaacagggctcgggggacaccaggcatcatgggcatcaggcagccagctagaggttgcagacattttctgcataaggctagtgagcagcagtgagggaaaaggcccactaggttgagcgccagagctgggctttctaggagctgagggcaagtcagatgacattgaaagagggggttctctttcagagcatgatggaagcttaaccttgcatgtatgcgcagaatgttgggcttacttcactggagagtttcaggcctggaaagccacctgtggagcccaatccacaagccgggcttcatgactgcctctcgcttctctaaaataagccgagcagctgcagccttgccctcctcccaggtgttggtgtttggaagtgccctggcatgtctgacactgtgaaggcagcccgtgttgtggtacccgaatgaggatggacttgggcgttgacggggcggtgtgttcaggtttctagatcacattaagaatgaggacagcccagggcccccagttggcagccaccatgcctttttctccgacgaccaggagccctaccctgtgactgatatttcggacctgatccgggattcctatgaggtaacgggaacccccgccccatgccccgttgcagcccctaaccccccgggaattgtgactgggggatggatgtggaaggaggttcctgggccacttcctgtttccacactttggatgagcaggggactgagcaagtggtcccttttttccctgcagaaatttggag

SEQ ID NO: 26169 - DNA, 1041 bp, Homo sapiens
tctggaaattttaaggaatttatgtaaagggatcatactgtaggtactatgcctagtttctgttttaccatattgtggggatcattttagattcacagggatcccttgaagcagagcattcagacattattcccattttgtagcaatcaaaatgagatacagagagtctcattcggggttacagagtacataagcaagccaagaattcatattcctgactttaagcaagtgctaatttcatccttatatttataaggaactttataaagtgcaagagaagaatctttccctctgtatgttggaatttcccccttactagaattttggaatatgacataacttgatcagtattttcaaacattgtgatttggttgctttctttactggtttcagagccaaaaatcaggatatgtggggttgcctgggggttaggatccttctttcctcctcatcaacattctctcttgtcattactgatgtgatgcatgagccactgcacccgacctggattcttaaaatatatatttttaaaaagataataataataactaatgtttattgattacttactgtgtgtcagatatgcatctcaacttttttttttttgagtcagggtctcactgtgtcgcccaggctagagtgcagtggcgcgatctcgactcactgcaacctctatctcctgggctcaagtgatccttttatctcagccggtggagtagctgggactacaggtgtgaaccaacacacccagctgatgtttgtatttttttgtagagatggggttttgccatgttgtccaggctggtctcaaactcctgagctcaagtgatccacctgcacggcctcccaaagtgctgagattacaggcatgagccaccgtgcctggccgcattaaattttttaattttttttttgagatttaatttacataccatgtaattattatccatcctttaaaagtgtaccattcagtggtttttaccatgttcacagagttgtgcaaccatcaccacaatcaattttagagcatttcatcacccc

SEQ ID NO: 26170 - DNA, 1334 bp, Homo sapiens
tgggctgggcgcggtaatcccagcactttgggaggccgaggtgggcagatcacgaggtcaggagtttgagaccagcctggccaacatggcgaaaccccatctctcctaaaaatacaaaaattagctgggcatggtggtgggcacctgtaatcccagctactcaggaggctgagacaagagaatcccatgaacccaggatgtggagctttcagtgagccgagattgcaccacagcactccagcctgggcaacagagtgcaactgtctcaaaaacaaaaacaaaaaggtgattggtggcgctttctcccactagtcttagctgtagctctctcttagagtgattgctttggcttgtgtgtgcagcactggagggtaggtgtagctggggtagctgggatggtctccatcctcataggggtgcttctgcggtgacctacaggcttgtgtggccacgttctgaatgtcaggtcatcaccaatgtctgttcttctctacggaggaaaagtgaaggcacttaggaagtactggaaagtctgagaagcgggctgtgagcagtggctttgttgttgatggtgttcagtaaaaggagttgatatatttagcatcaaaactaacatctgctttgaaacagacctaaaggataggatggtcttattctaaacttcataaagagctgatttctcgaggatttctcattttttcaaagtcacgatatcttcatctcagttatgctggaaatttaactatcttgtatataatacatatttaacgaatggtgaaattggaagacaactttctagtagggaggaaggaaactaactcagatcttaggaaagtcccccctgttgcttatttgtttgtaacttgaggtttctggtctctggctacccaaatgtgcaaaagacagatgtctacagggaaagtgaggacagccctgaaaggggaatggagactgtgtgcagcttgcccaggctgctctgaagccactgagagagaagccgattgaactcaggcagcaggtgcactgggtagaacaaaatggtttagttgcctcagatacgggagcaccttattcttttttttttgtttgttttttgagacagacttttgctcttgttgcccaggctggagtgcaatggcacgatctcagctcactgcaacctctgcctcccgggttcaagcgattctcttgcctcagcctcctgagcagctgggtttacaggcacccgtcaccatgcccagttaatttttgtatttttagtagaggcggggtttcaccatgttggccaggctggtctcaaactcctggcctcgtgatctgcccagctcggcctc

SEQ ID NO: 26171 - DNA, 1045 bp, Homo sapiens
gccttagtaagatatccttatgaaaaggtactgcattttatggtttgtttcttagttaggaacttttcggtgtgcataagagtatttaaggtaagttgtaggtaatggagcaaacactatatatctaccacctgtaagtaaaaaaataagagtatatcctatgcctgagagaccccttctgtgttttcctgattacatttccctcccttccttgcaggcaccactaccctggattatgtgttaatactgacttgcttttctttatagttttaacacatttatatgtattcgtaatcaatacatagttcagttttgtgtgtttttgtaactttattacaaaatatacttttattcatgctttatgtatttttctgtcacttgatcaccccaccccctgcattatgtttttctcactttgacccatggtagctgccgtggttcattcattttcatggatgtgtagtaatccattgagtgaatgtattattatttattcattctcctgtccttggatatttgggttgtagttgttttagtagataaagctgctgtgaacattttcctgtagtgttcacacaggtatacatttctctagagaatatttctatgagtgaccttgttgggtgtatccatcaggatgagttaggttatgctgcagtaacaaacaccccgacacataaatttatttctctgtcatgctgtatattcaatgtgggtcagcaaggatctcttctgacggagaactgggacttttgtgaacagccctaatactgggtcatagctatgtgtattttcaacctttctagataattccaaattgtttccaagcagagcatggtggtgcatgcctataatcccatctacttgggaggctgaggcaagtggattgcttgaacctaggagtttaagtccagcctgggcaacatagtgagaccactgtctctaagaaaaaacttcccacagtggtacatccttgctaatgcttgatattgtcagagatgttactttttgccaatctggtaggtatttacatagtatcttagaa

SEQ ID NO: 26172 - DNA, 1033 bp, Homo sapiens
gcggccgggcccggggcctcgcaccccgccgggcccgcggcccccagtcccgggctgcgtcgccagaggcgatttcttgggagacgcggggcccggacggccctgccgcgggcttgttttccttttttctgcgtttctcccgcgggctcccgtcgaggtggtggtagagggggctcccgggcgcgtgcgttttccgggcgaggcaggtgtcttcgccgcctggcccggtgagctggaggccggactcgacttgggaatcgaaggagaaacgccgggtggagcggggccggagggctcggggccgccctggagcagcgaggctgctgtgtggggccaggtgacagcggggtgcgccgagccagcccggactcggccatctggaggcgccggaggctccaggtggtgtcgtggctgggggcgcgcggcgatgcgcgcggggcgcagctcttggaggccgcggtgagcgggaactgtctccacgcccggaggggaaactgagggtgggcgaatcccaagctcgtgatctcagtagagaaattgaacagatcagttttttcctctctttcagtgtcttacaaggaatgataggaaaaaaaacccaggctcgtaaagttgatgataaaacaaagcattttttttctaaaagttttgttccaaagctctttgaaattgacgccaacttgcagtagctaggacacctgtttaaaggtcagtgaaggaacaattagactttttcatttgtatctagggggcctatatttttctttccaattttggaatcggaataaaagagagcttagatctcctgtcttgttcctgttctactgaggagaagacagaggccagagagaggtcaaaggacctaggttaggtccccgggttagtggttggcggctctttctgctctcagaccagtctagggaaggcctttttgaggttgagtctggtaggagatgtactaacacgcctggaaaccgcagaaccaagtgcaaaggaactggattttgctggactttagcttctgagaaagctg

SEQ ID NO: 26173 - DNA, 1050 bp, Homo sapiens
gaagtcttttgatgaaaaaatgaaatactatgccctcacacatcctattcttagttaccactatttgttcagctgccactatgatttgtactagttttatctttgcatcttataactgaagtaacaaattacgtggcgatgaagcagcaggaggaaaagtatggttgccttttgatatttcgaaacgaatgtggaaaccgtcacgaatccctaaattcacaaatactatattcattttcagaaaacaatagaagtacaaaaggaaaatgaagtggttcaactcaactattttataaaacaagattcatccctgagttacaaacccactgaaataaatgctggctaggacttctgctgaaccaatttcacatctcacatagtttccacatagggcaggagtggcttattcctgtcatggatcctagccctgccaaatttgagagtctactgttgagtttacagaaaatattttttagttaaaaatcatcactttatcttaaacatctccactgcctcttcacttacctcaccaggactagcatctgaatctcccttcaaccacttacaaaaataaagtttttaacaatttatgagaaatactacttatgtgatagagagttcttgcgaggtggggacacctggtgtttggctagacccacttattatgagtgatctgcttttcatatatcttcctggtgacctatgcaatttagagttctgcccgagcaaatatttaaaagaagccattacatgccatggacatttcagtcacacttgtgaccagcagaaacttcaaatattaaacctatgtatgtcaaagatctactgtaaaccaaatggtacaaaagtcactgtgtgaacttcaaactcatggtgatactacactatcatctggtaaacatgttctcatcccaaagcagaaagcttgccttcataattcaaagcacacagaagcctataaaacagatgccaggtagagtggtgcatgcctgtaattccaactatgtgggagtctgaggtaggaggatcccctgagcctcaagggattga

SEQ ID NO: 26174 - DNA, 1050 bp, Homo sapiens
tccgggattatacaggtactgttggaagtatcttggggattttcctgataagaacagtagtgattgcataaaaaggacaggatgtaaagtgaaatcagtaaaatatcttagtagacagagggtgctgaaattttaacaaatgtgtaaaaagttcttcctatgcattaattttccagatacccttaaaatgtttaaggaatgtaattcaaaatactgtttaaaagagacatgtgaccatcattctcccagcgaatgtgaatcatttagtgtgctactcaaaattaggtgtaaatgtatatgtacactataagaataaaaatcgataccatttctttaaagctttctaaaataaacttaattatttctaatagttacattttaggctctcaaactatttttcttttgaaataactgctttctaccctaagatgttactcattgctgtcttctttttaacaggtgatttgaagatattaaagctagaaattggaactagaaaatcaaaagaattcaaggcatcttaacgtgacagttgaactcatttgattatacttaaaaaagtttattgcagttattgactctcaattttttttttttttttttgagtgcagtggtgccattgttgctcactgcagcctcaatcttccaggctcaagaaatcctcccacctcagcttccagagtagctgggactacaggtgcatgccacaccctgataatttttttttccccaatataaacgaggtcttgctatgtcctccagtctggtcttgaactcaagtgatccacccaccttggcctcccaaagtgctgggattacaggcgtgagccaccaaacccagccaccaattttactttaggtaaacttttattttcaagcttttgttggtgttgcaagtgtaaatctgttttataaaatgttctataaatataaccactattccttgtaagctatttaaaataaattttaaagtctttcaagtaaacaccaatattgtgattttgatcctcacttacgaagtccctatttgagaacctccctactaaaatg

SEQ ID NO: 26175 - DNA, 2012 bp, Homo sapiens
ggcctggaaagcaagaagtgactgctcatctaatccataaaactatgttaacagattggagctgtttgcagacaaggttccaaagacagcagaaaatttccatgctctgagcactggagaaaaaggatttggttataagggttcctgctttcacagaattattccagggtttacgtgtcagagtggtgacttcacacgccatacagcattggtggcaagtccatctgcagggagaaatttgatgacaagaacttcatcctgaagcatacgggtcctggcatcttgtccatggcaaatgctggacccagcgtgaacgtttcccagttttttatctgccctgccaagatgccaagacagagtggttggattgcaagcatgtggtctttggcaaggtgaaagatggcatgaatattgtggaggtcatggagcacttggggtccaagaatggcaagatcagcaatcagcaagaagatcaccattgctgactggacaactgcaataaatttgacgggtgtttctcttaaaaaaaaaaaaaaaatactgtgacagaccaaggtaaattgtttttgataattacagaagtgtgatttcttaatcagcagctgtcaaacatagtgttccttaatttaaaagcttgaacactaaattataaattggagaggttggaataattacggtcatatctctagaaacacaagtctttagtagcaaaaaagaaattagcaagagaagaaaactgttcagtactttgaaaggaaaaagttttcagtgatagtttttttagatgaaaattaacatgataaagaagtgacaggccaggtgtggtggttgacgcttttaacaccaacaatttgggaggccaagatgggaggatctcttgagcccaggaattcaagactagcctaggcaacaaggcaaaactcatctctactaaaaatttaaaaaattagccaggtgtggtggcatctgcctgtagtcccagctgcttgggaagctgaggtgggaggatcgcttgagcccaagaggttgaggctgcagtgagctgtgatcacaccactgtactccagcctgggcaagagtgagaccctgtcaaaaaaaaaaaaaaaaaagaaacaaatattacaagagtttttgctgaaagttttaagttgataagatgcagagaattgggggaatgtataataaatcaggtttcattgttatattatttaccacatgaatcaccttcctcctaaccattataggagccatgtgttcacatgtcatgtggaccagtatttaactgtggaaaccgcgggtggcatggagaaggaggcagtgtccgtgactgtgctgctctccgcagccccctgcctgctgtcctgtttcctcggctcctcggtgtctggactggcgttctgggtttcccagcagaaaactaaagggccagagaggtgtaaaaacacacaccacttggcaggtaataatttccccgcatgctatctttttagggatcctgaacacacagcctttcccagaagactgctccctccagctactgaggaatgatgacaagaaaaggccgaattgcagtgtctccatcagcagtttgctctccatgggcacacgatgacaaaatatcctgaagcgaaccactagtctgacctcagtagcaggattggaagcttcatgccatgggagctgtcaagaaaggcatcccaaagagaactgaaatttaaaaataataatagaccttcaggaataggtgattgtccccatatactggggatgaaatacccaatgtaaccaaattccccagtaagatcacttagtttggcaatagtcttttcttttgagcatgttgaagtttatttgctcaatgaaggctgaaattataagtcagtatatatgtattactaagtagaacttgaggtaattatatgttttagtcaaaagcagtttctgtgggcttggtataaaccctactttgtgatttgctaaagcacaggatgttgactcaaaccaaaactagt

SEQ ID NO: 26176 - DNA, 1051 bp, Homo sapiens
gagtgtttaccatgaacagtgtgttgcttcagactattacaaagacaactggggcaggtactctaatataaaggacaggtggtgtttctaaataattggctgctatggttctgtaaaaaccagttaattctatttttcaaggtttttggcaaagcacatcaatgttagactagttgaagtggaattgtataattcaattcgataattgatctcatgggctttccctggaggaaaggttttttttgttgttttttttttaagaacttgaaacttgtaaactgagatgtctgtagcttttttgcccatctgtagtgtatgtgaagatttcaaaacctgagagcactttttctttgtttagaattatgagaaaggcactagatgactttaggatttgcatttttccctttattgcctcatttcttgtgacgccttgttggggagggaaatctgtttattttttcctacaaataaaaagctaagattctatatcgcacatgagcattaagttcttcattgccttgttaaggaaaatgagtaggcagactcagaatctgttatattgatttcagttacaatttaatctttacaattaaaagggcgaaagatgtagaattttagtttttgttgttgactcgaaataaccagttttcttgattagagtttaagcagatttaataccatgaccttgcttaaccgtttcttcttttttacttgcttgctgttcttttgggtcaaaggagcaggctaatgcaaagcttttggagactgctaagtgttaaaaagtgattaaacacacactctgctattttttcacttcttggaggtagaagtcgagtatgaggcagttattttttagagtgtggaattatagtctttccttgctcctagttattctgtatatctttactttgtaggtaaaaataaatgtttatttaaaacaatttttaaaattataaatttatttttatagccatatgtaggatataaagatttatatagattattttctcaagctacttaatgctttaattctagctactcatcatgaaat

SEQ ID NO: 26177 - DNA, 1127 bp, Homo sapiens
gtgaccaagagttcaggctgcagtgagctatgatcctgtcactgtactccagcctgagcctgggtgacagagcaagaccctgtctcttaaaaaaaaaaaaaaaaaaaaaaggaattttattagtagctgtgaaagaaaataaagaaatacataaagtgcagaaaagcataaggaaaaaatgaaaatagtcgtcccccacgtagagatgtcatcttaacactttgataattacctttccagatgtttttctggaaatcgaaaggtgtttaagggtcggtgaatatcacttatgggctgttaggtaacctactttttacttaatatatgaagctctttctatgttgataaatagataattttttacagctacagagtattacattttgaattttctataatttcttgaaactaattaatgagtgtttgtattatcagtagcactttgaaatcattatgtatatatacttatgccttgtctaattgttttctgtcactctgataggtaaaatgtagtgaactgcatgttttttgttttgttttgttttttgtgttttattttggtttttgagacagggtcttgctctgtcaccctggctggagtgtagtgatgagaacacagctcactgcagcctcaaactcctgggcttaaccaatcctgccacctctgcctcccaagtagctgagaccacaggcgtgtgccaccacatctagctaactttttaaatttttttgaagtgatgaagtctcaccatgttgtctagactcattgcattttttaaattacatttttgtcctcttttcacattgttggtcatctttattctttgatgaactgcttattttatccctagcttatttttttatggagatagtaattttttcatattgatccttagagctttttatacattgaaaatactagggctttgtcatatattttatgtatttctcccccaatttctgtatcctttggcttttcattgtactttccagatagaaattatgtagtttagtttcccgttctctcatgattctgcctttgattgcatgctgacttaggaaggtctttcttatgttaggattgtaaagatattgacctgtactttgctagtatttgtgggttttgt

SEQ ID NO: 26178 - DNA, 1050 bp, Homo sapiens
tacatacagatgaggaaactgatgctcaaggagtttaaaagattagccagagacgacacagtaatctagtaatctagggccagataattctttgttctctctccctctccccctcctctccctctccctccctgttcatacccccctcaccccatgtatgtgtctgtgtgtgttggggcgggggttgccctgtgcatttaggatatcttagctgcatccctggcctccacccactaaattccacttctgacaatcaaagatgtctccagatattgccaaatgtttagagagtaggggagaggccgacaaaattatccaacattttgaagcactgattaaagggaaattagtttggtagcagtgtgatacatggattaaacagagcaaaagctggaaacagaatccacttagactgtggggctagtctaagtagaaatataagggccagtactatagtcgtgactgcagaaatgaaaagacccttacagaatttggccacattgggtataactttttgagaatggaattaattcacaaggtgactgtgtacagacagccttgaagacagctcagacttaggtttctgtatttagtcagtgtgactagagccaggaaagaccactgattcagtggttctcactgttctgtgtaacactggttttctgtgaaataggtagaggtggcctgcctgtaaaattgaatactaggccgagtgcgttggctcatgcctgtaatccccagcacatcaggaggccgatgctggtggatcatgaggtcaagaaattgagaccagcctggccaacatggtgaaaccctgtctctactaaaaatgcaaaaattagccgggcatggtggtgtgtgcctgtagtcctagttactcaggaggctgaggcaggagaatcgcttgaacctgggaggcagaggttgcagtaagccgagattgtgccactgtactctagcctgggtgacagagtgagaccctgtctcaaaaaaaaaaaaaaaaaaaaaaatactagtagtctcttcccaagcctcaggagaatgtctcca

SEQ ID NO: 26179 - DNA, 1069 bp, Homo sapiens
ggaaggggcgggaagagcaagagacagagaagatgaagagggcgatgaggaaggaaaggggaagaggaagaggcagaggaaggtgagaaggaagaggaggagaaagagaaacaggaggatggaggatgaggaagaagataatagggaagaggaggaaggaaatgagaaaggataagaaaaggaggaagaggaggatataggagagaaaaaagtaaaggaggaagaggaagaagaggaggaagacgtaggtaagaaagaagaagaaattaagcagacataaaagaatccacaacagcagaaagggaatgacaaaaggaaagccccattcaattagtgagtgttacatatgtccagttagcaaacaagcactcattacccagggctcgccacatgaggcagaaggccagggtgaagcagacgaaggcccagttccactcgtggttcttgcccacggtagacacacccatgaagatgaagatcaaggtttcgctgacactgctcagcatcttcatgaagtacttgatggtcgtgtaggatttctgagatacattttcttctacgtacttattcatagtcattgcacaagcagtgattctgaaagggaagattcagcttctattgaaacctaacaatgatcttaatcagaatgcaagagatagcacttaagagctaaattatggctctactcttctgcccaagactacaacatcatcgaatgatttttataggtgaatgtgatttgcatgcaaacctcggaaatcctgcaatctccggaggtcttctttagcaaccctggctgaactacccggctctgcccagcattctggtccctcaattcccttaccccagattcacacttaaaggtctatggacgtcgacaccatcagctctcctttctgtatctcaaataaaacaagtccaaaataaatttgaaactcattatctttctgtaaactgatttattttcccacatatgccctgttcctctattatctaaaaggattctattgtataaaatcctaaacttgaaaatgggcttgcattagacttctctccctgtcacatctta

SEQ ID NO: 26180 - DNA, 1029 bp, Homo sapiens
gtgaattttacccatctgcctttcgacaaactgcgcattgcacagcgtaggtttggtttcatcatgatgtgtgtgcctgtggtttgcttttttaccagaccaggctggagaagccgctgttgatgaccccacttgtacagaattgggtgcattttcactagagctctcggttgacttgaatgtttaaaaatgcagatcagagtgaattgtacccatctacctttggacaaagggtgtgcattgcacaatggcggtttggtttcatcgtgtgtgtgtgtgtgtgtgtgtgcgcgcgcgcgtgtcctggtttgctccctgagtgctaatttcccacgtagaatggaaagtttagtaagctgattcatggcatttctgaacacctgccatgtggcaggtgctgcggagcttcactattgtaatccacagttctgccacagaagaattcagtcttacaagtaagctgatgttggtagtttctgggccattatctgcaagaaccctagatccacctctgcactcctccctttccaaggctaggcctgattcagccctgagtgtgagctaatccagtatcttgagggtaaggaagctgcgataagtgtcaatgggagaaggctgcctttgaggccttgaagatagtatctgatggcactgggccctggcagggagtcatcgttttctgcccagatgcagatcaagaccaccacttctcccagtttcatgcactctccatgccaccacctccatgcaaggcgttcagttggtagcaactctatgttgagttaatagttaagatcaccatgaaagcatgttcatcaaattgctgcaagcccagaaacacaaggtcttcagggagggcggctttttagagaggatttctctgcctctaggccattgcaggatccaccctccagctccatgcctttaacttcagagactggcactccttctgaccactattcctttaatctagtagttcattctcagcatggggatgcttcttctacttttcagtctaggcacctagaa

SEQ ID NO: 26181 - DNA, 1047 bp, Homo sapiens
gaaatgtttatgagtgaaatttacctgtaactttcttttattgtaatgtctttctcaaatgtgttatcaacgttccactggctcataaaacaagttgagaagtatatagtcttttagaaattaaaacataaatgagtctaatatcacatagtaattaaacatatatgtagtttatcctgagaaggactcactacagttttctgtctttctatgtttctgtgtattttaacttagatttttagcaggaagctggttttgtgtgagttttgcatgggaaagtaaataggaattagactatcttctaggagtttccatatggcactcagcagtatgttcatgtgcccaaggctgaaatttgttactgcatctcaatcctggaacccataatcaaggctcatcagttgagaaacctttttggacatatgacaagtgttcagataaaatatctgatccctgccaagaatcttctaggccaatttaatctctgacttttgaccttatctgtcactgctccaaagactttttaatttttatttttaaaatatcctgtagtagcatgcatatcattcctcatcccagctctcttttcctacttagtattgtcccagttcaaggccttgtcacctcttgcctgggcaatggcgtctatgggatactattctccatttatcttcttctcagccatgcagatgctgactctgaaatagaaagctaaccacattagtcctttgctgaaaaccaggtgatttctgtattgctctgcaagatgaagtccaggtttatcaatgtggtgcaggttcttgcatgatctgatgtcttagtccattcaggttgcttaacaaaatatcttagactgagtaatttataaacaatagaaatatatcgctggtagttctggaggatggggagtccaagatccaggcgtcagcagatttggtgtctggtagggcttcatagatggcaccttgttgctgcattcttacatggtggaaggggcaaggaagccccctggatcttcttttataagggcaccagtcctactcatta

SEQ ID NO: 26182 - DNA, 1054 bp, Homo sapiens
ccttgcaagctccgcctcctgggttcacgccattctcctgcctcagcctcccgagtagctgggactacaggcgcccgccaccacgcttggctaattttttttgtatttttagtagagacggtgtttcaccatgttagccaggatggtctcgatctcctgacctcgtgatccacccgcctcagcctcccaaagtgctgggattacaggtgtgagccaccgtgcccggccacaactaaattattttaatttggaaataccacttgtgtattgtgattttttttttggttgaatattatgattcagaactggggatggaactttactttggagaggttatgtatttgcataggtgagaattgagagccataaactcagatttctactctgggatatgcccagagaatactttcttatgtctcatgaactttgagagttatttcattaattcattatttatgtgaattccagggcagttttgctacatatgaagtaaatatgaaacatccagtctgaatgaaaaaaaaaattaaatgttctgtcaccttactcctctctagcaaaatctctgagattagaactctaaatgattcttctacagatgctatttagaaaatatgacccacaacattacaaaaatgagccaatacagtttcagtaaactgcatttttgtttggggctggaaaatgttatgttaaattgtaggaagaattccttttttttcactagttgttctaagggtactatacactgtctcaaatttcctgttttcatcatattatcaataggaagattttgctgatggaaataattactgaaggagatcaggaaatgttctcttaaaggtataattctccataagaaaatacatgagctacaaaattatccctctaactttgggaatttatgggttggtgagtgcaataatgaatgttcatattgtagatccagatcttaagaaaagccattttgccaataatccgctgtgaggaagcagtgcaaattaattaatattgaagaaagcacattatgtgtctgtatgcttaaatggctggc

SEQ ID NO: 26183 - DNA, 1137 bp, Homo sapiens
tttgcaaaatgtaggtcatgttctgcttctttccagtaaatcccaggaaatcaataaatgatatatgttttactgcctcctctattttttgtttaggtagtcaagaggcagataatataaagatctcagaaaggttccttatatttaggggtataaaaattcatgtgtcctctgccacaaccagcctagtgacttggtggcctcccataaccctcttggtttcagttttctcatctgtaaaataagggtgtgggatttggttgatctttaagttgccttctggtcataaaattctgtgttttgaattttctgtcatctagagaatctattaatgtaagcatgattttttatatctagttatattcaattgttatagaacttgcatgtaaagaagaatacagggcattccattatgcagtgtaaatcaataaaatgaaaatgtatacattgacaacatttgtattttcacctattacagagctgtgccatctctttgaatacaatacacttttatgccccattaaagcatgcttgacatagctttcaactacttgcaaatgctgagaagttgaaaaacataacatttacaaaagatacatctggtgcatatttatatgacttggaataaggaatcatttaaatactgctgagccatctccatattaggagaaaagatattccatgtccatatgtgaaattggtgataaaatacacgtaggtttaaatttctcttgcacatttttttccttgacacgttaaaaatatggaaatattgattagggattaaatcatctatttgagttgtgggaattgcttttcctttgaattttatagattacttcattaaatctaagtttatatgctaaaggtggtaagttttcaaagggattaaaagtagcacttcatatttagaaaagctgcttattcaggtgcaagagttcttaacctggagatcagagactccttaaacatccaaaggtgtttaaggggttctatgagccccctgagtttatatgctagcattgtatgtatatgtgtatatgacttttttttcctggaaaatatctaacttacatcagtatctcaaagtggtttatggccctaaaacttggagttataagaaatacctggggttac

SEQ ID NO: 26184 - DNA, 1026 bp, Homo sapiens
accctactgtttgcatctaatgattttcacgaatttggaaatacctgttatatacattttttctgtcttggatttattaatattggatggttttactgttagccataattctttataggacctgttgtcctagagaaaggttctaagtaacatttagacacactcactagcttctgccaaaggccctccccagctagtgtcttgacacactttcaatcactgtttttcaaaagataatttataggcaggtaaattttaacaaagaatgttaatggtaaaatgtgggtgtttaacttgatgagcttttgtttttagaatcaaggtttagcttttctttgaattatttatcaagctgtttgcccataggccttcctaaaagaagggaaaggtgaagaggaagggatcacttttatttatttaaagcatatgttgacataaaattttaaaactagccttttggaaaacagcgaattactaaaccaggtctgtaaacacccacctttgggactgtgaaaagcaaaaaacaaaaaacaacctaattactttcacaggaaacagtactcagttaactaaaatattgtatggcaatccttggaagctcctcctcctccttaagtatagtacagtttggtaatatactacacatatttatacatgatgtaaatatacatatgcacaagggtagatgtttatgtacataacataacaaaatatatacataccccaactgaatacatttgcatataacatgcccatgtgtaatatagcaaacttctatgattaacaatacgttctataacagatagtcttaaaataagaagtgagtgaattttattcatattgaaaaaaattcaaaatttgttttgaaatctgaattgtgctaactgtagatggcaccacagaaatcagtaaataataggttcgtagtattaatattttatacacactccctctaaaatatgaacttaaataactcgttttacaaaaaataaaatggacagcatatttaaaatataaacattccat

SEQ ID NO: 26185 - DNA, 1050 bp, Homo sapiens
aagtttcctcttcccttcaccagccggcccccttctctgatcggcgggggtgggaagcgggggctcgcatcgccaagagctctggtcgtggccacgctccttggaaatccgccaccgcaactttccgcagccgttgcgcgccggcggcagccccctttgtttaagttctcggatgccatcatctgggaaacctgcagcccaggaccagcgcggtgcccgcgcgtgcgagacggaccgctcgctgccgccgctccctggctcctccaccccctctctccctccttcgctctccctcccttcctccctcctccctcctctgggattcgtgcaagtagcgtgcgtgcccttgtgagtttggagggtgccggtcagcggagccgtgcgatgtatttgaaaagcaatcagtccgaccttcccccatagattcatcgtaagtgtattcgaccccaatggctttaggaattccctgtggcagcaggagccgggcgaaagaaccgggatcggctagccgcgcccttctctgctccaccgcttcctcgtgtgtgtgtgtgtgtgtgtgtgtgtgtgtgtgtgtgattagcggtgggggggtttgctcgctctctattcttaggcatggtggtgcttttttttctttcctttctgtctcagatggatttgcgtggtggatggggctggcggcgacaaatgctttctcagctctaacccagctgaaagagttaagggggatgggagggggagtgcacccggtaggcgagagaagcgggggtggggtggggtggggtggggggacgcggccaagcggaaacgctgcacagaggaacctcagcgaaccaagaaaaaagagaaagtggcaacgaaaacaagggcaaattgagccctcctcggggatttccaatgaactaacccaactcggacattcaataaatacatggctcttaatgagcgtgcgtgtgcgtgcaccccgcacccctagctgcgggtgcgcccgcttgcgcccgccgcccccagccagagcctgcatctggcagtcccgagcccgagcggcag

SEQ ID NO: 26186 - DNA, 1050 bp, Homo sapiens
acagggcagctgctgccctgtaggtcagagcagatgacagagtggccacctgccctgtgtgtttcattagcaggtcccctaatgaaggtttgcacattttccatcttttttcccaacccctcttcatataaacctctacaacatcttttgggaagggaaggaggtgtgttgtgtgcccagatctctagtcatgccccttcttggatggttgcttcagctagtagggttccaattcctgtttttgagagggtcaccactgcatgacatctggaagtgcagagagctgctgaagctgatcacaggacagtaaggggacatttatcctcactttcctgggagggcaagaagtgactttgcaggcagtatagacagcatgcgtgtttgtgtctgggcttgggaggggaagggctggtattcacttctccctgtgtatcagtcggggcgcagcgcctcagcaaattagaaccagcctgtttccttggtcaggctccttctcccactgctgtggtgtcttgatgctgtagatttcctaacatatttccacacctgcattgcaggccagtgtcctgggcgattccgtgtggaatagaccacagcaaaggttatgcaattacagagggaaggttggctgtcacatcacatcaaacttgagagcctcctgtaaacccatcattatctctgctcccataactgtaatttcatgcaactcaacattggaaacatgcagtggcagtgccagtttcccatctgtgctcgatttgcgcctactggtgtaattttcaggtatcttgtgtttacacaaatgctggaaaacaagctgcttcttaagcagcaaccgacagggaaggtcagcttttcccactgccatggccgtgccaggatgcacattgcaacaggcagggttctccagagaaagagaaccaataggagagagagagagacagtgtgtgtgtgtgtgtgtgtgtgtgtgtgtgtgtgtgtgtgtgtaggggtggggagagaaagggcgtgtgattgagagactgatttattgtgaggaattggttcagg

SEQ ID NO: 26187 - DNA, 1032 bp, Homo sapiens
cttcatttaaagcaagggctggtttcgcttctctgagttctgaattagcaaggggtttgtcaagaagtttgactgtggggctgggattaaggatcgtttcttcaggagatccaaaagggttgttcagaactttagaaagcaagccttaaattatattacagtttagaatgctgtatttaaaataagagacagtaaagggacatcttgctttatagacaaagatttgtgtcacacacacaaaatattacctgatttctgtcacataatatggatggtgtttatatttaagcttgggctccgatagatttttttttccatttcatctaaaaacatttcaatacatgtctctaaaagcacggatgccccctttgaaatgtaaccgcagtaccattgtcgtcattcccccatatcagcactgattcctttgtgtgctgggtatctggtcagtgctcatatttccaaactcgtccagtgaatgtttttgctttttttttttaatccttagggaaaaatctcgctagcctgtacactcaaattactgttttaatgtcacatgggatagttctcctctgtgtggttctgccaccaactcttacatatgtagttaggttcatttgtttcatttgacttttggttttttggggattgctttttaaaatttaatttgttttataattttataaaatatttacatagctcaaaagtcaaatcagtaaaacaaagtatattcaaagaagtctaaactcagtttctctccttcactctgttcactgcctccccccttttactgtctggtctgttttatttgcatatattctttctctctctctctccctccttctccctctccccctcccacctttctacccgcctcgttctttctttcccttcccactgtccctctgtgtctctctctctgcctcccttcttctctgccttttgatgtgaatgtttgtgttgtattttttgttttaatgattaccttgatattattcatcttataaaattcctttatgttctcttttttgggag

SEQ ID NO: 26188 - DNA, 1044 bp, Homo sapiens
gtttgctggcaattttttactatctggacctttacagaaaaacctgccacctgtgctgtactgtgtatcttgatctgggtagtgatacacacacacacacacacacacacacacacacacacacacacacacaaaattttttctcctgagctatataacttagaacttttctaactttacagcattttattgtaactcagtaaaaattttaaaagtttaaaatatgttacactttgaacttgagtgcacttgagtacactctgagttactttaaagcttgtcttttttttcattaaacagcaagccaacttgtttgatctttacttgattattacaatatgtgaaacctttgggggtcagtctctactgcctgatgtttctgttgcagcccacactgggtccactgttttcttgtatgcaaggataactctgacttgtgttaatcactacctttaaaaagttatccggggtgtttcttgagacttagaataaggatgtcttcctgcagagacgattgtcattgtctttaccagacacatgggctaccaccagactagaactacttcccagtcatttccagagttactttcaccttcctggggatgtaaatcttagctacaagtctgtatgagagtcggcttgcctgcctccaccccactgtgtcccctttccctttcctattcttccttccttcttttccttctttttcttccctccctccatgcatgaaaaggaaagatgtatttctaattcacacttatatgtggtggtgttttttgaggtcatacctattaggttcccctcttggaacactcagagatttgacttctctctcccttacattacagtcacctaaactacagctgagtttcaacagagcatcaaacaagattgcctgcttctctgggttcttgctgtctcttagcctgtcagctcttctgtgcttttatgtttgaaaaacccatgttttttcccagcagaattgctccttccatttaacagcaagcatttttctctgtttagcaaatgaaaaacctaattata

SEQ ID NO: 26189 - DNA, 1032 bp, Homo sapiens
aatcaagcagggtcctaggatcagaagcaaagctgtctggatggatttcatgagaagggcctgtcagtgcacgaacttggcctgtcagtgcataaaaccaaaagttcagccacaagacatagcagcagaggtgcacagcgctcagcagtgacctcgcatgcaccgaggctggaccccggaaccaaatctccctggctccacctttgacaagctgcgcgaaggggacaagtcctgccacctataagcctccgtttccatgtctatacactggggttcctagctcacgggactgtcggggtaattgagtgagttaacgtctagggagcacctgtgacatgccaacacagtgctgtcatttctgctgttgtccatttttctgcatctttatttgtaaggatttgaaagaatgtacagttggaaacctgatgatctcaagcagaaaatatcttttcataacgctgagcatgaatgacatgagaatccatgtctgaagtgaaatcgtatggatctgaagaatggttggtgccagccctggtggaatggggtgcgaaggagggaggatgagagccagacgtttcagtctgggtgaccctgccacccagagccaccttccattaactgaggggtccagggctccctccaggccacttgccactaaagctcagctaaagtctcaaaaaggacacattcggagccaagcaacaggcacagcccatgttaggaatgtttctgcaatggaaaaatacaaaaccagaaaggaagtgtgtgggcctaatcgtacatgtttatcaacattttactgcaatgtatgacatttctgtgagcacaagattagccttggtatttttttctgggaagtataaaagactttttttttctttctttttgttttcaatttctctctagaggaatttaaaaccggatatttccatcttaaagttcttgagcaagtctgtcaaggtgtccatatttcttaccctgttcctctcagcatcgaagtgctatctctgttacactcatgtttgctgttca

SEQ ID NO: 26190 - DNA, 1042 bp, Homo sapiens
cgtgttagccaggatggtctcaatctcctgacctcgtgtttcacccgcctcagcctcccaaagtgctgggattacaggcgtgagccaccgcacctggccagattttttttgtttttgtttttttctgtcctggtcctgtagaatcagaggaagtggaaaacacatatcaggtatatgagcaccgtgatcacgattattacctcagaggaaaacaggtgtacccctttcaccagctgccaacataaatggagctctgcagacattaacagaggctgtagactgtctcccttccctagcagggctggtgcttgtcctgacccacacagacggcctttcaagttagactgggagttcattttctgtaagtcagacggctatttgagaaagctcagtggaccctctttttcataaatatgcgtgggcttcagtttttccatccatagaatgaggaagttgtcatagataatctggggatttgtttccagcttttacaattccgcaatttatagttctctgtcctttcatcgttcttatttcaaattcccaaattattattcttatgtttgtgggcatggaatgggcagtgagcctcttgtcccacagctaaatcacaccctttattggaaaaacatatatgttggaaaaacagctctcaattgtgatgaaataaatgacagcaactttcaaggccaataactgaacaattacaggaaagcattgaatcttgtgccagcatggctgctccaactcgagatggctgcggtacaaaggatatttatacgttgggcttcagaataataattcaagtgctcaagagcctcatcttgtgatgttatcacaagaatgtccagacaatgttttctttaactccaggaagagtgatttagaaggacggatcttgccgcatgtgtccagctgcatatttattgctcttggaagagaattattctgtaaacacagaaatatccaagaatgaattcttgaaagatgatcttttccttgcttacagttgtcaggatcgtgtatacgcaatagtacaaaa

SEQ ID NO: 26191 - DNA, 1049 bp, Homo sapiens
catgaaaaacactacagcccctccccatcccttccagcaaagaccaagtgggacctggagctccaccctcacctaacgttaagaagatgcctcaacctgcccctacccccactctttgctctggtgctgtcagcaaaggcctgtaggggcttgggactagaaggcctgagctgagatttgcatctccactgggtagtaatgaccccaaccccatggcatcaactgcctagtggagagtcagggctttcagcactttcaataatcagcaataataaggcaacctcagtgaaggccacatggggagcagtaacaagctccccacccctgacagcctgagtgttaccagtggaggcctggagggaaacctgggtttccacctgctacctggcagtaaaaaggcaggttccccacttcactccctggagcagtcagagtaggcctgctaaaattcaagatttaaatcagacccagagtcttacagcactcagaactgatgaggtttaaatcaaaaattattcaccacaccagaaaccaagaagatctcaaggtaaattagaaaagataatgaacagataccagcaccaagatcacacagacattagaattatcagacaaattgttttaaaacagccattgtaaaaatgcttcaattagcaattacaaacatggttgaaacatgaatagaaaactgcagcaaagagaagatacgaagaactaaatggaaattttagaactgaaaaagtaacagataaaaagctctgtggataagttcaacagcagagtggagagaacagaagatagaacaatcaaaattacccggtctaaataacaaatagaaaacagactgacaaaaatgaacagagccttggagatatgtggaacaaagcatctgtcatgtcattggggtcatagaaagaagaaagaggatggagttgaagaaaatttaaggaagaagggctgacaatttcccaaatttgaccaaaaaaaaaaaaatcaaaatgctgagtaaccaccaaagaagataagcccaaagaaatacatgccaagat

SEQ ID NO: 26192 - DNA, 1776 bp, Homo sapiens
agaaaaaaaaatctacaggtagttctgaaattatgaacacaatagggcaggaaaaagaattctgaacttggagtcaagataaatttcactctgctgaatgcaggtcactccagcgctttgaccttccattacctcatctccaaaataaggttgtaaaaaacaaaaagagttacacctacggcactggtgtagaggggagtttccaggctgagggagctggcagtgggtggacctcctgtcctaccaactcaggcccactgcttcctaccttcctcacatgtatcagaagtatcagccaggccagagaatcaggttcaggcagaactgtcaaggaattcccctctgcttccaagaggcccatgcccatccttcctcaatgttcctttactgagatttgttgcagctgtagtttctgtgttgacaggaatccccattcctcagtatccccagccttttctcagtgtaaggccttccccccaagaacagaacctacatagatagaactgatacacctgtggaattggcatataaatgtttattaagaaaacagagatagcctttgaacctgctttttaaataaataaataaggctttcagggggtttgatgcatgtgctttttttttttttttttgagacggagtttcactcttgttgcccaggctggagtgcaatggcacgatctcggctcactgcaacctccgcctcccaggttcaagcaattctcctgcctcagcctccctagtagctgggattacaggcgcccaccaccacacccagctaattttgtaattttagcagagacagggtttctccatgttggtcaggctggtgtcgaactcccgacctccggtgatctgcccatctcggcctcccaaggtgctgggattacaggcttgagccaccgcgccaggccatgcgtgtgcttttcttctccacctgatccttccccttttccttctcagagctggagcggggagctctgggaaagccaggctgagtgtctggtgctgagggggctggtgctgttcacagagctgctggcaggggctcttttttgctgtcaggcgggaagagaccccagggttgttataatcaagcttgttcccaaaggcagtcccttcttcccagctgcctgctttccaccacagggaggtacacaagcaaacaaaacccccgagggcactcttgttcctgtgatgccgcgcttaggagatctccccaagcacctctgttgccgtctccgcctcagtgagtggcgtgatccgtggcgctccgcaggtcattcagcagatgctcatcccatgctggtatcgcacctcacatcgtgctgggctccagcagggcaaagggggttcggacaccagtccttctggggagttcacagttgggggcagttggcaaagggctttccctgggcaatgagccagagaagcttctccaggaggtggcatcagagcttgtccctaaaggatgagtagcactctgccaggtggaaagtagacaagacggtctcagctggcagagcaaagaacacaagccaagctatggaagtgtggagcaaatgtgcagtggaaacaaaggggaatgtgaccctcctcctgccacctccgcatcactttcagagtctcctgcatgcctctccaccttggccttatattagaatctcctggggagctagctgtaacaataccaggagatgccggcctcatcccaaacagtctgtgaaccagcctgggcggcatccccagctctgctgttgggcagtcagtgtgagg

SEQ ID NO: 26193 - DNA, 1045 bp, Homo sapiens
tattcctttctcttttctgatactcccagtgcagcatgcatgttgatgcacttattggtgtcctgtatttgtctgaggctctgtttagtttcctgcatttcctctgatctttgggttgcataagccctttcagtccaagtttgctgattctttagcctagttccaattgactgttgaatccctttgttgaatttttagtttcaactgtggtatttttcaactccagaattcaatttgtttctattttgtaatctctctttattatctatgtacttctttaagcatggtttcctttcgttctttgaacacttgccataacttttaatggcaaaaactgcaattgcttttgcaccaacctaatatttacagtggttgctttggtgtctttgttatatccaacacctgggacttcacacagacagtttttattgctttgttgttttttctgtttatgggtcacccatttctgtttctttgcatgtcttgtaatttgttgtagaaaactgggcattttaggtagtatattgtagcacttctggatactgtgccctcatcccaacccccaccttccccaacttgttttattttatttatttatttatttgtttagtgacttctctggtctactttagtgaagtgtttcctattccgtccccgccactccagtgtgaagctttaactgttgttccttggaggatgtagccttggccaaaccccctgggatgatggtgggtctaacaggctcatgctgacagtctctttccctgatttctctattaagcctgtgcagtatctcacccagctgttaggctgcagtggttgctagctaattgctttatttttcaacaatgctgtgggttttaaattgctcttcagcctgatccagttaaattctatccccttggcaggggtagattttgagaccagtctttgagatttgttctgaccccaggaggtttcttaagtgtcctctccttggttctctctgttaaacaagctggcctcggatttagctttttattctcatagatctattgccttctat

SEQ ID NO: 26194 - DNA, 1050 bp, Homo sapiens
tccgtggattcagctaaccacgaatcgaaaatgtagttaggtgcacaatggttatggctgtactgaacatgtgcagactttttttcaggttattattccctaaacaatacagtataacatttttacataacatttacattgtattaggtattataattatctagagatgatttaaagtatacaggcggatgtgtgtgggttatatgcaaatactacactattttatatgcggaacctgagcatctttgcgtttaggtatgggggtggggtgcggtcctggaaccaattccttgtggatactgagggatgactgtacgtttgttatatgtgtcatagggtgactctctttaaccttttgaggaactgctgtttgccagagcagctgcgccattgtacatttccaccagcagcatatgagtgttccagtttctctacatcctcaacgccacttcttattgtctgtctttttgattgtagcctttctactgggtgtgaagtgatatctttttgtggtttggatttgcatttctctgatagctcatggtgttgagcatctttttgtgtgcttattggtcatttctgtatcttctttggagaaatttctattagatattatcctattctttaattgggttatttttcttttcatcattgaattaagttctttatatattcttaattcaagtttcttatcaggtatattatttgtaaatattttatctcattctgtgggttctctttttactttcttgatgacattctttgaagcacaaatgctttaaatatggataaagtctgtttttttctcttgctgcttgtacttggatgtcatatttaggaaatcttgcctaaactaagggcacaaagatttaccatgtttttttcctaagagttttatagattttgttcttaaatttaggcctgtgatccattttgagctaatttttgaatagggtattaggtcatcattcttttggatatggctgtccggttgtccagcacaatttgttgaaaagactattcattgcccattgaattttcctggcaccc

SEQ ID NO: 26195 - DNA, 1027 bp, Homo sapiens
tggtaagtttgcacacctgaatagtatttgtaatattaagaaactttcttttttcgttgagagataattcacatatcatagaattcacgcttctcaaagatacgattcagtggcttatagtatgtccacagagttagcaccgcattctgattccacagtttcttcatcaccccaaaaaagagtcctgtactcattagtagtcacttccatttcccagtcccctcccgccagctctgggaaaccactaaaactactctctatctctatgaatctgccttttttgaacatttcgtctgaaagaaataatgtgatatttgatctgtcttcaagactcagctgtagcatcaatcagtacacttcattccttttcatggctaaacaatgctccattgtatgggtgtaccacatactgtttccctgtttctcaattgatgggtatttggagttgtttccaccttgaggctatcgtgaataatgctgctatgaatgcatgtgtgtaagttttcgtgtggacacaggattttcattcttttaggtatactttggagtggaattactggattgtatggaaaccctgtgtttaactttttgaggaagtatgaaatttgagagcagtggtttttaaccttttctagctcacagaccactttgaagaatacccaggggtatccttggctaatagtgctcttgttaaacatcagtataaactcaccaatgaaagaaacccttttaactattaggtaacaaattatgtccaaaaagatttcatgttgcattttttttaaagtaacagctttattgggatataattcacataccatacagttcacccttaaaatgtataattcagtagtttttaatgtattcacagagttgtgcaaccattaccacatccaattgtaggccccccccaaggaaagcctatacccattagcagtcactctccattttccccttaggccttccacaccccaatctctaggcaaccactaatctgttttttgtccatgtagatttgccaattctg

SEQ ID NO: 26196 - DNA, 1063 bp, Homo sapiens
gagttcaaatggacagtttatctgttcaattctagcattgtgatgcaagtggtgtatcttaatttcaaactggaagttaatttgtagaagaaattaaaacctgttttgccttatctgaaacatcagaatggggtgaaaggggttgagaactgtgtttttgctttaaaactgatttttgttattattgttctagatggttgaaccactaagagagaaaatcagagatttagaaaaaaggtatgtgtactttttgtcttaaagtcaatagttaaaataagtttgtctcaattgagtaattaattctgtttgtttgctccaaactctgccaacctaaataaatgtctgtatacgcatttcccccactttgagtgtaatacccagatagaacatggggagaagaatcaatctagatgtgttaagatcttccttcttcaaactctgaacgtctgaatttctgcaaatttattacatagaagttgaggccaggcctcacattttccttgaacttctgcatatattgatcagtgggatagaattccaaaataggaggacaatccagtgggcctgaaatgtaccatatgcaaacaccacaaaataaggatgtggagcctatggtgtgtcatgtgtagtcatttagctgcttttgtcaccagagttcatgaggaggtttccagaatttagtccaggtgaagtgagagggcagaagaattatgtaatatgatagaaatgtttatttgagtcagatttcggagagaacccctcctcaccctttgggacactattgccctcaggttctctctcaggcactcccgaggccgctgagcctcagcctccaggactttcctcttgcacgtactgtatgtggaaaactatctagagtagcagttgaatcttcagaaattttagaaagaaaaatgacagcatttattaaagttgatgtgattttttccccttattgggatgagtttggacgatgtgtgtcagcattgaatgagccttttatcaagtccagaacaaaaatgaaaaaatgaagagcagttttcctttgattttcattaaatga

SEQ ID NO: 26197 - DNA, 1045 bp, Homo sapiens
ctgtgtgtgtgtgtctgttctttggtctgggctgggtattgaattatctctcaagcaaagcaggtagagcttttgataatttgaaaggaggccacaacacttgacatgaaaacattgtaaagattaattggttatagcgcgtctgaagataaaaagtaataagcaagagataaatgtaagaaaagggaaaaattacttggcatgcattcaacgaattttagtgcttggaccatgtatgcctggtgtaacaaatgtaaatatgaaaacgcctcatcttgcagtgagacccacctgtaaggtaccaattagaacaaaacatgcagcagaccttggccacacaggagggccaccagtgtctcctggagcaggagggaaggttgaaggtgctttctggagaatcagatgctcagatgagtcttggaggtgcaggtgcccaggacactacctgtagacgagctgaagggttggggacagcaagtggtttagggaaggtggagagtcacatgcagggggctgcttgcaggggcctgctctggaggtctgagtggcgaagcgtggaggtctgagtggggaaggaagggattcatgaagcctcctttgcagcatgaatcaggaggtgcagctggggaggagagggcacgtctccaggtgcatctccagcctccaggggcagtggaagaggtctgagacacagaagtggatctggtccatatctgcttacatccattcttatccatttatgaagggtggtaaagctttggctgtggcttggacatcattccccagggctgatcctgggaagcatgggcgtcacctgcttccccaggaagagatgattaaggagaagcagtgggcaaggggaaagggctcaggacatcatggtcaaggaaacagaaggtgtctgggatgggtggcagccttcactgctgtgaaatggactgaggatagaaggattgagagatttttgtgaaatcaactttttttcttttttctgagacagggtctcacttttgtcacccaggctggagtagtggcgctttctcag

SEQ ID NO: 26198 - DNA, 1025 bp, Homo sapiens
tccagcctggccaagaagagcgagactccgtcttgaaaaaaaaaaaaaaaaaagagagagagagagaaaagaaacgttaatctaagtgtttaattagcaaatgcctagatctcaggcctagaacttctttccaaataaattattctcttcattgcaaggtgatccaaactcccaagacatacttttatcttttctaatagaaaataagtcttagcttttaggctaagcagttaatatttataagtcactggaaattcaagagctcatgtacatatactaaaaaaaaaaggtgctaagatctttttccttctggaataaaaagaaaactgaatagggaatcaatcaacttcagcaggtaaacatacttcaatatctgtaaatggaagtcttttattattttaattgaggaagctttccatctctttgggcttatcttctgtctctaacatttcaactgacttctcttgaaaaaacactttactcagaactcagaagaatctaaagtctacatgaaggaaaaacacacttaacttacacaaactttaaaaatcctcctccctgactttaacaactcaaaagtcactgtggtttagagatgtgggaataatttagaaatcagaggtaaatttttagaatgttaaataacagattctactacactaaggtgtacttggaatcactggaaaacaaacaaaaacaagccaatgcattattttaaaaactaccattttaaaccacgattaaagagactgtgatcaagatgagtattttcaacccaatacctgtacaccttgatttagctttctgtattagcatcatctgtttcttggcaaacttgatgaggtcttctttgggcaatgtttccagctgaaagatgtggtcatgttaccaacttgttataactcatgtttctagtataccacaaaaaagaaacaatgtctgctagaaaacaaaaacattctacagaataaatctttatgccaaccgcatactttgttccacattttttttttgagacagagtct

SEQ ID NO: 26199 - DNA, 1078 bp, Homo sapiens
gatcctatgctattgcacccacctagaatcaaagccactgtgctctacccaagcaatactaaagatacatcttcaggaaaaagttcttccctacaaaagtaaattaaaaaaactggaaaaagtgactattataccagatgcacagatatcaaggtaaaggacatagaaaacattaaaaagcatggaaatatgacatctccaaaggaacacaataattctctagcaacagatctcaatctaaaagaaattcataagatcctagaaaaagaattcaaaatttcgatactaaaggagctcagtgagatacaaaaagtttccaaaaaacaatacaaagaaatcagaaaaacaattcaggatatgaatgacaaatttaccagagaatagatatcagaaaaaaagaaccacatagaaattctagaactgaagaattcatagaataaaaaacaaaatacattcaaaagcttcaacaatggactagatcaagcaaaagaaagaatgtcagaacttaaagacaggtcttttttttctgatatagtcaaaaaaaaaaataagggtaaaagaatttttaaaaatgagcaaagtcggccagatgcggtggctcatgcctgtaatcccagcactttgggaggccgaggcaggtggatcatctgaggtcatgagttcaagaccagcctggccaacatggtgaaaccctgtctctactaaaattacagaaattagctgggcgtggtgatgggcatctgtaatctcagctactcacgagcttgaggcaggagaatcgcttgaacccaggaggtagaggttgcagtgagccgagatcacgtcattgcactccagcctgggcgacagagcaagactctgtctcaaaaaaaaaaaaaaaaaaaagaagcgaagtctttgtgacatatgcaactccataaagtgaccaaatatttatttatttatttattttgagactgagtctcgctctgccccccaggctggagtgcagtggcatgatctcggctcactgcaagctctgcctcccgggttcacgccattctcctgcctcagcctcctgagtagctgggactacagg

SEQ ID NO: 26200 - DNA, 1108 bp, Homo sapiens
ctgtgttttcatacgtatatatgtatgtcagtttgaccttaggcagagtagcattttcaaaattttacatggggaaattttctagagttaaagccattttatttttctgttctgtctggttttatctgcgtgttatttacaatctgctgcgtaacaaattacaaagttagtaccttaacacatatttatttcacagtttctgtgggtcaggagatcagaaatggttctatttcaaggactctcacagggctgcaatcaagatgttggcatggctggggtctcatctgaaggctggactggagaagaatctacttccaaacttatgtggtagttggaagaatttagttcctcaaggccgctaaactgatggcctgtgttccttgcctatgggatggtagcttgcttcaacaaagtgtgcaagcagagaagacagagagtccgctagcaagatagaagccacaatctcttgtaatctatcatttttgctgtattctactggttaaaaataactcattaggttagcctactggctctcaaggggaagagattatacaaaggcatgaatttctggaggagggaatgagggcaaagaattctgagaagtctgtcttccacaatctgaagaacttctagaaagtaggaggaagcgatattgcttagggatggacaacttggcactggttatgtatttcaagtgaggtaaccttgttcccaagaataaagagaaccagacgactgtaaacatttccctaaactgaaatgcagactgttgtatgttcccctgaaatgaatggtgtaagctgaatataagatttttgacaaaaattttgctgtgttctcagatctggcaggcccctgcccttgtgcaaacaatgttcctggcagctattcatctccttaggtaaataagaattggagaaaagctgtgctaagataggatgcatttgctcttgccttggaaggttgttttctgataaggttctatatcctcagcaaatcaaatcaggcacttacagtgtgagtatgcattctctgcctgccagtctggagatgatcaaaaagcctataacaggcttggcctattttcctattgggttgctgggctttt

SEQ ID NO: 26201 - DNA, 1019 bp, Homo sapiens
tcaacaatttataacaatctgtaactctgaccttgcaataaatagtcataaaacgttatttttattttattactattatttttagagacaaggtctcgctctgttccccgagctggagtgcagtgggagtcacagctcactagcctcaagcaattctccagcctcagcctcccaaagtagtgggatttcaggcatgaatcaccacacctggccttgaaacattatttttaaagcctaaattccagttggtatggtaccaaaatttagtttaacttcaaaattcacagtactgccgagaaatgggcgggtcctgaggttccagagaagtggggagtgaattcattcctggtggttttattctggcagcatgcatgggaaatcacatgagttagagggctgtggcctgctatcaacacttcaagctgttgtacttttacttcaagatgaaacttttaaaatacatctgtcatatagatgtacaaatatatgtagatgcaaacatatatacacactttttgacaaaagaattgtggtaatatacgtgaaccatttttgtaaatagattctatttggttaataaaaatattccttccatcaacctatcgaagtccagaccaactatgaagataggatgcccatccagaagaacgggaagcattttcttcctcacctttggaaagtaaaacaaaaaaaaaaagaaaaataaaagaaaaaagagagtattaaaatttctcaatgtaaaatctatattttagaatcactctacaatataagcaaataatgtgttttttactgattacatgccttttttttgggggggggggttctttttttttgagacagggtcttgctctgtcacccaggctggagtgcagtggcgtgatgagacttcaatgcagccttgatctcccaggctcaagtgattctcccacctcagcctcccaagcaactgggaccacaaggtgtgtgccaccatgcctgggtaattttttgttttttttgtggagatgcgggtctca

SEQ ID NO: 26202 - DNA, 1025 bp, Homo sapiens
aaggaaggggtttatctggccgggggcatcagcaagtctcctgtctcaagggccaagcaccccgagtgagcaattcctgtcctttttaagggctcacaactctaagggggtgtacgtgagagggtcgtgatcgattgagcaagcagggggtacgtgagtggaggctgcatgcaccagtaattagaccggaacaaaacaggatagggattttcacagtgcttttctatacagtgtctgtaatctatagataacataactgattaggtcagaggtcgatctttaactaccaggcctagggtgtggggccgggctgtctgcttgtggatttcatttctgccttttagtttttactttttctttctttagaggcagaaattgggcataagacaatatgaggggtggtctcctgccttattcctcccctttgagactctcactcaatagtaggagttttcactttcattttcttatctatgtcttcctgcaagacagatcgatagtgattcattcatatagtacacttctgctgaagcattttggtgaactaaggtagcgatgaaactttttatcatttgaagaagtacaggtagcaaacaagggagcagtaagcaggttcctattactattataacttttattataagagttttaaatcttcgtagtgctgggaaccattttctaaacatggcctcaggatcaaatccatgccacacttgtacgggcacatgtgtcaattttgttatatctgtaactatgtcttcaactacttgcccttgattatctatgtataggcagtaattagtatggttaaatttcctacagacctcaccttcagctgctagcaagtagtcgagagctaatctatttcgatagatagcatttctcatctgagtttattgccgggccagaagagtcaaggctctgccagttttattagtggttatttttaagacagcttgtaaccgtatgattcagttgatcatgcaaatgggggtctggtatcctcacgagccgtcttgtgccta

SEQ ID NO: 26203 - DNA, 1026 bp, Homo sapiens
gcccagccaccctccctggcagccctgcccacacttgtcacattgccctgtcggatcttcctagcgcttcttacttctgcttccttatgctttgtcttccttctccaactaaatgtcagctcctggagaggagagaccttgtccctcttgttcactgctgtttccccagcatccagaacagcacctggcacatgttatgtgttcagtatttgccaaaatgaatgaatgaacaaaataaaaatacatcacagtgtgaaaaggatcagttagctgggggaaaatggctgctcttattgaatagcccagccgtggccctagtacacagctaatggctgctgacctaccatgagttattttgaatttcatgtctaaataaagctgtgccctttgttggggaattatagacataagatagtattttattgaattaattcttaggttcagttttttagaacaaattctactgatactgattttgtgagaatttttattttaataagggaaccaggctgtcgattcgaactcctgtgcattgatgtcagagcttgtgaaaccaatggtggacgtaaagacgcagagaaaggtagagagggccacagtgcaagggggcagccatgagtagcatgtggatgataatcgcaaggcgtgtaggtttggggtatgtgttaaaatcagttacccaagttttagaaaataagtttatttttcctttttgataatttccttctgtactttgtgtcccttgttttatttctcccacttaagtatccctgtcggtttaactatttggctcttgaggaaattcatcatgccttgttctattcagaatgctcatttgggggactctgcctcagtttactctagctacctctgtgctagcagcgttgcatgctcccatgttccccacagagcaacacatctggtttaatgctctcactgcatctatttcagacccattttcagaatattgcaactcaactttaaaataggaaaacataaccttggcccattggtggctttcaattt

SEQ ID NO: 26204 - DNA, 1027 bp, Homo sapiens
tcccttggaatacttctcctatcaggtggtcactggctcacaggacaacctattccatatttggaacataacagttttattagaccagagtttagctctctggtttcttctctcagtctctgattttcagtgaaatatttcctcaaatattatgtctttttttttttttttttttttttttttgagatggagcctaactctgtggcccaagctggagtgcaatggcgctatctcggctcactgcaacctcggcctcccggcttcaggcaattctcctgtctcagcctcccgagtagctgggactacaggcgcacactgccacacctggttaattttttgtattttagtagagacggggtttccccgtgttgcccaggctggtcttgaactcctgagctcaggcaatccacccacctcggcctcccaaacgtctccccctttctagacaacttggtgtcttagaaaaagataacatagccaggcgctgtggctcatgcgtgtaaacctccgtgagccaatgagcctgtaaacctcaatgagccatcacgcccagctatgtcgtctttttctagacaccaagtcctgctttgtttgcatgaatgccaggtttctacccagaactaaaatgttaatgtcagatttacctaaccagatcagaggaccaaaaataaggttatcttttaaaatgtagattctagacactgtggttgtgttgttagagggcacagcacacagctgattcctatggagctggcttaagaccctagttttttttttttttgaggtaagccacaattaaaccaggtccacctacattctccttggaccttgtctctctgaactgcatgcagaacttcacataactttcatctgtatttcctctcattactagttcttctacatcttttagaattcttttatgagcagtattgtgtgctgtgctgggggtataaaaatgaaaaagacatagctcctaagtaatcctcagggagacgttgctcccacagttaccccagcacatgtgtgc

SEQ ID NO: 26205 - DNA, 1055 bp, Homo sapiens
ctcagcctcctgagtagctgggactacaggtgcgtgccaccacacctggctaattttttgtatttttagtagacacagggtttcaccgtgttagccaggatggtctcaatctcctgaccttgttatccacccgcctcggcctcccaaagtgctgggattacaggcgtgagccaccacaccaggcctaaagttttcattatccttgttttttagcagtttgctgtgatgtccctagatgtgagttcctttggatatttcctgtttgtagtttgctgaaattcttgtatctctgagttcaagtttagaaaattagaaagttttcagtcactattatttagatatttttttccctccctcctaccccccactttcaccttctctctttctctaacttttctccttgtattccaattactggtatgttagatcatttgatactctcacacaagtttttaagactgtcatagttttatcttttttctttctgtgagatttttagcttggataataactattgaacaaatctgtcttccattatttgatctgctgttagtactaaatatattttttacttcagatgttgcatttttacattctagaaattctgtctgctgctttttgtcgttgcgagctctttcatatctttctgtaattccccgtcatgccacccattatatccatctttttcctgtagattctttagcatatttgttatcattatttaaagttcttacctgctaattaaacatctggttcattgtggctctctttctgttgactttctttcttgactgtgaatcacatttttctgtttttttcctgtcataatttttttattgtatagtagatactgtagagatgctagattctgttttcttcttctgcagagtcttgaactttgttctaacaggcaattaaattgctgactgatcacattgatcatgttgagccttgttacaggctttgttaaggcaggtctgcttcagctgtgctttctgattgctgagttatggaccttactcctaaaatgtggcccatctagggtttcagtagaa

SEQ ID NO: 26206 - DNA, 1319 bp, Homo sapiens
ttaagatgttagttttgcctgtcaaattgacagaaatttaaaaattgttaataccctgtactgatgaatatataatgaaatggacccttttatacacttgtgtttattgtgaaatatgtatttggtctttgacccctgacatacaactgctgaaatccttaaaacttccaaagtgatgtcttttgtatgctaatgagatgactggtggctggcagcccctaggtagcttaaggatggggctggtcaccagaaagaacaaggcaagattagagggttgggactttcagtttcatcccccagtctctaggaaagggagaggggctgaaagttaattgataccagtgaccagtggttaatcaaccatgcctgtataatggaggctccttaagaaccaagaaggactgggttcagagagcttgcagatggccaaacacatggaggcttacacacatccatgtgttgggagggtggcataccctcctccatggggacagaagcccctgggcttgggactcttccacatgttgagctttgtatctctttatctggctgtttatttgtatcttttaaaatattctttgtaataaactggtaaatggagcaaatgaacaaattaattgaacccgagatgggggttgtggggaccctgatttctagccatttgttagaagcattggaaaataacctggggctggcgatgagcagaggtggagtgggaatggggcagagtcttggggactagccctcagtctgtgggatctcactctattgccaagtagagaagtcagaattaaattagagggcacccagctagtgtctactacaaaactgattgcttggtgggtgggtgggaaaaaacttcccacatttggtcacaaaattatcctgtgttgtgtgagagcagaggaaaaacagtttgtggttttttttttttttcaactcattgctaatattagaaatataagcaggtaggtccagtctttttgaggggcagtttggcagtatgcttggaacaggaattatattctaggaatttatcatgaagatattgtcagatgcacagaataattgatggttatacaggtgagttgggtggaattctgcaagcagacatgtaggaggagctagcagtgtaggagatttcttggagatgaggggcaggggtagtattgcctgtgaaagttgaagagggaagaaagcaggacatgtgggtgctggggagaaagccttcaggccctgatccagatcttaatagccgtgcaaggaaagaagggaggaagcccaattgagcagtgagagctgcagaaccgtgtggatct

SEQ ID NO: 26207 - DNA, 1039 bp, Homo sapiens
cctaggggtgaacacaggtaggtagttttgatttagggcaggttgggtgagaagtcaggggaggaaagactaaactttgcctttttcaaggtttatctagaacagtgtttctcaacattttttcattattaccccctcaggagaaaaattacatttaaataaaatgtaattaataacagatttaatttttattaaattagcccaggtaattaagttctccctaatgggaggaatccagtactaaagaatatacatttttcagataaggttgagctttggtgagggccacagaccatttgtttatttatttatttttgtcctcccaagaaccgatttctgctctctttagggggagagataatacaggtactgcccccattgagaatgcatgatccatggttagccatcctagcaatagggcaacatatgttttttcttctgagtctgctactagatttgaaaacagtctaagactaaatactctgtacattataagttaaatgaggcattcaagaacttactcaggaccttagctgtttgtaatattgtttctatggagactgtagtcttactccaagcagcttactaatatgaatttttggaaaatacaaattatttgtgtgattatgatttatactacctttaaataagtagaatgaaagctttttacaaaaagctcaatattgagctaaatagtaaacgaagcgatggccatggattagcggagaagagcaggctagacattttagacaggaagaatattcactgtctgacactgtttatatgctgaaacttaaaataacatgagaagcctttcaattcttcactattcatgaaagaaatagctttgctgggcgtggtggctcatgcctgtaatcccagcactttgggaggctgaggtgggtgggtcacctccggtcaggagtttgagaccagcctggtcaacatggtaaaaccctgtgcctagtggtgcgtgcctgtagtcccagctactcgggaggctaaggcaggagaatcgcttgaacctgcgagacggagg

SEQ ID NO: 26208 - DNA, 1024 bp, Homo sapiens
gataagagtagaaattaatgaaatagaaaacagatggaccaaagagaaaattttaaaaaagacaaaagttgattctttgaaaacattaataaaactgaaagatgcatagtgagactattaagacttttttaaaaagtaaaagaaaacaaactattaacatctgacatggaaatagagacattatcacagatccttcagacattaagaggccaataaggagatattataaacagctttataccagtaaatttgacaacattgatgaaatagataaattcctggagaaccataatttactgaaactggcataagaagaaatagaaaatgtgaataacctctggtaaagatattaaacctataattaaaaaaaaatcttgccacaaagaaaacttcaggcctaggtggcttcacctgtgaatttcttcaaacatttaaagaagaaataataccaatcttatacaaattcttccaaggaacagatgaaggagaaatgtttcccaacttatttcataaggccagaaaaaacatgaccccagaatatgacaagacattacaagaaaggaaaattaccagacagtatccttcatagatatagaaagtaaaattctaaacaaaatattattaaattgaatctagcaatatataaaaaggacattatgtcataaccaattggggtttatttcaggaattcaaatgtacattcctgggtaatcacatttaacatttgaaaatcaatcattataatttgccataagaaaaatcatatgatcatcttaagaggtaaggaaaaaacatttgacaaatttcaacacccatttatgatttttaaaaaattatctacaaactaggaatagaagggagagtcctcaaattgcaaaatgcaacaagaaaaaacctaaaactagcattatcttacttaacagtgaaatactgaacacttttttcctaagaccaggaacaagtcaaagatatccaagaaataaaaagataactcagttttctaaagggacaaaagacttgaata

SEQ ID NO: 26209 - DNA, 1032 bp, Homo sapiens
ccttttctctgatcttcttccaagcaagacttttccaaagaattatctccatttggaattttcattttccttactcattcttggctttccctgtatttggcaacttttgtctataagctcattttaaagaggattcatgctgggggacaaggggtgtcctgtataccctgagttgttgagttgtcatggaagggctgctttgaggatgcctttgctgggaaggttcttcccagtactccctaaattcccatcttttcatccttcaggtctcgcggtaaattctgccttcccagagatgccttccttgagtaatgtgggtttcccttactcccattcatgtgaacaccctttatagctctatgtcccctaataattattttatttatttgcttgtctacttattttctaagaaaattttcctcccattcaactgtaaactatggagggcaggggacatatctctgatttatctttgtatttctagaacctggtgtagcatctggcaagagtagaagctcaaaaattatttctcgaatggataaatgatgttattaaaagtattattcatgactaaagcatggaggaagagcataaaatgcttttgtgttaagaagtaaaactaacgactttgttttttctgaagtctccaaaaagtgctcatagatttctgcattttacaaaaatatttgaatgaatccttgtcatcatggggcatattattggcctaaaagtctttcttaaaggtgctttaagatgatcttttatgtgtttgtatctgtaagttttgtactgctgtttttatccataaatctatattggcgcttctattttggaaagcaagttcttagtaagcagcgtggcattttggaagtgcctgtactctagttcatagcataacattatggatttttgatttggagtttctttctttgtaagaaaatgaagaaaaaatgattttttcagggaatcaatttcgagcaaattacttcttacaaccagagctcatgccttcacaactggccttcagagatc

SEQ ID NO: 26210 - DNA, 1075 bp, Homo sapiens
tccagattatccaattctagcagtattgtatgtatggctagccagaagcagatagtttgggtttttatttaaagggagagagagaaaattttttgacttgcagtattgctaaaagattacttatcttattttttggaacaagatgtataagacagttaattgggtctttaatctctctcatgtataatagatatagtgtttccatacttgctgcattgtattgtgtttaggtgagagttgttatactaaactgtccaagcctgtggaagtcagatgcaggggtggggttatcctgcatattgaaggctacattttagccattatttatgctttgtctttttcaggcttcctcatttggatatgtggaatgaattttttcatgttatgttgaatattccagattgtcatcatcttccatctttggatttgttaaggcaaaagctgaagaaagtatttcaacaacactatactaacaagattagggccctacgtaataggctaattgtactgctcttagaatgtaagcgttcacgaaaataaaatttggatatagacagtccttaaaaatcacactgtaaatatgaatctgctcactttaaacctgtttttttttcatttattgtttatgtaaatgtttgttaaaaataaatcccatggaatatttccatgtaacttagttgttataaatatttcaacaaaatatacaaccccataaggtccctatatagcaggctgattgggctgcttctgggatgcaagcatttgtgagaataattcagacatgagcattctctagaaatcactttttaaacactgacctgtttaagccaaaaaagggccaagacagctattttccaaatttgaagtttggtgtctgtgtaaacacacacacacacacacacacacacacacacacacttccctaacatttccaagggacttcaagtttttatgaataaagcttgcctgtcctttattgtacctgttcttcattgctctctacgaagtacaaatcctaagcctgtttattttttaaaagtaccaaaggaaaatctctgatcttaaagtctttctt

SEQ ID NO: 26211 - DNA, 1050 bp, Homo sapiens
gctatcatttttcagaatacgagattggatatgaatttcacatacctgatttgcaggtccaaaagcctgccaacccctgggaattctacattgggacccagttgatggaaagactaaagccatctatgcagcacatgtttatgaagttctattctgcccacttattccagaatggcagtgtattagtaggagagctctacagctatggaacattattagtaagtattcatttttatgatgagcacatgaatttaaaatggatttttggcttgtaccttgcacgtacttttgtggttggggcttttgtggagtggtgggcaggggcaaagctctcaatttgaaattttattaatcttgtgcaactaactcaggattccactttccattgttcctagaatgccattaacctctataaaaatacccctgaaaaagtgatgcctcaaggtcttgtcatctcttttgctatgagaatgctttacatgattgagcaagtgcatgactgtgaaatcattcatggagacattaaaccagacaatttcatacttggaaacgggcaagtgttatgcttttaacagggttcttctcttcctatttccatagcagcctttcatcatttgtgctcatgcagcctggctttgtttgtgtttaatatagatttttggaacaggatgatgaagatgatttatctgctggcttggcactgattgacctgggtcagagtatagatatgaaactttttccaaaaggaactatattcacagcaaagtgtgaaacatctggttttcagtgtgttgagatgctcagcaacaaaccatggaactaccaggtataaaactaaagtgagggacttggaaatatttttctgtgttgcgcttatcagattttcaaaatgaatttggggatctaggtagtttgaggtggtcttttgaggagcagttgaaggagagatgagcctaaggccaacatggcagggatagaattctattcctgaagaatactctgctttcttattagtccattatagatcctgttatcaggaaaggggggcag

SEQ ID NO: 26212 - DNA, 1093 bp, Homo sapiens
ctgttatctttgggtttccctacggactttttaaataaggtctcagatgtgcagttctttacattataactcccccagtactggttccagcagtggtttctgttcctgggcttctagtttggcaagctgtgattctctgcgtccacttgtctgtctctaattttggaggaagcagattgtcctttgacctcagttctctaatggatctcagaagcgtcgttgattttcagccatttggcttactgtgagggtggagtgatgactccaagctcctcatatgctggaccaggaaccagaaatctactactttacatctgattttgaacatgtgaattcttgtttttaatttaatttaaaaatctactagtacagtctaggtgtgttagctcactcctgtaatcccaacactttgggaggccaaggcaggaggatcacttgaagccaggaatttgagacaagcctgggcaacatggtaagaccccatctctacaaaaaatttaagaattagctgggcatggtggtgcacgcctgtggtcctggcttctcaggagcctgaggtgggaggatcacttgggcccaggaggtcaaagctggagtgagctattaccttgccacagcaacccagactgggcaacagcaagaccctgtctctaaagaacaaacaaaaaactactacaacttcacctctgtggtcttccccccaaaatccaataactccaaagtaaccacaagaaatgtatcaaacaaacccaatttgagggccattctacaacatacctgactagtactctttggaactgtcaaggtcatcaaaaacaaggaacatctgagaaactgtcacagtccagaagtggctaagtggacatgatgactaaacataaagtatcctagaacacaggcaaaaactagtgaaagtgagtaagatgtagagcttagttaataggagcatactactttggttgattgattatttgtgacaaatataccatggttatgtaagagttaacaactgcagacagtggatgcgaagtatacagaaaactctatgtctttgtaacttctttgtaaattgaaaactatttaaaataaaagg

SEQ ID NO: 26213 - DNA, 1098 bp, Homo sapiens
gcatccttcaagcctctaataacaacattttgttaaaaaacaccttatttattatatattgtcaattcattaacattgaatttatgtccagcaacactgacttacatctaaataaagcttatctaatacacatattttcacaggtttctagtgcttaggaacattagagagcacttcagcactatactttgggaccattttcaataccaaaatcaccaagaaaaagcacaaagacacaaaaattgtgacactaagtacagctcgaaaaggatacttgtttgcagtatgagagctggaaccggaaggctgagtgtcaccttgttcaaccttagctcagaacatgtatgttaggtggctcaatttttcatcactctgcgttctgtaaatgactgaaaaatcactatgagtattgatttgaagcttacaaataaattttagcatgcaggtgaattcacaaatatgaaatccattaataataaggatcaactgtatactgtgtgtgtgtgtgtgtgtgtgtgtgtgtatggatgtatatgtatacatatacttccatgtacagtcatgcagttgcttaacaactgggatactttctgagaaatgtgtctttaggcagtttcattgttacatgaacatcagagtgtatttacatgaacttagatggtttgattagtttactacacacctaggctatatggtataacctgtggctcataggctaaaaacatgtacagcatgttattgtattgaatactataggcaatggcaacagagtggtgtaagaatttgtgtatgtaaacatagagaagatatagtaaaaatacagtgtaaaagataaaaaatggtgttctgtatagggcacttcccatgaatggagcttgcaggactgaagttgctctgggtgggtcagtgagtgagtgagtggtgagtgaacgtgagggcctaggacattactgtgcactgctgtagacttcagaaacactatagttaggttacactaaacttataagaaaaatttttcttcagtaataaattagccttagcttactgtgagctttttactttataaacttaaaaagttttatctttttgacttttgta

SEQ ID NO: 26214 - DNA, 1063 bp, Homo sapiens
ttaatctggactccatctattttgaatggaatcaaatgtgtttaatgcaacttttaaagaaatacagccatttctttttcttagaactaagtatcacatttcagcaataagcattgcctatcctatctggttgtttaaaattattagttaggttttacatttcttttgggtacttcctggcatgttgagttgatcagaaaattgtataatacttattttaaaaacgttttagttgaaatttctgagacagtgtgaatgagttgatttacttcttatgattcctactggaaggatcaggggaatttattatgtgataattttacttacggttttacccttaatttctccgtattttatcctcttttccctcatagctagaacctcagaacctctgcataatgttcaggttttaaatcaaatgataacatcaaaatcaaatccaggaaataacatggcctgcatttctaagaatcaggtaataatgacatttgtagcttgtgtggaaactgggaatggtattgaatggccagcctggctgccttctacatccactttgacatctcatttctttgatctttctcttcatggctctgagctccatgtcagccacctgctcctgtggcaacttcctgggcctgttattctcccacacagctcacctcaaatacaatttgttgtctaacccagaggccctcaccacacggcctcctgtctttactctccccaccagcttttcccttaccaatgtcctttcctctgttctgctggcctctgcataggctctggaaatccctactgggaatggatccacctgggggcttctgagcctggctttcaaaactcagagcctcaaagattgctgcctgttacctcaagtaacagggaggtctcatactcccaggcaatgggtcatactcccaggcaatgggacatgcttccagtgtctgattcactctttatgttttgtgtatctcttatgtttccaggttcactctagcgccaaactatagtgattttagacttcttttcagtctcttcaaacttgggacctcgctacctctag

SEQ ID NO: 26215 - DNA, 1035 bp, Homo sapiens
aaaacaattaagtcataggttcaggaagtaaaactggtccgttttatcagttctttgcgatcagaagaccgagattgttaaatgcagtcaaaacaaaaatccatttgctctaagactttttctgtaaccttcaacctagccagcaaattattttctttcagaagtcccccgccccttttttaaaggtaaagcagatattcctggtcctgttttgacttactaaagattaatgtgctttaatgaactggatgttttactattacagtgcatttaggtcattttactagagaaatgtggttggtgttagaatatgaaatgtttaccttgggcgagcctactagacatattttggaagaaaggttctgaaatagggatttgtccctctgctataagacatgagagacattcaaacttcagaattattattttttttagttttaaaaataagcaatgcgtttatatgactaaaagaagatttagaacagtatttaccgagaactcctgtacctgactactgtcccactctgtcacatgtaaccgtttttctagtttctttttggaaatataaatatttacattattataatatattaaatgtctgcacgtttgtatacattttttgcctttaccacacataaaatataacagtatatatatacgctgctcttttgcctaacaatatccctggagatctctaccaatacataaagttctttcttattctttttttacagctgtgtaatacttcatgtaccctaattgatctaagcagtcaacacaggttgttgacaatctgtttcaaatagtggcacggtgaaaaatcttgtacataacattttgcggatacacatgtgtatgtgtcttctagatctgcagaagcggtttgttggatcaaaagcaaatcagtccagttttggtagataattcccttggcaggaattgagcacatgcccacctacaagcaagatgcgacagagagcctgtttcttattgctgcacctacacaatcttttcacatgttttttagttttgcca

SEQ ID NO: 26216 - DNA, 1051 bp, Homo sapiens
gcagggaaactcctgtttttaaaaccaccagatctcatgacacccattcactgtcaggagaacagcatgggaaagacccacccccatgattcaattgtctcccacaaggcccctcccataccacatgggaattatgggagctacaagatgagatttgggtggggacacagagccaaaccacatcagcaacatgtcagaacacagaaaaaatgtaaaatatcactgtatttctatgtactagtagtgaactgtcagatgttaaaattcaattgcttagaatggcatcaaaaatatgaaatactggccaggcgttatggctcttgcctgtactcccattgctttggaaggctgaggcgggtggatacctttgaggccaggagttcaagaccatcctgagcaacagggcaaaaccttgtctctactaaaaatacaaaaaattagctgggcatggtggcctgtacctataatcccagctacttgggaggctgagacacaacaatcacttgaacctgggatgcagaggttgcagggagctgagattgaaccactgtactccagcctggggaacaaactgagactctgtctcaaaaaaaaagaaagaaatacttatgggtaaatctgacaaaataagtgtaagacctgtacactaaaaactacaaaacattgctgaaataaattaaagaagacctaaataatcggagagatatactttgtttaaaggtcagaagtctcagtattgctaaaatgagaactcttcccaatgcagtgctaatcaaatttctagcaggctttttgtagaaattgaaaagcagatttgaaattcatatggaagtgcgaacaaaaccaaaagagccaatataactttaaaaaagagaaaagatgaagttctaaaactatctgctttcaagatttattataaagctacaagtgatcaaaatattctagtactagcagcaagatagaggaaaagatcaatgaaccaaatagaaagtccagaaatagacacactcaaaaatatggacaactgattttggacaatattgcaaaagca

SEQ ID NO: 26217 - DNA, 1049 bp, Homo sapiens
actatgaccaccaaaccaacaaaaatgatgtgaaatgcaatttcttaatttcagtctcaaactgtgcctgggccaatgtatgtgaaagcccgatgtccatgtggattcaaatcctgattcactcaggcatggtacttaacattctaagcctcagtttcctcatctgtaaaatggctttcctatctcacacaggcagttagccaaggcctgatatgcagaaagtgctcagctgctgtgactcttcacccttcctgtgagatgccttctttaaccccacagatgtgtaccatgtgatggccaagggagcttcatcaatcatggcatctcaagggagctggagcagatgaggaggagatggaggtcccaggaagggctgtgatctgcctggggtcccacaatgggaaacaggcatgagctctccacactccctgtccaatgctctttccactacaactggctgtcggtctcccataggacaagaaaaaacagtcaaaaaggaaatcgaagggatttttgtttttatccctgttcttttgttggttctatctgttctgttttgggtattttgtttgtttttatttgtgtactttttttttttttaaatggagcttccatcatgtaggagtagggtgtagaaatctgagttggtggctccctggtataagaccatagccttcattttggtgagtaacaacataatttctgctttgagtcccattttcttgcagtggaagcttaatctcagagtatcaaaatcactgcatctgagcgtgggcctccccacatcatgggaggagaaggatgagtagatgatgtctcatggagaggacctgccaggatccctcatcgctggccttcagctttctcatctgccctcaaccacagaaccctgggaggaggctccctcagtggctcgtgcactcttgcaggccctgtgaacatatatacttcctggtgggaagagcaagggagcctctggtggaaagcagccccagggtccaagaaccacacagccctgcattagggcccccagggagggagaagaccaa

SEQ ID NO: 26218 - DNA, 1031 bp, Homo sapiens
ccctcaaagctcagcttctcacagggtcctctgcctttctcaggggagcttggagaatgggggaattggccctcatggggcagagtggaaaaagggtctatcttgtgctgaaaacagacacttatatgactatacggagaatgggtgctatacaacatgcctaactcttggattgatttttctagaaccaaggagtagaggtggggcaccaacactattccagctggggctccaaattcctgtctgtaggatggcctctgcctgaggtcagaaagcaggagcaccgtgaggttcaggaccgtcttctgcacactggctaccaggaccaggaggctattctatgctctgtccatcctcactgtttaaccagaaagggcatgcccaagcctacagcaggggctgacagcatctacagggttagaaagagatggggtccatgagggttccaagtccagggactgaaaacaatcccatggccccagagacaaaattacagctcaagtcaccatgttcacaactctaacgtcaacacaaggctccctcaattgccttgctgtaaaataggtgaataggtgtagtgggagattcagtggccaagcctgggtcccaggtaaggtgactaaccatcccagttttcctgaacagagaaatttcccaggaaactttgggttttaaagccaggaaagtcccaggtaagcaagggtgagttgatcaccctggcagggaactgattcattcaattctggataattgaataaagtccacatcctcaccgggaacattctactgaatgataagaagaagttccttctagttttgcctgtttcttttccaggatctgggtccatgggacccctaccttatcaactgtccccatacccaggccctggctctcatccctacattgacctccaccccttcctccacaggcaggccagaaagcagacccagggaggatagcacatgtcttcggctacactggtgaaggcatcgtgcctgctccacagcacatttttattcaaggtattgta

SEQ ID NO: 26219 - DNA, 1043 bp, Homo sapiens
ctagggattctagaaaagctctctaaaggagactgacatgtaataggcttagcattttgcacctgaattctctccttccccctgtctggaatgcagacgtgatggctggagctccaacagccttcatgaagccataagacaatgtggaggaaagaaaccagtgctaaggatggcagagcaggcagatggtcacaggtctttgggtgaccagctattttgcctgcctggagatttgactatttttggagccggatgcagagggaggtgggaaaaatattccagctgaaattcaacctgtaggagtatttttcagggtgtcagggtcacttctgtgtggagctgcctttcaggtctctggtatagggggcaagggtcatggcctcatggtgatgcccagggaccccaggtgctttggtctttgcagaccactttcttatgaaaaagcagagtgtgactgctctggcagaaagataaatgtcattcaggctgattcattattatacattcattttcgtttatttgtggttttcctctgattttaaaataaatcaaaattaaaacacttgtgcaggcccctaacagtatcatgggccccatgcactgtgcccagcatgcccagtggacatgtaggccccaagagggcagagagcaatcacagaaggacttgccctggccaacataggctggtctctctaggggcagcttcggaattgtgaattacccagagctgcgtgccaggaaatgtggacctaactcttgcctctgaggaaggcaggcaggcttggtttcatgtactgttgatgagcccgacatcctcaatgctcactcgagctttggaaatgacaagcaggattttcagaacaggattctctgtcctgtccctgttttaatttcagcctccttattccccatgtaataattctccatactggctcaattatttgtttaacgggtatgaattccagtctataatgccaaggtatcaaaatgtgacgtacctttactctagaaatctctaaattatattaaatctgctccaagat

SEQ ID NO: 26220 - DNA, 1054 bp, Homo sapiens
taattttcttagtggttgtcctggggattaacattaacatcttaatttataacaatctaatttataacaattagattaatacctactcaatttcgatggtatacaaaacctttgctcctgtatagtctcatttgcttctttgtgctcttattgccacaaattacatctttatacattgtatgtccatcaacttaaatttacaattattgcattatgcagttgtttctcaaatcagataaaaaaaaggaattatatgcaaacattcaattatactctcttttacatttatctatgtatttacctttgccagtgctctttatttctgcttgtggactcaagctactttaatttcatttcagcctgtggaactccatttaatatttcttataaagcagatgagctaaggacaagccctgtcagttttggtttatgttggatatcttaatttcttcgtttttaaaggatagttttgctagatatagaattcttagttgccaattttttctttcagctctttgaatatgtaatctcactgcctttgagcctccatggtttccgatgataaattagctattaatcttattggcaaatctttatatatgacgagtcacttctctgttgctgcttttaagatttctctctgtcttgagctttcaaccatgtcattatcttacatcttggttggggtatatttgagtttatcttatttgtagttcttgtagcttctcatatgtgtagattaaaatttttcataaaatttgggaggtctttggcctgtttgtttaaatattgtttttacacattctctttatcttctccttctggggtacccactgtacatttgatagtatgcttgacggtatcccagaagtcactgcactctgttcatttttctctattcttttttctttctgttcctcatactggattatctcaattgacataccttcaaatttgcagattctttttttctgcctgctcattttgctctttatttcttgtaatcatttttcatttcagttatggtacttttcaactccagtgtttctattta

SEQ ID NO: 26221 - DNA, 1036 bp, Homo sapiens
aagcaatcctcccacctcagcctcccaagtagctgggactacagtgcagtggtcaccatatctggctaatattttattgtttgtagagacagggtctcactatttgtccaggctggtctcaaactcctggcctcaagcgatcctcctgcctcagtctcccaaagtgctgggattacaggcatgtgccactatgcccagccagcagatacccttgaaaacgtgatgtatcatataatacaagcaatgtgcactctccttgctatttgaaatgcctctgaaaatgaaaacctaattcttcactaaaaaattgtgttgcggcggggcgcggtggctcacgcctgtaatcccagcactttgggaggccaaggtgggcggatcacgaggtcaggaaatcgagaccatcctggctaacacggtgaaaccctgtctctactaaaaatacaaaaagttagccgggtgtggtgacacacacctgtaatcccagctacttgggaggctgaggcagaagaatcgcttgaacccgggaggcagagcttccagtgaactgagatcatgccactgcactccagcccaggagacagtgcgagactccatctcaaacaaacaaacaaacaaaacccaaaaaacaacaaaaacaaaaacaaaaacttctgttgcatctgacatgaaaagggcacatagtcttcaaatgtcaagttttctccatagcctccctgtcttgcttgggctgtaactccttattccagccatctctttgctaattccttcagtcatcgtgggcttcattattgtcaattcttaatcaagcttcaattttacaaacccagcctttacattttggtgaagcaattttgggagatttcccacaattcaggagaaagcatctggaacaatgcaaactcgaagaacaaagaacaccagaggagtctcatgatgctttgattttttcttatttcttttctttatcatgataagctcttttttttgtttgttttcaactgtgcgttgccttattctcatatacttggattaaaaa

SEQ ID NO: 26222 - DNA, 1084 bp, Homo sapiens
ttgctttggcggccatgtcttacctttttagtactgttctggtctgttgcggtcttttgtccacaactaattttcaggtatcaggattacttaaaatctaatacatcttgtattttcagtgcgggtaaaaaggactattttagcctgaaggaaattattgtaccattgactcttgaacaacatgagtttgagttgtgtgggtccacttacaatgaaattcttttcagccaaatgcagatagaaaatgcagtattctctgatgtgaaacccatatgcaggttctgcagggccagttgcaggacttgagcatgcacggatttgggtacgcatggggtgtcctaaccaatcccctgagtattctgagggccttgactgtacttttcagcctgccacagtattgcttattttatttttttttagatgttgtttgctaattgattcttattttcaaatgttttctacatgttacatgttttctttaccaggatgactatcaaaattaagtttcattttgttgccttttagccccccagaagttgcaagtagaacaagaggaaaacaggtgacttttatttagactgtgcttttatgtcaaacacttaaaacaatattatttactgttctgcttaataactttatgttttattctcttataggtttagtttcaggcattctacatctgtttctagtctagctgaaagattggttgtctggatgactaatgtaggtgagagcttctttgttacctcctaactaggccgtgcttcctccagactagctagaagtggaaggcatgaggagagaggggctctggctttgtgaaaaggcctcacaagattgagattatggttcatcaagccatattctttttttctcgacaatctcacaactttcatataataatatttgggataccagctttttatcttgatgcataaggaatctttatttgccatttaattggaacatttgaggctgtggctatgtaagctggtctctgagaatggagaactctaatcacctacatacacacctgaaatcattgtgatactcagatatcagaaatgggtggttttggcaaagt

SEQ ID NO: 26223 - DNA, 1053 bp, Homo sapiens
atgtaattactacaatgaggatatagaacatttacatcaccctcaaaaatttctctcatgatttcgagacttatccaagttgtttcctgtatcgacagttcatcgcattctatggctaattagtagtttattgcatgaatgtgccatagttggtttttcattcaagatagttgggttgatttcagtttttagcaattgtaaatatagatgctgtcagcattcatgcttagcgttttatgtgaacataagttttgctttctctaggacaggtacctgggagtaggattgatgggtcatatagttaagtttatattttgtttttaaagaaactgtcatctgttttccagagtggctcttccattttacatttttaccaccaatatttaagagatcatttacctgcattcttgttggtgtttggtattgtcactcttttttatttttgtctttctgagagatgtgtagttatacctcattgtggttttaatttgcattttcctaatggctaatgatgttttcagggttctaggtatgaggttttgtcagatatgtggtttgcagatattttcttctggtttctaccttgtcttgtctcgtcattctcttaatacatcaaagagcaaaagtgtttaattttgatgaagctagtttatctgtatttttctttaatggatgttgcttttagtgtcatgtctaataattctttgtttaacttcaggttttgaagattttctcctgggtttctttgcatgttttacatttagatctctaatccattttgttaatcttttataacatgtcaggttttaagtcaaggtttttattatttcatttggatatccagttctttcagcactgttttttaaaaagactatcctttctctattgcatttgcacttttgtcaaaagttaatttggccacattcttgtgtgtctgtttctggactttctattctggttcattgatctttgtggctgtctacgctgtaattactgtagctttatagtaagtctttaaaattgattagcgttactcctcccttcattactctt

SEQ ID NO: 26224 - DNA, 1066 bp, Homo sapiens
tctgacctatgtgggcaaaagttcctgtgctttttagtagagtcccagctccagttacggtaggtgtatgtctttcccattgtttctgtataaataacttagcactgctttttctttttcttttctttccttttttttttggcttaagtagttttatttagaaataatttacatgtcataaaattaacatgtttttactgtataattaaatgatttttagtaaattacagtgttatacaaccatcaccatgacccagttttacaagatttatatcaccataaaaagatttccttgtgcttgtttgtagtcagtcttgttcccatttccagcctcaggcaaccatgctaggcttctgcctttatagattaatttttctggacatttatatatatataatgtatgtacacacagtgtacctttttgtgtttagctttcacttagcgtgatgtttttaggatccaccattttgtaacatgtatcattatttcatacctattgctatgtaatagtccattgtatagatctaccaccatgttttgcttatctgttcatcagctgacggacttttggtttatttccacctcttgactactgagaattatgaccatatgaacatttgaacaaaggtcttgagcaaaaatgtggacatatgtgattttatttttcttgagtaaatgcctaggattgggtcattgggttgaatggtaaattcatgtttaactttttaagaaatcaccaaactgttttccaaatagcctgtatcattttatattcccaccagcaaaatatgaaggttaatgtctctttatccttgacaggattggatatcatcacactctttgattgtagctattttctagtggttgtgaagtggctttaatttgcttttctctaatgcattctgatgttgatcatctcatgaagttattagccattcatttatcttcttaggtaaaatagctattcagatcttttgcccatttatttaccttcatattttgaaatacgatagattaaaggaagttacaaaagagtaaacaagtcctgtgtaccttgcattctttt

SEQ ID NO: 26225 - DNA, 1029 bp, Homo sapiens
gttctttaattttcccaaagaggggtgtttaattctgtttggatttttgcttgttttcttcagctatatgttttttgttgttgttgttttgggagatgagaactgggagtaagggcggctctgctggtaattttcatgagctgatgtgtttttgttctctgttttcttctgtaggtagcaatgtacagataaagagtactttaacgcccatgcgtgttcaagactgttcaagactggtgatttggagtagtttacaagattcctcattcagagtgccctcttgtgtgactggggtgatgtgcagcttccataatggatgggacagagagctgggatctaatgtacaagtgaagggcttggtcttccctgagacattccagccattggaataggagaggagcatatatggcagaggtgatggctggtgggtaaatgtgatagtaaattgtagaaacctcttctgattgattggatttccttaataaaatcggaagcaaggttaggctgagtgagggtgagtaaagaggtagaggaggtttgaggagagagaactgctcggaagacattggtagatggaccataaaaacagagttagttctctttatgacattaaatagttttacaacatatttttaatggttcacaatttcattttagggcttaaaataaattatggttctatgatttttttaaaccagtttcctattgttagacatttgtttccagtttcttactattataaataaagtgaaacaatatctcttactataccatttctaaatttagagttcgtaacttttctgttgttaaaatataagaatatttatctttctcattggtttataaactgtagtcagattatacacttgtgtgagttacaaactttaggagtgtgatggtatcattaacacaagattcaaatactaatgttccaagtacaaataataatgagattctaaatatgcagttttatatagtaatattgattattggttattattagacaaataccatgaaatggaaactcgt

SEQ ID NO: 26226 - DNA, 1032 bp, Homo sapiens
tatagatttattattccttctttaaatattctttactttttttttctttttttaaattatactttaagttctagggtacatgtgcacaacgtgcaggtttgttacatatgtatacatgtgccatgttggtgtgctgcacctgttaactcgtcatttacattaggtatatctcctaatgctatccctccccactcccccaccccacgacaggccccagtgtgtgatgttccccaccctgtgtccaaatgttcttatggttcaattcccacctatgagtgagaacatgcagtcaacactcatttcttattttaaaaaaacactaaagaaaataggaatagatggatactttaaaagttttttattgtgataaaatacacctaatatttaccatcttaaccatttgtaaatgtacaattaagtaatgttaagttcattcatatagttttgaaaccattaccaccacatatattaccagagctcatgtttttaatctcaaaactaaaaccctgtatccattaaacaaaaactccccatttcctcttgtcttcaaggccttgacagctaccatcctgttttctgtctcttgtgattttgactactttagatatctcatataagtgaaatcatacagtatgtcctttttttatctcatataagtgaaatcatacagtttgtcctttttgacagacatttctgtcaccaccatcctattttctgtcccttgtgattttgacaaatgtaggtatctcatgtaagtgaaatcatatagtatttgtccttctcaacaggcttatttcatttagcataatgtcctcaagattcatccatattgtaccatgtcagaatttcttctttttttagggcacagcctccttttgccctggaaacacccagacagcagggcaggcaactccaccctccccccacctcttgtagccagacaggccaggccacacctgctagagcttccaacccagtggtcccacttctacctgaactctgcaggcaggtgcaaccccgtgtttactcagg

SEQ ID NO: 26227 - DNA, 1054 bp, Homo sapiens
gatgtatcttaagtgtaagtgggttttcatatggaccattacagtttacttggggtgttttacaaaatgataaattattgaagacatttaaaagtactgtcaatgcaaaggcagaaatgtaatgtgtgaactgtaatactgtaatcctctcatatcaaataattaagatttaggggtttagacttttaattcagtcaaaggcacacaatgtacaaatttagaattttccctcaaatcatctttaaggatagatatgtcatagtggtttgttagtttgtttttaattctggaaattttttcttttttttaattctggaaattttcaaatatatgagtggagagaatagtatatgaatcccatgtacctattacccaccttcaacaatgaccagtttatagccaatcttgtttcttctgtatagccagattgttttgaatcatgctaggtttttaaaattgaagttttaatttttacttagtttagacactctgcaatatcaccaaaaagttcgctgcatagaaaatcaagaagtaaggactatgatgtatatagtgataatgatatctgcagtcaggaatcagaagataattttgccaaagagcttcaacagtacatacaagccagagaaatggcaaatgctgctcaacctgaagaatctacaaagaaagaaggagtaaaagataccccacagggtaagagtcaaactattttatcatttaaagtttatctagagaagcagtcacagttgtccatatacggacagaggatttttctttgcactttatcttatgataagactatggttttcatgaatatttataccagacatgagcttgcatggccagagaccccatctgagacctggccacttggtgcattaaatgcttagtttgtagagggagctggaggatggaggtgggttatcaaaggccctgactatttctaaagggagaatgctaaagccctggcctctgcatgtgtgaaggataggatatgcctgcttgtattgctgtcatttaaagaggattgactggaatggttgtatgtcagact

SEQ ID NO: 26228 - DNA, 1065 bp, Homo sapiens
ggagaatcgcttaaacccgggaggcagaggttgcggtgagccgatatcatgccattgcactccagcctgggcaacaagagcaaaattccatctcaaaaaaaaaatgagttttaacacactatagaagaatgggttaaattgtcactgagacttataagacagaaatagactttaatagtgtatcttttacttagctttcttgcttgcttgctttttctttttctttctttctttttttccttttctttttctttttctttcttttctttctttctttcttttctttctgtctctgttgcccaggctggagtgtggtagcatgatcttggctcactgcaacctccttctcctgggttcgagcagttttcccacctcagcctcccgagtagctgggactacaggcacacgccaccacacctggctaattgttgtatttttagcagagacagggtttcatcatgttgcccaggctggtctcaaactccagagctcaagtgatctgccagcctcggcctcccgaagtgctaggattataggtgtgagccaccatgcccagcctccttagttttataaaagaatacaggacagatgataaagcaggtacagtatcttcatcttcttggaagcctctcagctacccaagtaagcaacttcttttcccctttggggcctatgtggcttccaaagatgagagccaaggttgacgacaagaaattgcaacttcaacttcccacaagttttttatactgcttgagtcacataggcctcagtcttttatgcccacttttagctcctccagacttcgtattatatattataaccttccacagcagacaggcagaaacaacattctacaactgtcttacatagtttctgcaaaacagtactgtgagaagatggactcctaggttattctcaaccaggcttgcttcagtgcagcctcttcactcacaagtatgtaaaaggtgaatacattatcaaataaatatcacagctaattaattaattaacttatttatttttgagacagagtctcactctgttgcacaggctgcagtaaagtgg

SEQ ID NO: 26229 - DNA, 1043 bp, Homo sapiens
aaaaccaattctttagattgtttttgccaccatttgcttacttggaatagctttcacatttatttttcttatgaagaaatccagtgtcagtcagaccatgtaacatcaaagcaaaatttcattgaagcctatccttgtcttaattattctaaaataaagtacaataaagtgaattattttgccctttgtagtagcatagtgttaagttatatatatattttaatatgcatactcctaagtaaagtttcagagaccacatgctggagagcagtggctttcagacagcatcagcatcacctgaaggccttgttgaatacacattattggaagagaggggagaacacaggctcatgcctgtaattccagtgctttgggagactgaggcaggaggatcacgtgagcccaggagttcaagatcaggctgggcaatacagcaagacccctgtctctacaaaaacaaaaacaaaaaacaaacaggcatggtagtgcatacctgtagtctgagctgcttgggagtctgaggcaggaggatcacttgaacccaggagttcgaggctgcagtgagttattattgggccactgcagtccagcctgggcagcaaagtgagaccctgtctgttaaaaaaacaaaaccaaaaacttgattgctgggggccaccctagagtttctgattcagtaggtctggcggtggggatggtgggcctggtaatttgcctttctaacaagcgtccaggtaatgccccagctgctggtcccaggaccacactttgcagattattactctgagaagagcactaactctgacgttggattccttctgttcctcattagtgaatttatttgggggagattattcaatctggtagatccgcatttacttagctgtgaagtggaggttaatgcaacctgcctgagactgtgagaatgagaaactctaattgaaataccaggcccagcgtgcctggatgcttgaaaaatgctgactcccatggtccgtccttccctcactcttctcagctataaagtgagaagcgaaattcag

SEQ ID NO: 26230 - DNA, 1249 bp, Homo sapiens
gctgtgtacatatcactacagttataggaagtttcagtctacagtccatccaaaggaccaacctgccttacacatctcaaggaattcagctgttgaaatcatttgaactaatcaaggaataaatcctaatgttctgggactttattttcacatgttaaatgctggaatatattatgaaaatgttttcaagaaatcacttaagtgttcatagaccagtatttctgacaggtaaaatgctaaaataagctacctgtaataagtgtggattatatttttgggttttgtagaatattgcaaattaaccacacaaaaaatgtttaatttatgcaacaagcatgtttgtgcaaatttcatgggactttaaaaagaataagtatttgagaaaatatctggttcacttacactacatttactgtattattcttttatagcattaggtgccttgtattttaaatctgtgacaaaccatggcaaatttttaaaggggaagtattattataaaatgaagaaatatgtatttctaaaggctatattgctgtaaacttaattgataaagctctgtttaatttagagttttgaagaaatagtctcccttcaattaagaaattttcataatggaatgatttaaattgaagtgacaaagagtattattaaaatacaatgtttatacgtctatttgtgtattgtagatgtatcaagtgatttctaatttttttcacatatgaatgtgccagattactctagaactagatgtctcttctttaaataattttagttttcctgaataaatttgtaatggttaaagtaccaagtaagtaaggcgagaagggattctgtttttaaaatcacatcagaacttttcctctactaagattataaattaaatgtaaaatactcctaattgcaattcttaaacttaggccttacatgtacttattatgcaactgctcctggactctattcaccatagatatcagtaaacgtatgtcccaggattcacaggcttttgattaatcaatattcttttcaagtttgctgtgaagagtttagttctcttcaaaatttcttaactaatctgatttttaagaattctctttgcagtgtttagcttcctattcacattcttaaaattgctttggtgttaccatgagtctaaaatgaagtttagccttccttttgtttcattctgagaacttctatattatattacctttaaaaattgtttatgatattaaatttaaaatacaaa

SEQ ID NO: 26231 - DNA, 1028 bp, Homo sapiens
aagtatgctttcttggctttcctttagcctattttccaagcaagaactattgttgttggtaatttaggtgcatggaatagtaagttgaagtcttgaattcttatttaataataatacacttaatacattgtcagtgtttaattttgtcttcccattgttcttattcctgctagttttcacaaatagaaaacttacattgaaggggaaaattgccttaatgataattgtgggtgtgttttttcctctatcttttatttttaggtgcagttttcttggttattttttgcaggagctatccctgtatttttttcattttttattgtaactctcctatgccattataataattgggatcctgtgatggtgggaatcagaagaatatttgcttttatatgcagaaaacatcgaattcagaggtaagtttagtcccaatacacatttttaaaaatagtgtttgctagataactgagaattgcatcatgctggcctagcttttagagattttgtgaggaattattgaaagatgataacttatatgttacggcagatgaaaataaaataattggtttagatcttttgggtaataagattctttctcctttctttctttctttcttccttccttcctttcttcctttctttttctttctttctttctttctttctttctttctttctttctttctttctttctttctttctttttctttctctctctttttctttccttttctttccctctttctttcttctctttcttctttttttctctttcttgacagagtcttgctctgtagcccagcctggagtgcaatggcacgatctcagctcactgcaacctctgcctcctgggttcaagtgattctcctgcctcagcctcctgagtagctgggattacaggcatgcaccaccatgcccagctaatttttgtattttcagtagaggcaggtttcaccgtgttggccaggctggccttgaattcccaaccacaagtgatttgcctgcctagtaactacatttttttaaaa

SEQ ID NO: 26232 - DNA, 1024 bp, Homo sapiens
aggatagttttactgttaatttagattttaccaataagcaagagtagtactattgctggatttatatgggtttgatataattttataatccaaaagaaagattggaaagggatgacaagttggttaattcattcttaactgaaagatagtggatagcatagcacataaaagcactggactctggagtaaaactgcctgtatttcagtctcggctatgtgatcttggtcaagttaccttacctctttgtgtattagctttcacatgtaaaatgggaatggcagtaataacacttccttataaggtataatattgtacattttgtgaggattaaatgagttaatacaaatataacactatattattatattgatgttgttagatgttattattgaaattgctaaattatttgatagttttacccaaagttgagattagtcttgatcacttataaataatttttatcttcatgattaggcttttcagaattctttagctcatcattaatgactgttattctcatagcattggaggcgttgtactggtaaacctggcagggtctgaaaaacctgctggaagagacacagtaggtaagtactggactctggattctctctgttagagtaaataagaaagttacatgtgcgtgctcatgtgcacagatgaacgcacaaagggtaggcactagcagggtgggttttttttgaacttttcctttggaaataacataaaaaaatgcgtaaatagtttagtgaattctcatagccttcacccagatttttcaaatgttaacaacttacataaatattatacagttataaaaatcagaaattaacgttgattatgatactgttatctataaagccttttcaaattttgccactttttccactaatgttctttttctgatctaggatcatttattgcatttaattgtcgtgtttccttagtttcctttaaatgcagaagtgttcctcagtcttcttgtcttttatgaccttgacacttttgtagggtaccacctag

SEQ ID NO: 26233 - DNA, 1071 bp, Homo sapiens
atgtatactcatgtacacacacaaatttaacttaccaaaaatatgagtatgtatttttttactttgcaaaagtaatacatatacattgtagaaattatatatacatcataatatcacatgtagggataaattgtatgtgtattagtataggtatattgttgaaaatttagacgctacagagaaacaaaaagaggaaaataaatgctaccattcaaggaataaccactgataatattttgacatatatcctgccattcttttcatgtgtgtattttttattttttacaaaaatggaattgggcctggtgcggtatctcatgcctattattccagcactttaggaagctgaggtgagtggatcacttgaggccaggagtttgagaccagcctggctaacatggtgaaactctgtctcaactaaaaatacaaaaaattagccagtcgtggtggtgcactcctgtaatcccggttagtcgggaggctgaggcatgagaattgcttgaagtcgggaggtgaaggttacagtgagcagagactgaaccactacactccagtctgggtgacagagtgagactgtctcaaaaaaataaaataaaaatgaaaatggaattcttttcaaggttaatccatattgtagtgtttctgtacttcattcattttttgttgctgttgttgagacagagtctcactctcttgtccaggctagagtgcagtggcgcgatctcagctcactgaaacctccacctcctgggttcaagtgattctcctgcctcagcctcctaagtagctgggattacaggtgcccgccaccatgcccggctaatttttgtatttgtagtagagacggggtttcaccatgttggtcaggctggtcttgaactcctgaccccaagcgatccacccctctcggcctcccagagtgctgggattacaggcgtgagccactgcgcccggccaaataatgtcatttttaaagcttgtaattcttattgctaaattactgtctgtaatggttgcattaattcttatctctgttagcagtatataattaaacccttgttaaacactcat

SEQ ID NO: 26234 - DNA, 1029 bp, Homo sapiens
cttctcttttttttatgcaaagtagtctcttctctacatccatggttgatttctaaaaacccctttgcaggagaattccctgtcaagagcgtaagactttatgaagcaaattaggaaaattgaggccactattaaactacaaagaatacatattttccttagccatttgttcaaataggacaatacatctggcacatattatgtatctaaaattagtaataaattcccattcaccacttcttgctttgggataactttctagaacttctcttttatgaagtttcagcaagacacatgattattttataacacgtgatattcatgatgagtcttttttccccttttagttctggttgctacatttcttattttatgacttaaagttaaattacttacactctctacacccgaaatgatcccaagggaactgagtaacttgagagaagttaaatataattacatgtttggactctagagttatacagatctgcttcagacttagctcccctacagaagatgtgacttggacaagcaaggtaacctctctaagttaggtttctccatccataaattggtaagaataatatgtacctgcctcataggattgttgagaaaattaagtgaggtacaatgtgtaaaattaatatctcagtgcttggcacataatccatgttaaataagtgttagccaatgttattattgagatgtttgttaagaccatttcactacaaagaacagcggttcatctgggtgatgggagcaggggtatcgtgacggtatttatggaaataaggactttaaggaccttctggcatatcaagaaaagctgtcgagctgggcctcttggactctggaagtcactcaggaactagaagcatccagtggaagagtcaccaatctgagtcatcttcttgctgccttggcaagttcagggatcccataaatgcagtgactcagcatccctccaactgtactgctaccattcccatttctactaatttttcaactctcctataaataccgtttgat

SEQ ID NO: 26235 - DNA, 1035 bp, Homo sapiens
ctagccaagagccagaggctcagatccgggaaccctgaggttgcaggcttgctgactaccctttgcctggggacacatcccctttgttctacctgtggctccttgccagtagtcatctctcatagccctgtagttaggtttggtttttttgtttgttttgtttggggttttgagatagggtctcactctctcgcccagattggagtgcagtgtcgtgatctcagctcaccacaacctccaccgcaggctcaagagattctcctgcctcagcctcccgagtagctgggattacaggtgcacatactacctcccggctaacttttgtatttttagtagtgacaggattttatcatgttggccaggctggtctcaaactccttgacctcaggcgatccacccgcctcggcctcccaaagtggtgggattacaggtatgagctaccgtgcccagcccctgtagttaggttttatctctaatctatataactccctgaagccagaactatgatttatctgtacgttctgagaccctagcctagtgctgacacatatttgatgctcactaataatttctaggtgaatgaattttattaatttcctagataattacagctaccatagcctaattatatctgaatagtcctttggcctcatttttttgtgatagttatatacatttgtatttctataattctacatgcttccattattgctttccaaaattcacatttttgtgaagaagaagagagtaagcaaaagacattccttcctcccagacattaattactgcaagatgcctgtgtaattagtgaaacaggcatctcctacatgtgttaatttagattccaccaaaaagtgcttgattaacaaaaaaatttaaaaattttcaattgaattactttaaaacaaggaataatttccaatttagttatccagacaagttgtatggatccagacagattatttttaaataaggtgttatgggccaggcatggtggctcacacctataatcccagcacttcgggagaccaaggt

SEQ ID NO: 26236 - DNA, 1050 bp, Homo sapiens
gatgtggaccaacaggaaccctcatttattgctggtgggaatggaaaatggtagagccactttggaagactgttttgtgacttcttacaaaactaagcatacttttaccatacaatgcagcaatcgtgatccctggtatttacccaaaggagttaaaaacttaatgtccacacaaaaacctgcacacagatgtttatggcagtgcagctttattcgtaattgccaaaacctggaaacaaccaagatgtccttcagtaagtggatggatgaactgtggtacatccagacagtgaaatattattcagtgacaaacagaaaagagctatcaagccatggaaaggcaatgagaaagctacatattactcagtaaaaagaaaaacaaatctgaaaagggtatatactgtattattccaattgtatgacattctggaaaaggcaaaacaactgagacaataaagagtcagtggttgctagaggttgggacaagtaagcaaagcacaaaggatttttagggcagaaaaactactctgtatgataactacagtggtggatacatatcattatacatttgtccaaacctatagaatgtgaacacaaagagtgaaccctcatgtaaactatggacttttcatgataattattgtcactgtccatgtgggtttgtcaattttaacaaatgtgctgctatggtgtgggatgttgatggtgggggaggttgtatgtgtgtgggggtggggagtatatggcaactctctatactttccattcaattttgctgggaacctaaaactgctctaaaaaattaactttattaatttaagtaaataagtaaaatataatacttatgagatcagatgcattcagggtggtatggccatagacaaactataatactgtatgattaaagcaatgggaggttattccagtcttgtccagaacctctcctccaacttcattcaaaatgcatttataccatagcccatcaaacaatgttaggtgaaaaggtcactgaaactgtaggttaaaataatatccgaagattcgtcaagg

SEQ ID NO: 26237 - DNA, 1227 bp, Homo sapiens
aagggaggtaggtatctagcagtagcacagttactttgagcctgaccacttgttctgaagtgcagatgttgaaacatgcattgaggaagaacactttaaggaagcactttatgatttactcatggctggtgttggcctcaaagtaaaagaacatcttaatgcagaacagtacaataaagagccccataggatggatgccatcatctgtccccatggttgggattgccaaggaaagtgccttgttctgtgcatcttcagaatcccccaggccctctcttgatccttttcatgaagtccagagcattccttctattacaggctgaagatgcattgtaaaaggtaatgctataatagtattccctcttctcaataaatgtgcaaaactggagaatctggtgctgatctgcagcatacttgacaacacagggaataccgtggatgttccacgccagccttacatccgtccccattgcctgcccatgtccagtggccctgcgcaacaaaagtaagggcttgtcttaccacactctccccagcatctagctcaaggtagatgactgactgggaaattccggttggataaaatggcttttccacattgcaactttgcatctctattaggaaaatttagattgaacctttcctctacttgatgcttagtttgagaacagttttcacaactttagagggtctctctcagagtatgttatactgtaaccttgaagtttgagatgaaacaaggtgtcagaggttttgaatctttcaaaggaattgccttttacagatttttttttttattccctaagaagggaaaaagagagggaagaactacactaatgttagagataaggtatgttttggctcaaaatgtgtcatgaacctaaaggtaacttgatgggcagaaatgtctcagccatgtgaaccaagaagtgggaccacagtgcaaggctgtgggtggcagcactagatacggtggtggcaggagtgtgacatgtaggcactccatgggggacagctggacggtgtctatcaaaagtgcaaatgcataagctctttgaactagcaatgctactcctaagaattgtacctgtgtacaaggtacttgtgtacaagagtttttgttgaaacattgtaatagcaaaaagttggagagtgccaccaatacaggggaatggttaaatacattatggccagcttaaacaatggaatagtttgtagaaatttaaa

SEQ ID NO: 26238 - DNA, 1056 bp, Homo sapiens
catcccctcactggccctctacttctgcgttctgaattctcactgcatcctgggcccaagcacttgtagtgtgcaataattattcttcatggaaaacacaacattgttgtctaccatatggttttttgccaccttagcggttgcctttgttgggtttgatttaccccacgttaaatgggcaacagttatgcaccgtgggcgccatcaggtcatgatactaagatttaaattcaatagcactgatgaattcaaaccctacatttttgtgaagctggctttcggtacataaccttgagtgaacttagctctctgtctggcacctagtgggcatggatagagttttcagcaggaaagagactgaggtgatgagacattttcccttttcttctagaaacaaacacccaaagcgcctcttttgtatttgctttgaagagacggagaatatgattctgtaggctcacatactaggtgacattgcaggctgtctctaccgaaaagtacaagcatcgcctagggttctgtgacacacacagttccccacggtagagttctgatgctgtttttgcctcatttaaacggtgaggtgggtgacagtttaaacttatttactgtttcatatttttgttatggaaatcttaaaaaatatacaagtagagagtgtagtataacaatataatagtgtagctctctgttcttgttccatctcttccactccatttgttttaagctggagtcttttttccccccaagtacatctcaagccatttttaaaaggaacccagcatcaccttatttctgtccccccactgccctgcccatgaactgcccctctctccccaaaaaggtgctcaaaagtgtcagagcaccttgcttctgacagcctcaaagtattcagccttaccaccaagacaagcacccacctgtttccttgctccctgagtgaaggacacatctgaatcctgtagatgagccagcactagtcttagcaaaaccaaggtcgttgtggtcatgctgccatcacactgccaaaagatcagggcctccagagagctggga

SEQ ID NO: 26239 - DNA, 1058 bp, Homo sapiens
ttgtaacttcagcagtcacaactctaatttcgtgtgtgtgaggctgattgtttttatgcagtattcttttatgtctaagtacattaattgtatctagttttgcttgctctgtaactattaagatcagaattgacttgttgaattgatacatcttttttaaggttatgtctgtcttcagctctttgatgatccttggttatatgttcatctttaattttaaaatttcgggttaccacctctgtggatccatgcattttatgcagcccacttcctgtgtttattctggaagggatctacctactgtttgctgagatcagccggtagtaactgatgttctgggtcggggaactccccatttctgctgggtatcaccaactatgtgggaccccgccctgcctctgagacttaagcaccagctcttgtgtttaagagagtcaggtttcattgcctagcctatgtggctattcctaatgcagatccccaacactgcacaccagtccttcctacgtctgctaactccacacagcttcttcctgaggccattcctgtctgttaaccatcctttttggcctgtgaggttaaactcttgtgttctaatgtaatagtctggatgtttgggggtcttagggcaagaaggggtggctgcaagttgtgcttagtctactattttcaactagacctcttggaacttttttaaaactttttttttttaatttttgaataagtaacacattcacatcgtacaaaattcaaaaagtacaaagggtgtaggtttggagaaacggtgttttcttcactgaacagtagatactagagatcattgtaaaagagctactttattcttttttaaaatattggcttagtattctgttgtatgatgtaattacctactttacacattaaaatccaagtttaagtttcttctttaaaaagtgtcattatctgcctcacaaaaagaaggtgaagttgttcacctctgctaccaaggctccagcaaccatgtcttcattctctcttgcagctgaagacttacagtgagaaactggacaaagagcaag

SEQ ID NO: 26240 - DNA, 1117 bp, Homo sapiens
atagtaactctaagatcctgaattccttgagagtgagatgtcttttgaaagatgagagaacctcagagtgatataattgttcagaatttccagttatctcctaggcagagtgggggaagggctgcaggaggagaaggagggctgggagtgcatttgaaccctgcgattcaatctgtagtccaggttgcaagtgtgctacttcacatcagcattgtcgctgctcacttcccacttgtgattgctgaacagacacctctgctgccacctctgtcatgagcagtgtgtagatatttctgttccttggtttccacagagaactatcctcatccagacttgaaaagctgtcttccttgtgattttggtgcttggactatagccgtactatggaaggacctcgctgcaaggtccctacctcgtacttcctggacgatttggaagctaggatcttcaaagacgtctccgaaaccaacccagtatccctacttttctagaattcacatgacatttaccaatttaaaattcttactctgtagcgatatgtagcacttaatttgccaccttgatgtaaacctgacaaagcttttcaattctggtctggactaacctcttcagttattgtcagaatatttcaaaagggcaggcacatgaatgtcaattagaataatttttttctcattgttcataaagacgcctgccttgcctttggacagattagcttcctttacattgctctgtgactgggttccttacggattagatggcaagctctgcgggttgggagccctctgtgatattttaatgccgcagagcccctggcatgaagtttgccaattcgtggatctgtctttgtataataatctgaaagagattaaaggcaaaatatcttgatatcagctttctaagacatttatatgccttaggatataaactaagtgacttataaaggagctttttatactaaatactaaatcaagtatttgttgagcccttttcatgttatagaaaggtggagggtgtgatttaagtcagtaataagactatcctcaaatgaaaacagcagccaacattgctctgggcatatcattcctgcagtcgtcgttcctttttgcagatggga

SEQ ID NO: 26241 - DNA, 1030 bp, Homo sapiens
ttagctaaagtaatcattttttgcttctcttgggaatttaccattttgaactagactaatattattcggtgacatttaaatctgtttcctctaaaaatagaagttgtgaatatctgtcagttattagaaaacactaaatttacactagaagtcatcttaatccacaatgtggttttgaaagcacgttcttaatctgaaaatgttgaacaaattagattggcactttagccctcactgcaatgtaaacacaaatggaatatttgtagatggttgatgttctttgacagatgttgcattttggcagcagaaatctgttaagatgctctacggtttaaattttttctgtcaaggatttagtataaagccccttttcctcttctccttctgtctgactttgtctcatcattcaaaatccaccttggtcatctagttttctttctcatcgtatctctcagtgaatgaaccattagatgagacctgctggtttacggacctgttcctgtcttcatcagtctgagttctcttggctttgagaaacaaaaaatttagattgcttaataaaaagtgtgtttgaaaaacagagcggtcagctttctgtttactaggttaggaactctcatttcagctcagtaataaactgttttatctgactaaaaataacttcccattaaacaaagcagcttcccatagcactgtctctaaactcagaggcaaacagaggaacttacaagtttataagtactgtgcgccagtaaatgtacatttacaggactccacacaggactaagaattattacctaccaataaaagagagcagtttgaaagctcatgtttccttggaacatatactactataacagatatggtagaggtacctatagagatttcaagatatttttctgtgcattgcgagcattttctctctgtatggttgtctgaatcacgggtctagtaaaagagcagaatgagaaagaacttttccctctcggtgttacataaacgatggctggccagttggtgagcccacccc

SEQ ID NO: 26242 - DNA, 1047 bp, Homo sapiens
tcttttgtactaatgctgttgtaataagaatgaaaaattaggaaatggagaaaaacaaaaactaaatcacccatgataccacgagccagggataaccactgatactgcaagcaggaaataaagagttgtgaatatcagtatggagaatcagagattgcaaaaaaaaaatggcattgtactatatattctgttttgttgcttgctcatttgttgcttgctcattttgctcagtagtatattgaggatatctttccatgccaataaagatacctccatagcatttttagtggctgtagattattaattgtgtggaactagttcaactatagtttgtatctctgttttttttttttttcttcacttggccattatgtaggacatcctcatagctaaatttattcttttatttctaattatttacttaggatttattccatgaagtggaattggtcaagattatacctaaggcttttaatacttcttgccagattgccaggcagaaaggccgctgtgaactttatcatccgagcttatgatgggcgtgttctgtttttgtcttggctttatttttcttccttcaggagattattcccagtacctgctttcttctttgaagtgcattactttcttctccctatctcctttgcacagaatagctggctgctttgtagaaggcctgcccaacaggaggtggtattttcaaaggacataaggagtggaaactaccaccttccactttcacatcataatcataatcagctcctctgtctcatgtactgtgctgtgacacagcttcctcctctgagatgtcagccctccatagccatgaagtgtctgtcctgtgaagtgaggtcttttactccctcttaaccttgaataacaggtgcccacacagttttatccagacccaaaagatacattcatttactatttgtcagcatttttttggtagtttagacttttgtatgagaatagaggggacagagaaaagacttcttagagcttccagactagttggaaagaagtgcactgtggaacttaccggat

SEQ ID NO: 26243 - DNA, 1101 bp, Homo sapiens
tccgccgctgcaggtccgcgcaccaggaagctgaagaagaagaagaacgagaaggaggacaagcggccgcggaccgcgttcacggccgagcagctgcagagactcaaggcggagttccaggcaaaccgctacatcacggagcagcggcggcagaccctggcccaggaactcagcctcaacgagtcccagatcaagatctggttccagaacaagcgcgccaagatcaagaaagccacaggcatcaagaacggcctggcgctgcacctcatggcccagggactgtacaaccactccaccaccacggtccaggacaaagacgagagcgagtagccgccacaggccggggccgcgcccgcgccccctcccggcaccgccgccgtcgtctcccggcccctcgctgggggagaaagcatctgctccaaggagggagggagcgcagggaaaagagcgagagagacagaaagagagcctcagaatggacaatgacgttgaaacgcagcatttttgaaaagggagaaagactcggacaggtgctatcgaaaaataagatccattctctattcccagtataagggacgaaactgcgaactccttaaagctctatctagccaaaccgcttacgaccttgtatatatttaatttcaggtaaggaaaacacatacgtgtagcgatctctatttgctggacatttttattaatctcctttattattattgttataattattataattattataattattttatcccctcccccaccgcctcgctgcccccgcccagtttcgttttcgttgcctttttcatttgaatgtcattgcttctccggtgcctcccgacccgcatcgccggccctggtttctctgggacttttctttgtgtgcgagagtgtgtttcctttcgtgtctgcccacctcttctcccccacctcccgggtcccttctgtcggtctgtctgttctgcccccctttcgttttccggagacttgttgagaaatacgaccccacagactgcgagactgaaccgccgctacaagccaaagattttattatgttcagaaacctgtagtctgaaataaagtgtacactgtgctcacgagcgc

SEQ ID NO: 26244 - DNA, 1019 bp, Homo sapiens
tgagacatcctggccgacttgcaagaactccagggagacagcggaggaggcgaggaccaggaagcgatcgcccagattgcactggcaagcgcctttagaggcgcggtccactcgccccaaccctgctcgggcgagcaccggaaagccaatcagaagccagctatgcgctaggggcgtgcccagcccccgccgcggcgctagccccgcccgagcccacgtgggaccgcttgcgcaaacgccgggagtagccgaaggggacgccgggaacaggtggggacaacggaagtagggtgcttagttttgctgccgggagttggtcgagagttgggttcagtcctggcccgttgtggggacggcacgcgggggaaggggaggggacggagaccgaagaacggaggtccttatgtttcttttctttccttaaatcttgcccggcctgaagaggccggaagttgcatctctggacaagtaaactctgagacctgggaatggcgggcgggacccgctcctcccttggggtctagaggagacccccggagatggtccctgatgagcagcgtgatggtggaaagctggactggtctcccgaaaggcgaagccgaggcttcttcctctgaacttttggcacgttctttgacttgcttgtggccgtagtgtcaggcctgtattgcacatttatgtctgtggtgcatttctccatctggtgcgttaaaggcagggacggtgtcttatttgtcttgatttaacaaacttggacgggacgaagtgctcagcaaatatttgttaaatgaatggctgtttattgaactcctgttgggtaacttgcactgttctagaccttggcagacagcagtgaacaaagcgggtgaatccctgcaatcttggaacttacaagtagggacagtagtttatacaataagttaaatatagagtactttaggggcttagagagttggaagtttatagttttaaatggaggagggggagtattgagggaaggtgacatttgagaaagttcc

SEQ ID NO: 26245 - DNA, 1069 bp, Homo sapiens
ttcgatctgtgaggctgcgagcacttcagtgcctgggatttacctaactgccatgaaacactgattatccagcattcagcatgtgtcagattctgtaactatttctcctgtgatgtatcagtcagcttttgctgcaaaacagcatcagaaatctcagtggtctacaactagattcccattcttgggtagtctacaagttggcttctaggttatgctccaggctgggggtctgatcacgtctgctccacaacatgtcccgtattctgggtccctggttgaagcagcagcttaccttgggccgtgttctttctcatggcagaagcacaggaggccaagccctaccttgcaagcacaaatacagcccctgctcactttctgttggccacaacacatggccatgcctgacctctgtggggtgaggcagtgcatggccaaggaacaagcacagtccacacagggggctgtcactccgtgacctcagtattacaaaatggttctcaaggagtcgcaaaatgtgtggcagatcatccatgatttgtttcccgtgtgctttacgaatatcctgaaatttttaaaagctgtttccattagaagggatctgttggggatttgaggtgagatgagaaagaccctgcattccagcccctcagttagcagtggtgaggccggagtactccacacgggacagttttaggaaagtgctggaatccaaagtttctccggagggctatgcaaggcgctttggaaaggcgaagcctgggcgcagggagcccagccatgtaggtagaagcagcagacggtgagggaggccatccccacctggccctgccagggccctgactcagtgaaggaagctgttgggatacaggtcattcagccgggcaggaaagatgggatgaagcccagcaagttcacagggatccgggaagttgtgtggctggaaacccaggcagggctgcaccacagggaccatttgctggagatgcagcacttgccacagccaccaccactgacagcatgacacccacaaaaagggagcctccagctgcacccctgctgctgcgagtac

SEQ ID NO: 26246 - DNA, 1028 bp, Homo sapiens
cgcccacagagaccctggagtttcctcttacaggcccagcgaggaacgcagcatccctttagcacatggcttctacctgggcttctaatgcacacgagcttcaagtccaggcaccacaggctgctgctgccctgctgggggcatcttttcacctgcggcacccgctcagcttctggcagaagcatcggcatggatgtccgtcctggctgtcggtcctcggcgctactctataagaatgattgggatttgcacattttagcttttttttctcccaagcacattacagttgcccacaggtgctcacgtctggattctccttaaaaatcaaagcaagagtctctccctgctggaggcctggcctcggatcttcctgttgagggcttgaagccatttttctctttgcaatggcttcctgttagagaaacattttcatttcacctcccttttcttcccctgcttcattccctacagtcgcctgtcactattttccatctcttcaatctggactgattatttcctgaagatagtagccaacgatagagctcagtgtcctgtgtggcctcagggagatgtggagggttgcatgagcttgcatcattctcagggcatgagggcaatccatgtccaagcaggccccagccccacagtccccagcccctgtaggccctgtctgccggggccgctctagcaggtgtttgcagagaaggagtggacccacctcctgggcaggaattgccttgagtaaccagccctggtgctcattccatcttcctcttgtttcacattcaagtgaatttggagcctgctgagaaagttccatcttctggggctggagacccaagagggagttgctttagacagggccctttagaaagctgggtgtgtgctgatcttcccccagaccgaaggcacgggcctgtggaagacccatgcttggaacggatgtgggaataaatgcccacaggtagaaccataaacctggtggcaaccctgggagacagggatggtgccatttctcacagagcctg

SEQ ID NO: 26247 - DNA, 1046 bp, Homo sapiens
gcatttctaacaggttcccagcactgctgctggggctgatagggggctgcacttggagtaccacttttcttttcttttcttttctttttttttttgagacagagtcttgcactgtcacccaggctggagtgcggtggcgcgatcttggctcactgcaagctccgcctcccaggttcatgccattctcctgcctcagcctcccgagtagctgggactacaggtgcccaccaacacgtccggctaattttttgtatttttagtagagatgggttctcaccgtgatagccaggatggtctcgatctcctgacctcgtgatccgcccacctcggcctcccaaagttctgggattacaggtgtgagccaccgcgcccggccgagtaccacttttctaaggtttttcctagaatcccctagacctgcctttccgtggcccacgctcccctttaaaatcaccctgcagaccactctgtgtttaacaattgagccaggcgaagcaatggctgccgtctgacattgaggtcattgtcctttggcctctgaaatcaaaagtgatgtttggtctttcgcttcatgtggcatgtggagctcactctttgggggaactgggtgtttcaggtggtgagagcggctgaggaggctgcgtccacactggccagttccatccacccggagcagtgcatcaaggtgctctgccccatcatccagacggccgactaccccatcaaccttgctgccatcaagatgcagaccaaagtcgtcgagaggatcgcaaaggagtcattgctgcagctccttgtcgacatcatcccaggcttgctgcaggtaggccctcgtgttggtggggcctgcccccggcctgtgtggggttgcctaacttgaagtaatgtaagggctttgtgctcctccttcactggcagggacgggtaggaaaaaccaggcaggacctgtgaggccgtgtggcagggacacttcacagcctcctctgtcggcttccagctcaccccctctcctgaatgcactaagaatgctttcctggcagctcaca

SEQ ID NO: 26248 - DNA, 1044 bp, Homo sapiens
aggcattactgagaagattaaatttcataaagtatattaaaacttagacattttatttgcagttgcagctctgctattattgtttgaggattgttttggttttgctgctgctgttatttatggaataaactgagtaccagaattttttctaagatttaggaagccaggtgatcaatcaaagggaatgtggtaatggcagtagaattttaattatatgtttacattttggaatttaaaatgcctgtatgtttgcttatcacatgtgactctctttgtcaaatgaagcaacagatttagcccccaaaccttgttttgagaagtgtgggcaaaaaggcgtggcgaagaaacctagaagtataaagatgctgttggctagagcagggagaagtattaatacataaattgccttcaaaagatgagatatctagttgacttttaaaaaaatatgattataaaggcagcatgcctctagtctgaaagctatgggttttactatcaaatagctggatctcagcttaactgtgactgcgagtctctttcaagtcttttttgttgttgttgagacagtctcgctctgttggccaggctggagtacagtggcacgatctcggctcactgcaacctccacctcccaggttccagcgattctcctgcctcagcctcctgggtagctgggattacaggcacatgccaccacacccagctaatttttgtatttttagtggagacgggagtttcaccatgttggccaggctggtctcaaactcctgacctcagttgatctgcccaccttggcctcccaaagtgctgggattattacaggtgtgagccaccacgcccggactctttcaagtcttatttggacatcttccatttcatcacctgtagcaagaatactactttcaagattattaagtaaaagacctagtgatactactgagggttaaaactgacagctaatgttattattctgattcttccttactttcaatcatgtgtgtcttgctgattttatctaagaagccaaatgcttttatagctaac

SEQ ID NO: 26249 - DNA, 1035 bp, Homo sapiens
tattggttctttcaggtcaaagttgcaatcctgaaatacattgagtctctggccagacagatggatccaacagattttgtaaactctagtgagacaaggcttgctgtttctagaatcataacctggacaacagaaccaaagagttcagacgtgagaaaggtatgtccaagagaaccgacgtgtaattacagattgttcctgggcttgtgttagagaaatgtatttagaaacttgaaaaccgtgccacccacccacaaacctatatcactaaggctctgctgttgcccttttctctctccagctctgcccagttttgaatataaaaatgaaaatctgaaatcttgcatgatgggcttatggtttccccaggcatctactttatatattttctaatatgaaatcactagtaaattagtgtcttttacacagatgtttgttttccttatatcagtttgtaatacgtactttgaagataaaattgcagatctagggctagctggctacagggtccctgatcgtaaaatgtggttgaaaagtttgataagacgtaatagatgcttaaaaaagagcaaacgtctttcaatacgtagcacataagtatatgtgtgatatgtgagtatgtgcttttgtaatggaatgttacttaagtattgcctggtacgggctgaaacttattctatatttgcatattacctcgattaggacctgtttgggacaaactagctttgatcataatacccactccctgtggacatgcacattagaatatttgaactaggacttactgtccttattattctaatcagaacattacagataatttcgaatgattagcctgatgctccaaaaacctcaacttattttaatactagctcaagccaaatataaatagaacgttggatatattgccagaaatcactttgttcatttgctgtttgaatgagcttcaacacttgttttcagttattttggattatatagtgttactttgcaaagctttatctccactggcgtgctactttccatgcctgcccc

SEQ ID NO: 26250 - DNA, 1056 bp, Homo sapiens
aacctacatatcaggtactgcttaaaaactatttcagtctgaactatcaagatagtgatgtgcttgtacaaaatgtatagtttgcttcagtcttaagatattttaccaacttccttatttagggaaagtgataattttataatattctttgccaatttagttttaatttttgtgaatcttgagaaagggatattttcctttttttgcaagctggtaaaaattgccaggtaatctttgctatttaataccacatgtaccatagagatgcacatttcataaagtaacatggaccttaaaaattatattgaagaatttgaggtattgatattttatgactgaatgtgagagcgttaacatgtacagaatactctagtagtacagataaaatgtagcactgcttagtattattttgttaaacctataaattttctgtggtataatcactgtgaatttttcagagtaatgaatggaagcatattatcttttgtttttcctgaggttaacgaaaagccgtatgttgcatgaaactgtagtcaataagttaatgttttgaaccaagtctttatttcataattatttctaaaagttgttttctatccacatgaggacagaatttagcatgtatttccctcaggttgatgaagtaatatgctcactaagaatacttgttaataaaatggtactataatgtcagattgtaaatttgaggttgctcttaactgttactgccaccaccagcaccacccaacactactaaccaatgtttaagttgctttataatctcttttaatccactcagtaactcccaagaggtaggtaccattaaccattattagcaccattttacaaacaagatactgagacacagatagatttagtactttgcccaaggtcagtcctatggctagttgtgatccaacgagcatttacaattgcattactgagctggtactcataaccagtgtactgtaactgcctctccaaggaagatcattgaacttaatacagctaaattcaaacgattacacaagtactaataattaggatatggccagg

SEQ ID NO: 26251 - DNA, 1051 bp, Homo sapiens
aatgctaagaaaattgttatagttctacttctgctcttctagcagtgacacctaaaatttttaacataatcagctcttacagaattaaaaaaacaaaataagaataaacacctttgtgacatttgtagttatttactgtggaataaggaggctattccaccagtaattcttctaagtatattcttttatgatattcaattgtcttttatgctcctacatttaaaaaaattactaccaccaaataaaaatttatttttatataaaattgtgtattttagccaaattaatgtgtaaaatctggcttttgaaagtattatagttcattcctacatttacatctattattcattgtcattttgcttcacttttagctggcagccggtcaagttccccaggaaaattgttgggaagtggttatggtggacttactgggggctcctcacgaggcccacctgtgacaccgtcttcagaaaagcgaagcaagattcccaggagccagggatgtagccgggaaacaagtccaaaccgaataggattaggtaaggattctcaaagatcttggaataccattcccagcttggtcatagttttgattataatctaatgactatgtctaatgtaggaaatatagatctattttttgaactgaggatgtcactttgcctgggtgtgctttatacagattatggcatattgaggtttcagttagaaaaatatatgggacttaacccttcaaattgatgggaaggaattatgtcattgtaggcttttgtgttttgcagtcattgtacaaagcactggaattggggaaatagcagggtgtttcccccacaattagaagcagtgttgcttttcattttccttttactgattagcactaagtagacattaacctatatgaatttttcaaaaacagcatttagggtccacatttattttaattctgatcttctctaatctaattggtgaaacttatggtgaaaaaatatgcatagttacttttgacatagatttgtttaagcatgaaagctaggaattgattaaaaccaat

SEQ ID NO: 26252 - DNA, 1062 bp, Homo sapiens
tttagttgagacagtctctccatgttgcccaggctggtctctaactcctagcctcaagtaatccacctgcctcagcctcccaaagtgctgggcttacaggtgtgagccactgcacccagcaaaatttcagtttttgaaaatactaatcaagtaggcaaacttttgaaaaatgtcaattgaaatacagaaaaggtacaaattaactgttaagaataataaattaggcataaatgtggatcagtagagttttaaaggtaataggaagccaggtacaatggctcacacctataatctgagcactttgggaggccaaggtgagaggattgcttgaggccaggagtttgagaccagcctgggcaacatagtgagacccccatctctacagaaaatttaaaaattaatatggcgtggtgacatacacctgtagtcccagctgctcccagctactagaaggctaaggtgggaggatagcttgaacctgggaagtgaggcatcagtgagctgtgatcgcaccattccactccagcctaggcagcagagctagactctgtatcaaagaaaaaataatacttttttgaaattaaggtaagataaacctatgacagctttgttaacaattcaaaaacaagttgtacaagtttcaagaaaacccaaaactgtttcttcaaagaaacaagcaatgtgagtagttttaagactgctcattaaacaatttgaatcagtagttaaaagttcattgttctattcccaccctgccaaaataaacttaataaaaatggaaaagatactccaaaaattcctgccatgctcagatggtttcgcacacaagttgtatcaaagactggataattgcattgtcagtttatcagtggagatgcaaaaaaaaataataataaaaacattaggtaattccagtcttacgtaaactcagagaataggaaaagagggaatacttccctcactggttttatgcagctagtatgaccagagtacctacaaacattgtgtatgtgagtgtgtatgtcatgaccacgtaggtttagcccaggtttaatttttctt

SEQ ID NO: 26253 - DNA, 1033 bp, Homo sapiens
tgtgattgtgataggaacattattaatttgaaagatatgtgttctggaacatttgctcagtcagtcttgtttttatggaaatacctcatacacccataacaattgagaagaaattcattaagaactctctttttaaaatcgtttttaactattgcagcattatgtaggagtgttgtccatatgtaaccattgagcaaaggagaagtaacaactcttcctcctatgctgaattagttctgttaattttagtttagtttttcagtacttacctatgctttagtatattagatccacctttagtatttgtaattagtatttgtttcattgttggaaaaagtgagtaaaaatcagcctcagtatttttgtttttctgtctgtattatggagtgtttgaatatggctggtatagacttcccccagtgctagtaaaagccctcacgtcttttggtatgataatatggagctgacccttcagaagcactgatgataagttttcagtccagtattaacctcttcaaagaacgagactggagtattcaaattctctgtttcctgagaattctacctcaacttcccttattttgtccccaaacaaaaacaccaaaaaattgaaatatagcacaatcctagtgagaatttgttacagttgctacctaggttgacacatgacatctttgcaaaagtgtagcattaaagctgatgatccttttccaaacttctagagtccagacacatgagggaagacatggagtacataggcctggactcaggtaccatgctcgacagcttttgctgctggacgtgtagttgggataggcattgctagagcaagcttctctgagcttcttacttggctctgccttttgggtaactctttagtattttagcttctagttcctcctctctgccctgttctgctggtactttcttccaagaaaaaggaactcttaagaggatgagagttggctaaaacaaaaaataatctttctttcaactgtggcactaccctgggttgcccgtctgtgttttattt

SEQ ID NO: 26254 - DNA, 1026 bp, Homo sapiens
ggcgtgagccaccgtacccagctcatgggtctttaaaatacaaaatttgaaggaaaaacacacacacacaattggaaggccctcttttctatcttaaaacaatttttggagtctttagtgtacttggatttctttatacagaaatgaaaatggtgtttgagcttggcttactatattcagttatctgcagttaggccaggctgtgataacctgtgtgcatatgctggtggccatgagggtagacccacagggtaaaccctttccaaagagaaagagtacactttttgtagggccccttttcctgccaaaacagttagccttgccctgctgcttagtcaaaggcattcttttgcttcattgttcaaggcaaattggaaccttccttctacctttctctgcctcctactcttaaattccatgtccatgacagagatgcctgagtaatcctctcccatgtagatgaggttatgcctttggtaaaaggcctacagcatagtgtgatttggccttctctgaaccaccatgtccaaaatgtctctcaccaccctctgcctttcccctcactttgttacagaacactgttctttttcttctttgcctttatcacagatttgtctttacaaatgtcatacccctttgtactggaaagtctctttgggcagttagcatgaatgttttattcatactgtattcccaggaactagtaaagtgcctgaaatgtagtagatcctcatcctcaatgaataaacaaaagagggagatagttatccaagtcaggtggcaactagcctgctcctcctgtaaactatcttggctgttatttcttgaagtaaattaatgctttacttatgaactcagagcttaagaaagagaatctgttctctctcattctccctttgttcctttcttgtccccttttctcccacctcttccccaccatgttctcttgtatctttccattgtttcctcccactgccatcaagaagtccatagtcaactggaagataatcctggcctccatatttg

SEQ ID NO: 26255 - DNA, 1056 bp, Homo sapiens
agagcaattccatattttggcctggacaaatggtggtaggaccaactgaagtcaggaacctggaggggagagcaggttttgagggtaagatgattataggtgattatagttttggacacttggacatagaattttgtttgtacgtgagtttgattcaggtaggtttgtatcttggagtagacttgagattgctattagaggattaagtattattggaacatggctatttatgttaaattgtcatcttctttctctttgtcttcgtatgtagcggtatggtatttgcctctctagctaaagagggttctggagaaagagatcattaaagcagagatggaagatttgaaggattatttgcacaaatggcaaatagctcttagtgtaattactttaaagtatgagagaacattctggtaggaaaccttttccaaatttggctctaagtttttccaactgacttacttttgtgcctatgtagtgattgtcaaaaagaattgggtcaggattgctacagtgataattaaaatgacatttccaaaagagcacagggtgtagatctgatatctgtgggatttgggttctgacatttataactttcagggcaagttggaaggtaaaataagtactgtgatcaaagggagaaatgaacatttaatcaatgaaaggatatatggtgactcttatgtaatatgacactcagagattatctaaggtgttgaaattttagttgttgacttctggaagtctcagttttcagtcatcagtttgcaaactttattcacatcccttagtgttgcttaaaactttcccctttgccatgaaataataaaaatgtaagtcagaatatgcccacttaaggcctgcattgtaccttttcagttcctttttgagggataaatgatgatttcaatgtcctactattctctaacctattaccaggaagaagcttgtggttgtcattattactataattatagtcacccagtctcgttcattactgcctttgtgtctttgccattcctaccttgcccgtttcttgccccagggagcttgcac

SEQ ID NO: 26256 - DNA, 1033 bp, Homo sapiens
attaaggaatgtacatattgaagtttccagttaatactgttgaattatctatttctctcttcagttgtcactttttgcttcctgtattttgggctctgttcttaggtgcatatatgtttataattgttatgatcccctgagcactgactcttttactattgtaaaatgtctgtctttgtgcacagagagaagttttgtcttaaggtctgtgttacttgttatcactataaccattctagctctcttttgtgtactgtttgcatgaaatatctttttccatcctttacttttcaaccactttgtgactttgaatcttaagtgtctcttagactgggtgtggtggcatgtacccccagttccagctactggggaagctgaggcaggaggatgacttaagctctagttcagccttggcaacctagtgaaaccccatcttttataaaaaaaataaatacagtgagtctcttgtagacactataaagttgagtcttatttgtttatgcagtctgactttttttaactttccattggtttaatctatttatatttaatgtagtactggcaaggtagaatttatgtctgcaggtgtgctatttatgttctatatgtcatgacttgtttctttgttcctctgttactgcgttattttgtgttaaatagatattttctagtgtactactataacttgctgtttattttagttttttggggggaattattcgcagttgctctggggcttgcaattaacatcttaactttaaacagtctagtttaaattgatactatttaatttcagtattaaaaacttctacttagctctgttttcttctttttttgctattgtcatgcaaattacatctttatacattataagcccaccagtgcatatagttctataattattgctttatgcagtttctttttaagttatgtaggacaagaaaagagctaagaacaaaaaatacttttatactatattttatatttacctatgtagttatttttacttttttttttatttcttcatgtggat

SEQ ID NO: 26257 - DNA, 1100 bp, Homo sapiens
aggtgcaaagacctactgaaacttcgtctcctattgaaacttgacctagactactgggctgactcagcataaggaagttacagaacagttgatgatcggcgtaaagttaaaggggtgaagttctgttgaaatccttcccgtttaatcaccgcaaaaactgaaagaactttacttgcgacactaaaaccacgcgtcttgtgcaccctctactggtttaaccacaaagtactagtttatttacgaattactgctgtttgaactgataagtctatgaaaacaggttttcatttttccaaaaattgcaccaaaataaagcaaaagctctagttgatgcgggtgtgttgttcaggcgttagcagtactgccctcactatgcgctcattggacagtagcgcaaccccaagaaaaggatggttataatagaaagtccctgggctgcaagcaggaagcgccaatacctggtagggttgtggtaattaattcgtgagcctcgccctagtcggtctggtagctagcttacctccagcctccacagctttcgacgacaccccaattctttgttttctgaggctcccgaagggtcgcaaaagcggcggctcggttttacccagaagaccgcgcgtcggccgctcgaaaatttgcatacgcttttctcgccggggcggggctggcgggggcgggaccgcggcgcgctcttgaactccacccgcagctaacccgggtttggctacgctgtattgccttttatttcgtttctcctcaccgagtattttccattatagctgtacatagctctttttgtggaagatcatccttcttcgtgctaatctctttggtcctccagtcggcatgcgtctggactctcggactgcgtctgggccggaaatgtctaggcctccccggagcgggtgggcgggagcgctgccccgcaggccggctgctaacaggctcccggtgtttcccgctgcaggtggttctgctgggcatggacatcctgtccgccctggtgacccggctgcaggatcggttcaaggcgcagatcggcacaggtgagctgcggcacttgtggagcggacccggccccttcagacccccagcct

SEQ ID NO: 26258 - DNA, 1045 bp, Homo sapiens
cctggaggacctgccgatgaggagatgtgggaatgggtacccacataaccgtctggccacttttctgtagggctgctgcaatatgttgggggtccactccagtcccagttgccttggattttccagtacctggaggtatcaacagtgaaggctgcaaaacagcagagatagtggcctgcccctccctctgggagctctgtcccaggaaggcacagatctgttgccagcccaaaggcacctgtaggtggtggttggagacctcagttgggagggcccatcccctgaagaggaatgggatcagggacctgcttaaaacagcagtctgacctctttttcatagagcagccatgctatgctcagggtctgcccctagttgctttgggcacttgaaacccaaagatggaattgcagctccttttgccctgaagcccagaaagcctgggtatctaaggctctcgggtctctgtttgcgcctgagaaactactctgccaagattccatgtagctctgtgtcagactgaagaccctggtggagtgggttcatgaggcagtctcctgacccgagggttgtaaaaaggtctgtggaagaagcgtggttcccggggtcccatattcactcactgcttccctgaatgggggaggttcccctggctccatttcactcccaagtgggccaccgtcctgccttgcttttctccgttttccatgggtggagttgtttccttgattggtcccaatgcgtgtacctggatgtttaattgaaggtgctgtgtttactcgccccttcgctcctctcgtgagagctgcgcacactagatgcttctagtcagccatcttggccacccccctacactttgatttctatatttcatttctaggtagatacctaggaatggaattgcagtcatagggtacgtgtgtgtttcgtttttaaagaaactgccaagttatttccaatgtaactgaattttttagctgttccttgtttttactttttctgggtataccctgagaggtagtctcatggctaaagtatagagatgtg

SEQ ID NO: 26259 - DNA, 1035 bp, Homo sapiens
tgtcacccaggctggagtgcagtggcacaatcttggctcactgcaagctccacctcccaggttcacgccattctcctgcctcagcctcctgagtagctgggactacaggcacccgccaccacgcctggctaatttttttgcatttttaatagagacggggtttcaccatgttagccaggatggtctcgatctcctgacctcatgatctgcccgcctctgcctcccacagtgctgggattacaggcgtgagccaccacgccaggcctttttttttttttttttgcagaggattgttttatgtccaattatgtggttgattttagagtatgtgccatgtgatgatctgaagcatatatattctgttatttttgggtggagagttctgtagagatttatcagatccattggtctagtgttgagttccggtcttgaatatctttataaattttctgccttgatgatctgtctaatattgtcagtagagtgttgacatctcccagtattattttgtgggagtgtaaatctctttgaaggtctctaagaactttctttatgaatctgggtgctcttgtgttggggtgcatatatgtatttaggatagttaggtcgtcttgttgaattgaaccctttaccattatgtaatgcccatctttgtcttttttgatctttgttgttttaaagtctctttgtctgaaattaggattgcaaccctggcttttttctgttttccatttgcttagtagattttcctccatccatttagtttgagcctatgggtgtcattgcatgtgagatcagtttcttgaagacagcataccattgagtcttgcttttttatccagcttgccactctgtgccttttatgtgggggcatttagcccatttacattcaaggttagttttatatatgtgtatttaatcctgtcattgtgttcttagctggttattatgctgtcttgtttgtgtggctgctttatagtatcgctggtctgcatatttaacactggtttgtgtttttgcatttgttggtagtga

SEQ ID NO: 26260 - DNA, 1059 bp, Homo sapiens
tattgtgaatagtgctgcaattaacatacacatgcatgtgtctttatggtagaatgatttatattcctttgggtatatacccagtaatgggattgctaggtcgaatggtagttctgcttctagctctttgaggaattgccagactgctctccacagtggtttaactaatttacactcccaccaacagtgtgttaagtgttcccttttctctgcaacctcaccagcgtctgttactttttgactttttaatagccattctgactgtgtgagatggtatctcattgtggttttgatttgcatttctctaatgatcagtgatgttgagctttttttcatatgcctacatgttggctgcatgtatgtcttcttttgaaaagtgtctgttcatgtcctttgcctgtattttaatggggttgttttttctcttgtaaatttgttaaagtttcttatagatgctggatattagacctttgtcagatgcgtggtttgcaaatattttctcccattctgtaggttgtctatttactctgttgataatttcttttgctgtgcagaagctcttaagtttaattcgatcccatttgtaaatttttgcttttgttgcgattgcttttggtgtctttgtcatgaaaactttgcccattcctgtgtccaggatggtattgcttaggttgtcttccagggtttttatagttttgggtttgacatttaagtctttaattcatcatgacttgatttttatgtatggtgtaaggcacggttccagctttaatcttctgcagatggctagccagttatctcagcaccatttattgaataggaagttttttccccattgcttgtttctgtcagcttgttgaagatcagatggtcataggtgtgcagcctatttctgggctttctattctattccattggtctatgtgcctgtttttgtatgagtagcatgctgttttggttactgtagtatagtttgaactcaggtaatgtgatgccttcagccttgttctttttgcataggattgccttgactatttgggctttttttctggttccata

SEQ ID NO: 26261 - DNA, 1053 bp, Homo sapiens
gttggaaaatttttaaataatacatctaggatttaaaatttttctttctttttaaagaacaggggctaggtgcagtgtctcactcctgtaatcccagcactttgggaagctgaggtgggtggatcacttcaggtcaggcatttgagaccagcctggccaacacggtgaaaccccatctctattaaaaatacaaaaattagctgggcgtggtggcgtgtgcctggaatcccagctacttgggtggctgaggcaggagaattgcttgaactgggaggctgaggttgcagtgagccgagatcatgccactgcattccagcctggatgacagaaggagactatgtctcaaaaaaagaaaaaaagaatagggtcctcaaaaacgtcaaagtacatgtcagctatgtttgtattatgtatgtgtttgtttctttctgcccatgtctgttatctttaactaaaggagcaagtagagtggtcaggttgagtgtggcagaatgggaagccatccagaagtcactattttttcccccaagtagctgtgctcttgagaaaccttaagtatcttggttgaaagactttttttttttttttttgagatggagtcttgctctgttgctcaggctggagtgctgtggcacgatctcggctcactgcaaccgcctctgcctcctgggttcaagcgattctcctggctcagtctcctgagcagctgggactacaggtacgcacgaccgtgcccagctaattttgtatttttagtagagatggtgtttcaccatgttggccaggatggtctcgatctcttgacctcgtgatctgcccgcttcggcctcccaaagtgctgggataaaggcagtagccaccatgcctggccaaaagacttatttttatagactgagctcttgattgctttctataaggaaaattgatctgttttttgttttttcctatctccaaaattagatataccctgtttagggcaggggatgcggtcctagaaatgggaacgctggcaaaggagagcaagtatacttagtctctgtggagctgtgttct

SEQ ID NO: 26262 - DNA, 1050 bp, Homo sapiens
ccagcctctgctatcgtctcttctactttttacttatgagattaactgttatttagcttcacatatgagtgagaacatgtagtgtttaactttctgttcctggcttatttcacttaacataatgccctctagttccatccatgttgctgtgaaggacgggattttattctttttcatggctaattaatattccattgaatataccacattttctttatccattctctgttgttggacatgtaggttgattctttgctgttgtgaatagtgctgcagtgaacatgggggagcagatatctcttccatattctgatttcttttcacttgaataaattcccactagtgggattgctggatcctatggtagttctatttatagttttttatggaacttccatactgttttccatagcagctgtactagtttatgttcccaccagcagtgtataagagttcccttttctctgctacatcctcatcagcatttattattttttgtctttttgataatagccatcctaacaggggtgagttgatacctcattgtggttttgatttgcatttccctcatgattagtgatgtcgaacattttttcatatatttgttggccattggtatgtcttcctttgagaaatgtctgttcagattatttgtccatttttaaaattggatatgtatatatatataattttttttttctgttgagatgtttgagttccttgtttattctggatattaatcccgtttggctggtccaatggtaatgagttatcagaatttaacatagtgtcactaaagttggtatacaactccccactgctaaattttactggcttaaaaaaaaagtctcctgtcagaggagtaatttgcaaatatcttctcccattctgtagcttgtctttttactctcttgtttcttggttgccctgaagctttttagtttaatatcatcccatttgttcatttttggttttgtttcttgtgcttttgaggtcttatttataaaatattttcccagactaatgtcctgaaacatttcttaaatgttt

SEQ ID NO: 26263 - DNA, 1044 bp, Homo sapiens
tgatcatcagtgtcacactgcaggcatctgtccctggacaggtcttggttgccagaaatgtttttagattactactacagtctgctccctccctttcacgtattgaccttagttatacttcctgaaggaacctgaattaagtctgtttcttcttcacataatagcacttcatatttcccatgacagatatcacacttctagaattattgattaatttacttattaaactctctcttgaattgagcatcaggtaccaagagggtacagttgaagagacatccatggcccctgcacttcaggggcttgcagtctagttagggagacaataacatgaatcgatggctgattatagtgaaggtatgcaaacagccctaaatggttagtcctttcctggtttgatatggctcaccatgctttctttaggcaactcttgttttttttttttttgttttttttttgagacagttttgctctgttgatcaagctggagtgcagtggcatggtcatggctcactgcaaccttgaccttctggacttaatcaatcctcctgcttcagccttttgagtagctgggactacaggcatgcaccaccacacctggctaattttctaaattttgttttagaagtgttttgtagagatagggcctcaccatgttgcccatgctggtctcgaactgctgggctcaagtgatcctcctgccttggcctaccaaagtgctaggaagcctggcccaactattcccctacaccggcccccaagacggagtcttgctctgtcaccaaggctggagtgcagtggcgtgatgtcagctcactgcagcctccatctcccaggttcaagcaattctcctgcctcagcctcctgagtagcttgggactacaggcgtggtggcacatgcctggctaatttttgttatatttctagtagagacggggttttaccatgttgggccaggctgatctcaaactcctgacctcaggtgatctgcctgcctctgcctcccaaagtgctgggattgcaggtgtgacccactgcccccgg

SEQ ID NO: 26264 - DNA, 1035 bp, Homo sapiens
tatcaaaattaattcagttatctaattaggtttttccctgtttcttttttgtttttttcattgaaacgggtcttgctatgttgcccacagtgttcttgaattcctggggtcaaacgatcctcttgcctcagcctcctaaagtgctgggattactagcatgagccaccaggccagccatttttcgctttcttaatttttaaaaattaatgaggtttttgttgctattatatataatcagacaaaaagctataaaggaaaaaaagaattagtccacagacaagttttggttggagtccgacatttcacaagctgtgtattggccataagatggagtgtcgagtgaatagatgccacagaaatggcctttgaatggcgaatgaatgaagttgacacaagttcagaacgggtttttccattactatcgtttggaatacagtgtggccaaagccaaggcaactggtcactgtgactggaaattgtagccctggctgattgtggtatgagactgctaatatgaattctaaaatctcactttaatgcagcaaagcctatttcttgaagtggttggggagaaagtacagcacatgaaaatgatagagaattcacatttcagtgtatgtaaataaagacttactggagtgcagccacacttatgtgtatatgctgtctgcggctacttttctgctataggaactcagttgtaacagaccatatgtggtcctctgcttagcgctgctgctggatgcactacagattgtgcatttcatcgttggagtagtcccaactcataagaaagcatcagaagagttagatgtttaaaatggagtatcagctgggtgcggtggcccacacctgttaatcccagtactttgggaggccaaggcaggcatatcacctgaggtcaggagttcgagactagcctagccaacatggtgaaacctcatctctactaaaaatacaagaaactgggctgggcacagtgactcacgcctgtaatcctagcactttgggaggctgaggcaggcagatcacgag

SEQ ID NO: 26265 - DNA, 1048 bp, Homo sapiens
tcaagcaattctcctgcctcaccctcatgagtagctgagattacaggtgcgtgccaccatacccggctaattttttgtatttttagtagaaatggggtttcaccatgttggtcagtctggtctcgaactcttgacctcaggtgatccatccacctcagcctccaaaagtgctgggattacaggtgtgagccaccatgactggcctgactaaacttttgaaacattccattgtaggttcttcctaaaacattatgagaccagattctgttatttctattatacagaagaggaagcttcttttaaggagataatctgatttgtttaacttacatgttctgttttaagttactgaagtaaacccactatttaactaaagactgtaatactcttagattgccatttattagccagttgaggtagtgtgtgcctgtagtccttgctactcaggaggctgaggcaacaggatctcctgagcctaggatttcaagtttgcagtgaactgtgattgtaccattgcactccagcctcagcaacagagcaagaccgtatcgctaaaaaagaaaaagattgtcattcagaggtgacactgccagaattaagtctttggtttactgtatgctataagtagataccaaaacactgaccctttcctccatctgtcacagtgaggagagctatgtcttttattatagatcaagaatgaagcttattatggtatggctagtataggtaaaggtctcattcttttcttttttttttttttttttgagatggagtctccctctgttgcccaggctggagtgcagtggcactatctcagctcactgcaacctccgcctcccaggttcaagcgattctcctgcctcagcccccacgagtagctgggactacaggcacacaccaccacacccagctaattttttgtattttttttagtagagatagggtttcatcaccatgttagccaggctggtctcgaactcctgacctcatgatccacccaccttggcctccccaagtgctgggattgtaggcgtgagccactgcg

SEQ ID NO: 26266 - DNA, 1048 bp, Homo sapiens
tgtttcccaccctgaaatctccaccctcttggttactcattttgatggagcacatgttccagtaggttcctgagagaagggatgtaggaggagaagctttggagacttcacatgtttacagatgtctttactcgactttatacttgatcagtagtttggccaggtcctagaactaacattggagcttccagtgcagcagtttggcagtctgatgccctttgcttcctctcagtgtgttgtctgctgtggtggctgtgcgttttccttcccttgaaaactggtaggatcttctctctttttggaaatttgaaagtgatattcttaatgtttttctttcatcgtgatgggcactcagtatatcctttccatctggaaactcgtgtccttcagttctgagaatttctgtttttttgttgttaatcactttctctatgtagtcccttcttggaattttgattcatcagatgttagatcctctgaacagcttctccagtttgcttatcttttttctacttttttatctctttgtcttctaacccttgtattgagacttgttaatttctgagagttctttcctggtaactgttcttgttttgtttgtgaatagagtgtcttctcggaggctttgaaaacttttgaagcttccgtctgtttcctgccatgtctcttttcttcatttttttgtcttaattgtttttacctgtcttttgagtctttctgagttttggtaatccttgactgtattttattggtttaaagtcactgaaaacctggcaggcctttctgtgtggcttagtgggtttgccagcttgtggacctcaccagagtggctgggcagggcctggctatttcttcaggaggttgccaaatgccagtatctctaggacttttctcttgggctggacggtttcttcagtgaggaatttttcagtcccctgggcaccaccgtgtgttaggggaagaggagggcttgtggaatctttgcattcagtcttgccttttccctcatctctgccgggcatccctggagaataagcctccagtgccc

SEQ ID NO: 26267 - DNA, 1044 bp, Homo sapiens
acccagtagcttcactgtcccgtggctgtgggcaaggtaaagtactcctcagctttagtttttcaatctttcttttttctttttgagacagagtcttgctccgttgcccatgctggagtgtagtggcgccatcttggctcaccacaacctccgcctactgggttcaagatattctcctgcctcagcctcccaagtgaccgggattataggcgcccgccaccatgcccggctaattttttgtatttttagtaaagatagggtttcaccatgttggccaggctggtcttgaactcctgacctcatgtgatctacccacctcggcctcccaaagtgctgggattacaggtatgagccaccgtggcatggtggctcagccaggtttttctatctttaaaataacaataacaggcatttctcttctcactggtttgttttgagattttgacatttaaatgagatgtgtgtaaagtgctacagtaggccccagcgcctgccatttctcacatatgtatgtgaagtgggcatgtctcctcattataaagaagaaaacaggctggagcagtgtgtgtcgctcagatgtcagctatgtggactgttacaagacattttcctagattgctgtacttgtgagtcattctgcctgtccctgtccttcatttcaacctgtccttgggtgggattgcactcttgtttcttgtaggtgctggaaagtccctggttggtgtgactgctgcatgcactgtcagaaaacgctgtctggtgctgggcaactcagctgtttctgtggagcagtggaaagcccagttcaagatgtggtccaccattgacgacagccagatctgccggttcacctccgatgccaaggacaagcccatcggctgctccgttgccattagcacctactccatgctgggccacaccaccaaaaggtcctgggaggccgagcgagtcatggagtggctcaagacccaggagtggggcctcatgatcctggatgaagtgcacaccataccaggtaagcaggctggagctgagctgtccact

SEQ ID NO: 26268 - DNA, 1054 bp, Homo sapiens
tccacctggagtaccctctgttggcagaatatgacttccggaatgattctgtcaaccctgatatcaacattgacctaaagcccacagctgtcctcagaccctatcaggagaagagcttgcgaaagatgtttggaaacgggcgtgcacgttcgggggtcattgttcttccctgcggtaagtggtaccagagttaagaaggtggtcaggctgttgtgtctggatctgccagctgcctcccgctttctctctgcacatttccctaaatcacaccttgctgaaaagccaagatcaggtgactccctgattcatgacttgacaaatatttgagtgcttgctgtgtatgggccctggcctggacactgggggtattatggtggctagaacaacacttctgacctcatggagctcactcttctggggaagagacagatggtaagcagatgtgtacaaccttgggtggtgctagagtcagcgaagaaaaattagagcacatgaggggtgagattgtaatgatggcaaggggctgttgcacttagtggggttaggttcttgttcttgaatcagccttaggggttgtgtatttggagactccctagcgcagaaactttggtgttcctggatgactaggatggtgtgcaggtccagggaaaggcaggagtggccccctgggcacctgtttgaccacttatcccagtagtgtcaggtcctagcctagcttcttggccagagaccacagcagactcaccttgggaccccactgaggacttacagaggcaaggtcttcagggaaggggaggttctttttttccaaaactccaagggttattttgatgttgttttccttttttatttcactttacaaattttttttatttacgtttattcctggtaactcacagtgtatttttataataaaggaaggatctctgtttaatggaaaagcttgatttttctcttgatcttcaaatggtggatggtagtaaactcagaagctcctggaatttcattttctctgtacacacatagcgcatccctgaattctcagccccgtttg

SEQ ID NO: 26269 - DNA, 1940 bp, Homo sapiens
acatggagaaataattattgtatagcatttaaatgtgagtagaaatcaccagctgaggagataatgtgcaagaggccataacatcatctaaaaatggggaatagttcaatttttggctgatgtgggagtatcttacttgaaatagtgggaataggcctacagtggtaactcaggctggattgcaaagcattcagaccttactgtgtaagcagtgcatacaaagattcatgttcaaagatgtttattgcagcactatttgcatactctgaattcctttttgtgtgctagtgtgtcatagtttacttttatatccatattgaccccatgctatattgctgttatttttgctttagacagctatcttttgaagtgattaaaaataagagaaaaatgtcttttatatatatcttcagtctattcatttttatagatctttgtatatatccaaaatctgtataaacaaagacagatccaagatctattgggtatcaaattccttctgcctgaaaaactgcattttaacctttcttgtaatataggcatgctggtactgagttcattctgcttttgtttgtttgaaaaaagtctatttctccttcatttttgaaacaggatctcactctgtcactcaggctgtggtgcaatctcaactcattgcaacctctgccttctgggctcaagcaatcctcccacttcaaactcccaagtatctggcactacaggcatgcaccaccatgcccagataatttttgtattttttgtagagagtgggttttgctgtgttgcccaggctggtcttgaactcttgggcttaagctgattcacctgcctcaacctcccaaagtgctgggattacaggtgtgagccactgcacctggcctttctagcactttaaagctattgtcccattgtcttctggcttatatacttcctgaagagaaatctgctataattcttatctttgttcctccatatgtaatatgctttcttcccccacagctgccccagctgctttcaagattttgtctttgattttctacagtgtgaatatgacgtgtctaggtatatttgtgtagggttcccagctggtgttctttcagtttattatatttatagtttgtctgtgaaaagttctcagttgttacctctccaagtattttttctgtctcattcttcctttttcttttgggattcctattacctatacactagactatttgatactgtctcatacctctgttgtctctctctctccctccctctccctttctccctgtctccctctctcccccaccattgatctattttcaggttcactgattctttcctcagccttgttgcatctatttatgatcctgttgaaggaattcttaacttctgtcattgtttttcatttcatgcattttcatgtgactcattcctgtagtttccatcgctctgttcaccatctgttcatgcatgttgtctaccttttccattagaacctttaacatgttagtcatagttattttaaatttcccttctgaacctcctgagtctggttgtattaattgctttctcttttgattttttttggaagggttgcttttttgtgtcttatcattttacattgaatgccagatatcatgtataggataagggaggaggtaaatagaatgtatgcctggaaataggcacagctcttcttctgctaggccgttactgtgaggagctaagtcaatcagtctagttaggagttgagctgggtttggattttgttgttgtcatggtctctgtgcaccactgactttaaattcttctaattaccttgtgctggtttcctaaagggattttctcaatggtcctgctccatcagcttttttttttttttttaatttgagatggagtttcactcttgttgcccaggttggagtgcagtggcgcgatctcagctcaccgca

SEQ ID NO: 26270 - DNA, 1034 bp, Homo sapiens
ctgcctccaactgataatggtttgtacaaacactatggtttatgctgaatacctgcttttcttctgggagtctggaattttggtatgtgttaggcaagggggtgcctacatgatcaaccttcaatataaaacacctccccctagcgaaatgtgtaaagtattcatattgtatatttttcattagtattatttaaactgacttttttttttcttttcctggctccttttctgtttctttttattaatatgctgatctgttttatcttctcaggccataaagaatgctgatgggagaaccattttcctaattttcaaattgttgagctgtttgccataatgggtgagttcaaactaaaagcatttttcagcaataattaaaggatagaatggaagtgaaaaaactttctctattatgtgttattataaacctttttataaataaattttatgatatagcagatttatgaaatgttttatatttacttaatagactttgaattaaagtactttttgtgttgctgtagttttagaatgatcattttatgcgtaacagcagggacattcaaaataagctgttaagatgtgttgtgatttgcttaaagtctgatggcaagagagaaatcataaaatttaattttatcattcatagagcagcaaatcattggtgctcagggagaatatgttatacaactcttggtcgtatattgtggtataatgttagtttaaagacactaaagtatgggaatggattgtgtatgttcagtttacatattttgttttcctgtttacctcctttttgttttttccttttctcctttgtgttaagggttccagcatgaggcagggaattagttagacaggaagacactagaaggaaatggagtcacgaatggcccaccctatcctaaatcaagaaaaatggtactgagtagttggatgctaaattttgaaacttagactgatcctgggatttaattctgacatttgcttgccagagtttgcctttatcacacattttctacttcttgcttaac

SEQ ID NO: 26271 - DNA, 1045 bp, Homo sapiens
cattaccacctgtcattgtctttctttttgattatagtcatcctactggatgtgaggtagtatgtcattttgatttttattggcatttccctgatgacagatgatactgagcatctttatttttctttttcagtattgttgtggctattcagtgcctattgcagtttcatatgaatttaaggatcagttttccgtttctgctaaaagaggccattggaattttgatagagagttcattgaatctgtagataactttgggagtattgctatcttaaaaatattgttttcccattcatgaatatgggatgtctttctgtatatttaggtctactttaatttctttcaacagtgttttgtagtttttagagtgcaagctgcatttttttgttgttgttaaatatgttcctaagtactttattttttttggtggtattgtaaatgaaattgatttcttaattttatttccagaatgtttattgctaatgtatagaaatataattgatttttgaatgttgaccttgtatcctgcatctgtgctgaacgtgtttattgattctaatactgtttttgtttgtttcttaggttttcctgtatctaagattatgtcacttgcaaatgggtatagttttacttcttatccagtctggattccgtttatttcattttcttgcctcgtcttctgactagaacctctagtacaatattaaatagatgtgtggcaagagtggacatccccatattcctggccttactgggaatgtatcctgtttttcaccatgaagtttttcaccataatcaacttgattatgtcctcttctgtttgttatcttttgagcataaaagggtgttgaattttggcacatgtgttttctgtatgttttgagatgatttggtttttgttcttttttcttttttttctttttttccttgagacagagtctcgctctgtcgcgcgggctagagtacagtgcagcatgatctctgctcactgccaacctctgcctcccaggttcaagggagtcacctgcctcagcctcccaagtag

SEQ ID NO: 26272 - DNA, 1094 bp, Homo sapiens
ttagctatgaaccccctccagtcagccagtcagtcagtcagtcagtcaacaaacagtgccactgaatggtaagagtcagaccaggcagcatcacccactggctgtgtgtccttacataggttgttaaacttcttgaaggctcattgtaccccagggctgttgggggtaatccctgagatacaaattacaaaccccctccagtcagtcagtcagtcagtcaacaaacagtaccacccaatggcaagagtcaggccaggcagcatcgcccactgcctgtgtctccttacataggtggttaaacttcttaaaagctcattgtaccccagggctgttgggggtgatccctgggattagtaaggtctcataatgggatgctgctgagctcctcacagaggaaaggaattacagggagaaggaggtgagcattcttggagagctcctacaataggcatggcatgtttgtgaggcctccctgccaagaagagagcgcatactccatggagaactgagggctgaaaggtcggcccgactctgctcaaaatgggccttgaatgcccagtccagatatctagacttaaaagagcaatgggacgtcgtcagcaggggagctgcatcataacaaaagaatggaaagggcacaacagcaacaattccagaagctgacagcagatggatggacacagtaactgacttggcagactggaaagcaaaaatctcagcccgtgatgggggcgcccagaagctgaaggactggaccacggaaccataggaggctgtggggcttccaggaaggcagtgcaggtgggagggcatgttgagagtttgtaagagaaactgcgaaagccctcctcactgacttgactcccctctccctgcctgcagaaggtgaaccagaggctctgactagggacttcaggccccgcttcaggaaggagtggtgctcttagctgaccacagggagtcatgcaaatgtccacagcctgcacaggcaccagctcccctgccccaccctgctctgaggggccgaacaccatgggtgagcgtcttccatcctccaagagcttggaggagtcctcttagaaagcagcctaaaa

SEQ ID NO: 26273 - DNA, 1050 bp, Homo sapiens
gtttgcccagtaactctgggactcagggagagggaggatctgcgaaagaaagccactcctacctcctaggtttgtggattacaggcaatggtgtcggtaagaggcccagttccggggattcccagggcggatgctagaacaagaactctatatccagctgtccagggtctcacagcaataagtggtcaagtcatggatttacatctgactccaaaggcttttccattacccactcatctcccatttccttcagtggataggagggcccaggagggcctggaagcctgggctgagtgagtactgtcagccacagctggagagaggccacacacaggcccatccacccagtgtgacgcggtaaggcgccccgccccccaggccatgtgcagaggcgaccacccagcatctgctgattaagctgctactgtagaagtccctgttttggtcttcctaaatcagggcctgggaaaaagacatgaagaggtttcagtcctccattttcccagaacaaaagacttttcctgtccacatcatatcactggcccggaatgcatccgctgcaacctcagcgccttcagcacgatgcagcactgccagccggcctggctcgaggagccttggccaggatttaccacctgccccacgtttttgaggatttcatcacgtggtgtaatatgattgcaatacaattcttgaaagatattgtttttactttagctttttcttttaatgtaacagctttactgagatttaattcacatgctgcagtcattttaaagaggtaattccatggttttttttttttttgtatattcacagttatgtaaccatccccacaatccatgtttaaatattcttatcaccccaaaaagaagtcccataacactccccatttcccctcctaccagtcctcagcaaccactgatctactttatggatttgattattctttacgcttaatataaatggaatcctacaatgtgtcgccttttgtgtccgggttctttccctttgtataagcttttctaaggtcatccatattgtagcatt

SEQ ID NO: 26274 - DNA, 1051 bp, Homo sapiens
gttgcgtcactccccagcgagcctgatgctccctctctgcccagtcttccaggaatccactggagttgacacttgagacagaacccacgttctcccttcctagcaaaaggtgtggggtatccggttctttgaaggtcgtagaggcagttggggtgtttaggactacatcctgaccctgtttttgagtctaaaaggcccctcctggctgtgccgaagggccctggggctggactgattgcgggcctggctcactgtgggcttttcccctgtagttcgcatttcacccctcccagaaggaaacccaccactgactctggggacaggcagtgcccagtatggatgagatttgctccccctcaccacactcccgtctcgtctcaaagattcatactcttgtcttttttatttattttttattttgagacagggtcttgctctgttgcccaggcctgagtgcagtggcactcagcctcggcctcccaggctcaagccatcctcccacttcagcctccagagtagctgagactacaggcttgcaccaccacacctggctaatttttttgttttcttgtatttttattagagatggattcttgccatattgcccaggctggtctcgaactcctgggctcaagggatccgcccaccttggcctcccacagtgctctggatgacaggcttgagccattctgcacacgcacccagctaccctcttgcctgctctgtgtttgggtggttatgtgtttattggaggcagtcagtttgaaactaactcatggtgcagaggatggaaccatggaagactgagcagtctggattcaagtgtggaccccgctctgctgtgtgagcttgggcaagttactcaacctctttgaggcttaggtcccttttctggaagaggccataataatagtagctgcagtattgccctggggattaaatgagagtgtgaatacagagccgctcacctgtgctgggtggtgttctgtgtgcgagactctctggtccctgaagaaggggtaataggggcccaagtgggagttgactgggc

SEQ ID NO: 26275 - DNA, 1068 bp, Homo sapiens
atgcatacaacggactgttacgcagccttaaaaaggaaggagattctgacacatgctacgacatggatgaaccttgaggacattaggctgagggaaataagccagtcacaaaaaggaccaatactgcatgattccacttctgtgaggtacttagagtagtcaaatacacagagctagaaagtggactgggtgcataaatgcccatcagtgatgttacctaatcatttatgcagctaccgtatagaaaaggcaggagtgtgctgctcattttataggtgagggaagctgagaaataccaagaagtgaggtaacctactcaaggtcacctacaaaactgacgatagggcagcgttaggttgtgattcctggtttctaaccttgtgggcttcccattgcagaaagaggccttcactgagggtccctctgtgtgagccctggatgcgctttctgctgtggtttggttgcagggagggaaggtcattaacaaaacccactctcctctagcactgcagcaaaactcatcctaacaatcatcttcacttgcttccctgtctcccttgaagcccttcaaccaggccttcgttccaccgtgccagcaaaattgttcattacaaaatcgccagacgctgtcggctagtgcggtgagtttcggccctcagccccaggacggcaccgtgggctcctctcttgactgttcctcctcctgagacctcagcgttgttgcgcctgggatatcccctcttttctctctcggcaccctctggcccagcccgtgttgttaaaaccctctgcgtgcagagcgtcccccacttctccaccgggcatctaatagacaccctggaggtgacatgcagaaccaaacacttcactcctgacttcccctcctcatcccccaaaacctgtagctaacccctccttccgcacctcaagaaatcgcaccccatcagcaagtcccaccagctctaccttggaaacagatccagtaccagccgattctctcctccaccactaaccccacatctgggcgcccccctgcaccccaccacggagcccctgttttggtccatg

SEQ ID NO: 26276 - DNA, 1381 bp, Homo sapiens
ctgtctttgtctgggcagtgcatattatttctgtcgttgacttgtttctttcaagtgtgtttataactgtgatcctttaatgttacaggctttattgcttctaggccaaacctcttgccatcttgattaattcgcttttcaacaaaaatggccattgtatttatacttgttttgaattctgacatttttttttgatactttgtttctagtcatgcccataaaaacacagtaatggaagtgaaattaaacctcaatggcaattggctactcacagcatcacgtgatcatctctgtaaactttttgatatcagaaacctaaaagaagagcttcaagtcttccgaggtcataagaaagaagccacaggtcagtggctgtgatatgcttctcattgaccactgttacctgtaacattctcagatcctgataattgtgtcttttcccatgtttttgttctgcagctgtggcctggcatcctgttcatgaaggactttttgccagtggagggtctgatggttctttgttattctggcatgttgggtatgtaagatttatgtgaaaaagtagtgtattttgtgaagagagcacgtgaatgtgtgcagacatgatagttttgtagcttttctaagtgttcatatatcctatatcagagactgcttgcagttttcagttctgtaaatccagcttggaatagaaaatgtacctctgtttgtggatatggaagtcattaaggaggaataaaatagattttctagtttctaaatgcttgcagccttttcccctgtgaagtgctctttggatgaaagggtaactgtcctttggcaatgacaagccaataccccgagacatgtggaattcaccagagtccaagtccaggctttggtagcttcattttaagagtaacagaaaatgtcttttttgagggggagggagaagctgggtaacttttgtgaacaaatcttctctctttggtgctgttgcagggtagagaaggaagtgggtgggatggagatggctcacgaagggatgatctggagtctggcttggcatcctcttgggcatattctctgctcaggctcaaatgaccatactaggtaagctttatattgaaatagcaaagctttatatggagcaacaggaaataaatactgtatgtgtttatttttattggttgattgatatagtaatttatattccaacttattcttgggaatatttttgtagtggtttacaaatacttatattgcaataaagagattgggtattgaatatggttttggctattcaaattttgttttgccttctgacttaaaacagaagttttccacttttatttatttatttatttatttatttgagacagggtctctgtccaggctggcg

SEQ ID NO: 26277 - DNA, 1862 bp, Homo sapiens
aagctgttgttctagcactatgtaaccctacaaatactccccagtattcaggtcttgttttgtttggtgaccacatatttgagaggttgagcaccaataacaggagctcaataaacgttggcatcatgcacatttattttgaattaatgagtggaagtggaagagtacataaatgaatatgtgaaagaacgagtagaataagtgaaatcgtttacttcctgtttgctgtacattttaatgctattaatggtcactttctgcaaataattattacaaagtagtaagtcaaacatttctggcatattagacacaggttaatctacaaagcagcatcacctgtctccaggagatgctaattctgtcactggtcatttagctaggactctgaaggaacgtttagctggatagctagctaaggaatgatgcaaactcactgttctcaatgcttaatatctaaaaataactcagtgtgattaatttggaatttcttttggtggagttagtttatggttgtcacattccttcattccgaacaagactctggtcttcagaatcaatatgtttacttattaaatagtcaaaagaattatgtatttatccctaaattattttcttatatagttctgagaggtggaaaggagtatagaagttgtcatatacaagctcttcagttacagttgagaaagtgaaagttgatttgtaattggaacagaagggactatccacttcatctggatgttatatttagtgagatgaagacaggattggatgaggaggaagaaaatccgggccccctcccaccactgccctaaccctttcaggcttccgtgttctcatctgcagagttagagggctggatagttctgcaggtcttctcaagctctggtatcattgaaagataattttttgttgttgctgttcattgtacaactgagataaataaaaataagattgtggaaatttaaagggacactttctttagggccagttattgtccaatagggtttttttgttttttgttttttgttttgtgacgacggaagtattctatatctctcctgtctgatattcttagccactagtcacgtgtgactattaagcccttgaaatgtcactgatatgactgagaaactaaaattttaaccctaaaacaaatttaaacagccgtatatggctaataggtgccatatgggacagtgcaggttaaattcttaagtatttgtgttcagagggaattccacacagatttataatggtctttttctttatatagtgatctacaactggaatgtcttaattttagaattttgcaattgtacctccaagtccaagtcgtactgctgaatctttcatgtgcccatatcactggcttctttaagctctgccatcctactgaggattctgcatgtccaccacagtctacctatagactcctgtcagtcccctgcagggccacactttgtgcctgtagtggactttgtagtgtctggagcagatttggtgctgttcggaattttatcttccttttttttgttgtcaggggcttgattctgagaagtttaattacttgaaaaactgcctggtctttcatcagcaagaaattttcagtactaaaatctttagcctttagggagatgtttttagtactataacgtctagtcaccaggctacaaaaactctcgttacctgggtgaattttccattaagtctgtattcttgcagtattacaaacactacattcttggaattttcacatttggggaatcacaaagagcctggaatgattgtatcatgaaattctgtacctcagaaatgaaatgatcaaatttagtatagaggcattctttaggcttaatgtttga

SEQ ID NO: 26278 - DNA, 1061 bp, Homo sapiens
cttccccacgttattgtaaaagagtttaacagcagcctgatatgtaagtttcagcaaaacttatacctgtatatgtttttatttgactcaaaaattagatattttaccatatagtcataagaatttgctcactttgatgccagaagtacttaagaagttacacggcactaattttatgagttgtatgcctaatttcaatttctaacctatttgacagtttcttttaggtcagcctttgttggtcttccatgtaaatacaagttggtacaaatcaatagaaaccattttacctacataggcaaagtaaatgtgtgacttagagactgccagatttatggtgcatctacctttttatccatttgagcttgcttttttatgtttgtgtattggttgctcctgacactatacatttcaaaattttttataacttgaaaaacacttctgtgctaccactcagttctgatcaaatccttacattttgcaacactcatttctgaattttcagtaaagaaatacacattacaaattaaaggttaaaggcccctttacatgcccttccccagtctcctcttcctcccccggaagtgtccattctgctgaattcaggttcatcattgccagacaaatgtagtaagctagtgtttcacatttccaaaatcagccttctggcagacttggaagtactcttgagaaaagaagactcgtgaccaaattctcccacagatttgtaataatgtacatattgaaaggactgaaggctctcagactgggaaagaaacttacccattttaaaattcagcattgctcaacttacctgactgccggaccccttcacccatgattctatgcactgtattgttggaacatacattgtgaaaacactgccctgcctaggcataccccctttccagaattaactttccatttaattctatagtttttcactgatgtaactttctagactggacaacaaagatgactaatagtaatcactccaagttgatgttgactgttgggttgtggtgaaatcattttgcattaaaggaaggtaaaatactaat

SEQ ID NO: 26279 - DNA, 1049 bp, Homo sapiens
ttttagtagagacagagtttcattatgttggccaggctgatcttgaactcctgacttcaggtgatccacccgcctcggcctcccaaagtgctgggattacaggtgtgagccaccgtgcccagccggaaagtgttatttttatcaactgcatgtttacttttcaagaatttctagtggttctctaatcttttcatttttcaaggaagcctgttttgtagttggtttgtttttaaggaatataccccttaaaacctttaacatagtaattggggtgtttgtgtggatgtctggtttgatctgttgttcctgtttgttttccctaaagtcatataatctgtatttttctctttcctggtacttgctttttctcaaataacgcagtgacccttggttgtccagagatttgaatggtggtttgtattggttagtataagtagctatcttgcatttttttgcagttaagttcgcttacctacaagggtcctctcctggatggaagatctcactgtggattcgtgtgtctgtgtgtgtgcttgtacatgtgtacacacgtgcatgtttgtgtgtgtttaatgaagtgagtggagaagcacaggccactgccacatttatcaagtaagtgggttgtggtttgtactctgaggtggagtgcttaagtttattccactcttaagtggaactgccatctttctctcctccctcccttctcttttctctttttctcctcctctcccattctctctttgccctccacttctttccattttcagtgtcatccgtggcatttctgcagactttgtgctgctttactcttcagcctcaaatcctgctctagggtttcttcccagactgaaatgtgctttttgtaacaaatgtgctttgtataatttgctttgtctgactgagagcatctgttctacagaaacaggaagtcaggagggacaacctggacaagtctccctataattaccctcattacttcatcacagcctttgtcactgagcctttgccacaacctttgtcactgacaactacagtctatgtatttt

SEQ ID NO: 26280 - DNA, 1152 bp, Homo sapiens
gtatattaaggtcatttttctgcatcattactaccccagtctttttgactgcatgtatctactgtaatttatttaactattcctcactgataggcctttgggatttgcaagaagtttttgccaagacacagttgtgcactaagcttcctaatacctttatatttgtgttacttacgtaaattttccattaggttagactcctaagaataaactcaatggagcaaagggtatgaacatttaaacttttggaagatgagttgtcttcactgtccaggaagtcatcaacgatgaagtttaagaaagttcttgtcatctagccaaactgaaaataacacaggattaacattttaggaaattgtcaccacctaaatatttaaccttatttttaaaaatcactaataataagcacacatggtaaaaagtctttcctccagccccatagagggatggaatatgaaatttaaaaatctgccaatcctttacctctccccagaggtagtttcttaaaactaattgtttctattcttgtggtcatcagaatttcacataatatgtattttggtatatctgtctgacgtagtgcctctttctgtcatcaaaggtgaggaattgagtgttattcacaccaccaaccatgcctcctacctcctcgtttttgtcataatgaattgtagtttcagtggttttctttatagctttaaatgttcttaaacctttatttttaaggggactgccaactttagccaatattccttggctcaccactaggttacagaaggaaatctgtgcctctcaatgtgtttccacttctgccgtttgtcttcctttacttctgaattgtcaaggattttaagccaattttattctgttcttgaattatggctacttttgttttcttcatattttaaaattctaaacaatgagaacaaaaaagatagcatttctgctatgaatgatactattgataacagaaccaagcagtataatggggccttgcagaaagagtgataatcttgtggtagttaatgaaaagttgttctgcttggacagtgtcaagatcaagtatgctgcttttgtattaagtctgtcatgctgtcaactgttgaaaataatgccatagtttaattcacttttgtcttgcaatttattatt

SEQ ID NO: 26281 - DNA, 1049 bp, Homo sapiens
gtttctgcttggcacaatctccgtatttcctctggggaactttaaacatcactcagctgagagtcagcaagtttggctttgaatccccgctttgccactgggcaagtcaagtctttctcagcttgcctctcctcgtctgtaaaggagagctaatgatacctacctcacagggctgttgtgaggaccacagacatactctgcacagtgcaggatgaagcaaatgtttgttgctaaagtcataaatatcaaggaaagatgctaaaagacaagataggagtaaagaaaataacatattttacttaatttgatttaagaggagattggaattgagtaggaaaggtattaaaagagaggtattaaaggtattaaggaaaggtatttatgggaggagattattggatcaaaaattagtattggaatatgattatcttttcagtagtgatttttaggtttagaagtgtgattgataaagttgtaagccacatttaaatagataacattatattgaaatagaactatgacttctttttaaagctttatttatgtaagtcctcatattttatttccactatcatctcagaaccacaggagtgccagaaggcaatccttcacaccctgcattagagttgttctcttcattgcctttgcttgcttacctttttttttttttttttttaattattttatgttttagagacagagtctcgctctgtctcccaggctggcatgcaatggtatgatcatagttcactgcaaccttgaactccagggctcaagtaattctcctgcctcagcctcctgagtagctgggactacaggagcttgccaccatgcccagccacagattgttttttgaatagataatatatttgaatctttctggagaacgacgtgctgttttttgagttctagttaggtaaattcatgttggatgagtgtaagacataccgagttactctacagacttggagcattctttccacttgtactttttggtaggtttacaatatcttgaaaaaatatgaagcccataaagtggtatgtctgtg

SEQ ID NO: 26282 - DNA, 1341 bp, Homo sapiens
agacatcatattttatttttaattttctcccacagcctcacccctccccattatactcataaagagaatcagttaacaagtttcagcgtgctttaattttgttttaccttcttgattttaacaataataacagctgacacattatacttactgtaattgtaaggcatattgtaagtactttatttaatcttcccagtagccctaccagagcagtactgattgtttcccattttacaaatgagtaaaccaaggcaccaaaaagttaaataaacctgtcagaggtcatataatttataagagttgaggctaggatttgaagcctgtttggctccaatattcatgctgttaactactatgttaaactgcctcttttatgttttaaaaggaatgtcagcaacagtaccttcctaagctgtaattgacagaattgtgaagtaaagattggtatgggggagaagggtgtgggtagaggaaactaggtattcaggttcattttaacattctttaaaactgtagaggttatagtgaatgtataatatatttagcaaaaatattaaaacacagctattggttcacactacacatgggttataaggtgtattaaatagaacatggacataagcagttatattgagacttacgcaggagtttttagttttcaaatataatactaatggaatggaaatgaacacttacgtactcaccacacagattaagaaaagtaatatgattactaatacttttgttaagtctctgtgtgccccttcatgattgcattggtggtttatactacatgagatgactgctgtctacacaaagatcttttcgtttggcagtgtgtttttgaactgtgtgaagacacatttacaaagtttgaatgttccaaaaaatgggtgctttttattggaaataactttattattaaagtaaaattggtaaaccatgtagtttatgataataaacctaatttatttctataaggttttacaaaacactccccagaattctgttttcccccaagacaaaaaacccagcttcctttaaagtagcccatagcagaataattccttacgttgacttagcatgcttttagtattaaaagcacttcaagcatatatccaaacaaccacctggacccattttactacagctagctgcctgtattctgtatccagtttcttactttgaggaagcgtttctttaaggctctgtgctatcctgaaaagactagatcatggtaggttgtcttattatgtaaataattatatcataagagagaaaaagacttgatatttaacatctaaagcacattatttaaacaagtttgtgtagtagggttct

SEQ ID NO: 26283 - DNA, 1055 bp, Homo sapiens
gagttaaggaatttgttgtatatatgcaatacaaacatcacaacaaagacacttctaactggatcctgttagtttattaagtaggaaggtagttttctccagtgcttaatttgaaccttttgaatgtactgtttaacaaacagtaccttctactccgtacccttgattccaggatgccacaaaagtaccatctttctctgacacataaatacagggtgggaggatgggtgctacgggtgttgggtgtcaaattattattcagagcttttcccttatgttcaagagtcagcagagatcgttgtcttggttgaatcgttaagtttctcacagtttttcagagctttagctgtagcatataatgttgatgttttgtagacaggaaagactcttgagatactttaatgtgtatttcagcccatatttcaagccagtatcttccatcacatttgcttcaacactcctgacttggcacattttgtttgggtttatccacagtactgtatgactgtagcttttgtaagaatagggaacctgtcacattgagggagtttactcactataaaggtcataatattgtataacttcagaacgagacagagactttgagatgatcatgtctgagttattttatggatgagctccatgatgccaagggtggaagtgacatgttcaaagcaaaataggttcagagccaggactagaatcttatcatttgactcccagcctaatgccacacttatgttgaatctttcctcactattagtcttggctgttaaacagaaataagtgaaacattttctaagtttttaaaatcctggaaacttagagaaaatgaaataattttatttattaaaagtaattctagagtagctgggcgcggtggctcacgcctgtaatcccagcactttgggaggccgaggtgggcggatcacgaggtcaggagatcaagaccatcctggctaacaccatgaaactctgtctctactgaaaatacaaaaaattagctgggtgtcgtggtgggcgcctgtagtcccagctactcgggaggctgaggc

SEQ ID NO: 26284 - DNA, 1060 bp, Homo sapiens
ggcctccggaagtgctaggattataggcatgagccactgcacccggcctcagcatggattttttttttaaccagctagtgaattgctcatgttaacttttaaggtagaaatttttattgagataattgtagattcacatgcatttttaagaaataatacagagagatccttaatacagagattctatttatgttacccagtttctcccaatgataacaaattgtaaaactgtagtacattgtcacaagcagagcattgatagtgatatggtctgcagatcttatttagatttcctccagttttactgtacttatttgtgtgtatctatagttttctgcaatcttactatatgtttatgttcctgtgttcgccaccataatcaagatattaacagtttatcactacaagagttaccttttttataaccacacccatccaccctctcctacccccctaactcttggcagtcatttctattgttttggcattttaagaatgtcatataaatgaagcgtacaatatgcaatctcttggatatgttcatgtgtctattaccacagtcaagataatagaatctcgaactttaaaaagctattaattgggccgggcatggtggctcacacctataatcccagcacttcgggaggctgcggcaggtggatcacttgaggtcaggagtttgagaccagcctggccaacatggtgaaatcccgtctctattagagatacgaaaaaaattagccgggtgtggtggggcacgcttgtagtcccagctacttgggaggctgaggtgggagaattgcttgaacctgtgagatgaaggttgtagtgagctgagatggtgccactgcactccagcctgggtaacagagtgagactgtctctcaaaaagtaaaaaataaaaagctattaataaattaattattttgagatagggtctcattctgctgcccaggctggagtgcagtggtgtgatcatggctcactgcagtctcaaactcctgggctcaagggatcctcctgcttcagccttttgagtagacgggactggaggtgaaag

SEQ ID NO: 26285 - DNA, 1095 bp, Homo sapiens
aaacagtatttgttgccagtgataaaaatctgagctttcaaggtaagtttggaaagcttgttgtcagtgataaaaatctgagctttcaagataagaagtttggaaagcttgtatctgccattgtgaaattgaggttcccaataattaatacattttaagatgagaacaatggttattttaaggaaagttatattttataaggaatgtgataaaaattggatgatatacgtaattctctggaaccagtattttccagatggtcagtgcatgatgttataaaaatcatgcatgagtaaaagttccattcaaattgcaggacaaatcaatggattttaatgtaacagagtataaaaagcttgttgatacaatttcaaggctatgcacagtggctcacacgtgtagtctctgtactttgggaggtcaaggtgagtagatagattgagcccaggagttcaagaccagctggggcaacatggtgaaaccccatctctacaaaatataaaaattggccaggtgaggtgtcacgtacctgtagtccccgctactctggaggctgaggtggaagatgacctgagcctacatggtcaagctgcagggtgccgtgattgcaccactgcactccagcctgggtgacagagtgagaccctgtctcgaaaaacaaaaaaagaataaaaaatatgatttcagatgacacattgcagttagtatttcataaattagtgcttgtttttgggaaagagtatcatagaatatctacagttgtcttagaaggctgtgaaaatactcttttctagatgtataaatgtgtgaatccagattttttttcataatatatttcatatatgcccggctatttttcatatacttaaataacatattgcagcagactgaatgcagaagcaaacatgagaaagcagctgttttcaattaagctagatactaaaaagataagcagaaatgtgaaaaacaatgctacttttctcactaattgcttttgggaaaggaaaggtaatgagtttatcgttatttaaaaatgaattaatattttaaaaactttttttttttcatttctaatatggccagtatccaatacca

SEQ ID NO: 26286 - DNA, 1050 bp, Homo sapiens
ctcctggcctcaagtgatccgtctgcctcagcctcccaaagtgttgagaatacaggcgtgagccaccgtgtcctgccaaaatattgtatttctatattgtaatagtgaacatctggatatggaaataagagaaaaacagtatcggctgggcactgtggctcatgcctgtcatcacagcactttggaaagccaaagcaggaggatcgcttgagcctaggagttccagactagcctggacaacacagtgagaccctgtctctacaaaaaaaagaacagtttaaccactcatggtggcacatgcctgtgggcttagctactcaggaggctgaggtgagaggattgtttgagcctaggaggtttaagctgcagtgagctgtgattgtgctactgcacttcaggctaggtgacagagggagactctctcaaaaaatagaataaaataaatgagataatactacagaccttttagaatggcaaaaattcaaaacagctgccacaccaaatgctgtcaacgatacggagcagcaagaactctcactttgccagttggaatgcagaatggtacacctactttagaatatagttaggcagtttcttacaaaaccaagcatacccttatcatgtgatctagcaacctggctccttgagtcacatgagttgaaaataacatctacccaaaaacgtgcacacaaatgtttatagtagttttgttcataattgccaaaacttggaggcaacccagatgtctttcagtaggggagtgggtaaacaaagtttggtacatccatagagtaacgaaaagtaatagtagtaaaaacaaaaaaaagctatcaagacctgaaaagacatgcaggaaccttaaatgcatattgctaagtaaaagaagccagtctcaaaatgctccacactgtatgattccaactgtatgacattctggaaagggcaaaactgtggagacagtaaaaagatgagtaaatagccaggagcttgggggagggaaggatgaatagatagagcagaggatttttagggcagcagaaactattctgt

SEQ ID NO: 26287 - DNA, 1048 bp, Homo sapiens
ctgctaagatactaagatggctgagtgtggtggctcacgcttgtaatcccagcactttgggaggctgaggcgggtggatcacctgaggtccggagttcgagaccagcctgaccaacacggtgaaacccagtctctactaaaaatacaaaaattagccgggcgtggtggtgcatgcttataatcccagctactcaggaggctgaggcaggagaatcgcttgaacttgggaggcagaggttgcagtgagctgagatcacaccactgcactccagcctgggtgacagcatgagactccgtctcaaaaaaaaaaaaaagatactaagacattataaggcctttttactgttgatgcttgcagttatgttataaaagcagtaatggataaaactactagctccttagcatcattcaaggcagtgctaccaaactgtagtaggtatgttacttttacctcatgctggtagttgaaaagaaaaaagacaatttcacttaagaatgtcactgatgaagtggtaaatataattttattaaatgtcacctcttgagcatatgatttctaatacaggatgctttggattgagtcgtattcccttatatttatatgctgaagtagtaacccccagtgtgatgacatttggagatgggggcctctgtgacatcactaggtttagctgaggtcatgaggttggggccctcatgatgggaatagtacctttaatagcagaaacaccagaaagtttgctgtttctctttccgtcaagccagaaagagagccctcacttggacctggttatgctggcaccttgatcttggacttccagcttctagaactgtgaaaaactaaatttctgtggtttaaagccacccagtctatggtatttttatggcagccaagcagactaatacatagcacatgatgaaatgggaagtgtgggttggctgtggtggctcatgtctgtaatcacagtactttgggaggccgaggcgggaggattgcttgagcccaggagtttgaggctgcagtgaggtatgattgtgccactgtctt

SEQ ID NO: 26288 - DNA, 1087 bp, Homo sapiens
ggtcttgctctgtcacccaggctggagtatagtggcatgatcataactcactgcagcctcaaacacctggattcaggtgattctacttcctcagccttccaagtagctaggaccacaagtacctgccaccatgcccggctaatttattttatttttgtagagatgggatctcagtatgttgctcagggtggtcttgaactcctggcctcaagtgatcctcctgccttggcctcccaaagtgctgggattacaggcttgacccaccttgcctggactaaattgagctttttgttttttttccttgagacagagtcttgctctgttgcctaggctggagtgcagtggtatgatctcggctcactgcaacctccttctcccgggttgaagcgattctcctgccttagcctcccgagtaggtgggattacaggcacccgccatcatgcccggctaatttttatatttttagtggagacggggtttcaccatgttggccaggctggtctcgaactcttgacctcagatgatccacctgcctcggcctcccaaagtgctaggattacaggcatgagccaccgtgccaggccctaaattgagtttttgatgtaccaaatcattagatattacctgtgaaataaattttaatttatcttgggggatagtgaatacacatacatgtatgaaattcaaaaggtacacctgaaatttctcctcacttttatgctaactcatctaattttttttcccagaggcaatctgtggtaatgtttctgacgtatctctctatgagtgtgtttatagtataccactggcctgctttgtttgtttcatcacaacccaggtactctaatcaaggtagtttttatttttttcctttttagaccccatggaactttatattttctcctaagataacagagtcgtcaagtgaaaagtatagcttgatcatttacctaatttgctaatttacctaataatcaaatttggaaagtttgtgaatggatcaagttttactatctctcatgatttatttgtaataataccttttttttttctttttgagacggggtctcactcttttttgcccag

SEQ ID NO: 26289 - DNA, 1330 bp, Homo sapiens
cctgggttcaagtgattctcctgcctcagcctcctgagtagctgggactacaggtgcatgccaccacacctggctaatttttgtatttttagtagagacggggttttaccatgttggccagggtggtctggaattcctgacctcaagtgatctgcctgcctcagcctcccaaagtgctgggattacaagcaggagccactgtgcctggccttaaccattttttttgagatggagtctcactgtatcacccaggcaggagtgcagtggcacgatctcggctcactgcagcatccgtctcctgggttcaaacaattatcctgcctcagtctcccgagtagctggcactacaggtgtgcaccaccacgcccagctaattttttgtatttttagtagagatgggatttcaccatgttggctaggctggtcttgaactcctaacctcaagtgatgcacatgcctccgctccacaaagtcctgagataggcatgaaccactgcacctggctcataatgtaattctgtttttaacatttttgaagaacctctatactgtttttcatagtgattgtactgttttttttttttttgttgtgtgttttttgtttgtttgtttgttttttagagacagagtctcactgtgttgctcaggctggtcttcgcctcaaagtgatcctcccaccatggcctcccaaagtgctaggattacaggtgtgagccaccatgcccagcctcattgtaccattttacagtcagtacacaatggttccaatttcttcatgttcttaccaacagttattattttctgtgtctgtgtgtgtttttcctctgagaaaaggtctccttctgttacccctgctggagtacagtggtataatcatagctcactgtgcctcaacgtcccgggctcaagcaaacctcctgccttagcctcccgagcggctgggacaacaggtgtatgtcaccatgcctggctaattttgtttttcttttcttttttttttttttcctagagacagggtctcactatgttgtctgtcctggctggtctcaaactcctgggctccatcttcccacttcggcttcctgaagtgctgagattacaataggcatgagccactatgcccatcctaaagttttacagcccaataatagtaatattccatcactacagctatcattgagtttcagaagttagactgttaaaagtttcagtaaagagctttaaccagtttattgtggcaatactgtgtacacaattattttttgtaaaaggaaggagatttctgtcttaaatagctttaataaagtttcagtttcatatacaggaatag

SEQ ID NO: 26290 - DNA, 1971 bp, Homo sapiens
cagcttcaagacgacacttcattccagctataggtggcaacagatattatggcagggaatacagatgtttaaatacgaatgaaatcaagggtcaccattgcttcaggcacagggcacagcttactttctgccagatttttaaattccacctgtggccggagccccttccaggaggctttcgcttttagctccttgtgtttctttcgttccttttcttgtttctgcttgaaagccttattcatcttcttggcctgctttttgggcagtttcaaagggttcttcttgccacctttgaggccggacctggcacctgctgccccttcctgactctgtcaccacaaacagctagcctcatctttttaaagaacgttccatattttggaatttcttattgtatgcttaaaatgtcatgtattttgtttctcaattcctgttgtttctctattccttttatttcctgtaaactagaagttagatctagagaggtttgactaaatttgggtcaaatatttttggcaaaaatacttcatagaggccaggtgcgctggctcatgtctgtaatcccagcactttgagaggctgaggcagatggattgctagagcccaggagttcaagaccagcctggacaatttggcaaaaccctgtctctattttaaaaaaagaaaaaaaaatgctgggtttggtggcctgcgcctgtagtcccagctacttgggaggttgagacaggaggatggcttgagccagagaggtggaggctgcagtgagccgacatcctgctgctgtactccagcctaggcgacaagagaaccctgtctcaaaaaaaaaaaaaaaaaaaaaaaaaaaaagaaaaaacttcacaggtgatgatacgtgatttatgttgtgaggatatacttctagctatgagccttcaataaggtggtagggactgccagatgttagcttgcgttatttacaatgccaaatttacctggttaatgtgtccattggatttcttcatcaaagaggtatatttttccctttgcagttatacttgatctgtggggtgataactttagcatcatgtgagtacctcacttctcaaaatatttttcacttaatgattgatgattattagctgagtcatttattgggggttttctaattttgttatttgtttatattcattaactgttttctgtaataaagagcttttgctttccccctttcgtgtttaaatgtttaaattttgaaataaatatgaactaacagaagagttggaagaatagttcaaagaactcctatgtactttttattctgattcacccatttttaacattttgtcacatttgctttattcctcccttcctgcctcccagcccctcatgtattattttcggagccatttagtgttattcacagatatgcacttctccgcacttctctgctcaagaacaagttaagtacccgcaatattaactaattctggacattgaacatttatatagtattgaaaattcatactcaaatttctctagttgtctcagtaacatctcacagaatttttctttctctaatccagtatccaatctagatatttcttttctttttttatttattttttgagacagagtctcgctctgtctcccaggctgggatgatcttggctcactgcaagctccgcctcccgggttcacgccattctcctgcctcaacctcccgagtagctgggactacaggcgcccgccaccatgcctggctaattttttgtatttttagtagagacagggtttcaccgtgttagccaggatggtctcgatctcctgaccttgtgatccaccctcctcggcctcccaaagtgctgggattacgggtgtgagccaccgcacccggtcccaatctagatatttcgtatctctttagtctttaagcaggagcaggtatttggcccttattgcttttggtctttttttttttttttttttttgaga

SEQ ID NO: 26291 - DNA, 1021 bp, Homo sapiens
gagggaaatgcattttaactgaggtttggggcgggagtggaaagaagtgggccgagttgaagtagttggttgaaagggtcaagggaagttaacgtgaaatctgcaaaacagctgaagacttagccgtgatgttatcgtggcttgaaatcggtgcttattataaggatgaggctacagcttgacaggcaaagccctgcttttttggaatagttgtatttctatttggtttgtgctagatccctgtttctgattttaagttgtcttctggcaactaagtagtgaggatcttagcatgccttcttaaaagaaatgacaatgaatgtttgtacttggttgtaacccttgggattagtggccccttccggagtaaggaggaggcggcggcggcaggtcggtagggaattccgtaattggatctatttaaatcaaatcagaaaaatacgggctacttgtagaaagcctgtcaagaatgttttaaagtagtttctacacacatgatcttaagttgactgttcaggaactttggaagacattagaatatgaacaaaaagcctgcactgaaaggaacaactctggggagcgtagactttacttttttagtacactctggagagctaatgcatgctatatatacatatatatgtgtatatatgtgtgtgtgtatgtatatatagcctgtgaatatggtgcagtggtaaacctacttaattcaaaccttttagtgacagttatgctagttgtacctcttgtggcatttttcatttcctcgccttaattgcattttacccattttttattactgtaagatacttttgctttttttgtctccttgaccgggagaagataaaatattgtatagatttgagtttttgctgagacttgaagttccatatttagactatcttcttgaaacttggggagaaattttaacttgtctttcctgtactcctaggaagaattttggtagaaagttggcttatggccgggcgcggtggctcacgcctgtaatcccagcactttg

SEQ ID NO: 26292 - DNA, 1058 bp, Homo sapiens
atcaattgggtgggagggggcacattcagaccatagcatctagtcattctggttttattaagatttattagacctgaggcatgaaaaatagcatactggatgggacttcagcatcgatgagttgccttagtaatactgttaataaaaagcactaaatatgccactggtgtcagataatttttttacaaaaaattttatacttaacagaaaacctggaaagactagtacattgatacctgtgtgttcaccatcttgatgtaacggataacatgctatttgctttatctgtatttcattgctaggaatggggcattatagcacttaggaacattgacaagtattgcatgttattgaatatccagctcatattgaagttttccttggggagagttctgggtcaagggtcagtcccagtagtggtgtggctcagttgtcagggtctaacctaacaattgcggtgagaaatattgaggaaatatatgtggttacagctctcaagtttctgtaaagatctttgactagataaaagtacctgtttgcaactcctgaatgggagatgggactagggagactgcaggtcctgggtagattctgatcagtatttgtgcctacacccggctctcctctcttcatcagcggaagagcagtttggaactaaacaaggagaatgcacattcaatgacagcagagtaggggcagatctgctagagtccatcaaacatggagcaggttcaaagcagcggtgtatgcctcccttccgttgtgtggcactgtgtattttttttttttttttttgagatggagtttcactcttgttgcccaggctggagtgcaatggcacgatctcggctcactgcaacctccgcctcccaggttcaagcgattctcctgcttcagcctcccgagagctgggattacaggcgtatgccaccacacccagctaatttttttgtatttttagtagagacggggtttcaccatgttagccaggatggtctgtatctcctgaccccatgatccgcctgcctcggcctcccaaagtgctgggattacaggca

SEQ ID NO: 26293 - DNA, 1028 bp, Homo sapiens
aaaagttgagtcttgggcagagaaagaggaaagtagcatgtaaatttggcggcaaagtgaattaaagctgtcagcatggaacatgggaaccactacacggagcctttccttatgctgccttgtaggtttcccgtttccagccaggggctgtgccgttttcagaaaggcagagagtccttcgggtagctggcaagtccaaaaacagggatttttggcaataacagaaatgaatagggacaaagccaaaaggttttgttcttatccatgattaatttggggctggagaatgttttgtgttttgctttttttagtccgctctttgtgacgtggaagacagggcgggacaagcggcttcgtggctgcattgggaccttctcagccatgaatcttcattcaggactcagggaatacacgttaaccaggtaatgacaccagacattaagaactgtagataaattggctagaatcagaaatagctgcctgactttatttcttctaagtgatgtacgttgagctttctctttttggtaatcaggaaatgtaaggggcttaatctggtgagtcagttatcagttcaagtacagacagttaatagcatcgagttgtttttaacatgttagtgttgatgaacaatagatactctctgcatagctcaagattcataaatatgtgggctctatggcacctgatattggctcctgactccagagcagccttacctatgttttctgtccccctccagtgcacttaaggacagccgatttccccccctgacccgagaggagctgcctaaacttttctgctctgtctccctccttactaactttgaggatgccagtgattacctggactgggaggtgagaacagccgcatttggaactctgcatctctcgttgcatttgggttcgggttagtacatggcaatgtatctccttcattgagagaaagggtataagaatgtgaaggctgagtttggaaccaattgtgggcaacataggtgacagaagaggtgctgctataccaggagt

SEQ ID NO: 26294 - DNA, 1029 bp, Homo sapiens
cagccctccaggcagtctggaaatgtcctcagccagcttcacgctggctggtgccccaccctgtcttctgccctggggactcttggggaacagggagctgcttggtgcctgcctccatccatggtagtcatctggaaattttatggaaaataaaaattctcttttaggaaaaggttaggggtttcttctcctggtctgtgacctggaggttgagtgggagaaagaatttgacagctcttagctggtcaatgcagactctctatctttgatgttttttcctctccttttaactaaccagtcaaattaatgcttaacttctcattttggttagggttctgcagcattccagaccttgagcactgaatcaggatgggaaaaagacgttgtgttcctccactcgagcccaagttggcagcaggctgttgtggggtcaagaagcccaaattatctggaagtggaacgcacagtcacgggaatcagtccacaactgtccccggctctagttcaggacctcttcaaaaccaccagcatgtggacagcagcagtggacgggagaatgtgtcagacttaactctgggacctggaaactctcccatcacacgaatgaatcccgcatcgggagcgctgagccctcttccccggcctaatggaactgccaacaccactaagaatctggtggtgactgcagagatgtgctgctactgcttcgacgtactctactgtcacctctatggcttcccacagccacgacttcctagattcaccaatgacccctagtgagtaaatcatgtgctgggggcactgaggaaggcatggtgacatctttctggggtgattctcttgagagggtctgctacttggaagtctttattatcatttgaggaaagggtaatgggaagagaatgataagaaatgtccagagaatatttaaaacattcagtggattcagtaatggaagggagcagttcacatttggaggaggctgtaggcttgttgttaaagtaatgttctggaaatcaagtgagttca

SEQ ID NO: 26295 - DNA, 1047 bp, Homo sapiens
atctttctgtctcataaccctatataactttttttcaaaaaagttgtaaacacacaaggatggggagaacaggagaggacacagtagcaactgaagctgggaagcagaccatcacgcgatggcgtcctggctctgagaaagctaaatgtgaagcttgcgtaggggaaagttgagaaccatcctcttttaaaattggaaaatcttcaaaaggaccaacaacaggcaaatcctgggggcgaaggaaggggctctgtcctttaaggaggataagttaaaacctttgagtttgaaaagtgttaaagttagagcccagaatcccattttctacctatgccatgtggtgtactgccccttcccgactttagcaggagcctgaaagttcaaactctgcagatggtccgctagggtcacccagcactatagaggtcatgagtattttaccagaaagagattgtgactcaccgtgtgtgtgtggagtgctgaacacttcccagtccactccctgctttcagctgatagaactctggcaggtgaacttgattctagatagaaaatgagaagaggactctactttccttctggggagtctatccagcccaaggggaagctctaaagatactgacactagggcttccttaaggacagggttagattaccctacagtggacctcatagtagacatgcccttccaaagctcagagctcccagccagcatttcagtccctctccccgactcttaatcatgaacatacaaccaaagataggcacatatctgaggggacctctaacggtggaagacagaaaccacaataaatacatgcccaaagcaccttggaagatgtagaggcctggcagggagaataaaacacaaaacaaatgagcaaggataagcaaacagtatccgtgatgccttcagaaagacaaaagaaaaggttgcatccacaaaacagtaacacagtgctatgcaaaaagaacattcagaggagaaaagaaccggtcctgaaataagatagcagaaattgaaagatcagtagaagagttggaaga

SEQ ID NO: 26296 - DNA, 1200 bp, Homo sapiens
ttggccattttgagagtaagggttgcagcattatgaccatttatccgtaagtacctccatttgtagcacggaagagtaaagacattctttgatgtcaccgcggtacagctatctgaaaggattccgagctctcccttctctttcactcatggatatttttaaagagtgtggagaggccagttgttttagggaatttggtactgtcacgttgtttcttcatggttacattcaggttataccaggtaagcagtgtgttcttcccattgcatcagagagctcatgctgtctgtttttcccgtattggttatgttaacattcattacttagtgaaggtgatgtttgctggttttttctactggaaaagcatgtttttctcctttgtaaacaagtaatctgtatggaaatatctgagtataaatatcctgttctccagtaaacattcattcaatagttgtagatctattattaattcctggctgaatcaattattaatatgatagttgcaaaatagtgagtttttctaacgtgttgtctatatatattagctggcattctgacgtaaagaaactttctcttatccacccccatttatttattatgttgagcattttactgttttttaatcggctcggccttgtagatttgcttttattcattattagaatccattgctgtcatctattttggtgctcacatgatctcatttggtctttgggggttctttctgtctgcttctgtggatttcgccccatcccctctattctagcctttccttattttccaatgacgagatattctagattcctattgaactttatctgtctggctgtgaaatctgctgtttctccaaggagccccttgtcatttacaaaccaagatctgggcattagccctgcttgttgctatgggttgtcattcttctaggccctttgagcaggcagaggtagaaagtatataatattttaagaacatttgagttcatgctgatatctctagttcaaccccatcgcttcccccattccatgtttgtatctgcctctcccataaagaaccctatacagtatacacaaagtagtttcaaaaacaggttattgttaagtgttctaatttgatcatttgtgtctaggaatgcttacagattttgatacattgatatgtccatcccccttgttgaatactcctgttagctctaaatgttta

SEQ ID NO: 26297 - DNA, 1044 bp, Homo sapiens
ttctgtttgcagccgcccccgaagcccaccatgcctagccgtcccattgctcctgctccaccttctaccctgtcacttccccccaaggttccagggcaggttaccgttaccatggagagtagcatccctcaagcttcagccattcctgtggcaacaatcagtggacaacaggtttttcttccttttaatttgctgattttcaaactgaaatgccaaactgttgatcatgatttattgaatgctagcagtacattagtcacggtaataaaaaaagatcaaacagtcactgatacctgcaagtgaagatagtaggtttgagagagaaggataactgtaaagggagtagaagccagtgtccatagtggtcatttagctagaatttattgagcagctactagatgctcgattcgaccctagtgtgatatataaatctagataaaacagtccgtgtccttgaggagtccggagtccggttcgtgtttggttttagcgtcaagaactgccttccgggggtaggcagtgctgctctgtggtttctctgaggagagcagatgtgcatctcttgggataggttacctcaagcagctctctagttccaaacttttttttttttttttttgagacagaatctcacggtgtcacccaagctggagtgtagtggtgcagtcttggctcacagcaacgtccacgtcccgtgttcgagccattctcttgcctcagcctcccgagtagctaggattacaagcgggcaccaccacccccagctaatttttttattttaatagagacggggtttcaccatgttggccaggctggtctccaactcctgacctcaaatgatctgcccgcctcggcctcccaaagtgctgggattacaggcatgagccaccgcacccagccttagttgcgaacatttattctgaagtcttctgttttaaggtttttttgtgaaattttgcaatcctactctgctgtgtacctgattaattaaatattttacattttttacctggggaaaaaaactaaatctaaaaactttccctt

SEQ ID NO: 26298 - DNA, 1034 bp, Homo sapiens
ctactcaggaggctgaggcaggaaaatcacttcaacgtgggaggcggaggttgcagtgagccaagatcgtgccattgcactccagcctgggcgacagagggagactctgtctcagaaaacaaaacaaaaaaaatagaactaaatgcaaatgaaaatacaacatatcaaaattggtgggatacttctaaagcactgctgagaagaaatttttattttgtttttttagacggagtctcactctgtcgcccaggctggagtgcagtggcgtgatctcggctcactgcgacctccacctgctgggttcaagtgattctcctgcctcagcctcctgagtagctgggactacaggcgcccatcaccacgcccagctaattttttgtatttttagtagagatggggtttcaccatgttgcccattctggtttcgatctcctgagctcaggcaatctgcctgcctcggcctcccaaagtgctgggattacaggcgtgaaccactgcacccggctgagaagaaaacttatagcattcaatgcttacattagaaagcatgataggatttatatcaataatctaagctctgacctcaagaaaccaggaggagaagagtaaaataatctcaaagcaagaagaaagaaggaaataaaaataagagcagaggctgggcatggtggctcatgcctgtaatcccagcactttggaaggccaaggcagagccaagatcacacccattgcactccagcctcagtgacagagaaagactctgtctcaaaaaaaaaaaaaaaaaaaaaaaaaagcagaattcaatgaaattgaaaaaggggccaggcacaatagttcatgctcgtaatcccagcactttggcaggccaaggcaggtggatcacttgagcccaagagtccaagaccagcctaggcaacatggcaaaaccccatctctacaaaaaatacaaaaattagctggacatgatggcatgtgcctgtagtcccaactactcaggaggctgaggagggaggatcacttgaaccgaggaggtc

SEQ ID NO: 26299 - DNA, 1038 bp, Homo sapiens
agcccccctcatgctgcgtcacagccctcacctcctctccccgtctccttgcaggaagttctactacatcaccctgctacgagaccccgtgtcccgctacctgagcgagtggcggcatgtgcagaggggtgccacgtggaagacgtcgttgcatatgtgtgatgggcgcacgcccacgcctgaggagctgccgccctgctacgagggcacggactggtcgggctgcacgctacaggagttcatggactgcccgtacaacctggccaacaaccgccaggtgcgcatgctggccgacctgagcctggtgggctgctacaacctgtccttcatccccgagggcaagcgggcccagctgctgctcgagagcgccaagaagaacctgcggggcatggccttcttcggcctgaccgagttccagcgcaagacgcagtacctgttcgagcggacgttcaacctcaagttcatccggcccttcatgcagtacaatagcacgcgggcgggcggcgtggaggtggatgaagacaccatccggcgcatcgaggagctcaacgacctggacatgcagctgtacgactacgccaaggacctcttccagcagcgctaccagtacaagcggcagctggagcgcagggagcagcgcctgaggagccgcgaggagcgtctgctgcaccgggccaaggaggcactgccgcgggaggatgccgacgagccgggccgcgtgcccaccgaggactacatgagccacatcattgagaagtggtagtggcggtggtggccacggggaggcctcttggggggtgtgggggataaaacaggacagacgacaggtccacccaagactgtcaagggatgagcatcccaaacctgctccacagaggtagctgcgtcctgaaaaaaaacagagcagggatgtagtggggctgggcagggatgggggcttgagaaatcaacaggtgcagcccagtgggtcagaggaaagcgtgctcgaaggatgccatggtcagggcagggcctccagagcaggtgttgtgcctggag

SEQ ID NO: 26300 - DNA, 1060 bp, Homo sapiens
caggaagcaggaggctccagggcctgcccacccaggctgacacccctgtaccttgtgggccacagtcaggaaatcccagagcctgggtgtgggagggtggtccgaagacctcttttgtctccccctccacacacacacacacacacacacacacacacacacacacacacacgcctcccttctttgcggtggagcctctttactgcccagtagcccaccttcttctcccagctctccaggccccagagcacttgtcctcagaggggccgcagctcccaggtgggagtgtgacagcgtctccatcctacctgggccaccaacctattgaaactggtgtcatcttaaggacagccagcgcctcttgactctgacaggctgccccagggtgaacaagtttctaaaggtggcaagtcccacctacccagtagacaggctgagaacaaaggaagacccaagcactagcaaggagagccctcccctccctcggggactgcggcacttcatgggcagggcccggggccctccatcacagcccaccccgccctgtgccccctctgatgcagtagagtcagtgaattgtcactagcctggtgcaggccatccagagcacagtgccagggccgggcacagggcgtgtatgacagaagagccatgtggggtctcaggaggaggctgtcaagtccaggctcagaagctgtgatgtgaaggacagtgcttcatggagtttggggcaggtttccagcagagggtctgggccagcagggcaggtgcagagaggagagggcagggccctgccctcaaggaggtacagagccaagcctactggcttcgggacccacatggtgcccctgtgtccctgcagcgtggtctcagcatggacccccaacctgtggtgaaaccattgccctgggatgttcagcaggactgggtcagcttctgcctggctcagcatggccattccacacttagaggctgaccacaggactaactggatcctatgtggccacagaccctgctcacatagcactggccttctgagctggtggttaatccaaccttc

SEQ ID NO: 26301 - DNA, 1033 bp, Homo sapiens
acctgagtcttctggcccaggctggagctgggctaagctgctctgctgtggcggttgggatgcacttcccccatctgcccagggacccagcaactctctatcaggggcagtgcccatccctgctggggtgcctcatgttaagtgggcttggtgtcaggagactcaggtgtcaccctggccctcctgcgatgtcttcactctggctctgcactgccatctccgtgttctctggggactgagaccctcttttccttctatctctgcctgcctccctgcccaaggctggctcctggaacctctccaccaagcccctcccattccctgctgcggtttgggagggtctcagtgggcctgtggtgcgcgtaagagaggtggggctcttcccggctgccagcctccccattgcacagtatcagcctgggctgctctgagctgggcatccatggagatggacaggtttttgatgtcttcctggaatatggtttggaacttctagtggctgttagtgcttggctgccttggtagaaaggaacaagagtgagcagagcattggcgggtccctgtttagtcctgtgttcaccatgggggctgcctcatctgccgacatcagccagggtgcttgtaagactccactggaaggacgtttgctggctggccttaaagaggtgtggccatccccaggcagcagccaaatggccagccattccagggaccactcggttagaatgtctcagcaccccacactccgctgtcactcagagggtccagatggtgctccagagccagaacctccctccttcctcttcccgtctgcctgaaggcaacgcaagaacaggcatggtcaaggtcttgcccgggccaccctggaaatgtccctgaaatcatgtgggcttcatttggggccacggagggcatctggagcccaagtgtggcatctgggccaccttggccgggaacccgggaccagctcacatcctctctgcaccagggcctctctggagcccttagtgggctcgcagcctctgtgacgttg

SEQ ID NO: 26302 - DNA, 1027 bp, Homo sapiens
caagatgcccaatagtcttttgaggatgtgtaaaaagagtttgtgaagtcctcctcacttatttgtagtttgcatcttggttagtgctaaataaatggtgctcctgaagtccctgaagctgatcttcactcatgcaccgtttaagcattcattcatagcattaatttgtcaaatgcttttgaaggatcaacacttttttttcagaaagagcaggtaatgatatgactctttttataaaaaatgcacttttcaacacctttgcccactcttggtaggtttactcatccacctgtacttgaccataagttactcaagtcttactgtcgcagcttccaggcctgcataagccacgttaaaaactgaactgttttgcttgaagtaagggtgaagcttggagcccccatgcttgcttcttgctcctttcctgcatgcttctgtggaaccaccttagtacagtttatttgaagatgtaatagaactagactgcaatattatactccaccagaagatgtcactgtaacatgtggtttatacatgctgaatatatggtaacggaataatggcgaaccttccattttctcagtgaatcaaaaagagaaagaaaaacgtagttttggccaacttatatataaaaactttgaaggtgagaaagagatagtcaatatctactcataatgtttaattaactcatttagttacatatacatatttgaaataatatatagaatcattaatttgtaaatatcactttattttcattcatatttcatggaacaactttatgaaagttccttacatgcttatctttcataagtgtctttattgtcactagagacacttaaaaaccttttatttgaaaatactttcaaacttacaggaaagttgcaagaataagaatagaacatggaatattcatatactcttttcccacattcaccttttattaacattttgttcatttgctttatcttgttttctctttccctgtctctgtgctatatatctatatctatatctatatctatct

SEQ ID NO: 26303 - DNA, 1057 bp, Homo sapiens
gccctggagcagtcacagggctgcaaaggctgccgggaagtgtgttccatactgtgtgcccagagcaagggaaggggtttggtgggagtttgccagttccaccacagcgctgctgtgacaattgaaatcaaatgcatgaagggactggttttcacacaggtcaggtgtcatgactgctacaagctgggttttcctccagcttgtactcctgtccagacagagcgtctatttttttttctatctactgaatcagagaacctacctttctcaggtcagagtccaaattcccaacttgtatcaaatgagattttcttcccagtaataaatagtgggatgtctacagacatttgcaaggtgttcgtcgcacctcgtgatttctcccttggcagggacctgtggccactgtgtctggctcaggacactgacaaaacaccaggctcaggattttttcccccacaatacaactagatcctgaccaagggtttttgatgaaaatcagattttgaagactgctgtggtttataagagcttcctcaagaagaagactttgtagacctcaccatttacagatatgagagagaagtttccttctgagtgatctcattctgctctgatgtccctgggaacacacattggagccaatatctcccatcttttcaaattaaattagctccctgtagggagccagataaaagaatgatggaaagaaatggaacaatatagattagcccatttttgatgcttgggttaaattttattaaaatgactgttctgcatggcctaaaccatctattttgagaatgatttgtcattatttctaaaaatgtacttataactctgccctaaattgtaactaaatctgaaaaacatacttaaattctgccgaagtgataacttaatccacatttaaaggacttccttggatgaaggacactgaaagtttaaactttgcaacctgtctttttactacccttttctgttcatcttacatcagcttaatggcataaactagtcataatacggcaggtatttgaagacacaaaaaccatagtcctgt

SEQ ID NO: 26304 - DNA, 1097 bp, Homo sapiens
gtggcccagagactctggcagcgcagcttcagcctgtcctgacaccacccctgcccccgcacctccgcatcgtcctccttgccccgagacaatcccgttccctggatcccattcgtggcccactcccttccatgatctaccgctaggatataccagcgcccccgtgatccaaggtaagtcagattctgatcatcttgtgcaagcaactcacaagcagaggccctgtgcagtcgggagaaatctatacctttccccttggacatccaagagcaagttagatcccctaaaggccagctctcaccaataaccctgacatttccaatataaatgagagagaactctctgttttgagacaaggtcttgctatattgcccaggctggagtgcactgcaccatgacagctcactgcagcctcttaactcctgggcttaagcaatccttccgcctcagcatcccaagtagccaggactacaggcatgcgccaccgcaccctgctaatttttaaatttctttgtagagacggggtctcactgtgttgccaggctggtcttgaactcctaggctcaagtgatccgaccgcctccgcatcctgaagtgctagggttacaggtgtgagccaccacactggagagcggactcttatgtagccttcactgtaaaaattaagctagcttcccttgactcccaaaaccagaattcctagcataattttctcaagtcacaaggtgcgaaaatatatcaaattatttcccagtcaagaattcctacttttggccaggcgcagtggctcatgcctgtaatcccagcactttaggaggctgaggcaggaagatcacttgacgtcaggagtttgagaccagcctggccaacatgctgaaatcccatctctactgaaaatacaaaaattagctagtgtggtggcgcatgcctctaatctcagttacttgggaggctgaggcaagaagatcgcttgaacctgggatgtagaggttgcagtaagccgagatcgtaccactgtactccagcctgggtgacaagagactccttctcaaaaaataaataaataaaaaaagtgataaattggcagctggcgccag

SEQ ID NO: 26305 - DNA, 1078 bp, Homo sapiens
aggtgacctggaggcccctctgcccgggccttcaaagcgaggagagtgtggccacagccctggcctggttgtggaggggggtgctgcgctggcccgcggctgctgggactgcaattgtttggattgtcactgaccgtgctttgtttttgtttttttctcctcactcctgggctcgttctcattgctttctttctctctccgcttccccctcccgtgtctggtcctatctctccccttccccaccccattctcttgtcctctgctcttcggcctcttccggcatctctctgtttcttatctcagctggaggttctgcactaccgactcagtgtctccagcgccctctacagccccgcccaacccagcctccaggccctccacgcctaccaagtactggctcattcgttcccttcctcctgcccagagtgcatgtccatgcctggcaaagcaaggggccgccggggccggccgctggtgactcagaggctagttccaagcagaacgaagcccctgtgtcggggggaggcaggggtcagcctccagcctggcttggcccctggctttgtagactagtttggttgggggtgggggtggtggctttgtggcagaacgaggcatgtgggcatgtggccctggctgtccaggctccaggccagtggaggtgtcacaagctctccagtgttggaggcctcgtgcttggccctggtttgaagagctggagtcctcaggcctcagcagtggctgggttcactgcactctgcagggtctggcgcttaggaaggagctgaagacgcagaggcctgggacttacgggtggtgtgggttctgccttgttcagaactgtcacccagcctggaggtgctgtgacccagagcttgcgtgtgaggcagggggtgggaaggacctggggcttgaccctatagcccacagaagctgtcagtccttgacagcccagccaggacccggccttcacctggggagccctggccgctcatacacacctccagaggcagattagagtgggtggtgacctcatagaggttgcagctgcctaggcagaaatgacaagtgtgtggat

SEQ ID NO: 26306 - DNA, 1034 bp, Homo sapiens
aaacctcgtctctagtaaaaaatacaaaaattagccgggcgtggtagcgggcgcctgtaatcccagccacttgggaggctgagtaagagaattgcttgcacccgcgaggcggaggttgcagtgagctgagatcgcgccactgcactccagcctgtgcgacagagcccagagcgagactccgtctgaaaaaagaaaaagagaaagctggccgggcgcagtggctcacgcttgtaatcctagcactttgggaggctgaggcgggcggatcacgaggtcaggagatcgagaccatcctggctaacacgtgaaaccctgtctactaaaaatacaaaaaacaattagccgggcgtggtggcgggcgcctgtaatcccagctactagggaggctgaggcaggagaatggcgtgaacccgggaggcggagcttgcagtgagcccagatcgcgccactgcactccactctgggcgacagagcgagaccatctcaaaaaaaaaaaaaggagaaaaaagaaaaagcggccgggcatggtgactcacgtctgtaatctctgcactttgggaggccgaggagggctgatcacgaggtcaggagtttgagaccagtctggccaacatagtgaaaccccatctctactaaaaatacaaaaattaactggatgtggtggcatgtgcctgtaattccagctactcgggaggctgaggcaggagaattgcttgaaccagggagtcggaagttgcagtgagccgagatcatgccattggactccagcttggcaacggagcgagactccatctcaaaaaagaattgaaaaagtcggcactttgggaggctgaggcagcggatcacttgaggccaggaatttgagaccagcctggccagcatagggaaacccgcctctactaaaaatagaaaaattaggcagcctgtggtggcaggcccctgtaatcccagctactcgggaggctgaggcacgagaaccgtttgaactttggaggtggaggttgcagtgagatgatggagtgagactcagtcaa

SEQ ID NO: 26307 - DNA, 1050 bp, Homo sapiens
gtggaggcctctctgaatctgatggactcgctttgttggtgaactgagccatttggcaatgcaggatgtgccccctctcctcccaccccctatgaccatgtaagacttgagtagaaggaggacactttgtgtaccggggttgctctggccttcttcctttcccttgaggggagcttgtctttgcaggtcagttgtcttcatcgggatgttttcatgcatctaggagagctggtcttgcgttgatagaagaaacagctgcctgtagaaatcctttggcattcatctaccgtactttactttgcaaggcctcctctaaggaaaataaaccatggaaagatgaggcccctggctgggatgggcacatctccgcggaagccctgggggtttgatctgatgtctagggattgggtgaccacccaatctgtatgaccacccatgtggattcacctcctggtctctgggtcaatatgaccacctttaggtcatgcccacacaaaagcgtactgttccctccttgtttttctggacttgacttcagtgtaaggaaattatgccagagagaaaagcattccgggttattatgtgtgcttcaatgtagactctgatttggttttccccatacttatctgtcaaggaacaggaaactgggcatagacagaaactgctggtttgaggcacagggagggagggcagcaggcaccaggttgggtgccactgtgttggaggtggtgctggtccataaagggactcaagtagttgttgagtttctgcagttgtaggaaaaatagatttctcttaaagaactcagaagctcatgtagtttagaatcctcatttcttttttttttttttaattttaaaatttttaatatttttttttaagacagggtctcatcctgtcagccaagatggagtgcagtggtgtgatctcagcttactgcaacctctgcctcctaggttcaagtgattttcccacctcatccttcccagtagctgggactacaggcgcctgccaccatgcctgcctaatatttttttgtaccttttggta

SEQ ID NO: 26308 - DNA, 1117 bp, Homo sapiens
gggttgcatcagtacagatgggcttcctggggagggagaatctgaaaagctgttgttttggaaagacctagcactgaatgaatttgatatttcagggaggcagtgtatatttttgggtacgatgaggtaattgtgtgtatttatttaaagtttgtgaagttcctgttgagttactatggagggatatggtggacttagtgctgaatgaaaaaaaaaaggtggcaagcacacactgtctatttttaattaaaaaaatttttttacttagtgttttaaatttttaaaattattattattagtttttagagacagggtcttgctcagtcgcccaggctggagtgtggttgcacaatcatagctcactgtaacccagaattgctgtgctcaatgagcgatcctcctgccttggcctcctaaatcgctgagactacaggtacaccccaccatgccttgctaatttttattttgtagagacaaggtctcgctatgctgctcaggccagtctcagaactcttggaatcaagttatcctcccatcttggccttctaaagtgttgggattacaggtgtgcaccatagctcttggccccacactaagtcttaaattgatagggagacctgtttgccttacttgaaatgcacttgtcttaagtgctggctagaaaatggtgtaatattcatgcctaaaccaaagaccaaaagttttctggtgagcattagaacgtagcctcacagtcataagaataaacagtaagataatatatattaaaaaccattgttgtgattagaaatcgttggtgacttttttcaacattttattgtaaaaaatttcagatgtcacagaaaagttgcagaaatttcacagtgatcacctatatatggactgctaagattctacgattaaattttttaaatttaaaaaatttcagatgtcacagaaaagttgcagaaacttcacagtgatcacctatatatggactgctaagattctacgattaaactttttaacgtcaacttttacaagtaacattttacttgtatcacatacacattactccatccatccttcagtccatcttattttttgatgggtttcatttcagagtaagttgtggtcc

SEQ ID NO: 26309 - DNA, 1054 bp, Homo sapiens
tgaatttagaagtttaaaacagtttcttacaacaaaaaataatagcttttaagtcaaaatatgtaatgtaggaaatgtcggaattcagtgaaaatgagtgacctttacataggcttagctgttcactggtagcagcaaaaataggcccttgagtccaagctagacttgaattctgattcttccagactttgtgcagtgaagtcagatgagggtaacaggacctagcgtgtgatacccttagcactcttactactcttgctaagtaattatgtgattagagtttggaatgaaacttccagaaatgttataattgaggcttggcgcggtggcttatgcctgtaatcccagcacttcgggaggctgaggtgggtggatcatgaggtcaggagttcgagaccagcctggtcaccatggtgaaaccttgtctctactaaaaatacaaaaattagctgggcgtggtggtagatgcctgtaatcccagctactcggaaggctgaggcaggagaatcgcttgaaacggaggttgcagtgagccgaggtcgcgccactgcactctagcctgggcaacaagagtgaaactctgtccccctccaaaaaataaataaaaataaaatatataattgttacctatcaaaattctgagggaaagccaggcgtggtggctcacacctataatcccagcactttgggaggccgaggcgggtggatcaactgaaatcaggagttcaagaccagcctggctaacgtgatgaaaccccgtctctactaaaaatagaaaaattagccaggtgtggtgacacacacctgtaatcccagctcttcggaaggctgaggcaggagaatcgcttgaacctgggaggcagaggttgcagtgagccaagatcatgccattgcactccagcctgggcgatgaaagtgaaactctgtctcaaaagacgacaacgataaaaaaaacaaagttctgcgggaagaagacaactagagacatgctgttggccacacatagtgctcttggggctgcttaagtctgtggagttctggggaagaaggtaag

SEQ ID NO: 26310 - DNA, 1035 bp, Homo sapiens
gcagtctctggatcacctgtgcgtcagtttttattgtccatttgttctgttcttttgtttttccgtcacatggtcctgtcttggcatgcctggtgtttttcattaactgtctcacgcagtgtattagaaattatgggtggtttcactgatgatgtcttcttttgctgggaaggtagcatgctgaatggtcttcttaatccacttggagctgggcttagatgcatttcagttttggcaaggcttggtctccctttgttctgcccttattctggagcgcagggtttccataagcctgacatgctctgcacagtccatccctcttgtggatccgtaccctgatctttgtctcttacaccaggggagtaaggaaaactctgcgtttcagagatttttggtttttgctgtctgctggggtagctttagaatttgacatatgtcttaaagcagactttaactggttttgaagctcatctgaggtccaattttatcactacagcccttcaagatcaccaaaacccatgtttctctgtcctccagccacggccttctgtccagggagaacctagacttggcctcttgcccatgctgagaattgacaagcaccgcccaggtcaacaaggctgtagatcctaatttctcctttgttccacaaatggtagtggacactgggatggagttaggaacataaacattttgggggggctatcacataggaaaatccagcagggaggaagtagaattagggagagcctcagactgtgaggcacatttgccgaactcatggccagcccacgggtgctctggggcaagggttagcagttggaggccgacatgaggcaccagcggcctggtcctgctcctgagactgttgacccacatacttctcctggctgaacagtaggttctttctggaaaagagatgcaggcggcgttgctcacttcgctttgtaaggaatcactccataacagttcacagaagtttgccttgttcttttttttttttttttttttaaatgtaatagcgttacatacact

SEQ ID NO: 26311 - DNA, 1035 bp, Homo sapiens
tcctaaactgtagggtaagacacacaattgattctcctgcctacctgctatgcctttgtatacttgtttcctccctactctgaactgtaggcctgcactgtccagtatagtaaccactagccacatgtgactacttatgttgaagttaaataaagctaaaagatcaatctcacagtagcctcatttagccttacttttcagatgctcagcactcttggcaggcggctgctgtaggggacagcacagatggagaaggatgtggtcattgtacaaagttttgttggtcagtgctggtcaagacctatcacgtagctgtagttgtgaatggcatgacaaatctggcatttggatttggtttagaagtttaaaaaaattagacagttcaggtaatgaatgttttagttactaaagttgccagtttattcctgatttaatccagaacttcctgttacagaggctaaggatgtgacctaatattttcttcttactacaggattgcttggttgtgaatattctaaatgagacaaatgagctgaaaatttgaagtggtttctttttgtattttgtcttcgtaatggattttgacacctagagtgttctgaaaggcatttgttttttagaaagtcggtaggtagttgcagctattttgtaccagatgttgttattgatgctggagatattgcctttaaacagaaccaagtgcaactgttccctgcttgttttggctacattctaaatggggatgtggggaagacagacataaaatgcacattttgtgttttgttacttattacatgtttttcagagatggaaccttattatattgcccaggctggtcttgaactcctggcctcaagcgatcctcccacagtgctgggaatacaggcatgagccattgtactcagcctaaaaatagacttttttttaggtctagcagttttaggttcacagcaaaattgagcagaaggtacagagagttcccatatacccccctacccccacacatgctgttttaatcttaaagatcaccttaat

SEQ ID NO: 26312 - DNA, 1030 bp, Homo sapiens
ctctggaatgtcccacttttggggtttgtctgattgtttcatggtgtcattcagcatattccctcctactcctgcgtttcttgtaaactggaagttagatgtaaaggctccatttgatttttttttccccccagacagagtcttgctctgttgccccatctggagtgcagtggtgcgatttcagctcactgcagcctctacctcccaggttgaagcggttctcatgccttagcctcccgagtagctgggattacaggtgtgtgccaccacgcccagctaatttttgtatttttagcagagactgggtttcaccatgttgcccaggctggtctcgaacgcgtggtctcaagtgatccgccctcatcggcctcccaaagtgctgggattacagggatgagccactgcaaccagccaagtagagttttattattattggtctaggctataagtcaggtcattatggaaggagagcctcctaacatccttcagtacttcatttgaatttgcagtttttggctgttaggaataatgctgttacaaatgttcatgtccaactgtaggtgtagcatgtgttttcacttctcttgggtatgtacctaggagtggaattgtggggtcatgtggtaactctgtttacctcagagttgctcaggagcttctttgcctaccagaggacatctccactcaggcctgtatttaagggtctccacttggtggttgtacctaagctgtgtctccacaatcatctattactgattccctacatagagcctaagctccaaacaaactcagttgcttaatgttcttaaaatgcatcttgcttgttctcatttctgaggctgatttgatcctatccattgtttattggaaatgctgccctttaattattattattactattttttgagacggagtcttgctctgttgcccaggctggagtgcagtggcacgatctcagctcactgcaacctctgcctcccagattcaagtgattctcctgcgtcagcctcctgtgtagctgggattacag

SEQ ID NO: 26313 - DNA, 1074 bp, Homo sapiens
ctgctgaagctgaacgtggcccccctcgccgtcttccagatgctcaagtccatgtgtgccgggcagaggctagcgagcgagccccaggaccctgcggccgtgtctctgcccacgtcgagcgtgcccgagacccgaggtcagagctgggcccgctgtccctgccccagtggcgggggtggcgggcggggagggggcaggcgcggcacagcggcggcgtggccctgagtggccaggcctgtctgtcggtcggtctaggcccagcacctgcagggcccatccgtgggctctgctcctgggcttcgctgccagccttaggaggcacgtccaggtcaggtggacgcagagtgcgtgccccagggtggtccaggctgggtagggctcctccgcttagctcctccccacctcttcactcaggccttcatcctacaaagtcgggaatcaagacggtttggggctgggcgccgtggctcacgcctataatctttgggaccccacggcgggaggatcctttgaggccatgagtttgagaccagtctgggtgacagggtgagatcctgtctctaaatgtttttcaaaagacagtctcgatctctgtcctgtggtatacagcatccagggaagtgcccagggagcagggcaggcagacgtcttcctgcctttaccccacctgggcccagttcctgcctctgatgattgcaggaagagagttagacgcggaactcccagggtgcagaggcctgcggggtctgaagggcctcctccctctccagtgtggtgactgggctgaggagatgctgggactgagagtgtcatggtggagcctccgtccctgctcatcctctccgcatgttgcttctgctcccgatggctctctctgaaatgcagcacaacctcccaggccaatggaaggaggcccagagctggctccctgcctggaagcaggaggagaccctcacaggcatcatgagaaggcgtggaaagcaggctgccttcatgggggaagtgccagggcctgggcacccacgcccgctgacccaagagggcccgggcacctgcgtgctggcctcttcactg

SEQ ID NO: 26314 - DNA, 2140 bp, Homo sapiens
gcggtccgcctctccttcgctgcccaaacgtcggggccgccccgcgccctccgcgcatgagtggccgccggtccctcgcggctgccgcacacgggtcgggcggtcggcctcctcgcacatgggcacgaagggtcgggagtggtgagcccgtcggggggttttgtgtcctgtgggtggatgggatgtccggttcgccgccccaccacccccctcccaccaccccaagctgctccctccctcccccacgccccatcgcccgccctgccgcgcccaatctcgcaactgggacgccgggctcatcctcgcgagtcccagaggccgctttctacctacctggttgatcctatcagaaccatatgcttgtctcaaagattaagccatacatgtctaagtacgcagggctggtacagtaaaactgcgaatggctcattaaatcagttatggttcttttggtcgctggctcctctcctacttggaaaactgtggtaattctagagctattacatgctgaagggcactgacccccttcacagggaagatgcgtgcatttatcagatcaaaaccaacccagtcagcccctctccgtccccggccggggggtcgggtgccgccagctttggtgcttctggataacctcgggccaatcgcacgccccccgtggcagcgatgacccattcgaatgtctgccctatcaactttctatggtagtcgctgtgcctatcatggtgaccacgggtgacagggaatcagggttcaattctggagaaggagcctgagaaatggctaccacattcaaggaaggcagcagacactcaaattacccactcctgacacggggaggtagtgacgaaaaataacaatacaggactctttctaggccctgtaattggaatgagtgcactttaaatcttttaatgaggatcaattggagggcaagtctggtgccagcagccgtggtaattccagctccaatagcgtatattaaagttgttgcagttaaaaagctcgtagttgaatcttgggagcgggtgggctagcgagccacagcccgtccctgcttcttgcctctcggtgccccctggatgctcttagctgagtgtcctgtggcccgaagcacttactttgaaaaaattagagtgttcaaagcaggcccaagccgcctggatactgcagcttggaataatggaataggaccacagttctattttgttggttttcggaactgaggccatgattaagagggacggccgggggcattcatattgcaccgctagaggtgaaattcttggactggcagtttagaccagagcgaaagcatttgccaagaatgttttcattaatcaagaacgaaagtcggaggttcgaagacgatcagataccgttgtaattccgaccataaacgatgccaactggcgatgtggcggtgttattcccatgacccgctgggcagcttccaagaaaccagtctttgggtttttgggttccgaggggagtatggttgcaaagctgaaacttaaaggaattgacagaagggcaccaccaggagtggagcctgcagcttaatttgactcaacatgggaaaactcacccagcctggacacggacaggattgacagattgatagctctttctcgattccacgggtggtggtgcatggccttagttgctggagtgatttgtctggctaattccaataacgaacgagactctggcatgccaactagttatgtgaccctggagcggtcggcatcccccaacttcttagagggacaagtggcgttcagccacctgagattgagcaataacaggtctgtgatgcccttaaatgtccagggctgcacgcgcgctacactgactggctcagcgtgtgcctaccctatgtggcagatgtgggtaacctgttgaacctcattggcgatggtgatcagggattgcaatttttccccatgaatgaggaattcccagtaagtgctggtcataagcttgcatgaagtccctgccctttgtacacactgcagtcgctactcctgattggatggtttagtgaggccctcggatcagcccgctgggtcagcccactgccctggcggaacgctgagaagacagtcgaacttgactatctagaggaagtaaaagtcgt

SEQ ID NO: 26315 - DNA, 1035 bp, Homo sapiens
ttttggactgagtctctctcgctctgtcacccaggctgcagtgcagtggcgctctctcgactcactgaaaccactgcttcctgggttccagtgattcttcttcagtagctgggattacgggcgcacaccaccacagccggctaatatttctatttttagtagagacggggtttctccatgttggccacactggtatcatacccttgacctcaagtgacccgccctcctgggcctcccaaagtgctgggacgacaggcctgaaccaccgggatttcagcctttaaaagcacgggccctgccacctttccctgtggcccttacactcagaatgacgtgtcctccctgccataggttgactccttgagtcccctatgccattgcactctagcctgggcagcaagagcgaaactccgtccccccaccttcccgcgcaaaaaataaataaataaataaataaaatctctaggtgtgttcccaagagtgatgtctaagaaatggcactgtacactgaacgcagtggctcacgtctgtcatcccgaggtcaggagttggagaccagcctcgccaacattgtgaaaccctgtctctactgaaaatacgaaactgagtcaggcacggtggggcaggcacctgaaatcccagctacatgggaggctgtggcagaagaatcgcttgaacttggcaggcggaggttgcagtgacccaaggttgcgccactgcactacagcctgggcgacagagcgagactcagtctccaaataaataaataaataaataaatgaaagaaagaaaaaaagaaaagaaaagaaagagaaaataaaagaaaaggcactgtatcgctactgggctaggaccttctctctttctatctgtttctctctgtctctctctgttcgtctctgtctttctctctgtgtctctttctctgtctgtctgtctctttctttctctctgtctctgtctctctgtctctctgtctctctctctctctgcctctctcactgtgtctgtcttctgccttactcactttctctg

SEQ ID NO: 26316 - DNA, 1001 bp, Homo sapiens
tgagaggtgtagaataagtgggaggtccccagtgcccccctatccccgtgagggggtggggtggggtcctgtgggctgcccatggaatactactactctgatcgttttttcactgacctggtgaggcagggggtgagcccctaggggccctcccttctggcgccaagtgcccagctgcacgccggccgggtgttgacccgtcccgaggacagtgccaggtggggagtttgggatagtacacctgtcaaacggtaatgcaggtgtcctaaggagagctcagggaggacagaaacctcttgtggagcagaagggcaaaagctcgcttgatcgtgattttcagtgcgaatacagactgaaagctgggctttgacgatcattctgacgtttttaagcaggaggtatcagaagttaccacaggggataactggttcgttgcggccaagcattcatagggatgttttttgatcctgtaatgttggttcttcctatcattgtgaagtagaattcaccaagcattggattgttcacccactaatagggcatgtgagctggatttagatcgtagtgagacaggttagttttaccctccgtgatgtgtgttgttgcaatggtaatcctgctcagcatgagaggaatggcaagttcagacatgtgcttggttgaggagccaatggggtgaagctacggtctgttggattgtgactgaacgcctctaagtcagaatcctgcccaggcggaaggatacagcagcaccgtggagccttggttggccttggctggccttggctggccttggctagccggttccccacccccgctggtgggctgcctcacccttggtggggtgtgccccaccatgtgctaggactgggtccggtgcagagtgcccttcctcctgggaagggtgtggctggaaaggtggcctccttgcccgtcatgcaacacacgttcgtggggaacctggtgctaaaccatttgtagacgacctgcttctgggtcag

SEQ ID NO: 26317 - DNA, 1045 bp, Homo sapiens
acctggctcaggccaggcatggtggctcatgcctgtaatcccagcacttcgggacggtaaggcaagagaataacttgaggccaggagttggagaccagcatgggcaacatagtgagaacctgtctttacaaattttttttttaaataagacaggtgtagtggatgtggtggcacatacctgtggttccagctactcgggagaggaaggtgggaggcttgcttgagccctggaatttgaggctacagtgagccatggttgcaccactgcagtacagcctgggtgacacagcaagacgccgtctcaaaacaaaaacaacaacaacaaaaaacataatacaattcactggtatactggaaaaaacgtagggtcaaggatgactccaagctttggctcttagaaaggctggatttgcccttgccttctgccaagtgaaatgggagttctgcgtggacatgctagatttgggggcccattaagcctgcaagtggaagtggtgggtaggtgggaggctaggagagtctggggctcatgtaaatttgagtgtcatcagcacatcaaccgcatttgaagctgtgtgtccaaatgtgatgaggaagggagggagtgtagcccaagagaagactaggtcctcctgccttatctcagtcacagagaagaggaagaccctgtgaaggaagaggagggctggggagcatggcgtcttagaagccaagtgaggaaggtatgtcaaggaggagactcatgattctgtctgttgcttgttactaaaaagtggcaagcaatcttcagttctgtcctaccccttcctctgccagtggggttccagtgtagacaggagaagtaggaatggagggggaggatggtctaagtgtcctgaaaaaggagacaagatttaaaacaaattcactgactccacatgagagagtacctgggtatgagggcacttaccttagggcccatgtttcagcatcatatgcctgtctacatgagttgcgcaaggcaatcaagaatccgcattaggttgtggctttggatgacctcatg

SEQ ID NO: 26318 - DNA, 1045 bp, Homo sapiens
tttcatgggtagtggggaaactctctttaattgttctctgctaattacacccttgctactcaatgtggtccatgggccagcatcatcagcatcacctgggagcttgtcagaactgcagactctcagagcccaccccatacctactgaatcagcatgcacatgaacaaaagctcagctgatccatatgtacattaaagcttgaaaagtactgccctgagagatgtttaagggctccaagcaaagcttcccaatccacactattcaaaataaccttaatacgtattttaggaaaatcggggttccctatgtttgaggaagcctgcaaattcaaatcctctcttcggaaactacgctaatgcccattggcacactgaagcctctgagaagtcctccaaaaaagaaacttgattgttgttggatgaataacattatttgaagaataactttagtgtttcctgaatggtttgcctgctgaacccttcctaacctgtagtctttcaacattttgtagaaaagtagtctaagaacagtttgcctcggggtcttgaaaaggggcttctatagatgtgtatacataattaagcagatgttttgggcagcacagactacagtgggacagagtggcaggaagcccagctttcactgtatttggaccttttttattatttctgaatgtctcccccacctccttccctaaacttgtaaaatgttgatgaaaggtgatatgtgattccacatacgtgtcctcatttaggaaaagtcagttcccaaaagcagaatgaagcagagccaaggcctcagacatgctcatcattcggatatgctgaagacccaatggcaagccagccgcttccagactgggggagtgaagttgctgccaccgggacccaggtgaggggtcgggggaggtgaagggtgcaatccacctgttggtcctgattctaaaaagtgtaccctaaaaacacttttatgatagatttcactttaaatgaaatttgctgttggtttactgaatataaaccaaggtctagggttcaccctttcc

SEQ ID NO: 26319 - DNA, 1050 bp, Homo sapiens
ctttggcccccttcagttctcttaatatgtggtaccatgctgcacccacagcaaaccacagcaaaggtagaaatgatcactgagaaagggctctactaatatgtctctccagaagccagaagctcacatcagtgatccctggtaacaaagtccatccacttttggctattgcctaatgtagttactacttaggtaccaggcatcagggaattataggatatcaggaagtgtaaaacagggtcccgtagggagaccatgaactaactgatggcttagttgaagagccaagacacatgtgtatgtgtgtgtgtgtgtgtgtgtgtgtgtgtgtgtgtatttgttgttgttgagatgaagtctcactctgttgcccaggctggagtacagtggcatgatctcggctcactgcaacctccacctccctgattcaagcaattcccctgcctcagcctcccaggtagctgggattacaggtgcacaccaccatgcctggctaaattttttgtattttttagtagagacggggtttcaccatgttggcctgactggtctcaaactcctgacctcagtcaatccacccaccttggcctcccaaagtgctgggattacaggtgtgagccactgtgcctggcctctgtctctgtctctctctctttctctctctcttcccgccaccctctctctctctctctctctctctctctctctctctctctctctatatatatatatatatatatatatatatatatatatatatgtataaacatttttaataatagtagcaacacccaggtaaaagtccctaagcaccagcgtttgtcaggggctgttcagtcttcacaatgatcccacatagtaactactttcatgatctccatttacaaagaaagaaactgagtcacagaggggttcagtaattttcccaagctcacagagctagcaagtgaaagccagagtttaaacctcataaatggccttggagttcaagtgctcaaccacagaacagttatttactgcagtagataatcctatgtgataatcacatgc

SEQ ID NO: 26320 - DNA, 1031 bp, Homo sapiens
ctcaaccctgttcatttctacctgtttcatttgcatatgatcagtttgttattttatttatttattttttttgccattgttgaacccaaggttttctctgcagtgggtattagatagtgtctgacattatttgctttcataataatttgacaatatttacatccaggattctagcctggttgaataatgtgctttttgaatacaagtcaggtgtcattttcttggcattttgttcaaaactgtgttatttttatttagtccaatgtgcacctttgtcattgttttgattgcctgttgagtagactgattcaagggtcggtcacctctttcctacctcatctgaagtttgttgattttttttttgttctgatcctattgcattgtagttttcaatgtgagaaattaacttgtttcttctattagactattgttttctttatggtggcccctgtatattttatccatctttattttcccccagcatagctcctgcaggtacagcaaaggaccagtaattgaatgtacacataaaagaattgatgttccacctcgtttcctgaatatgactgttccacttatttattgctatgtaaccaactatctcaacactttgaggcttaaaataacaatttaatttttctcacaattttatgggtcagaaatttggggaggacacagctggatagttcatctccaatctatgtgatgttgggaggtgaaaggatccatttccaagatggctccttcactcccatggctggcctctcagtgtcccctggcctatctctctctgcaaggcatctcatcctccagggcctgtctgcatagctggggctttataccacctcaaaacattcagactgcctacatggtagctcatataagaagtgttctaagaggccaggtagaagcttaaaagctcatggtgtagtcttggaagaccaaagatggcacttcagcctccttccattggtcaatcaagtcagtaaggccagtctagattcaagaagataagtcacagagcatttgca

SEQ ID NO: 26321 - DNA, 1103 bp, Homo sapiens
aaatgctgtaaaatatccacgtagtctgatttctgatagcaaccttttgagggtgatctaattcattagcattcaaatgagctccaaccctagagcctcactacaaagggagtgggaaatatgcagttttactttataaccaaagcagtgtgacccaagtccgataaaggaccagagatttaagatgtggatgtgggaggagagattataaacaccagctgtcatggtgtaagagtctctacagtcttagttttggtaattactcctgtttcagaaatatctgaaatacatctttaatttatgaattgaactttctagatttaaacatccttggctgcttaatagcatttttgcctttggaattggaacgccttagttacagcacacccagggcaggctcagcctccctttcagagtcagtaagtgctgctgctcagctgtcacggtggacaggggctcctctagaaagcaggttcgactgtgtttctaaagaagatacagcttgtaacacgtgtccgtggtttgttttgagagaacagcatctcaacccagcaaagtaaagaagacatatttttaagaacagagcaaggaacatgagcagttggaaattttgcatcatttttcccaagatagagtcttttcccttacctttgtctcatttgtaatcatatccacaagacctttcttagaaacaggaaaaataccttttcctgtgacatcatttttttttctgtttctgttttgttttgctttgttttgttttttgcttcttaggttcctggggccaagtcaaattggttttggtaatctcataaaatactaagatgatcaggaattcatttagaggagactgcctcccatacagtgtagtagcttgggggaggtaactctgtaggtaattccagcttaaaatgagaagcaactgcaggcaaacagcatatgatgtgcaggtgtttctaagttcgtatgataaaatgggttccttggaaatccaaatcaccaaaaaatctccctgcagtctagttttatgagagaaagacaaataagaaaacaaacagcctttttcctttttccccaaaagtggtgtcggggtatttcctgag

SEQ ID NO: 26322 - DNA, 1091 bp, Homo sapiens
attcctcttgtccgtagatctgtgctaggaaccagtgaggtacatcaacacctattcatttcaccataaccttttccctcattttgaaaaggttaaaatagagttgaagtgaagttcacagcccaaagtctcactccagcacatgctatattcatctatactgatttttatacacacaacacctgtttcagtaagtaccctggaagttaatcagcgaagataagtgaactcttaagagagctcaattgtaatttacagttctttagaaagtgcttcctttctctttccttattttttttttaagccttaacaaaatgtggtaaacaactgtaaatatgtagatcggcagtgagtacattgagtgactgagtgcacacaggctgggaaaagaaatctaaaattctgtttgttgatagagtggctaagtctttgcacagttatttataacattttaatacacaataaggttataaagtatttttattgagagcttttatttatgtctgtggcctataatcttgagaagtctcaagggtttttgattctgctttaagcaattgttcttttctatgaattgttatgaacttcgaatagctgctgaagtgggtgatggtggtaatgggagtatttttattgtgtgttaagatttaaagggctgaaactcttccttgaggaagcagatttctttcttcctcttttgttttaagtggcatccactgttcatataacaagttcagatacagaaggcggaatttctcataaccaaagtgtgtgcttagattcaggtcagtcaaaaataatgtctttcaaacaagatgaatcttccttttctctttgaaattattctataaggtgaatttttttattctacatcctacagaaatatttcccagatatccagaagttttcaaaacagtttcatttgagagcacctgctggctggcacactaactaaaaagtatttgtctcgtacatccaaagtcatgttaaatactttgaaaggaatagaagagttttaaataacatcactaagagttgaaatagatatgtacattcttctccggaatttaaaatccctggtttaatgggtt

SEQ ID NO: 26323 - DNA, 1044 bp, Homo sapiens
atcaagaatagtgtcgtgagacattgggtgaaccctatttggatcctgatttgaaaatactgcaaaaaagaaaacaaatgagacaatctgaagatatggttggaatatttgtctactccctgaatatttgatatagttcatgtttttaggtgtgataacatatggctatgttttttaaaagacatatttaaaagacatacctatccatactgacataaatatggctgaaaagatatgcttgtgtgatgtaatttaaataatttggagggaggatcaggagttaatgttgaaactcaattggctttgagttggttataatcaagcatgtgagcatttcttatactggaacctttacttttgcagatgtttgtaatgttttatgaaaataaaagaagagaatacctccaagacatgctgctttcttatagattattagttgcaatcttagttttgctgaagaaattaacagaacttaatacaattactcttatttgcaagtctataattttctaaacctaactctgatgcagtcctactcctaatatttacaaggcctagaacaagagtatataaatggcagcccacattctacgggtctaaatatatacaagttataaaccaagtcagcaaaataaaatgccatgtaaaatgtgttctccttgatgaatgtatcttcatcatgacctggaaggccgaatcaagcatggcattctcatagtccttggagttccattttggcccatttggtacaggggcagccaattcctaacacccagcttgcagcccagtggtttggttggctccctttcttctctcacccccagctccatgttcccattaccactaagggcctggggtgcacatgtgtgtacaccctagctgtcatgtctatactctgtccacatcccatgcctgctgccagcatttggctactttttggatcttgggtgcgcacacatacccagcaggtcctggaagcaggcttgggcccatttggaaacaaattcctggttcagcataccctgaacatcatgaggcagaggg

SEQ ID NO: 26324 - DNA, 1084 bp, Homo sapiens
aaaaaaaataaaaataaaaatataaattttgttttgcacatacttgctgataatatatagaaatacagtagatttttgggtgctaatcttgtatcctatgattctgtgagatatagttattaattttaggaggttttgtagattccttgggattttttatatagacaatgtcttctgaaaatagaaagtttatttcttcctaacctgtatgacttcagtttgctttcttgcctgattgcaatggctagatctttcagcattatgttgaacaaaattagtgaaagtggacagtctaaccttgttctcattatttgtgagaaaactttcagtcttttttcaccatttatctgtagtttgtgaggtgtttgtttgtttggtttttggccagtgctcttttaactgaggaagttcccctccattcccatttttctgaaagttttcatcatgaatgggctgaagtttgtcaaatgctttttcccacatcaattgatgttgatttttttagactgttgataagatggatatttttttccattctcatgtccctctgatgaattctatttggtcataattctttttatgtattactgaattctgtttcttagtgtgctggtaatgagttttgcattaacatttatgagggatgttgatttgtagtttttttatttgcctttatctcgttttagtatcagggtaatactaattttataaaatgaattgggaagtattccctcttgttgtattttctgaaagagattgtataaaattggtgttaattcttctttaagcattttgtagatttctctagtgaaaccatctgtgcctggagatttcttttgtgtgtggatttttaaattataaattgaattttcttaatattattaacagggtcatggaaattatctgtttcttattgggtgagttatggtagtttgtgtttttgaaggaaatgacccatttcatcaaagttgtcaaatttatgtatgcagtgttgttcatagtattttcttactatccttttgatatctgctgtgtctgtagtgatagctcctgttttcttcctactattggtaatttgtgtctt

SEQ ID NO: 26325 - DNA, 1050 bp, Homo sapiens
aacttggaaactcatgattctttttagatatacagaattttagcaaaattgttttttcttttaaaaaagatgtagggaggagggtgaatgcaagaaacagaatgtagtaaaatgcttttcatgaaataagattaatctcctatcctgaatgaaaatagaggcagaagacagccatccagtgagtgctttgtaaatcacattattaggacttgcttaaagcattcacctagtgttctatatggaggtggttggtggaactgccatatgccagcttgggtctgggccagggaggcatgcaggaagggttttgcattccagtcatcctctcccgcctggcaaaaagcactttttgtatgtggtggaagtacccaagttatacgtacacaatgggaggctgaaatttcatttccacatgaaattagtgaataatggctttcaagactcactgaataagcatccccaagacagtcagcattgtaagtctgtacaggacgccagccatctggatgaaaaataaatcagttatgcagctactttggggggcatcagagatgggcatgcaagggtgaagtgtacggacactgtattggagcaatttgcttttcatcagggctttgttgtggccaagttttgtcacttctgtgattccatgtcactcttgtactgttctaagtcactaacttattaagccagaaatgcatatatttttatctccaattgtaatatattggccactgggtgtctgtttaatggttttatcttactattttattatctttattgtttaccatttcttaaaatacaccttcacattaattttggattttagcctttaggagagtaggtattctatctgcatggtggctaagttcgtaactccggaatgcgcaactctagacagtgttatcaataatgaggtgtttattttctccaaattgtgatggtgaggtctcctttctggctaatgtaagactagctgttaaaatatgatttgagaaaatatgatttcagttttggtaagggttatttgaaaaaaaaataaggccaggg

SEQ ID NO: 26326 - DNA, 1033 bp, Homo sapiens
gaatatagagtttaatggttcatcccaaattatataacgagtaaagatagaactgggatttgaccaggccctctggcttcagcctatgttcttgactttactgctttactttttctccctgactcaagtacgatctccagggagacatgaaaagaaaactttccttgaaattatttatagaatgcagttatttgtttacctgtagttaacatttagctctctctatactaatccttcttgaaaaggagcgtttttaaagataagtaacctttatgttgctatcaagcatcacctggcaaaatagaaaggaaggaagaggtaaacactgggctcactaaacatatcttggattatccttgagaatttttaaatacttattctagaatatttttataagcattcttagaatttttttttgattccaagtatttaagcaatgagtgtctggaacaatgagagaatgctttgttctggaaatcatgtataagtatttacacaataataccaaacttaactggactacacgaactggattccaccttgggccctattatgagttgcccaggtttcctgtacatcctaaaggtgcctcctcccaaaaccaaacgtccttgagccctgggaacttaaagaagttagatagatctgtagtcccaaagtacttacagagcaatttattaagacttgggttcctgagaaagttttattctattactcagttattgtcttcaatctgccattcactgaaaggtttctttggccttaattcaattctctatctcctacgctatcagtgtttttgttgagcacttttctatccagacagataacaggatttggtgacagctttcaatttcattactgctaaaacttttgtaggtatacaatttctctgtgtaggctggtccctgactgtgatttatttagctcattatttattggcctgtaaaactggcccaactctgcaaaataactcactaattcttcccatgtgaaaacctctgaagatatttatcaacacacatgtaagtaa

SEQ ID NO: 26327 - DNA, 1082 bp, Homo sapiens
gttgcagttaccaggtgtctgctctggggaaatgacctgtgtgttttctgcttagaatctcaaccagctagaaaagtctgtgtgtgtccctgtgggacaggaggaactttctttatgacctttgggatgacagagaggggtgtgtgagtgcaggaaaagtacgtttcaggccccagactcgctgatatcactgatgtgtagacaagaaacttgacaagcagtgcctcctggacatgttgctttgatttattcctgggcatgtgcggagcccaggggtcacgtcaaagggcaaaagtcttgtgggttggtgggttggtgggtgcatctgcacaaaatagagcagaaatatgtggattcttttttaaaaagtttatatatatgtgtctgtatatgtatatatgtacacacaaacatgttttatgttatacacacgtgtgtgtgtatgtgtgtgtgtatatatatatatttttgttttgtttttgttttttttttttttaaagatgcggactcaccatgttgttgcccaggctggtctcaaactcctgagctcaggcagtcctcccacctcggcctcccaaagtgctgggattacaggtgtgagccaccgtgcccgggtagattatttttttaagaaatacttccttgtccaaaactctcaaggctcttttgtgtgtgaagtgtggagtgcagacatgcatggtgacagtgacagttgtggggcccttctcacccgcaggacggagcatggtgacatggcatgggctccttgtcttagccgatgttgacctgctgggtgcagagctgagctttgcacagtgggcagggacatgggaagccaaagtgacgtttccaccctgggacagagctctggcccaagaatccatctgcagaggtggtgggactgtcgacaggtggcgggactgttggcagatgtgtcggcagttctagggggtgagggtgggggtgtgggctggttgtccttgttggggagccaggagtccctgtgcccaccgcctgctcccactcctcctcctgagtctgcaacacggtctcttgggaaggcaagaggacgcccccagctt

SEQ ID NO: 26328 - DNA, 1084 bp, Homo sapiens
aggaggggaataggcatcacaacgtctgctcaaagccacacggcatttttctttcaacatgcaagggattcgatctttttccccccgccccttgtttaaaatcagcatgtgactttaattcaagatcattgggcagacaaatgagagaaaaatggggtacttgtaacagtagggaaaattgggatgagccttagatatgccagtggagtaatcatggcaggaataataaatgacttttctctttactgttcccacagtcattcgccctgtgtggctggctacctgtccttacaaggctgcttctgttgtgggcaaaatgccacagttggtgaagccactatgggatctgtggcctctaacacaagcactgtgggttatttacaaatgtgccctcctaatttctggttgtgggacttttgggagcaaattatccagtccatgaatccacaggccttaaagtgctagcacttcggatgctgtcagtgccaagatggcttagtttctgggactaacctgcttagttcaccttttaggtgctctcttagcagctggcttctctcaaataaagtgaagcaaattcaaacgcattccttctctgtgatgaattcagccagtgtgttttatgctgctttctttcctcttgagggaaatcagatagtgggcagtgccagtctctccctcttgtggaaaacaagcccctagttggcctggcagtaattgtgcctgggcagacaaaggctgtcacagtgactgtcctgttcttagacttctgggtgctctagagccatcagtggagcttataaagactcctgagtctaagcccacccccgctagaaattctccacggatctaggatggggcagtataacaggtgcctcagggcatgcttcggagaaacggacagaaggagatgagaaacaggatggtgagtgtccggagtggaagctttgagccttatgggcagacaagtccacatctcagcttggcaaccttacatgtttctcataccctttgaacttggtcttcctcgactgcttaaatatctgtcttctcagacaggtatgaggagtggtgggagatagtg

SEQ ID NO: 26329 - DNA, 1105 bp, Homo sapiens
ttaatacctaggtgatgtgttgatgggtgcagcaaaccaccatggcacatgttacctatgtaacaaacttgcacgtcctgcgcatgtatcccagaacttaaaattttaaaaacccaagctctcaattacagcattaaatgttatcgatattaaaaaacaaaaactcttgcatttcccctaggctgcttcccagaccaattacacctctatggctgagtgtgggacccaagtgttaagccacctgggtaattctcgtgtgtaaccaactttgacaaccatcgtcctaagactgcagctcattttaatgcaattacaaatcaatctgggctattcaaatgcaggctgtagttcaggaagtctggggaaggtcctgagattctgagatcctgggttatgtcgctgctgctggtccaagaaccacacttggggttgcaaggctctaaaatattggagtagaacagggtttctcagtctcagctctgtggacactttgggctggataattatttgttgtgtattgtagaatgtttaaaagcatccctggtctctacccactagatgctgtcaacactccacccacttggttttgacaaccaaaaatgtctacagaaagtgccaagtatcccctgtgggagggagttgggggagaagtgaggtggagtgggggtaaaaatctcctcaggtgagaaccactggagtagtgttacttactaaggctgggtttcaggacccctccccacttcccgtttctctgtttaatggaaactttatttctttgactaggagaaaaaccacttgtctacctctagactgatcctaaatgcctggaagaggcctcaccacgatcagagtaattcctaccaagatgaattagatatcagctcctttgctgagaaacgtggtgtaatggtggcagggagcagctgaggggagattgggggagagacaggagtgcttttctaggttttctcagtaatggattttgaaagacatcagtaatagctttttaagcattttttctaaatgaaatttggcttatcctcatttccaatcatctctgagttttaaaagcaacaaaacaactgagtaccgcacctcagctctt

SEQ ID NO: 26330 - DNA, 1023 bp, Homo sapiens
tagatcgagaccattctggctaacacggtgaaaccctgtctccactaaaaaaaaatacaaaaaaattagccgggtgtggtggtgggtgcctgtagtcccagctactcgggaggctgaggctggagaatggcgtgaacccagaaggcggagcttgcagtgagccaagatggcgtcactgcgctccagcctgggcgacagagcgagactccgtctcaacaacaacaaaaataataataataaaagaactttgctgctacttttagctctggcgtgtgaggtctgtgtagcaaatgtgctaacaagttgaggggctgtatacgccatcggagacggcggagacggcccataaatgctcataaaagttggttaactgtgccttcaggggatgttcctcctgcttattcccagactgaagaagcagcacagtgaaagtgtgctgtggtgttgaggaagttttgtcattaaaagctggggtctttgtctttttgtctctgagctggtgactcctgtgtgtgagacctctgagagcttcttgaaacccaggtctctccctgttgagtggcaggcatcctgcccatgtcccaggaatgccgatccctgctttggaacgggggtcatgtgcatttcatgttacgcaaactgaaacagagctagtctggtggtgtgtggtagcaggaacaagggtgccctggtccatgctagagactttccttgggttgtttttatttggatttttttcctgttatactattctgtgttggctcttggctttctgggtccggggctatccttactctttccttaatcctagatctttgccatttgcaaatgcttcaagctgtccctaaagcagtggtccatttagaggctggtttctccattgtgccccagaaagtgccagctgcggcttcatttgctcagggaagggcttctgggtagcacggctgggcctcccggtgttttgagcccttggtcctgtctgccttctccctgaaggctctgtttgctgcatgctggagctaa

SEQ ID NO: 26331 - DNA, 1049 bp, Homo sapiens
aggttcgatctgggccagggactggggatgtgactatggctagaattccagtcctaactacaaggatgaatgtggctagggggtcttcattcatatgtgtttcatttatatgtgttttccaagtgttctttttagctaaatctttgcaggtaaatctttgacataactctcgctcctaatggaaatgataaagaagtcgttctgattgaaatgatgtgggggtgggatgaggggcccactgtggtcccttagggcttaaacctacagggtctaaggaacttgttttgaaaaaccctaagggtggtggtccaaccatggcagtgttcagttcactgccctgatacctggttatgagttatttattagcactgagtagaagtaaagctgatgctgtcagggaagaattattgtcattggatcaagaaaaactatgactcctatttttattttcttttgaagcatcaacactgattcatttttgatttatagctcaatatcactgggaaattgttctggttcatgtagaatgtcaaaaacacagctctccatctataaaatcctatcagaactcagtccaggctatttgtaactggtaaccagcgtcactgtgggtctttggcatagtgatttcatggagtgtctgaatctcacttttgagagttgttatctttcatgtttgttcttgtgacagattccccagacttctcctgtgaagttgtgttgattggttgatggatctgatgatgtctttgtggtcgtactctccttgctttagaatgctcacagggctcatggatagctaatacatttgctaattcagaagccagacctaagatttctttccttcattcttttttctttctttctttgtttctttgtttgtttctttctttttctttctttccttttttcttttctttccttctttccttccttccttcttttttctccttttctttttcttctttcttttttctttcttttccttctttctttcctttttcttttccttcttttctttttcttttccttcttttctttctttttct

SEQ ID NO: 26332 - DNA, 1040 bp, Homo sapiens
gttgcagatgtaattaatgagttaagatgaggtcatgctggagtatggtgggacctaatgcaacatgactagcgtccttatgaaaaggggaaatgtggacacagatacgcacgcaaagagaatgccacgtgaaaatggaggcagtgatcagcgtgatgcagcagaagccaaggaatgccaaagtttgccagcaaaccaccagcagctagagagagggctggggccagtttcctctgcagcctgtagaaggaaccaatggtgctcacaccttgattttagacttctagcctctagaactcagacaataaagttctcctggttaagccacctagtttgtgttactttgttttggcagcccttgccaactaatacaagcttggcctgagattaaggaatcactaaagaaaaggaaattgccctggaaacagccatttctccaacaggtgccatccgaagaatttcagtgtcatatatgtatcttgactcaactgtaaaacatcttagaattgatgacccaaactttgaacactgttttgtggtccttagagccttgcttgctcttcattccagactttgttgggctcttctttcaaaaagtcttaagtccatgcacaaaaatcttccctgggaggaacatatactataaggcatttatactaaaatgttggcttttatatttaataaatatttgaagaagcaactggttcttcacatgactatttgttaattaaatattccaattttgctttatgtttataagaaatattgataataacagctaacattcattgagcatggactctgtgccaggcactcttccaggtattttttttttttttgagacggagtctcgctctgtcgcccaggctggagtgcagtggcgcgatctagactcactgcaagctccgcctcccgggttcacgccatcctcctgcttcagcctccctagtagctgggactacaggtgcccgccaccgcgcccggctaattttttgtatttttagtagagacggggtttcactgtgttagccaggatggtc

SEQ ID NO: 26333 - DNA, 1049 bp, Homo sapiens
atagctttaatggagagatgtagtaactgacttttggctacatgatacatattttgggtaattgttatttaaattttatttttatttgtttggtttttttccaaaatgcttgagtaaaaaacatctgctttcagttatttatatctaatttgtcagctgtgcatacaccattctatgtgctagttgtgtgaaatagtgctgctgacccgtctcttcaaaagacagtttgggagtgagaatcatagtctcggtatagaagctctttggatttaatgattttgcctaatctgtagcaattagcccaagctctgaggctctacccccacactcacattctcccctgggtcccctcgtgctgtgttcttcaccctggatgctcagaaagattcatcaggggagcttaaaaatatatatccctgggctcatccccagacaaactgtgttcaaatttctgaaagtgagacccaggcatgggtatcatttgtacagaaatctccaggtgactcaaacgtgctaccaggctgagactcgaatcccgtgtgcattcctggaggtcggttctaaacctggatcccatcgacttatgacctgtagaataccctctgggcagatgaatgaaagcagggtttctcaaggtgtggtcccagatcatcagcagcagcatcacttgggaatccaccgggactgtatgtccccagacctccccccagaccactaaattgaaactcaggggctgggcccagcaatctattttaagaagcgctgcagctgactcggatcacgctgagatttgcaaactgctgagttccagggagagcttggccttggagctggccagcaggcacctgggtggacttcagctttccagggcacaggctgcaagtggctggcggccacagtggctctgagagagccctccataggttctgtcccctctgtcccagcagtgcagaggactggttctgccttcacttaggggatgagggtccatccggtcaccagtgtttacggccatctcttctcccttcctcaacccttgtcagaagagg

SEQ ID NO: 26334 - DNA, 1037 bp, Homo sapiens
gcatgactcctaaatcataatttctaatcttctggctaatttgttagtgctacaaaggcagtctagtccctaggcaagaaggaggtttgttttgggaaagggctgttatggtctttgttttaaactttaaactataaactaagttcatcccaaagtcagttcaccctatgcccaggaaagaacaaggacagcttggaggttagaagcaagatgaagttggttaggtcaagtctctttcactgtctcagttataattttgcaatggcggtttcgatgataattaaatgacattgaacgaaagatactatataggagctgctgtacatgtttacgttttccctaaagaaaccttggcaagtaaataaattaacaaaaccttgcaagtaattcttgtggactgtagaaacaagtctggatttctgaagcagccttccattaaagcacctttagatttggtgcctgtacctggtctttgccagccagcctgagcccagtgatgaaaggcacagacttctgatcactggtgtggtgtggtggacacagccctgacaatgcacttagtgctagaccaggtcctggcagacccttggtccacatgtcctcgtgttagtgactggattgcagagacaattgagagttccatgggggaagggaaaggaagggtggccaggatgagggtagcagagatgcatgaggcaggagaggaagggccagctagcagccatataccttctgatatggagggtttgggggattttaacaaccagcaggaccattctgttgtctccccaatgagtgtcaaccccgaatgttgttcatggggtctctgcttgctgattcgagtatgtgtccacacccacacggtcttttccacttggaacactcttttccaatccccacttttgccgatcttgcccctgcttcaaggctggctgagatcccctgttcatttttccttgctcctggctacaagtactcaccctctgctctctgaagctggaaggcctttatctgtgtctgggtttccgtatttcttt

SEQ ID NO: 26335 - DNA, 1048 bp, Homo sapiens
agcttgagttttattctgtagtgcaatttgggggttgggggagggtgggaaaggattgggggagatgagatgagaggaaaggcaggcagaagtcggctgttgtgagccccatggtggaaggtggtggtgggtgggatttagtctgtgggatttagtctgattagctgtatgtgcagtgcagtgtagaggatatgattttttaaacttcctatgtatttttttctcattactattctgtctgttaatttgcagatgacagtatcagatctcagagggagctgcttactaatttgggtcaagaaacacacatcattaagaaagaggcttctgttgatctgagtggggcatatgcattcagctactttaaaagcagttttcagtcacaaaaataataacagctgcagacgtttggtgagagcttgccacaagccaggtggagcttagatgcagtatcttgtttaatgctcttgagagtgctttgaggctggtggtgttatacctgaatttcagatgcagatgctgaggtccggagaggctgaggaactggcttagctgcaggaccagtaatcagtagaggcagggttggaattcagctctgtagtccctctgctgtgtgctttcccactgtatgagttaaagtgaagggggtggtgggtgtgctgtgtactcacctagtattgcactgttctgaatcatcatcagagtttccaggggaccattcacacagaccctgatcctccaggtggcattagatatggccagggatagatgttgatatggttgggctgtgtccccacccaaatctcatcttgaattgtagctcctgtaatccccaggtgtcatgggagggacctggtaggaggtaattgaatcatggaggcatgttttcccgtgccgttctcatgatagtgaataagtctcatgagatctgatggttttataaggggcagttcacctgcacatgcactcttgcctgccactatgtaagacatgcctttgctcctccttgaccttctgccatgattgtcaggcctccccagccttgtgg

SEQ ID NO: 26336 - DNA, 2022 bp, Homo sapiens
aaaccgcacaaagttattatctgacagttctgaaggacagaagtccaagatcagcctcagtaggctaaagttaaggtgttggcaggaccgtgtttttccataggctttggggagaatctgctttcttgcctttccagtttctagaggctgcctgcattcctcagctcgtgggctctctccacccagcaattacatcactccaatttctgcttccattgtcacatctccttcttccactctcctaccttgctgtttcccttataaggtccctgtgattatgttgggtccacctggaaaatatgggctaatctcgtcatctcaggatccttagcttaatcaaacctgcaaagttctttttgccttgtaaggcaatatattcacaggatctggggattaggttgtgaacatctttggggagcactgtttggggacctagctgtaggtcctagggatacaaaaatgaacagcacagttttctgcatttcaaggggttgtaggcttgaagggagtgggaactcatgaaaggatgtgcagtgttggaagatctgcattcatagtggctgagcctcgggtataaggtgggaggcagccaaaaatgaaagtggagggaaaattggagccataccaacacgtgccaatgcgagctcatgaaacgggactatatcttgtggatcaggacttcttgtcctggggttagtagaaggctgccaggtgttcctctaccacctggccttgtatgtaaaactttaggcatgtgtgcatttttctgtggagagggtccatgatgatattcatcagataacaatggggtttatgagccaaaagttcaatgttgcagctgtgggtgatgggatgcctttggaggactttaaatgacctaattaaagttgcgccttggaaaactagccatgagtggaacttgcaggtataggagtagaggcagggacatccttaggaagccccccagtactgggccaaagatgatgggcagggcaggcagtgggagcagagcattgggactgagtccagggtagatggggaggtagaattgatggaacttggatgatttaatggatgagcagggcaaagggtaattggtggcattctggatggatgaaggccctgttagtggaccaaggggatatagatggtgagcaggcttaggggttattgtgggttgggagggagctgataaattcagctttaaggccaggcacagtggcttatgcctataatttcagcaatttaggaggctgaagtgggaggatcgctttagtccaagagtctgagatcagcctgggcaacagagtgatacactgtctctacaaaaaaaaaataaaattagccaggcaggtgtggctgtggtcccagctactggggaggctaaggtgagaggatcacttcagtgaatcttattactgcactttagactgggcaacagagtgagaccctgtgtatgagctcacataggcacgtgttggtctgcctccaattttccctccactcaaaggcagtaaatacataaatttggttttgtacctatgcatatcatagagcctgtgggacattcaaatggaggtaagtagtatatagtatgtggtcatagccatttctagagtccagaggtacagaaattcatgaactttccatatttttattcttatttaatgtctccactctgttcttcttcagtaaagctaaacccttaaaatgggcaggacttaggaggttttgaggcagaaatagcaacagctaatacactttttgttacttttataatttataggacactttttataatccaaataccatcttatcattgcatcagtctgatgaggggtggtggatgaactgtcactgacatgagggtgatgataataatgaataataattatagataacatatatgaacattcaccatgccaggctaggctctgagcactttacatttattagcttagttcatcctcacagtagccctataagagttgcttttatcatcccattttacagatgagtcag

SEQ ID NO: 26337 - DNA, 1055 bp, Homo sapiens
tctatgaatttatttcttattaactttcattcagcatttcttttctaacctcagcttctctgtgatattttcagatgcagaggtaattctattggtttcttcctgaagaaacctctcatggagcacctgacctcctgtaaccggttctgattgcccatttcacctggtgcacagctgcatcccagactcttccttccccactttttttgggatttcctttatttttctcttctgttggaccccctgtttcctggataccatgtttttctcttctctggcttactcccttttagggggaacacatctactcctagctccctaggtaaggtcacatgggaggtgtagctttcaaaccatgtaaagcctgaaatgtcttcagtatatcctgacactggattgacagctggatagaaaattctcagtaacaaataatgttcccttagagttctgtacactttgcttcattttattgtcatttgtagtgtggctatgaaagtcctaagatcttctgaaacttacacctttgcatgggacctgctgtggtgggggctgttttatccatacacaccctacttcctatttctttgtctttttgttctacttcctgggaaatttaatcacctttatattcctacctttctattgagctttttcatttccattattaagttaaaaaaattgtctgagtgtatttctttaaaaaattttccagctcttgttttgtggatcttttttgaaaattttttttatttttaattaattaatttattttttatttttagacaggatctctctctgccacccaggctggagtgcagtggcacaatcacagctcactgcagccttgaccttccaggcttaggtaatcctcccacttcagcctcccaagtagctgggactacaggggcgtgccaccatgcccggctaattttggaattttttgtagagacacggtttcaccttgttgcccaggctggtcttgaagtcctgggctcaagcagtcttcccaccttagcctcccaaaagtgttgggatgacaggtgtgagccactgct

SEQ ID NO: 26338 - DNA, 1038 bp, Homo sapiens
tcacccacatagtatatttgattataatgcctcttatgcttcatttaatctattatagcaccccattccttttttatactatcatactatcaatggttgaatatactggatcatttgccattctggatttgtcttcctgtatctgcaaggtattgtttgacatgttcttctgttcccccaattttctcagtaagaattgtaagatctagaggcttagtttcattctcattcagttattttgggaaaagatcttaacaggtggtgcagtatatcaagaggcacctatggtctggcgattcccctttccatgttaatattgaaagacaagaggcaaacagataacccagaaatgtagtccatcacaatcagaggctatgtatgtgtatatacactcacacacatatatgtgttcattgcattgaaaaatgtaattttaatacaacaaattatgacaaattattatttatagaacactatcatcaatattcactttcatttccaaaattcaactggatttctaatcttgctatctgaacaattctaaatttcaaactaggccaggcgttggctcatacctgtaatcccagtacttggagaggccaaggcgggaggattgcttgagccaagagttaccagcctgagcaatatagtggaaccccatttctacaaaagaaaaaaaccagaacaattagccgggtatggtagcatgcacctgtagtcccagctagtggaaccccatttctacaaaagaaaaaaaacctgaaaaattagccaggtgtggtagcatgcacctgtagtcccagctacttggttggctgagataggaggattgcttgagtccagaaggtcaaggctgcagtgagctgtgatggtgccactgcactccagcctgggcaacagagcgagaccgtatctctaaataaaatgtaattttgtaatgtgcttaatttaaaaagaatcacccctcagccactgtgtgcccactaaaatattggatgaattcctgccagtttgacaaattatatatttttatttacc

SEQ ID NO: 26339 - DNA, 1006 bp, Homo sapiens
tgttgagacagagtcttgctttctcacccaggctggaatgtgatggtgcaatcttggctcactgcagccttcgcctcccaggttcaagcaagttgcatgcctcaacctcctgagtagctggtactacaggtgcacgccaccatgctcagctaatttttgtagtttttgtaaggatagggtttcacaattttggccaggctagtctcaaactactgacctcaggtgatccacccatctcggcttcccatagtgctgagattatagccatgagccaacatgccaggcccttcgcccactttttaatggaattttttgtttttctcttgtaaatttgtttaagtttcttatagatgctggatattagacctttgtcagatgcatagtttgcaaatactttattcctttctgtaggttgtctgtttaccctgttgatagtttattttgctgtgcagaagctcttaagtttaattagatcccacttgtcaactgttgcttttgttaagactgcctttggtgttgtcatgagaactttgctcattcgtttgtccagaatggtattgcctatgttgtctcccagggcttttatacttttgggcctggaggctctgtacagggagttgccgagcagctactggctcaatagctctggtggcggatggctagagccccaggcttggaggacctacccaatgagcagatatgggaatgggcacccatgtaacagtctggccagttttctgtagggctactaaagtagctgagggcccctccagtccctagtcacctcagattttccagtacctagaggtatcaccagtgaagtctgtgaaacagcaaagatggcagcctatcccaccctctaggagcttcatcccagggaggtacaggcctgttgctggtccaaaggcacctgaaggaggtagctggtgatctggttgggaggttctgtccagtgaggaggaatgggatcggggactcacttaaaaaaagcagtctggccacattt

SEQ ID NO: 26340 - DNA, 1001 bp, Homo sapiens
tttagaatcagcattttaagtgtatacaattttgttggaattgtgttggatctgttgactaatttggaagaatttacttctgaataatatttagtcttctggtccctgaaaagagtatcgttcacttttaatttatccccacaatgttctctagtttttttaatacattttgttagatttatccataggtattttgtgtccttttatgctcctgtaaatggcattttttaaaatgtaaatttccaggtttcccttgctaagtatagaattattatcgattttcttatattaaccttttattctgtgaccttgctgaactccttttattagttcttgtggatttttggttaattctagaagatataggatcattttgtctgcacataaagacatttttatttcttccttgtaatatatatgccttttatttatttgttttgcctattacgttgaaggaagactagtacaattttggatagaaatgataggactgaacagccttaccttgtagccaatcttagggggaaggcatttagtctttcaccattaaatatgatgttattgcggctgggtgcggtggctcacacctgtaatcccagcactttgggaagccgaggcaggcagatcacgaggtcaggagatcaagaccatcctggctaacacggtgaaaccccgtctctactaaaaaatacaaaaaattagccaggcatggtggcgggtgcctgtagtcccagctacatgggaggctgaggcaggagaatggcgtgaacccaggaggcagcgcttgcagtgagccgagattgcaccactgcactccagcctgggcaacagagccagactccatctcaaaaaaaaaaaaaaaaatgatgttattactaagtttttttagatgacttttcttatgtagaggaaacttcctttttttactagtttgtttagagaagaaatggaacatatgaactttttttcctttggcggagaaggggaagaagaggtggtta

SEQ ID NO: 26341 - DNA, 1029 bp, Homo sapiens
ccaagtagctgggattacaggtgcccgccaccactcatagctaatttttgtatttttagtagagatggggttttgccatgttatccaggctggtcttacactcctgacctcaggtgatccacctgcctcggcctcccaaagtgctaagattacaggcgtgagccactgcgcctggtcaacaaaaatttttttaagagacatgatcttgcttggtcacccaagctgaagtgcagtagcacaatcatagcttactgtagcctcaacctcctgggctcaagcaatcctcctctctcagcctcccaagtagggaggactacaggagcacaacaccacactcagctaattgtttttcattttttatagagattgggtcttgctatgttgcccaggctggtctcgaactcctggcctccagcaattctcccactttgacctcccaaagtgttgggattacaggcatgagccaccgtgcctggcctcaatattttttaaatggcagtttccctcaaattgttcagtggattctgtgcaataacaatcaaacccaagattttgtagaaattgacattttaaatctaaaatttatatgcaaagacaaagttccttttttaaaagaactttgaaaaagaagaaaagaataagattcacactatttttctttacagtcgtcaatcaggagacacatgtaaatcactggaacatatagaatctagaaatagacccatatatgtgatcaattgatttttgacaatatgcaagacaattcactggagaaaagctagtcttttcaatacatgctcttggaacaattggacatccatatgtgaaaagaagaaacccaaaccatatcttacacaatatgcaaaatttaatgataaatggattgtatatttgggactttgggttaggtaaggatttttttagatggggcacaaacttcatgaacgataaaagacaaaagtgatgaatttcacctcatcagaacttaaaatgtctctccccaacactgttaagaggtgaatagacaag

SEQ ID NO: 26342 - DNA, 1066 bp, Homo sapiens
aaacttagagcatgaaacaaacatcattagatttatagatttgatttattatctaagatatttcacatggttcaaaattctaacctatggaagagtatacacattgaaaaatcccttttacctaagttctccctataggcgactgtatgtagtttttaatcttccctcagaaactgtgtgcatattcaggcaaattcattgttttaaaaagattgtaatataagcataaacattgttttgtactttccctttttgtctttttttcatatacataaatggtatacattatggttgcatgtcattgtatcattggaaatatactgtactttcggggatggcaggaagttgagagtttgccttgtacagtttatattttctctgtggaatgggaaggacaatcataggttcagagaaatggaaaaatagagggttaaaggtttcatgaaagttgatgtggtttgaaattttaccaaatgagaatgagattagtgtggtaggattgttaacagctctagtaatcatttgagatcagcaactgcagatttgtaatggaaccagttttctctaaggtacaatttctccagccacacccagcagcctggatacaggcatggaaaaggcttcaggcctttttgatcctgaggttggatccattcaagattggattttttcaacagcttatgatgcatggactgtgggacaagggaacttaaactatatttataagaacaaaggtaatgtatgaactcagaaatcaacagggctgaggaaagatgtgaagacagaaaaaatataatggatttggaaattagaggagtcagttgactgaaatgtattgatgcaatagtaaagacatagtgagtatgaatgaacaagcaccttcgaaggatggggtaagtagagagtagaatgtctcaatttaccaggtagaacggtttcttaggacctggttgtaaccatagggatagttggagtaggttttagagggtcattgaagacaatgagtgtgaggaactaagagggaactagaagccatgttttaagaagcattttaacaaatgaaaac

SEQ ID NO: 26343 - DNA, 1034 bp, Homo sapiens
gtcattgtaactatcttcatgggtgggctgtgggaacagcacatctgaagctctaacactcccacgtagccatatgcctttggcagctggagagtcatataaaatcagcactggcccatgttctcatacttataaacacctctctctggcttactactttagtatttatgaactattttctggcaagctacttaatcagaactttaaaaatggttcactttggccgggcacagttgctcacgcctgtaatctcagcactttgggaggctgaggcgagcagatcacgaggtcaagagatcgataccatcctaagcaacatagtgaaaccccttctctactaaaaatacaaaaattagatgggcgtggtgacacgcatctgtagttccagctactcaggaggctgaggcaggagaatcacttggacctgggagacagaggttgcagtgagctgagatcgcaccactgcactccagcctggtgacagagcgagactccatctcaaaaaaaaaaggaaaaaggttcactctgataattaatttttttttttttttttttccaggtgtatggtggctgatgaagtaagtgtttcaatggtttttatgtcttttataagattacacagcttgtttttagtgtctgctattttccatgtactctttctccatatgactatatgtctgtatatggggatggggagagagagaaagatgggagggtgaggagggagggggagagagaatgagaatgaatgaatgtgtgtgtgtgtgtgttttctagacatgcatctgatacatatgttaatattaacattagtgaccccaaattgttacctaggatgcatgaatgagttttgaaatgcagccccccaaaaagcttttctgttataatagtacttgcttaaaagctaaactttaaagattctgttctaaaggttattgtttattgtttcctatgagtttgaaacatagttctgaaatggtattttattatcactcaacaatctgatagatttaaatggcatgtgcttatatgta

SEQ ID NO: 26344 - DNA, 1053 bp, Homo sapiens
tacaatgcataataagcagatgtatcacctcaagcatttattcattatgttacaaacaatccaattatattgttttaattatttttaaatgtacaatttaattattattgactatagtcaccccgttgtgctattgaatactagatattattcattctatttttatttacccattaaccatcccgactttccccctaccccaccactacccttcccagtctctaataaccatcattctattctctatctccatgagttcagttgtcttaattttggattcccacacataagtgagaacgtgcaaagtttgtctttctgtgcctggcttatttcacttaacataatgacctctagttccacccatgttgttgcaaatgacaggatctcattcttttttatggctgaatagtactccattgtgtatatgtaccacattttctttatctcttcatctgttgatggacatgtaggttgtttccaaatcttggctattgtgaatagtgctgcaataaacatgggagtgtagatatctctttgatatactaatttcctttcctttgggtatatacctagcagtaggattgctggatcagatggaagctctatttttagtttttgtgaggaacctccaaattgttccccatagtggctatactaatttacattcccaccagcagtgtacaagtgttcccttttctccatatccttgtcagcatttgttgttgcctgtctttcattttaactggggtgagatgatatctcattatagttttgatttgcatttctctgatgatcaatgctgtcgagcacattttcatataactgtttgccctttgtatgtcttcctttgaaaaatatctattcagatcttttgtccatttaaaaaattggattattagatttttttcctgaagagttgtttgagcttcttctttattctggttattaatcccttgtcagatggatagtttgcaaatattttctcccattctgtgggttgtctctttactttgtggattgtttccttttctgtgcagaagctttttaacttga

SEQ ID NO: 26345 - DNA, 1076 bp, Homo sapiens
tgttgaatgggagtggtgaaagtagacatcttagtctcgttccagttcttcggtggaacactttcagcttttccccattcagtatgatgttggctgtgggtttgtcatagatggctcttattattttgaggtatatccctgatgcctaatttgttgagagtttttttttatcataaagcgatgttggattttatcaaatgctttctcagcatctatgaagatgatcatgtgttttttgtttttaattctgtttatgcagtgatattgtttggatatcttctccaaatttcatgttgaaatgtaatccccaatgttggagttaaggcctggtgggagatgtttggatcatgagggtggatcattcatgaatagcttggtgctttcctcacaatagtgagttcttgtgagacctggttgtttgaaagtgtgtgacacctccccactcactctcttgctcctacatttgccatatgatgtgtctgctcctccttcacctcccactatgattgtaagtttcctgtggccctcaccagaagcagatgccaacaacatacttattgtactgcctgcagaaccatgagccaactaaactgcttttctttataaattactgagcctcaggcatttctttttcttttttttttatactctaagttctagggtacatctgccaacgtgcaggttagttacatatgtatacatgtgccatgttggcgtgctgcacccactaatttgtcatttaacattagatatatctccaaatgctatccctcccccatcccccgaccccacaacaggccccagtgtgtgatgttccccttcctgtctccatgtgttctcattgttcagttcccacctatgagtgagaacatgcagtgttcagttttttgtccttgcgatagtttgctgagaatgatggtttccagtttcatccatgtccctacaaaggacatgaactcatcactttttatggctgcatagtattccatggtgtatatgtgccgcattttcttaatccagtctatcattgttggacatttgggttggttccaagtctttgctattgtgaatagtgc

SEQ ID NO: 26346 - DNA, 1034 bp, Homo sapiens
ctcattgttgaatgtccctcatttcggatttgtcttatgttccttcactttagactgagatgatggacttttagggagattgctgcagagatgatgcctctgtttctctttgactccattcttttgtgttaaaacaaatgccttttgcttaccaatgtaaatttttagccttttaaaaagttttttttcttaattgttgctctaggaattataatacatatttttaacatatctcagtctacttgagtttaacattgacttaattctgacttaattctggtaaaatatagccgtttcattccagtatcactctatttctttccctttgtggtattgtattatacaagtatatattatatgtaagaatatagtgttataattattcattttaaatcttttttaaataaagagaaaaaagaaaaatatgtgtatgcatgtgtgtattcagtcatttatatttatattaatatatacttaaatatttaccgttgtgaaacatatataaaactactgtaggaaaggtctgccagcaacaaattctctcagtttttgtttttctgagaatgtctttgtttcaccttcagttttgaagggcagttttgctggatgtgggagtcttggttggcagtattttttctttctacaccatgaatgtcattcggttgccctcttgcctctgttggtctgatgaaaagtcagcccctagtagtatcattgcttccagtacataataaattgtttttctctttctgcttttaatatttcttctttgtctctatctttaaacagtttgaccctgatgtatctatgtgggcttcttttgtgtgtttatctgacttaggattcattgagcttcttgggtctgagagtaaatgtttttcttcagatttgggaagtttcggaccctgatttttccgtatttttttttctgcccctttctctctttttctgggccttccattatatgaatgttgggatgctttgcattgtcccaaaggtctctgtctgaggcttcattcatttttcttaaacct

SEQ ID NO: 26347 - DNA, 1096 bp, Homo sapiens
ctccccgcccacgcctaccgctttaatagcttattgcagtataatctacatataaaaaattaacacataactgtataatttgtgttataaactatacacagtttgatcagttttagcatcactagaattcttttagaatttccgttttaccaaaaagtttgtgcctctttgtactcagtcaatccttgtccccacctccagacctagtcaacaaatgatgttgctttttttccttctttacagtttaccttttctataaatttcacgtagttgaagtaatatactgtctaatctttttttggggggttcctatttttttccagtcaccagctctctggcaaactgtgtaatcttttgtgtctggcttttctttccaggttcatccttgttgtataaatcagtagtttgttccttcttattgccgagtattttgttgtatgggtaaactacattttgtttataaatttactaattgatggagatttgtatttttccactttggggctattatgcataaagctgttatgaacattcccatgcaattctggatatttgttttcatttctctggcatgaaaaactaagagtaggattactgggttgtatgttaactgtatatattatataacctcctaagacaatgccaagtagttttctaaagtggctatactattttacattccctatggcaacatatgacggttccagtttctcctcattcttatcagcgcttttttttttgtctttttgattatagccattctaataatgtgtattacattgtggctttaatttgcatttccatgtaagtaatgatgttgaacagcttttcatgtgcttgtttgccattaagtattgtctctagtgaattgtctattcacatattttacctaagttttaattgggttgtctgtcttcttattaaagaattctttatatattcttcttacatagcttttatcaaatacaagatttgaaaatattttctcccagtctgtgacttgttactttattttgttaatccaatacaggatattacattgcatttaattattgtgtctttttagtctcttcattctgtggtagtttcttaatct

SEQ ID NO: 26348 - DNA, 1093 bp, Homo sapiens
aaacaattttgagaaagtctcatacttctgattttgaaactactacatagctatagtaatgaatgaagactataagtactggcataaagagagacatacacacgatcagtggaatactagaaataaaagcatacatttatggtcagttgatttcaacaagtatgcttactcattgggggagagaacagtattttcaacaaatagtgccgcaacaatagttaactcacatacaaaagtacgaagtataaacccctactttacactattcacaaaaattaactcaaaatagatcaaagatgtaagagctagaacttgaaagaaaacctaagtgtaaatttttgtgacttggtaggagacagtggcttcatagatatgacacctaaaaacatacaaccaaattaaaagtacataaactgaatttcattaaattaagaaacttctgtgctttaaaggacatcattaataaagataacccacagactaggaacaattatttgcaaatcatgtttctgataagggacttgtatcaagaatatataaaaaacttataactcagcaataaaaagataactcaattaaaaaatgggcaaaggatatgaatagacgggcatcatcaataaagtgtaaagataacccatagactaggaacaaatatttgaaaatcatgtttctgataagggacttgtatcaaggatatataaacaacttataactcagcaataataagataactcaatgaaaaaatgggcaaaaaatatgaatagacattcatccaaagaggatatacaaattgccaataagctcatgaaaagatgctgaacatctttaatcttacccatgaggatggctataatcaaaaagaaagacaatagtaagtgttgacaaggatgtggattaattgaaatcctcatgcactcctaattggaatgtaaaatagtgcagccactttgaaaaacagtttgctagttcctcacaaaggtatgcataaagttaccacataatccagcccttccacttgtagatgtattgtacccaagaaaattgagaatatatggtgacaaaaacatgtatacatttggtctttcactatttt

SEQ ID NO: 26349 - DNA, 1071 bp, Homo sapiens
tattaatatttattaaatatttaaaaaccaagacaggtttttgaaatatttaatacttttggtaacctatctttttgttttgccatttgagatttttagatttctcccaattttttcatagatattaaaaaaccatgcattaaatctttgaatctctgctccatcaagcttagtgttagatacattgcctaattttttattaattcatatttatgtcatgtatttatttctggatatgtatattgtgaatatacatggttaaaaataattgacaatgtaataatacatgaaatttatagtatacagttgaacaagaacatttgctatttgtcatgtacttattcattcaggagatgtaagaagcttgtgattgaatgaaattattaggcttagcattgtacattttcttttttacctttttcattagttcatactctttgtatggctattgttctgacataaagtgaattttattttttctggaaatcctggcagagtaatttgttttaattgtctgtctggggaagaaaagactttgtagaaagtcaacaaggatacccaggaattgaacacagctctgcacgaagcggacctaatagacatctacagagctctccaccccaaatcaacaaaatatacatttttttcagcaccacaccacacctattccaaaattgaccacatacttggaagtaaagctcttctcagcaaatgtaaaagaacagaaattataacaaactctctctcagaccacagtgcaatcaaactagaactcaggattaagaatctcactcaaaaccgctcaactacatggaaactgaacaacctgctcctgaatgactactgggtacataacaaaatgaaggcagaaataaagatattctttgaaaccaacgacaacaaagacacaacacaccagaatctctgggacgcattcaaagcagtgtgtagagggaaatttatagcactaaatgcccacaagagaaagcgggaaagatccaaaattgacaccctaacatcacaattaaaagaactagaaaagcaagagcaaacacattcaaaagctagcag

SEQ ID NO: 26350 - DNA, 1035 bp, Homo sapiens
aagtactgggatgataagtgtgagccaccgcgctcagcctcacttacttatttttaaatttatttttacatatgaatgtctacttgatccagcacaatttattgaaaagactttttcctactgcattgtaatgttacttttgtcataaatcaagtaattttatgtgtatacctttctagataagtgctgtctaatggaactttccgctgtgatggaaatattctttatgtgtactgtttaattcagtagctattcactgcagatggctattgagtacttgaagtgtggctagtgcaactaatgattgaatttttaattttactaattttaattaattcaaatttaaatagttacatgtttagtgcctaccatatggaatagtgcagttgtagattctttgttttgtttctctgtttgccatctttgtgtcagtaccatacttcttcatacttcttagcgtagctttataataaatattctggtatcaggcagtataaatctttcagccttactctttttcaaaattgtctcagctattattgactctgcattacatataaattgtagaagtcatttatcaattttcacaaaagtgctggatttgtgaatggagttttactgcatctatagatcagtttggggagaatttatatatttataatacagagtatttcattccatgaatatgaattatttttacatttacttaattgctctttcggtgtcctgtatatctcttatctttttttgtgtgtgctgcagttttgatattttgtatttagccatattcaagcttactgattttatcttttgctgttaattaatttattggattctcttaaggatgagaccatcactcaatatacttgaaatgagaaaccactcaatttctttcttgataagcaagggagaactgtgcttcttagccatgacattctaaacaaagcgaagagttggtatcgcattgggctttggaagcctgaagactttcaaaaacaggagtgtttaaggactgtctgaaatttctgtgtatag

SEQ ID NO: 26351 - DNA, 1032 bp, Homo sapiens
agataccagtattatcatttgtgatagctactttattgtatagctctagcataaccaattccctgctgatggatatttgcattgttttcaattaataatttattttttattgtgttaaaaacgcataacacaatatatcatcttaaccatctttttttttctttttttattttgcgacagagtcttgctctgtcttccaggctggagtacagtggctcactgcaacctctgccaactgggttcaagtgattctcctgtctcagcctcctgagtagctgggattataggcatgcaccatcatgcctggctaacttttgtatttttaatagagatggggtttcaccatgttgcccaggctggtctcgaactcctgacctcgagtgatccacccacctcacctcccaaagtgctgggattacaggtgtgagccaccgtgcctggtcatcttaaccatttttaaatgtatagtgtgaccctgagtcttctctgaggccccatgtgtgggtgccagatgattgtcgacaaaaagagtcaaactgtaaaatatgaggagatttatgctgagccaaatatgagtgaccatggcccatgacacagccctcgggaggtcctgagaacatgtgcccaaggtggttggggtacagcttggttttatgtattttaggaaggcatgagacatcaatcaaatacatttaagaaatgcattggtttggtttagaaaggcgggacaactcaaagtggggacttccaggctataggtaaatttaaacattttctggttgacaattggttgaggttgtttgaagacctgggattgacagaaaggaatgctcaggttaaagataaaggattgtggagaccaagttttattgtacagaggaagctcttagatagcagacttcagagagagcaggttgtaaattgttttttatcggacttaaaagggtatctggctcttagttgattatctgctggatttgggaaggaaggtaggaaaacaaagggggaaggggattcactatagaatatgga

SEQ ID NO: 26352 - DNA, 1066 bp, Homo sapiens
aacatttccataatttcagaaagttccaaacccctgcctcttttcagtcttagccctcttcccctgaagtaaccactgttccgacttcaatcactacttttatcccacaggttaattttttggcttttttccactaaattttcaaattctttgatatggtactttactattgacgaagtactttcacactaggttatttaatattctttgattcacccaatatttagggaacacctgtaggggacaaaaaatgaatgagagcccctgccttccattgctgctaatctggtgggaacgagacatgtatttaattaagcatgtaaaaaatagagtgggtgatgaaataatctatatactaaatccccatgacacacagtttacctatgtaacaaacctgcatgtgtacccccgaacctaaaatataagttggaaattaaaaaaaaacgagagggagaatagagcatcacaaccagagtgctgagatgaattactttattaccaaagaaggaggaggactcagggaggtgccgacgtttaaacccagtcactgaagggtgtgcagaatttggataggcaagataccctgggacaaggtcattctaaaaccatgctaacatttgtactttttttttcattgtgatagttcctgaaatgagttgcataaaactggtacatgtcttagggcagtctctaattgatttttattttgttctatttttaaaaattagtcttcaaatagcagattcacatgatattaaaatatatgcacataaattatatacacaaatatattttctgaatgaaatttagtatctgcatatatttaagagctatttctgtctcatatgttcataatcttcatccattaaaaaaacttttgttaggcctttctcactctaagattataaaaaattctcccattatttacctagctagttttctagttgttccaaaaccatttattgaacaatccatctttttgacactggtttggcatgccttaattatatattcttgtgtgtgttaggatctccttttggactttccattctgttcattgagtctt

SEQ ID NO: 26353 - DNA, 1013 bp, Homo sapiens
taagcataatactgacaatttcattcctgctggtttaacttcataattttattttggcaatcttttaccagcacatattagatcaactttggttttttattaatttcccatattcaattgtgtataccacagcttgattctttagactcctgttgagtgacatttggttcattttcagtgttttgtattacaaacaaaattgtagtaagcatccttgaacgcaacatccttttatatttggctataagagaaatttctaacaaattgatgtcttcaatggtgtgcacatcataccaccaaaatcacataggagttcctgtttatgtgaaaaagggtatgtcattattttggtttgtgtttagttaattatgggtgagattgaacatgttgttatatatttattggctgatgtctatttaaatctgttaagattctttcttttgtggtcaggctactctgaacgcccggacgtccattttggcagcagcaaacccaatcagtggacactatgacagatcaaaatcattgaaacagaatataaatttgtcagctcccatcatgtcccgattcgatctcttctttatccttgtggatgaatgtaatgaggtaaccccatgagcttccttttttatttccagttggagtaatcgagtgagacaaggctggaagatacactgctcaacagctggtgcatgtatgtgcaccagcctttgatttccctcagggtggcacaggatcggacaaagggtttagtaagcaactcaaaataaagtcatttgaattgcctcttccacttaattgtgttcaagaattaagttttcaggttttgttactatttatttctcaaaaggaaacaagttacagttaacttccaaccacactttttatttttttaaacagcctctcactggagactgggctggagtgcagtggcacagtcttggcctactgcaacctccacttccaaggttcaagcgattcttgagtctgagcctcccaagtagctgggatta

SEQ ID NO: 26354 - DNA, 1062 bp, Homo sapiens
agttatacaacataatgtacttactgccactgaacttatacactgaaaaatggttaaaatgataagttttattatgtatttttatcacaattttatttttttaaggaaaagttattttgtcatcttatttcctggccttatgacagagctgcacttaagtgtgtttccatatgcgagactagtctcctggcctttttgtggttgtagtctcctggccttgttggtgtgtgtgtatgtgttttagagagacggggttttgctatgttgtctaggctgaagcactccctcctgggctaaagcaaccctacctccagcctccccagtagctgggattacaggtgtaggtcaccacattggctcttgtttctctttttatttaccaaaatggagtgtttatgattggttacttgttctgtctatacctttggcagtttcacattttcctgactcttggttgcaagctgtgttttgaaggctatgactaaaattttaggcctgatgctttatctttgaactcttccatccttgtcttccatactcaattaggattatggtaagaactcaacctttttttatctttttttattctattttattttgagacagagtctcactctgtcgcccaggctggagtgcagtggcgtgatctcagctcactgcaacctctgcctcccgggttcaagcgattctcctgcctcagcctcacgagtagctgggattgcaggattgccccacaacactcagctaatttttgtatttttagtagagatggtgtttcgccatgttggccaggctggtcttgaactcctgacctcaagtgatccatccgccttggcctcccaaagtgctgagattacaggcatgagccactgcatccggccctttttttctatctaaatataagtcagagaagttttgtttgtggaagggatttttagttttctacctgttttgttttgttttgttttgttttgttttgttttgttagggtcttactcttgcccaggctggagtgcagtgacagcatacattgcctactacagcctcaacctcctgggctta

SEQ ID NO: 26355 - DNA, 1037 bp, Homo sapiens
gcctaggtagattgaggctgcagtgagctgtgatcgtgccactgcactccagtctgggtgacagagtgagaccttgtctcagaatgaaaccaaagaaattgactgacttgacacatgacttactaagtcataaacagcccacagaaaattcacagtattgagcataatattgacaagatgattgttcagctagtcatcttggacagaggaatggccaacagtgtgggtgctgtatgattatttatgtgctatatgataatcaggtatggtatgacattttatatttagtgttccggtgggataggagagaactgaaagagggtcctaaacctagagtagataatagaagtgtcctacacagttaagttctaaggtttagttgtaaccagatgaaattccttaatctcggctgttggtaggtatgtaaagggaaggaggccttggtaaacctctaaggtatcagctgacttttttgtttttcagagtttacccttacctgtgtcgggccttgaaaacattcgtcaaagaccgtaaagagatccctcttgccaaggatttttatgttgcattccaagacctgcctaccagacacaagtaagaaacccttctctggaaaaaaaggaattcaccaaatggtataagtaccacttagctgacagtcagaaaacttgagaggttgccttgatctgctattagctggctatttaacattatacaaatcacttttacctccctgagcctcagtttccttgtctgtgaagtcttttggcttaggttttctacctaaatcatgcaaaaaataggtttgttgctgtaaaattactttttcataattgataatcacaataattataaaacaagtacttataaaattgatgctgtaaaataccaggaggaaaaaatagtggtttgcattcagattttgtagaaggttgacttttgtaggagttatacccacttatccagaaagtttagtgttggagaaatgtattttcctatggagatgggattagatgtaaagggagtgaagcaaattt

SEQ ID NO: 26356 - DNA, 1108 bp, Homo sapiens
attttctaaaaccaagactccaaagaggataaaagctaaacttagtatgatctttttaaaatttttaagataatgatataatgaaaaggaaaattagtccttgagctcctcctactggtggcagttgaaactgttagactagagaactgatatttctgaagtcatacaatattcagtttatacctttaaaatgctgtttcagcagagccagtttcagtttgtcagctattaacatcctcatctcaagttttatcaaaaatgttgaaagtcaaaaactgttggaatgtaattttttttttttttgagacggagtttcgctcttgttgcccaggctggagtgcaatggcactatcttggctgactacaacctccaccccctgggttcaagcgattctcctgcctcagcctcccgagtagctgggattacaggcgcccaccaccacacccaactaattttttgtgtttttagtagagatagggtttcaccatgtaggccaggctggtctcgaactcctgacctcaggtgattcacctaccttggcctcccaaagtgctgggattacaggcatgagccaccgcgccgggccctcaaatgtaatttatttatttttaattaaatctaggtcacatagtaagcattctctaaaaaaagtcataatttcaagttaatgtcatttatttctttcagttgtagcattcatttgaagaaaactaccaaaatctcatgtatatatctagataaaaatttaaattcttgggaagataatccatgtttttcaatgatggatattgtaaaatacatcaaatttcccaaaataattcatggacttaatatagtttctataacaatcaaaaggatttgagataatttttttcattataaaatgcatcagaatgactagatgaactagaataacaaagaaaaaagtaaaaatcaaagatgtttatcaaagtgtaatttagaatgggggagaaattagaaagggcttacatgttcaaaaaaaaaaaaaggaaaaaaatgaatatttaaaccgtaggcctggcactgtggctcatgcttgtaattctggcactttgggaggccaaggtaggaggatcatttgaggcc

SEQ ID NO: 26357 - DNA, 1048 bp, Homo sapiens
atctatgacaaccagttcataagtttaatttccatttagcaagatgttgaagtgagtttaggccaggcgtcgtggctcacacctgtaatcccagcactttgggaggccgtgatgagcagatcgcctggggtcaggggttcaagaccagcctggccaacatggtgaaacccggtctctactaaaaatacaaaaattagctgggcatggtgacgggcacctataatcctagctactcaggaagctgaggcaggagaatcacttgaacccaggaggtggaggttgcagtgagccaggtttagttgaactagctaagaggcaagcggcaataaaatgtattcagtgaccctcttatagaatatattctaagtgaaatacatctctgtacatttgtcagtaacagtgaaacagctttttgctaaataggtcactaggcttttgaaagcagaagattatgccatttgttttgattggatgaaccagacgtttcactaaaccacataatgtgaaaaaaatgcaagtctttttctatagtttaaatgtagacatcttgaaaatgagtaagtaatctaataaattataaagacctttgaaatggttttattgttttatgagaaactattgatttgtaactttgaatgtaagttataaaataatgttacttaaatatgaccagtttacatgaatgtttttatctgatctgcagaaattcaagattatttaaatatcattctttagagtgaaagaaatgtaatcattccattaacagtgttttcacagggtactactgtgtaaatgcagaaggggtgagccctttgatatgggagaagtaattgaaattctcgtaatgagactaagaagacaccttcttcacctaactcagttattcacagctaacttagtggtttgaggtcacatgttttactaaacacctacctagtcataggatagctattttttaaaaatataataagccaggacctaaagataagaagtcacttcttttgaccagagaagtggacaaaagttagtctaaagtagagataattac

SEQ ID NO: 26358 - DNA, 1033 bp, Homo sapiens
tctgggtgttaaacagatgaacattttttattttaatagctatacaatataaccagcaaataaaatccatgttttcatggatattattgcttagagttagttaagttttaaaatgtgatttaaaggaaaatattaagtactagtacaagagatacccagtatgacagaaatgatagtagaaggcaaaagacaagtttaagaaatgctggtttgtgtcagcagtgggcagaaaattggggactcggggctgccatgagaatgataggtgtttgatcaccacagctataggagttctttgaaagtagatctggacattttgaaatagtcaaggggaggtgtcctcagggatgtcataactgttgacctcaagaccaatgcatcagttagaaaaacattttaaggatgctcagcactgctatgtatcacagggtccctccataggacatacatacttgatctgctagcgtttttgtcatacgttagaatgaatgaatatgtgttggaatgtcttgacacagttaacctgaacacatacagctggaatccccctgttgcagttgttattatatgtaatataatagcaattgcagacagcttggattctttctcacagatattccttttgttcaattagaaattctacataattctggccgagcacagtggatcacttgaggtcaggaattcaagaccagcctggccaacatggtgaaaccccgtctttacttaaaatacaaaaattagccaggcgtggtggcgggcacctgtaatcccagctactcgggaggcagaggttgcagtgatccaagatcacgccattgcactctagcctgggcgacaagaaagaaattccatctcaaaaaaaaaaaaaaaggaaaaagaaattctgcgtaaatctggccaggcatggtggctcatgcctgtaatcccagcactttgggaggctgaggcgggtggatcacttgaggtcaggagttcaagaccagcctggccaacatggcgaaaccccgtctctactaaaaatacaaaaaaa

SEQ ID NO: 26359 - DNA, 1035 bp, Homo sapiens
ggaatcaatgaagaagtgggtggttaatttttcttatatcccaataatgaggcaaggctttgaggggtggaggagggaaagaaccattaatatctgttcattctttgtcttctttccatctctcttttaacgctaacttctctctggccgcactttgtgtttctaccattatctgattttcgggcataatattaacgtacacacatcctactcaattaaaagtaaacatggcttctaaaagtattttttgtgctcttcaaaatattagtaaaatttatttttttcttttctttttttttttttttaggaaggaagagctactgttaaccaggatacaagattagacaacagagtcattgatcttagggtatgcctcatttatttattaagtgaagcaattatgccgcattagagaggggcagggataccatacctgtctcaggcttataaagctaaatggtatttgcctgactgtaagtatgataatacaggaaacaatttccttttctgactgacccttcccctaaaaagaattgcaggcaacaggagcggttaaatactagttaacaggatattgactttctttgttttaaaatgacaaatgaatttgaagccagtaaatgatcttgcttccaggtgatatcttttttagacaagttattcagcaagtagaaacataacctttaatatcactacaaagttatgaaaaaaattacatgcacatttgagatcaaccaggtggagatgagtaattaatgcttcaatcctttgaatttgattggagcaccaaattaaaaatatagaagcagttggctctggtggtttatgcagtagtctcatgggtcttctgtttccctttctggtttggttgcaagtgaaagagagtttagtggtttcatcattgttgtagtaaaaccattgcatctttcttaatattttgaccacatcttccttttttacttaaatattctactcaagctcaaattttttgtcaccttaagagttcttcttggctattctaccatcatgtgagtc

SEQ ID NO: 26360 - DNA, 1045 bp, Homo sapiens
tgtaaaatactgaggtttataaattagttactgaatcaattagcttttgttatataacaaatcaccccagtacttagtgacttgaaacaacaaacatttatttgcttacaattctgtgatgcacccaactgagatggctcatctgctccatgcaacattggctgggctcactgataaatctggcacatctctttctgtggcttcctctcatccagcaggctagcccagatatgttgatattcaggtaccaggagggttcccaaaggcaagagtgcgaaaccctaagaacagacacttttcaagcttctacttgtgtcacatctgctaaatattccactcgtcaaagtcacacagcaaaacttagatttaaggggtagagaaatagattctagcccttgatgggaggaaaagcaacatgattgcaggggaatatacatgcaggagcaagaggaagtattgcagccatttttgcaaacagtctaccacagccacatagggaaaaatacaaaacacatctgaaaaactactcaccaatataagtgaataataatggacctatcttgctataagttttttgatgatgtacttttattttattttatttttcagtttccatttttacttttcctttatttttatactttaagttctaggatacatgtgcacaacgtgcaggtttgctacatatgtatacatgcgccatgttggtgtgctgcacccattaactcgtcatttacattaggtatatctcctgatgctgtccctcccccctccccccaccccactacaggccctgatgtgtgatgttccccttcctgtgtccaagtgatctcattgttcaattcccacctatgagtgagaacatgcggtgtttggttttctgcccttgtgatagtttgctgagaatgatggtttccagcttcatccacgtccctacaaaggacatgaactcatccttttttatggctgcatagtattccatggtgtatatgtgccacattttcttaatccagtctatcattgatggacatttgggttggtatca

SEQ ID NO: 26361 - DNA, 1079 bp, Homo sapiens
tgagaaatataaaagtctgaggtctagtgtggtactaattcactataattgaaagaagtgcttgacctataaatgaagcttatgcttaccttagaattgaaacatatggctgggcgtggtggctcacacttataatcccagcactttgggaagccaaagcaggcagatcacttgagcccagaagttcaaaaccagcctgggcaatatggtgaaacatcatctctaccaaaaaagtcagaataattagccaggcatggtggtgtgagcctgtagtccccagctacctgggaggcgaaggttgcagtgagctgagattgtgccacagcactccagcttgtgtgacagagcgagaccctgtctaaaaaaaaaaaaaaaaaaaaaaaaaaaaaaaagatttttattttcaaaaggtggtggttttattattttttgaagtacttacctaatttatttttgttcttttgatgctgttttaattagcaaatacgtggtttcttgtgtttgggcattttgtacttctttgcctcagtgaattgtacatttaatttataacattgaagcattttatgttggtgcattatttgaagaactggtgtgtgacaactttatggcatgcctcttttctaactaatcttttttcaccccccttgcaaagatttaaaaattactcatttgaatgtgggtggttatgtagatctgtaagtatatttatcattgagtatatagtaagatttaacacattatttctgacaaccagaaagctaaaaaatgtatcggttttgctgaaaatctttaatagtcaagtttctgtgttaaaaattttagtagtttttgttgatataaggatatataaatacgcaaatggaaaaacttaatgtacatagtgtctctttcaccattattgacttttttttttttttttggtggtggtaataaatggaaatagtttagaaaaatatgagccgatgactacccaaaaataaaatttggtcatcccccagtctctaccaactgccaagtttatccctactgttaacaagacaatcagaatacatcaatatataggatttctgttatat

SEQ ID NO: 26362 - DNA, 1037 bp, Homo sapiens
tatccttcaactttactgattactgaatttatccgttctgataggttttgctggagtctttaggtttttccaaatataagatcatagcatccacaaaaaaggataattttacttcttcctttccaatttggatgccctttatttttttctcttatctgattgctctagctaagatttctagtcctatgttgaataacagtggtgaaaatgagcatccttgtcgtgttccagatctaagagaaaaggatttcagtttttcctcattcagtacaatactagctgtgtgtctgtcgtatatggcttttattatgttaaggtatgttccttctatgcccagtttttggggggtttttatcatgaagggatttgaactttatcagctgcttttttagcatcagttggaaatgatcatatcgcttttgtccttcatcctgttgatacaatgtattacattgattgatttgtatattttgaacctccttgcatccctgagataaatcccacttggtcacgatgaatgatctttttaccgtattgttgaatttggtttgctagtattttgttgaggatttttgcatcagtatttatcagagatagtggtctgtagttttctttttctgatctatctttggttttggtgccagggtaatactggcctcttagaatgagtttggaagtattttctcttcctctgttttttggaacagtttgagtaggattggtgtgagtcctttaaatgtttagtagaattcagcagtaaagccatcaggtcctgggcttttctttattgggagactttttattacggctttaatcttgttgtttgttactggtctgctcagattttggatttcttcatggttcaatcttggtaggttgtatgtgtctagaaatgtccatttcttctagattttccaacttattggcatatattgcttatagtagccactaatcttttgaatttctatggtatcagttgtaatgtctcctttttcatctctaattttatttatttaggtcttttctcttttttcctt

SEQ ID NO: 26363 - DNA, 1075 bp, Homo sapiens
tgggccattcagtatgttgagaaatcagtttgttcttcttgcattatgctcagatgactttcatatttttacaacactaaagtaagcaaataaaaaataaaatttcacttaaatcaacttttaaaaagtaataacataatggcctaatggttctcctaaagaatatttcactgaattaaactcatttctattcttttttccactttatttagcgaaagaagatctcacatctctctctctcgggtccattggaattcatcctcttttgaaaattttctagaggagtagattttatgacctttccttgttactgacttctgcatgaagaactcatactctcaatgctctttcaaaatttctgtgggagtagactagtgcttggggctgcagatacatggagcacctgggaagtgagttgtggggaagtgacctttgtttcactagagccttaagaaggtctttaggtgttactagtgatatacattgggtgggcaagcaggtaagtggccagagtctccaggactgttgtgagaatatgttaaaaatatacaaataaaaactcaagtatgtggcacaaaagttgcccaatagatccatgggcccctcactttgatcactgttggcattgtgggttcaaaggccagagttgctgtccccctagtgctagggaatcgattgctctgtgcagtaactcttaatggcataaagtaatttgtacctgttgcctattgcatctttttctccattgtgacatcctcacattgtgtcctctacatccctgtttgataggttggaacatcttctactttgtccttcttgatgccttctttgtatgaagttttctgttaggttcatcaaatctgatcatcttattttaaccttaaaaaaaacctggctgggtgcggtggctcatgcctgtaatcccagtactttaggaggccgaggtgggaggatcacttgaggtcaggagttcgagaccagcctggccaacatggtgaaatcccgtctctactaaaaataaaaaaaaattagctgggcatggtggcgtgcggctctaatcccagctacttgggag

SEQ ID NO: 26364 - DNA, 1035 bp, Homo sapiens
ttattataaataggacactattaacacagaaatagggattaatgagaaaagtagcagaggtcatataaaagttgctctagaacatgattttaaataaattggtaacttatgttcttgactcttaaaaaactgattatattaataaagaatgggaagtatacatttgaagatctgtggaatgttgaacaaaaatacttatctgaattttactccatattttgtagggtaatcacagggttaaatttttggaggatgtacccataaattttatgggttacaactcttaacccaaaattactaagtaacaacaaacatcaacaaactatttttgaagctttcgttacaagataatgcatatttcttttaaagtatgaagccataaaaagaacgagattatgtcctttgcaggaacatggatggagctggaggccattatccttagcaaactaaagcaggaacagaaaaccaaatatcacatgttcacacttataagtgggagctaagtgatgagaacacatggacacatggatagcatcacacactggggcctattggagtggagggtgggagtgttagcagcagcaaatatgtatgggtctgcagcaaccacaatccttgccttctcagaagaaaaaattcaactgaggggcataaagcagaaggagacaccaaggcaaggtttatagcaagagcaaaagtttattaaaaagctctaaagcagaaacaaaaggaaggaaatacagttggaagaaggccaagcaagcaacttgaaagacaagtgtgcagtctgatctttgacttacggttttatatgttggcatgcttccagggggtcgtgtcccttctcccctgattcttcccttggggtgtgctgtttgcatgcacagtagcctgccagcacccgtgaggagctgcaagtgcagtgtgtttactgaagttgtgcagatgctcacttgaggcattcttctcttaccagtccagtgttcctagaggaaggtcatataccagttaaattctacctttttgcctcttagt

SEQ ID NO: 26365 - DNA, 1018 bp, Homo sapiens
actaatgttccaaaaacaattttttgaaaatcctagcttagcatttcaaatctaccaactactacttacacttacagcttcttattcttgtgagctaaggagacatcaaataatggccagttttctcaaagtttggactctttaccatcttatcagaatcatctcagtatatttgttaaaaatgcaaattactgggctctgactcaggtctgttaaattggaataactgacaactcaattgggaggtaggacttggaatcagaattttagtatcgtccaatgttgaagtcttatttacatgaaaccccaagaactcaagagaggaattttatgtcttgccctttcagagtctgctgctgaaatcattctcaaaagtttgcggttttcttgtggtctctattttctttccaagtagtatactaaagaagtagaaagttactcagactcttactacttggagaggagaacaacacaaaactcagtgattaatatttcccactcagtaggtgctaactttccactgtgctcttaaagaaaaaaacatttcttcctcccaagtgatgttttcaggggcatttgctggttatgtgttacttgaaaattaaatatagtgattccttccagccactcattaaatttgaaacaattacacactgactctgtgagcaggtagtagaaaaaacttatttctaaaataatatttataaaaatcttgtttgatcatgctttttgaaatttagatttaacttggttttatttgacatctctggatttagagagaataatggaataattttaactttttaaatctagactaaatattttggttccaaaagcctttccaagtaacataagtaagatggagtgttttccctcttagtatttttgtgtctgtgtgtgaagcctcacaaatttaatttctactcagtatagaaaatgagatattattgttagccatgcaattataataaaacctgcttaaatgtttttttaaacaaatcttttgttttcatacttt

SEQ ID NO: 26366 - DNA, 1021 bp, Homo sapiens
cttggaagcagcccaccaccatcttgggagctctgggagcaaggacccctctccttccccccaccgccccaccccaccccacccggccccaccgtaacattatcatctttgttttgaggttaagctataaactaaattcctcccatagttagcttggcctacactcaggaatgagcaagggcagcttaaaggtcacaagcaagatgaaattaggtcacattactttcactgtcacaatttttgccgaggtggttagatacagagtcttacagctaataggagagtagtaacaaagtctctatgcaaatttgaggcacacagattatatgaatcaacttgtataaacaaatggaaaaagggcatattacagcaagttgtatccataaactaaagaacctgtagatacagagtgtaggtttcatccttcatattgaatgctttacagtctacatttttaggactcatgtatgttattttccctctgtgtaatttcctgcctgatcagtatctctggcctcttgaagtcttggtagaagtactgaagaaatgcaaacaaccctgctttctgaaagtgaagtgataagttacttactatttattttgatgaagctggtctagggaaaaagtgcttcagaaatgtgtactctatgggatacacaggcaacaatgtgtatgtgatgtgtgtgtgtttgtgtgtgcatatgtattgcatatatggcatacttttcttaccctaaaactcgtggttaaacttttgttaaaataaagacatcaagtttgtgaagaaatatgatatatgctgaagatctgtaaaactgaaaagaaaaaaataaaaagagtgctgcagcgaatcagccaaaaagcgaagaaacatgtgaatcttagtctaggactccactgacttgaagacagtattcatgtatgttaggcctttagtaacactctgcctaaagaaaagaaggcccagaagactgagtctggaaatacagaagagggatacgttttgcatagcatggtttta

SEQ ID NO: 26367 - DNA, 1021 bp, Homo sapiens
gtgacggggcagcactaaggtccaaggaaaagtcccacagtcactgcagtctctctccccacaacacacatattctctctatgccagggcatgggagaggagttgcattggtgatccaaggctgtctttcctaccctcttcagtgcctctttcagtgatagaaagttaaagccaggtactgtgattactcacctaatttttggttcttatgaaggtgattttttgtgtagatagttgttaaatttggtgttcctgtcaggggtgatgatcagtagaagtttatatttggtcaggccatattactccacctcctttctccagagcataaatttttagttttaataaaatccagttatttctttcctagattgtgcctttgttgttatatataaaaagttattgccaaattctaggttatctattttttctcctttgttatcttgtaagggttttatagttttgcattttacatttaagtctatgatccattttgagttaatttttgtataggatgtaagatttgtgtctaaatttattttttttcttgcatgtggaagtccagctgccccagtaccatttattgaaaaagactatcttttctttttaaatgtcttcgttcctttgtcaaatttccattgactatattcacatggatctatttctgggctttctaccctgttttgtctattctcttgccaataccatgctgtcttgtttactgtaactttacagtaattcttgaaattggttaatatcaggcctccaacattgttctttaccattaacattgtgttggctattctgggtcttttgcctctccatataaacttcagaattagtttgtgtttatccacaaaataacttgctagaattttgattaggattacattgattctatagatcaagtcaggaaaaactgacatattaacaatattgagtctttccatccgtagacatagaatatctctttatttacttagtttcttaatttcatttgtagagttttctaatcctaatatat

SEQ ID NO: 26368 - DNA, 1044 bp, Homo sapiens
ttaatttacattgccctgattatgacattgcttatttgctccttgtatatcttcatttatgatgtgtcttttagggtctatggctcatttttaaatcaggttttttattattgttgagttttatgtgttctttgcatgttttggataagagtctttcatcagatatgttatttacaaatacttccttttggttttaggcttctctttttattctattgacaatgtttatcacagagaagttttttaagtttttattttttgtgagtgcacagtaggtatatatattgatggggtacatgagatattttgatacaggcatgcaatgtgtaataatcacatcagggtaaatgaggtatccatcatatcgagcatttatcctttgtattacaaacaaaccaattatactcttagttattttaaaatgtacaattaaattattattgactatagtcacctttgtgctatatttgactatttgactatatttgactattattgactgtagtcacccttgtgctatattcttgtatttgtgctaccaaatactagatcttattcattctctctatttattatacccattaaccatttatgctagcccccacccccactacccttcccagcccctgataaccattattctactctctatctccactagtccagttgttttaaatttagcttccaaaatgagtggaacatgtgaagtttgtctttctgtgtctggcttatttcacttgacataatgaccttcagttccatccatgttgttgcaaatgacaggatctcatttttttaatggctgaaatgtgtatataatcatccactgtgtatatgtaccacattttctttatccattcactggttgatggacagttaggttgcttccaaatcttggtggttgtgaagtgctgcaataaacatggaaatgcagatatcacttttatatactcatttcctttattttgagtacctagcaataggattgatggatcatatggtcgctctgtttttcctttttttttttttgagtaacctccaact

SEQ ID NO: 26369 - DNA, 1031 bp, Homo sapiens
ggtgaaagtgtaacctcccaaatgtatgggcagataatattttgactaataatacaatcacttttatttcaacatgtttcacaagcaacttgataacagagtcagttttatgcctgtgctctaactatatttgaactgacctactagaacccaaatttcatgatgccagagtctaccttttgtccaattaaaaacttgcttcctatgattaagtattaattaaattaaaaaatgtatatatgtgtcttttgaaaacaatagttcattcaaggaattccattattaataactcctgcttagtgattaaagtgttaatattaaatttttttctgaaaaatatttgtctacagaatataacaggaaactgactttttaaaacaaatttcctagtcattatttgaaaaagaaaatttcaaaattcaagatatgcaattgcctgaaggtatagacttagaaatttaacatttaaaaacattttcttcattttctaagcttatatttcataactgtacaaattcttagctattctactattacttgtggatttgcttaaaagaaagctctttagtgtttagtcaaacaatagacaaaacttttagcatgaaacattattttatggtagactcagcaagctgaactagtaatatattctcttatttactgaaacatttgttttatatttattatttttgtataaggtaatacactaatttgtgatgaacttttaattatacattatttgtaaaattacttttttcctatgtagcaaattttaaaatagccagagtaagccatggaaataagccaatgtcaaagtttgaaggtcaaagtagtatgatctagtagaaagaactgtgcctttgagtgaagtagattgaataactgatgcaaagttttccttggctctggtaaaataattgattcattcctttgctatggcttcattttagcattttagagtgtgcttcctgcctccttgacttgggtgtgctttagccaaagggaaattagcaagtatgatgtaatcagag

SEQ ID NO: 26370 - DNA, 1069 bp, Homo sapiens
tttaaacgatttgtgctataaaatagtatacagtcagctatgtaatgttttactattgattacctagtattcagttacagggatttttaatttttatttatctttttcctcacaacttttgacattttcctggtcactaatgcctgcaggagacagtgaggcgaactcaagttaatcaagtcactgttcagtttttagtgcctttatgaggagcaggactttaaaactattgactaaaattaggctttctgggttatttatggattttatttaacatatttctttcccttctgcatatgcagtttgagagcagactgcatatattgtatttacactgaagagaaagttgaacaaatcaattcatggagataagagaaaatacacatgtaaaacaaatattgtcacagaaacaatagtcttatttcttgttgaaaattatgacggaattcacgaaatagaaggatgatagcttatctgtattttgtacttttttagtggggcatgaaagagctggtgtaaatggatcatagctttaaaatagaactgagggtatgaataatatttaaggaaacttgaagtcagtatgtctaaatagagaatcactgacaattatgtacttaatggtcagcatatcatttaatcacagatgctcttgacattgtttatgaaaatgagtcatgtagtaatttgtcaaggtcaagagtttgagccctgggccctataaggggtatgagtttgaatttaccctccacccttcactcacacctatgagctatttattcattattctctgctattctactatatgcacagttgctctcatttatatatcattccgtatatgctttttgttgttgtgttgttttatggcgctaaatgatctttggaagttgtatttgccatgatatttgtaggtaaggaatctaaaattatcatgacatatactacttgagtgtcaaggtgtatgcatatatatatttttatttatatatttgtatgtcttaccttgggctgctatagcaaattaacataggctgagaggctttaaaaacatcagaaatttatttct

SEQ ID NO: 26371 - DNA, 1150 bp, Homo sapiens
gagcttagctttctttcctttgagtgtgggtactgtctcatttttaattaagagtataaggcggaagtgatgatatgtggctttggggacaaagtcataaaaagcatgagcttctttgccctctcttggatcactgtccttaggcaaagccagctgacatgttatgaggacactcaagcagcccagtgaagaagtacacgtgggaagaaaggcagtcaagattttagcacaagccaacagctataaagtaacctcaagggatactccaaaccagaaccacccacatggctgctcccagattctagacccacagaaaccatgtgagacaataaatgttttatggtgctaagttttgtagtcactttttgcactgctatagatattaattcatatgtttacccacagggcagtcatttatttatgaatagacttagaagttcaaatcttaatagagttaagcaggttatgaatgagtaaagtatgtcaggggtgataaaaccaaatagctctaacataaatgttaagtaggatctgagtctaggctgcaatatctgaactagcttgggagtggcaggaattatgatggagtgggaaaaatgaaagtcccacttatggtagaacacctctcagctccacttatttttgccataaggaatattaaccatttgtgacatatcttttatttttgaggagaaggaagaaatacagatatttatttaaaatctcacaatttttaattattagcaagtaatcttttttaaaatttttttttaaaaaaataccatgcaaactaacctactatataggctagctatgaaagctgtgaaggctaacactataaaagccaaacactctacaaaaaaacaacaacaaaaatctctacaataaccttctgttgttgcttcagcacagagggcagcaggtgtcacctctggtttggtcatcatttatactggtgacattgagttactgagagaaaaggatggaattaaggcagccaacacccaactgtaccactagaggggactttagtagaaaaaaaaaagtcacctggtagagctggtatagtatacagaggagaataagccccttctgtggagaacaggatacaggattttctacgaaggttttctagtggtgtttgaacaga

SEQ ID NO: 26372 - DNA, 1049 bp, Homo sapiens
gagcgttctcaggcagacaatttaatgtgggagctggggtcattcaagggacgtagacttaagctgttggacaatgtgctagggattgttcaagtctgttagtatgtatttgtggcccaggggcttggggaggggggcggtggaggtgagggcagcaggatgaaatcatttgtgctgagagtctgcagtttttattggccaaggctgaagtctagtcagaagaggacttagaggatcctgactagtgtttggtcaaggacagagtctttgtcaggtaataaaaagttttaaaagaagttgcaggattaatgacaggtttagggctaagaatcaacaggttctaatcatgcaaatattggcattatatattcaatttcagatttcaatgtgaatttcatttaacctaaaatctgtgacttcattccacagataggattagaaagagacacttcagtactgagaaaaccgtgacacttgaaataagctaaaagcattgtaacaatttttttttctttacctcctgggcacaatgacatttctttacagtaattctctggaaaaagaatgtcagttgaactaaaatggggcaaatactttgaaatgactgctgttttaagatgcttatgattatgggtgaacaaacatatttggaggaaccaagagctgaatctattttttttcttcaaaataataccaaacttgaattgaattgttagagaaaacagttcatacaatcattttccttttcttattactgtagcttctttgatggtgacaaattatatgaagaagagttgacccatataaagcttttaaaaatgtagaaatgtttttaaaagccttacatttcaggccaattttcatactggatacattttcatagacaaccagaaatatttgcattatataaatattgcttcaatttactgattattagacaatagtctttttagcacatctcaaaacatacacaattaaatagggtttgaaatccacttgaaaatatttttaaagccaagaaagacaaagcttctttcagccttatttct

SEQ ID NO: 26373 - DNA, 1035 bp, Homo sapiens
tttataagatgctggtatgtagtcagtcaataactagtattatctttaggtacatttaaaaaatgtatattacacctgaacattgcataatctggaaaagataattaataagaagtcagtgaaagactgtttcgaaaggaggaataatttgcagtgaaacatttacatagacgacaatgccagtcatggtggctcatgcctgtaatcccagtactttgggaggttgaggcagtggatcacctgaggtcaagagtttgagaccagcctgaccaacatggtgaaaccccatctctactaaaaatacaaaattagctgggcatagtggcacatgcctgtaatcccagttacttgggaggctgaggcaggagaattgcttgaacctgggaggcggaggttgtagtgaatggagattgcaccattgcactccagcctgggcaacaagagtgcaactccatcacaaaacaaaacaaaacaaaaataacaatgaacattgatctctttgtgtttctcactgttactgttgaatcatgctggctaaacaataattatttttttcttctagaaacaataaaaaaattctataaattccgtctatacatgttagtcgccaaaatgtttgatatcatttgatattctcttatgaaagggcatgtacatatgtctggagtggggagttggggtgttgatgttataaatgtaaatagaaggacaacctctcttgctaaaatgaggcatttacctgaatttgagtttctgacaggcaccgatagcattcacctaaatttagggatctaaaaggcactaatatacaaatgtatctttaaagtttgcttttaacagttttgcaattaaactttcaattagtcacagaaaccttctttttatatatatatatatatatatatatattatataaatataaatatatgtatatatatatagagagagagagagcagagcaatgacttgaatctaaagaaaatatcaaagctcaaacaataagagcactttaagaccagggcaagaaatattcaa

SEQ ID NO: 26374 - DNA, 1053 bp, Homo sapiens
gggcagaaggttaatgtctcattttcttagaggttgaatgtactgaatattagatttttaaatttagtttgataactttttttatatattcagagctaatttccactttattttttgactgttttttagtgttaaaatctaacagttggaaataattttaaaatttacatggaaaatttcccaaccgatgaagtatcatcagtttcaaaagttttcagatgcttaggatgatttatttttttcttagcaaaacttagaatattgattaatatgctcctaagtttatagaagagagataaaatttaaattagcttattatagagtcaaaaaagatgtaatgttatttttaaagattagatctcatcatatctgagtccccattttattgtttactcatttgaaccaaaacttgagttgattctctgtttaaatgccttgattcttgtctacagtacatcttctacactgcagtacatccactaaacagttattatctatctaaggacaaaagcatatttcggacaacgttcgtgctgattcttgaaacataaatgtgagttctcactatcttgttaggcaacaaagagaagaaacttacgaaggagtggctgacatgaacaaaatcttgttaactgaatcctaaaatagtggaaatatttagagacacatttctgataaacacaagaaagtactcctttgcaaaatgaaacaatgtatgagaaatgtttaaaccttatgctgaatatatgctaacaatatgaggagattaaaataacggtttaggtacattcatggatggtaagggaaagtgagataggaaattggtaatagagtgtagtacaaagagtgctggatggggagcttcatgaaatgaattctaagacctgtttttccttaaggagatacatgtatcattaggcaagtctaatttctctcagtttcagttgccttatagctaaaatgattggacataattagtccattttttaagcagagaaatatatttttgttattcatatatttttctccaaaataaaatagtgctcaaaacta

SEQ ID NO: 26375 - DNA, 1035 bp, Homo sapiens
ttctctttccagatccctaggcaacattcaagtttcttgactgtggagattgcatcttctgttgaattaatttagtttatcataaacagagagttttagagtcacatgactagttttgtagattggcatgtaaatgctattattctaaaacactaggaagaatccgtgtgcaagtttttcagttttctaagttttaaagttccaactgaatttttttttatttttaaagttcaaaatttaaaacttagtcaactaaaaaagaatatacatttgtacctctaagaccaattatctgggtcccaaaattcctttcacatgtgctgacattgatacaccatttagtattcaaatcataggcattctaatgaccatactattgcattgtagacactttgaagctgggtgattctacccctgttggctatgcaaagggaaatggatgccctggggaaaatttcaagatttcaaaagattttttttaacatatttcaacagttgaaatgataaaaagactgccagaatttctattatgggcctgatttatagggtttactatcgaagcaggtttaaattacaacaacttgccaatagcaaagaaaatttatttaaaacaaaggtgaacccatttttcataatctcttaagactaaaatggtcttattttaccagaaaagtcctgaaagtttacacaattatttaaacatgtgtttttaaaagttttactggatgcaattttaaagtaaaaattgaactttatatgagatgatttcttattatgcagttaacaaatagagaacattttgagcaacgtgtggaatttactgatagttgagatttatattttatttactatctgatttttaaatgtagtaactttaatttagaaattaagtcagggacatagtatacccaacctaaggcatgttacattactttttgcaaatctaataattaagacaaacaatgagcatcatataatagatacagattaggtatatcaaataagataaaattactagtccatatctctaaaagt

SEQ ID NO: 26376 - DNA, 1071 bp, Homo sapiens
gttatataacctaatattttattcaatttgttgatgacattatcatcttaatatggacctatatcatctttttaaaacactgtataaaatttccttgtatgagagaaccacagtttaatcagcatattttctattgctgaatactttggtggttttgttttcttttattagtgttacaaggaaaatccatgaaaatacattattaaccactcctttaatgttttctataggattgtgccctacaatggggatggtattaaaaagacgtgtaatagtaaatttagcttaacacataacagtttgggataagctaaggaatgttcttgggtgtcggaagccatatgtcttcattttgaagtctgcaatgaagcatctatagtatgataggttggttttaaatgatctaaaagcctgcttatacgttttttctctctcctagaatatatttttcactttgactctccacattttctctagtccatctaccttttctttttctacataactcaaattcctctacagtgaactcagtgcatctatctaatctctaatcataatatccaactatgtatactttgttttttcttgccaagcattctctcttctcaagttattgtgtggcttaatccttcttttattctgctaaaatatcacctcctcagatacactatccttggccacccaatttaataattacatctcccctcgcataattatttttaatcatataattgagattttttatggccttattactatctaaaattattttattcatttatttgtttgcattgttggtttgacttgtaggatgtaagttccataacagtaggaacattgtctttctttggcactactgtatccatagatacaggatacagatgtacatattttccacatagtagacatattaaaatatttcttggatgaatgaataattttcaggagtgtgttacgggccagggttttatactctgtggaaggagaggagaagggaactgattcgtattgaacgtctcttatgtatgtactagagctttatatacactgcctcatctgaatctcataata

SEQ ID NO: 26377 - DNA, 1045 bp, Homo sapiens
aaaataatggaaagacctcctatgttcatggatcagaagacttgatactgtgaaaatgtccatactattcaaagtgatctacagattcagtggaattcctctcaaaatcctaatggcattttttacagaaatagaaaaaaaaaattctaaaattcatatggaaccccagtggatcccaaagagcctaaatcaccttggggaagatggacaaagatggagtactttcatttcctctttttaaaacacattaattacagagctacagaaatcaaagctgtgtagtactgctatgaaggcagccattacttcaatggaacagaacacagagcccagaaataaacccacacatactcaaatgatctttgacaagagtgcccaaactggacaatgaggaaagggtagcctcttcaacaaatgatgttgagtaactgggtatccacatgcaaaaaaaaaaaaaaatattgtgctctgttttacactacacaaaaatcaactccaaatggatgaaagacttaaatgtaagctctgaaatgtaaaatttaaagaaaagaatgtagggcaaaagggttataacattgatattcatgattttttgaatataataccaaaagcacaggcaacaaaagcaaaaatagacaagtgagattacatcaaactaaaaatctgcttttcaaccaaggaaacaatcaacagagtgaaacctaaacagtgggagaaaatatttgaaaaccatatatctgataaagggttaatgtccaaaatatataagaaactcatacaactcaatagcaaacaacaactaaaaacctgattttaaaaaatgggcaaaggacttgcataggcatttcttcatctttgtccagtgaagacatacaaatgactaatagagttatgaaaagatgtacaatatcattcatcatcaagaaaatacaaatcaaaaccacaatgatgtattacctcatagctataaggaaggccattgtcaataaaatgacagcaaataaaactttaaaatgatgtgctggcaaggatgtagagaaattga

SEQ ID NO: 26378 - DNA, 1051 bp, Homo sapiens
taggccaggcacagtggctcacacctgtaatcccagcactttgggaggctgaggcgagcagatggcttgagttcatgagttcgagacctggaaaacatggaaaaaacctgtctctacaaaaaatacaaaatttagccaggagtggtggtgcttgcctgtagtcctagctacttggggggctgaggtgggaggatggcttgagcctgggaggtggaggttgcagtgagcccagattgtgccactgcactccagcctgggcgatagagccagactttgtcaccttgtctcaaaaaaaaaaaaaaaagtcatgctgtgctgtagcaaaaaactggcaaatacctagataaatgtccataaaggatagctcctggggagccagtgagggctacctgcggcctgaggaaagccagattaatggagtttaagggaagaaaagaagatactgatgtagccatctctttctgtccctcctgcccagtttcttccttatttttttttccattttttccccatttctttccctttttctctcccctcacactccctagccactgcatatcccacactttttcagtctttattttctcagttttatgccttcaaatacaagcttacacttgagcctttttttaaaaacttgtctgaatttcaaagtcagcaattatttcacatttctggtcagccaaccctactttaacattgattttaactgtgttttgtcaatgtgtatactttctttctgttttatttaatatattgagactgccaagctacattaaataagtcaagccatgttaaattgtacttattctccttctgatggtaaatttcctatcttttttttgtttcctttccttagcccactgatatttgcacaaataaacccaaaaccttttttttattgctattgatttttgttttattttgaaggagttttagttttccttttaatttcaaattccatcaggtgattacttctaacactttttacacccccaaataaatccctatcagtgagatctcaattaagaaagccattcttaccacatgg

SEQ ID NO: 26379 - DNA, 1035 bp, Homo sapiens
atcccttgagggcacgacagctctatgctgtgtagtagaggaaaccttgaaccttggggtcaagaaactgagtttaaagctctagctactctaaccttattaccttaagaaagacagatcattgaatcattaactgagggtctaatgagtactagactctattctccactctctatcttaaatttaaaaagttcttattctatggagcttgtgtgtatgtttgtgtggggtgtgtgtgtgtgtgtgtgtgtgtgtgtgtgtttagacaaggaaggtatgttgcaaggggaaagatgggataatagaaatacaagtaaatgtataatgtaaggatggtgaaaatactaaaaagaaataagtcaggataatggaagaaatcagtaactgagcaggcaacatgatggaaatgttattttagataaggtggttctagaaggcctctctgaaaaggttgcttttgagcacagagagtgctgtattcagtgagcttcagaatctttaatgcatcagggataagagttctggaagaaggatttcatgaataggggaaggactttagattttactcaaggcttattttcctctttcataaaatgaaaagtatgttttacctacccaacacacctgctggtaaaaggaaaaaggtgtgcgataatatttgtaaacataaaatacagcctaaatccaaggaacttaggattttaaaaaatcattgttttgctgagattggaactggaagatataaatgctcaaatggaaattctttcttttgagagagacggcatttttgtgtaaaaaagggttttaggaatagtaatgcatggagttattaaatttcgtatgtatttctgcacatacgtatatgtgtatatatatagaaatatcatcaaatgactgtggggggtgtgtgtgtgtgtgtgtgtgtgtgtgtgtgtgtgtgtgtctgtattgccgaactcataacctaggactatgtttttaatgaagcaattttctaacatgaattcattatcttttgctttatggttgagattt

SEQ ID NO: 26380 - DNA, 1050 bp, Homo sapiens
tctgtttaagggcaagttctttctccgtcccctcagacctcaaaatacatacatgcccataagagcatgaatattgactcacatatagcaaacactcaggactttgatttggaccttttgcaagcactggttttctgattctcattgcagtaggggccacagcatgtcttcactttccttcttgaaaaatagcctagatgtcctattaaactgctaataaatagcttgtaggttcttgttttattttgttttaagccttaaaataaaataattaggatagagaaaatactgatgactattaaagttaattacttgtatacatgggagtttttataccactctctactttttagagtgtttaaaattttacattggaaaagtaaaataaaaagtgacaaaaagtaaacttggtattaattacattttttaaaagcctaaaattccttctatttgccctatcttgtgaatctgtcagtattgtagaaagatttgctttgaacacttattactggataactcattttgtattatctgaagagaaaaatgcatattctcttaccacaatcttatgagaaaagactaagaaaatattggctaagtaaggaaagcattgatagatatgagaaatccagagaaaattttatagaaataaaaatcaccacattgatctctgaaaattactttaaaggctagcatgctccattctgtcctgcagtccagccaatgatacctcaccatattaaagtagacccctgaaattgtacccgtagaaataaaaatgctcacataagttagtctgtttattttccataacactttgacttacatagcaacagtacacatagcaattgacttgatttttcttctccctaaacttcttgtgtttgtatatttgtttaatatttattgaagatctgaagttgtgtaaggttttgttcaatcactggagataggtgtgtaaaaaatacacagttcttgcctttacgagcacacattccactgggaaggcagacacccgaatgtaatcaaaatacagtaagctattttata

SEQ ID NO: 26381 - DNA, 1034 bp, Homo sapiens
aacacttgttcagcctgggtgcagtggctcacagctgtatttctgcactttggaaggctgaggcaggaggatcacttgagctcaggggttcaagaccagcctggggcaaaatgatgagacctcatcttttcaaaaagtaaacaaaattagctgggtgtggtggcaagtacctgtagtcccagctactcaggaggctttggtgggaggattgcttgagcccagaggtagagactgtggtgagctgagattgtgccactgtactccagcctgggtgacagagtgagaccctatttcaaaaaaaaattagaaacttgtttataacagaaacttattatagcttctgcccatctccctccactgtaggcaaccttgcttgaagactgacagacatttatcttaccttgttcatcatgtttaccattcttaaaatcctgtttcttaaaatttcataggtcactctgcagcataattttgttaaaagcatcagctcttccatcaagaatttttttttttacatcctattcattgtttacccaacattaagaaagtgagtacagtttgcttttgtaatgactgaccaataaggagacagaaataaacttaggaaaagaagactactaatgaattttctgagacctaccttctttctgaatccaatacaatgtttaccttcatctctattaatccatcaaatcaagcacaaaaggaaattgtactcacaatttgattttcatcatctattcttaccaatgtcacaagaaatattagaaaagtagcatttggttgttggtggtgttactctgtaatgtcaagtttaggtgaagatttgtaagtacagcaaatcacagggtcccagggtcctactctgtgatcagagaccctgtttgctcttttacccagccacctaactgtggattatctttgaatcttcaaagtatgtcaaatttttccacatagtattaaaatttatttgttaatagaatttatttttagagcagttttaggtttacagcaaaattgagcttcatctccat

SEQ ID NO: 26382 - DNA, 1026 bp, Homo sapiens
cccaggctcaagctgcagtgagcttgcagtgagccatgattgtgcccctgctttccagtctatctgggttacagactgaaaccctgtctaaaaaaaaagaaatgaaaaatcggtaaaatttcctaaaacttacattatatcttgataattatagcctttctaaatgttaaaaaaatttcaacaaatttagtttaaagatctaattggctttactggtgatctatgaatcaggcagcatcccatcaaagatgtagaaaagctgctttaataagcagagcaaagaagttgggctttataggcagaaaagggctgaagaagcagaaacaaggaacaaaaacacggattggtccttacaaagtaactttccttacagggttaaaaaagaggaacttcctctgttttaccagctggctcaggtaaaccaggccccttctgattgattgctgtgaatttccccttttttttttttttttttttggaaaactggttcattttaaagttcattttgattacatggaacctagcacaagttactgcattctagtttgtccagtctggtctgttggacctagtgcatgagctcagttcacacaatgatctcctataattttcatataatatagataatataaaaactgtcatatgataggtatgatatggtttggctgtgtccccacccaaatctcatcttgaactgtagttcccataatccccacatgtcatggaagagacccagtgggaggtaattgaagcataggggcagttaccctcatgctgttctcatgatagtgagtgagtgagttctcacaagatctgatggggttataaggggcttttcccctttttgctgggcatttctccttcctcccatcatgtaaagaaggatgtgtttgcttcctcttctgccatgattgtaagtttcctgaggcctccctagccttggagaactgtgagtcaattaaacctctttcctttgtaaattacccagtctcaggcagtcgtttatagcagcatgagaacagacta

SEQ ID NO: 26383 - DNA, 1049 bp, Homo sapiens
tgccaaaaaaattacataattctaattttgatacatattgcacattatcttccaagtagactttaccaatttacacaccaatcaccagtttcaacatttgatatattagtaattatttttccaaccttgtgaatgaacatttatctcattttcatgtgcattttgcttattgtttctaaggttgagttcttttcatttgtttttggacatctaatttattacgttaagaattccctgataatacattatgttcatgctttttttgttgacttgtttatcagtttaataaaacaatttacatattccagatagtaatcctttttgtataccactaatttattggtgactcccaacgttaagtagtatatacctgttgcttatttttatgtatcttctttttataagtggatattaagctcctccattagttcagggttcttctttcatatcttttttttactgtccccagtacccagaatagtctcaataaataggcacttaatattgattgtcaattgaggagggagactacaactgcaaaattaagacaaggatcagcaggaatgtgttgctggctccagtctcaaggctcaaggccaggagtgacaaagtcagctttggcttctcagatcagttatcaatcctgaaggtataaaaccagaagatgaaagagacctgtataccctgagatgcgaccactcattttcctctgttcagtcattcacttctgagtttgttattatacatattcattcatcaagtgatatgtttatattgtttatcttcactaacttatttagctctttccatgaaaatccacgtggaaagttggcttaagccaaaatatattcaaaggcttctgtcttgaagttatgtcctaaatgttactctacaaggctatatgcaaaagccaactaaaacatttagacatatttcatttgtcaaatcacttgtgttccatagtttatttttaattcagcctttatttaataaaaatctcttccacatacatatttataagcacatggaattatgcagattttgcttgt

SEQ ID NO: 26384 - DNA, 1083 bp, Homo sapiens
ctgggaaaaaagaaaactctctaaagcaagaagccaagctacaaaataaaagtttaaagatgtgatttccaaaaacttttaacaagtattttattaggaaaggtactttaaatataataaaacaaaaatttaagaatggaaagaaatgtttgcagtgcatttagtgtacaatgtcttaatattattaatatacaaagagtttccacaaatcaataagaacacaaatttctttaagaaaataatagggcaaaatataagaacaacaattcatgaaaaataaaaacaaaagtttctaaacatatttaagtatgctcagtcataagtgagtgaaaatacaaatcaaaacaaaaagttaccaacagaaacaaaatgttaatagtagccagcgtttttgaggacactaacatagattattcatgtgtttataaattgccccatgctttcaaaaaaaagcaatttctagtatctgtcaaaatgtctaatgtacatgtcctttgataaagcaaattcttttctagaaatctacccgttgcaatgcagtgattaagaactttggtttcagaaatatctggatacaattccctgcgattccatttttatatgtgtacccttgaagttcttcacttttataaggctgaaattactcatttgaaaacaagatagcaataggaaaatggcttcacagggttattctgtagattaaatgaaaccatgcacgtgaagcaattagcacattttaggagttgataaacattaaatagtatgattattattaattataacatagatatgtttccagtgtgaaggaatagctttatgagaatgtttattatattctaataacttatagtattgaatacaatcttggaatcactgcaattatctttgtacaattgtggcaaataaattggtcttaagaagacaagagatgggaaaacgttgctctgtgtgactaatgtcacatatgcaatgggtgaagattcagaaaatcagtattggtcaacaggcaagtcttaaaatgattattaacagatatatttaatgctttagaaaaattcaataaacatcagagaccaattcaaa

SEQ ID NO: 26385 - DNA, 1069 bp, Homo sapiens
acgtaaacacatgaagagaacatagcctatgtctgtgtaatatacatgtgagaataggggtgtgtgtgtgtgtgtgtatatttatatgtacaaatttgaactaaaacgtgtgacagaaagaaaattgacagggaaaaaaattggaatagcttgtatttgttctaatttgtataatcctagcccatgacttaatgttgatgcttggctttatcttttggatggcctaacctacattaacatgtacgcagaacattttaagagtttttttttttcaaaaatcataatttattaataaataaagattaaaaaattggaattgcaaaattacatttgagcaaatgtttttatagagaacttgcccaaaccagcagaccctctatttaaaaatgtccaaattcctgaatcatttactaactatgctttaattctgtgaaccataaactataaatatgccaggtcagttctcaaccagaggacttactatggaagtttaattggtagaattgattatttcagactatcttctagcctgcagaactgctaaaaagccttcacgtggaaaaagaaatttcttgatctatatcataatcacaagggtaaaaatgaaattatattttaagagatgaaatgcaaacatggaacaggagaagtttctattaacccattaatgctttactcctctatcttaataaaaaccaaaacaaaacttttattcaactgactctatgtggtcaagaaccaacagctatgaaatatcaataaattgctaaagtgtaaaataatttagtatttttttctggtgcaaactataagatgaaaacatggctaagtagcaaattcaataataatgtagctaattaatttattataaattttggaaccattcattcatctttaaagtcagaatatttggcttactcgtctcacaaacttgttataaaatgtaattgggtaatgattataaagtcagattttcactaagagtaaataacctattaatgttatctaggttgttttcaatttggtgaactgtattgtccaaactgtggcatctctgattatgacaaaa

SEQ ID NO: 26386 - DNA, 1034 bp, Homo sapiens
atgttaggttaccaggaagtttacaagaggacagaataaaacttatcttttcatgtttttatataaatgcagtaaatttgccccaggaggcatcagaatatgtcaaattgccttgtatatattatgcacctcctcaagtgacaggattgaatttaaatctgaggcaggaaaaacggtaaatacagcagctgtagacaattatagttaataaagataagtatgggaaaaaataaatggcatgaaagagagggatagtctgcatggtgcaaattaaaaagttcaatgtgaacaatcattccacaatgtggcaatgctggcatgaaataatccagcatcatttttaaagtattattgaatggagaacttagaggaatgttaccttgcttattcaatctgctgaaaagagacatagggaattaaaaaagaaaaaactatctaaaggaataccaaagatgatgagtgtgtagaacaaagcctgtgaaaaatcatgcagcaagagaaataaaagacagaaatggaatgtaatcatctgctggaataagaggtctagaaaataagcaacaagatgcctttctcatccattgccatttggtagctcctttcctgttaatttttgtaagaattatatctttatgttcattgtgctttctaaagagcaccatttgttcccaagtgatgtctaaaagagaaaattgtgctttttttttttttgaaacaatcgaatgatcatgagcccaaattcttccaaatgtgattttagagatttcctaatcatggggacacaggaataaggtcaaactgaatgattttaaaatactgaatcaatcactaactagccatgggatttaatttccctatcgataaaataagagtgattgttgggatgagtaaattattggtacacaagaagttctcagaacagagcttggcacattatgcactcaggccatgtttgtggcactaaggctgggtcactagggcaggctcactcacagtcacctatgtgccgaggactctcttaggccaggtcttcc

SEQ ID NO: 26387 - DNA, 1034 bp, Homo sapiens
ctatcatgatgactcaaaacagtagggcttctatggaaactaaaaagaaatgagattttaagataggtgttccctactaagaagtcttagtgaaacactggaagaaaaaagcatttctgaggatgcttaatatgcaccaatatcaataactggagcaacacttgcatcagccagaagagctctacctaacatgatttacaagcaatccactattctgtgagtgtgagaaagcaagaggcaaaatctcaggttgccaaaaaattgtgtaatcccatgccccttagttttcctatctctaacatgatggggtaaacaagatcaatctgagctgacataattatatgcaattacaatgcagtttttttccctgaaggcaataatttattatatttcttgaacttgaaaactgttttgtattttaagaatgcctcctccagtctcctgatgaggatttctctgcagctcttgtttaagaagctctgtatgctagtaagcaccaagtcttttgtaagtcagcactgggctgtaggcaacttccgcttttttgttgtttgtttgctttttctgagacagagttttgctctgttgtccagcctggagtgcagtggcgtgatcttggctcactgcaacctccacttcccaggttcaagcaattctcctgccttggcctcccaagtagctgggattacaggcatgtgccaccatgcctagctaatttttgtgtttttagtagagacagggtttcaccatgttggccaggctggtctcaaattcctcacctcatgatccacctgcctaagcctcccaaagtgttgggattacaggtgtgaaccaccgtgcctggcccgacttccacatttagaaaagtctacccaccaaagggagaacatggttttcttcctacctaagagaagactggcctttggtatgattttattgcagacttcatcactctgagaggccagaggaaatctaagttccctttctaagctgcacttactattctgcgtctcataagtcttcattagaaagaa

SEQ ID NO: 26388 - DNA, 1039 bp, Homo sapiens
tatctgacagacccattgctttattcattataatcaaatagaagaagaggaaatttatggtgttttgagaatgcatgcaggttttctttttgttttttcttttgaggtgtgaatacagtaataaaatactgactaatgcttgaaaggcttgaagaaaggactagcggtggagtccaaggacaagaagagatgagaagcttttttttcttttcttttccttttggtttcagagggaagaagctatgtaaattggactgggaattaatatccagcttcagtcagagaataagaaatagcttgaaagtacagagattgctgatgtcacctgaaacttacttttaatcaaaagcatctttctagaaatagaagggcaattatcacaggtggatctggggtatctttcccttggcctgagtgtgaacatcaaagttagagaaaagaagttcccaatgaagacctcctcaagttgttatacatttggggattccatgaaaggagatggtgcttcgctctggaaattggtaattaacactatatatctctactgagaaatataccagacatgtatagctgctcctcagaatcagtaaaaaccataaagacattatcatcccctcactgagcactcactggctattgatttgctaaactggtctttagtttgccaatgcttagcttccttccggttactagttcaagatcctgctgttgcagggaagctccatttcatatctttatagcagtgaaaagtatcacctaactacttcctggttcagatagtgatgggtgtttcaagcatccaggcattattatcaccttcaatccccaggatattttacagcaagtaaagccatacctcacaggaggttcataatttagagcctcatttagttaaccatttccctgttacatacatatgtatatggaccagagctctcttcatagactccattcttctttaatctgactcagttctattctccttagtatcctctcatgccttctccccttacctaactaatctaaataaaattgccct

SEQ ID NO: 26389 - DNA, 1096 bp, Homo sapiens
gagttctatcattctgcaaatgagtttagagcttccttgtattctttgtaattttattcttactactttccatctgttcatatgaactttttatctcagtctctttttatgtcatggctttctgtggtccaaaagtctatagtctatagattctttcattctactggggattgaaaacatttttcagaggactttattttttgtcattttttagagtgatgatacatttctttgaatgacttttgcatttttttcccaaagccttctccttttatttttatcaacgtgtttaaaaatcatgatttggctttccacaacagaggattgtcttaaatcttactatttgaacatttgattcatgaaaatatactttggttttctagattgaaatttgaaggacagaataattttatcagcactcctttacaattaattaactaaggagtatttagtacttttcttcaaaatattttaaatgagacactttttaatgatcacatagaaataaaaggaaagtataactgaataaaaacaaaagttaaacatcaaataaaacaaaaatttactttgcactagagtataaatttcctaatggcaagagttttcctttttgtcccatttttatatatcctgtgcctagtagagttatctagattgtaacaagcaatcaatactctaagtaaatacataccttgttaaatcattattgagttttgttcaagattttgtttagtgattacctattaatttcctatgttttatcccattctttatgtattattcataatactttgagcatgttagctattcagtacatatatatgtatatattttatttattgacacataaatgacgtttagaatggactcatgcagaacttaagatttagttaaataaaaaatacattttgacattcaacattgaatgttctacccaactgtgagatttttatatgcaatactgaaatgataagaattactgaggccaaaatagcatgaattaataaattggattatacaaagcagtatgtgatgtttttatctgaaaaaatacaataaagcatattaagttgttacaaatttaatactcctatga

SEQ ID NO: 26390 - DNA, 1250 bp, Homo sapiens
tactagccttgaaaatgcagctgcacccattgaaaggtagcgtctgttacagagcagcttgttgtgtgaccagagaatcattggagatttcacacaatctggaacacacagatgacacgtttttgtatcctatccattgaaatttgtacaatcaatttcacccaaatctgctgcttatcctaggtttttcctatttttcttatcttcaagtagtctgaccatgtttaagctgcctgaaaatctatacttctctaatattttcttattatttcttgacaatcctttctattcttaaaaaacagctccagctaattacccatagtttaattttgtgcttataaatgtaaaaaagaaatcaataagcaactgagggcatggtatagaaatggagaggaaacaaaagcaatggggtgatttttttcacgtgctccttttacagtagatatttggctccctgaaaatgacattaactcggtacatcataaacttgaatgtacagcagaatcatctggaaagtgctggaccctaaccccagagtttttgagtttcgaagtcagaggtagagttcaataatttgtatttgtaacaagttctgaggagatgctattgctgagaatcactgaaataaggagaaaaaggaatcatcagttataaattccacctgaagacaagatgctctataagcgacctttgctccctttgaaactgaacagcttggatggtgctgaaaaagggtttatgtgtgtagaagtttctttccgggcaaaatggcaactcttctgccaaaatgtcagatatatccattatttcacttttaattagtttcagggatgtgttatgaaatttagctaattttttttccagatatcacttagaattttacctggtctctgttggtattgctactacttgctgtcagcaggttccaggtgctttggaagccaagattgagcaatctggcctcaattaagcttgataaattgtttctgaattaaactgagaaagtttgagacaatacctataagtgaaaaaaaaactaagctagctatttatgaatgaaaaaccttttatctaaaacaatgttaatacctgagaacataaaatattcagaagattataattctgcttttagctctattgtttttaaaacttggatgatttattttaaaatatcttaaatgtattgtcttgttcttgtcaggctgattattaaccatttacactgtttacggatctctgcttctctcagg

SEQ ID NO: 26391 - DNA, 1047 bp, Homo sapiens
ggggaaaagttactttctttctagactaaaatattccttctaaggatgggaatttaaaaaaggctgatgattagatgacctaattccaatagtattaataatatgcttgctttcaatgcattttattgtttttaaatttattgtgttattttgtcttaacttttaactcccacaattagatccattacttataaaaaggaaaccaaaactacttagttaacaagttcagtttcgataatattccgacttaattggaataagtaaggataaaaactcctctctatgtacagataaaaaagaaaatgaagagaaaaaagaagggaaatgcatttagattccaaagaagtgcctcagattctaacttaattttaactgatacacgttaaaacaaatataaagtgaagaatttaaagtttcttaaaataaatgatgaaatatttttaatatcaatagcgatattttaataagttgtttatttgccataaaaatagtaattatatattggaaagagttttcatatgctattcgctctaatgaaaaagcaaatgatagtacaatttggaaatttggcagcattaatttttgtataaaaataattctgataactttgagtgatttttaaattataatctattacccttcttttttaaagtgttgggcttatgccacttaaccttggaacctgggaccagataaatctgttatagaaactctcattctagtaatgacatgtttagcctttaggcactatacaaaagtgttcaatgtgtttaagtagtagtagactgttaccctttattccagcaaaaatgtgtttaagtgtaataactgtttctccttagcgttactcataaaacccattgtcatttgaaagcagatggtcttttagaatgaagaacataacactattttaaaaaagcaaaattgtgatttaaaacaagtatttagcgatttcattaagcatgcaacatgaagctattttaatcagcaaaaagatacttgactatgaatagagaaaaaaggaatgtttttttcacaatgtgtaat

SEQ ID NO: 26392 - DNA, 1048 bp, Homo sapiens
tatatagtaagtttggcatttgttttaaacttttgggtattgactgatatttgacagagtgagagaatttgttattcctcaaaaactgatttaacaaattagatatgtgttctaggctcaaggaatcacagtaattggattggctatcaataatatactattaagtagctgagattggcttgtgtttaagatttaacccatgaataaactgaacctctgcaacccactgtgagttgcatcctttgtgatcaagattcagatggccaggttcatgttaaattttgcttaaagattatatatatatatatatatatatatatatatatatatatatattgctcctggttttcattctctatttcttgatagtgaaaagttgatttactgggcacttttagatgcaatgaattaaaactggttcagcctgcatacatgccagaagaaaaaataaaaataaaatactagtgcagtaaggtaaagcaacaggcttaaggacacatagttaataaacatcagaaccgtgactggaattgacatccccttggcttacatcttcttttctgttctttccaatttgtacatgtgccacccagtaatatagttttaaaccttttttgtactgactgcctgtcattatttatcaaaataataacaatggaatcaccacaaacgtggactctgaaataataatttgtaactaaatttctaaacttaaaattaatgtagatgtgtatccctacactaactttggcctttgcttccatcttccctcaagggctgctgtgcacactcacgcatgtgcaaacacacacatgcatgtacacacaacataatatttttttataaagaaaattatctggttacttgatatatgtgtggatttttcatgtgacagcatggagactaggagattatgatcagcataaaaaaaagtataaatggtactcaccttgcttaacttacagaaagatatcctaatataagggataaataactgggcataaaaccattagatcgtactacggtgcttgccaaatagtctttcaga

SEQ ID NO: 26393 - DNA, 1031 bp, Homo sapiens
gggttcagaagtgaggatccataaggcctcacaaggctgagatcaaggactccctcaggctggggacttatcgagagggtgtgaggaagaatcagcctccaagtttatttagggtcttggctgaattcagtttcttgtggttttaggaccaagggcacattttctttctggttgtcagctgcagccacgctcaacaattaaaagcaatctacatgtcttggcgtgcaacccctccattttcaaaccaagcagtggtgtgtcaaaaccccctcacgtttcatgattcaaatccctggcttccgcttctgtggccaaatggggaaaacactctgtctttaaagacatcatgtgactagaacacttagctatctcccttttgtcacggaatgtgatataatcttaagaatgatatcacattatgctcacagcttctacccacattcaaaagagagagggttagacaagggtgagggtcattgggagacattagaattccaactaacatagcgtattcgtctgcgcgggctgccttaaaaaaacaccacacactgggtggcttacacaaaactcatttatatcctcgtagttctggaggctggaattctgaaatcaaggtctcggtagggttggtttcattctttggcctttctccttggcttgcaggtggctgtcttcatctagtgtcttcacagggttatccctctgagtgtatctgtgtcctagtctcatcttctcacaagggcaccagtcatattggattagggcccacccataaaacctcattttaccttaattacctccttaaaaccctatcttgaaatacagccacattctgaggtactgaagtttaggacttccacatatgaattttgggaggaccaattcagcccataacacacaagataattttgctttttaaaatatattcttttttttttttttttttttttttgagacagagtcttactctgttgccaggctggagtgcagtggcaccatctcggctccctgcaatgtctacctcccgtgtt

SEQ ID NO: 26394 - DNA, 1098 bp, Homo sapiens
ttaaaatatttaagtaaaatgggaatatacagaacaatatatattatttttaaaatccctgataatttatatatattttttctatatagaatagtctgcaagaacatatgaaaatgcgatagcagctattacctagaagtggtcaatttcagaagatttgattttttttctttttgattgtcttctatgttcttattttaactaaatataacatagtaattaaagtacccacaaaatttgatcataacactctaattcatagcctggtaatgtgacttaaaattaatatgtgcgttgttaaattacactgtttctcagtaatttctttattatggaaaaatgaacaagcattggtataatgtgggaaaatatgtgcatttatgtcgcttctgaaaacatgaggtttaatttatattcctttgggtccttatggttacctcttctaattttctgttaatattaaaatgttacattaggcctcttctttttaataaactaataattactttgatgagatttcacttaaattctcatgaggtgtctactgtagagaagaacttaattatctgtgtttcttatggttatgtttgggaaacccattgaacttttcgtcatatttcatagctattgaaataacacaggtccacctacctaagacctctgtcccccatcacataaactaataaagaagctcttctcaattgataatttagggttttgatatacatctacaaaaaaagtaaccagcctaggaaaatcactgtctcactatctttttattttctagaggactttcatccattttagagacttatttgatgatacagttgaaataaaaggagatgaagttcatttactccatggctttgattctggagaatactagggaaggagattcttgacaaaatcataaagggtgggcctctagtactccaaactcctttatttttactattcagtctttttatctgtgctacaccttcatgattgcccccatctccgtaaatcccttcctttgatctattattcacaaagctgtaaataaataatagaaaaaggtttactttttttcagagctagttgttaccttttgtactg

SEQ ID NO: 26395 - DNA, 1066 bp, Homo sapiens
aagtccatatttggattgtagtagtgactgggtataacaattattctgaaacatttcgttacctccgctgagaggtatatatccagtaaatcactggccatctttctcctgtattttgtctggcagtgctaatttaccaccttctaacctattatagaattcacttatgttattttgtatttcttttctcccatgagaccattgatctctagttgcatagcttgtcaagtgtctaaaacagtactgggctggaagcggatgctcaataagcactccaaggatgaaatttgttctaataatgccgggcgtggtggctctcacctgtaatcccagcactttgggaggccgaggcgggcggatcacgaggtcaggagacagagaccatcctggctaacacgcagagtctctactaaaagtacaaaaaattagctgggcgtagtggcgggtgcctgcagtcccagctacttgggaagctgaggcaggagaatggcgtgaacccgggaggcggaagttgcagtgagccgagatggcgccactgcactccagcgtgggcgacagagcgagattccgtctcaaaaaaaaaaaaaaaaaaaaaaaaggaaatttgttctaatacgatgacctaatgacctagggtttctatgggttttctttttcaaatataacctcaattatacaaattggtatatagttgtttcagttttcaaatctaccttaataactcgttcatatttctacatgattaatttgtatgaaaagtattcactcattaaataaaaatctttggccaactctacctgagaggactaaaggaaaacatggcacaatataaaaatgaggagttcttgctagagggcattaaaaactcattccagggctattaattttattttatttttctttaacaaatgctgggaagacacatgtttgtggattattgtaatactaaattattaatgcctttcattaagatacattttattagttgtggtttgcaagtaaacaattgatctgtgttttttattagggtaaatctattgtgatttcttgttcagtaaattaggct

SEQ ID NO: 26396 - DNA, 1029 bp, Homo sapiens
aaaattaatcctagttttatatttatagatggttaagtaaaaggtgactaagaaatattgtagctgaacccggtgagtttgaaaaactttgcttttctttgagactttctatatattattcacatttgagaaaaactgttctagatgacatttaaatggtaagatacttcaaatatattttggcgtaagtaggcatttgaggactatgctaaagctctaagaactatttggaacactgtttctatgggaaaataatgttggaaacttttctgttagcactgatgaaaacataataggcaatattctgtttgttgttatccaatccaaaatacttaaatattttctaaaaattaaaaaagaggaggtggctgtcccggccatccttactaactcaaaaaataaaaagcaatgcccctaagttgaaaaagcccaaatgaagaggttggagggcacagggcaggtcggaaagaaagaaaaaaaccaaagattctttctcaacagcataaaatgtgtcatgatgtaaaaagctaacatgctcagtattgtagtaaacaatgacattattttgcacatgtaaggacaacgatttctatatagcataaatcattgtttgtaaagagaaataaatctagtttcataaatttatttttacattctgtattttcctcaaagtaaaataaccaagtctcatgggtggaaaaaaatggtgagccctttgcttaattggaataacaatttcctttcctccagtcctcactaatgttctgctattcaggaacacattgtgaatttgacccacagtcatattttctccaaatattaaataagaaattcacaaataagtaaaccaaatcaaaagatagtaagtcttcttaatgaaatatatatctacatatgtattttctttctatcccaagttgatacacagcttcaatggcaacaggggttttgtgtctatggctatggtctcacttctctgagagaatattttctgcctgactgctatgtcatggagccaaatacctcata

SEQ ID NO: 26397 - DNA, 1046 bp, Homo sapiens
caagatgacatcagtcactaaaaaggaatgagcaaaatactgtacatgatggtgataatttctacttacctaatgactacaatgtataaaacctattagcttgtttccctgtgtttttttcataaatcttcacaactgtcccatcagatggaagctattatcccccagttgagattcgaagatgttaagtactttgctaaggccatcctacaaagaaatacagggctggaatttaaaccaagaagtccaaagtctgtagtctttctgctaggctttgcagagcttacaaatgacctaatagattgccttgcccagcagagccagaaattgcttccagaggcatgtctatattagcagcatgagttgatccctatgtgataattgtaccattaatgtaatagaaatattgagcagctcagaacttcctgaccccaggctaaagtgtaaaaagggagaaagataatagtctcctgctggtttcaaccagggtcatttccaggacattgtctggcctagacagtaagaatcagatgcaaattgtaacaatcttctttgatctgtgtgttcagcacaaatagatttatgaattcctctcctttagcttagttagtgttttgttggagtcagatagatactttgttaaccccatcgtcagtctagagcaatgttgtcatagaggcatgaccttcctgtgatgtatcaaactcttcatttgtaatattatagtcttataatagagaacacaatattctgttccaagactcaaacctaactcttctccaggaaaacatatgcaactgactctttattagattgttttggaaactttttattttactggtcaatcaagtttagtgacctatttgatattcaggtatgtgcacaatgtagacatttttcaaattaccgtatgaatttagataatatctcctattgagaaagaaaagactatcacatggaataaccttgatttgttaatctggctagcacatttgccattgttatatctattccctgttgaaaaagccttcttgtcagacttgtca

SEQ ID NO: 26398 - DNA, 1048 bp, Homo sapiens
ctcctggcttcacagcattctcctgcctcagcctctcccagtagctgggactacaggcgcccaccaccacacccggctaattttttgtatttttattagagatggggtttcaccgtggtctcaatctcctgacttcatgatctgcccgcctctgcctcccaaagtgctcggattacaagcgtgagccacctcgcctggcacatgttatatttttaaaggttttttatatctttcacaaatttactttaaggttactttttattgatcaccttttaagagctttttgaattaagtgaatacatgcaaaatggttacaacattgttcagaataaagacccatcttacatactgttgttatgactttagttaaatactatggtggaaagtgaaaaaaaaaaaaactaatgtgtgtttgctttattaaaaatctaggagaaaatatataatgaatgttggctatgtaactatatcatattatgtatatccaaaattaatgttccttgaataacactgaacaatgatattaagaactaaaaataaatattcactatatgctaggaatcctacgaatgatgaaactgcaccttaagagtcagtcaatgggaatacaaaatgctgcagccactatagaacagagtttggcagttcctaagaaaaagtttgataattaccatacgtattagtttgttagaactgctgtaacaaaatattacagatcaaggatcttaaaaaccaggaatttattttctcactattctggaggctggaaagtctaaaggcagagttggtttattcggcggcctctctccttggcttgcagatgggcacattctcatgctttcctcacattgttagcattattatagtttataaatagttgctgtttgtctatagaaacatatgatttttgtatacatatttttaatctcaatcctggtaaactatcatatttattgtgatcattaaactagtttatttcagattttctacatagacatatcatttgcaaataatgacaggcttattttttcccttcatatactcttaa

SEQ ID NO: 26399 - DNA, 1059 bp, Homo sapiens
agccagcaccatcctgaactctggctgaagtatccagtccatctctgtctgactcctacatactagagattcatagaggggcatacaaattgaatgtatccagcgagcttagagagaaatgggttagaatgatttctccaccggaacatccatagggtgctgttatctgacagtatgacagaagtatagtagagtcaggtagattccagggccttcaaccatttgtactgaagactctttcagaatcttattggtagaataagggtaccagcagccccccgagatggattcctggatcatgaagagacaaaacaggtagggtagcttatagatgagtcatcaattgaaaaaaaaatcttatgttgagtatttttcacttcactctgagttaaaatctgcaccattgtctattagatgctgcaggagctggctggcccctgctgcttgcttgacctcagcaagtggaactcctagctctctgttctgggcacactagccttttctgaaccaggtgtttctcatgtgtcactgtatccaagaggacatcacagacaacactgtctaaaacagaggagaacccccttttccattacaggctttgtttttcttcacaacattttaacactccatggaatattagatgctgttttgttcactatctgtttccttctagtagagggaaaacgactctctagtttccctcttataatctccatgaaaacaagaattttgtcctgctgtagttatttctgtatgccataggtgctcaaatagtcactgaataaaatagtgaaatgatgaatataagccttgctccacttaatctaatacctctctttacctcaaaaaatactgagcatgctaatttgaaaaagagttaagactcagtagatgggagttggatgcgtgttgatttaaaaccagccttaggtaagaaaggtgctagttggtggaattagtcagtgatgagacaatatattcatttctctctactcaatggttttagcaacttaatatttcaataattagctcatagcataaaatttgtctcagcaatta

SEQ ID NO: 26400 - DNA, 1032 bp, Homo sapiens
aaaaaaaaaaacagcttaaatcagcatcccaaccggttttctgtaaggttaattaattgttgctaattgcactgtgtcgcagccagagacagaagcactgtcagagataatgcagtgggaaggaacagggataaaggagaaacatttatgaaatttgcacttatagaaggtactctctacttcagtgagcttaagatgcaaaaaaggtaacaccacattaggagaacacagacatcctgaaactagatgtaattgagtatttttttaaactcctgaataattacatacatatcaattagccaagtgaaaacttggcaattctttgtttacttgatccgtgtaatagtcaaattctataattcagtctcccaaattcattttgaagataatagatacagtcaaaccaaaatgtattatctttcagctctaatagatgtttcatgctggagataaaggtaaagatgaaaaataacattgataaaagtgaattatgtgcctggtattgttctaaaggagctataactcatgaagtaattaatactgttatccgcatttttataggtaaagaaatagaaagacaaagggttaaatacttaccaaggtcatagataataagtggtacaacacaggcttgaagcactataccatgctgtaacggcaactttattttatgcctctcataaatagatattggaagagatgcttgtattgttgtgaagatcagctataattttgacaaactcatagtggatttccagtttgaccaatgtgatcattcaggagaattttgtagaactagatgcagaaagaactcacgtttccattccattcctatttacatcttcatcagttaagagattgtattggtctggaaagggtcaacatacgtcaccatttagaaatatctgttaactctaacaaggcagaggaaacaacttgatttttaaatttctgtgcataatctaagatcaaaatatatgttagaagtcaagagattcacaaatctatgatattttatgtaaatattcaaat

SEQ ID NO: 26401 - DNA, 1049 bp, Homo sapiens
catgtaaaatagttacttatatatgtgcagttatgtgtgtgtgtgcgtatgaggttgaaatatctgaacttgcttacattgaactattttgacctataaaaatgttttcctccgttaaggaaattttaatttcttatgaaaggattggcacagggcacaatatttttgccaattattgataattacaaaacgtggaattttctatgttaagggtgatcacaatatgctggacataagtgtgaatgacataatagttgttggagaaatttagaagagattttccactgaaagaccaagtaagcatcaaaagaatgatggttgcttaggaaagtttagagaacaaatgtttgtgttacaaatacatttacataatgaccaaaagatctataaacataatatcacagtaaaagatttcatgtgtaactaagtgtttaaggaagatgaagttaacctcaccatattaattgaatacaaatgaacaaataatttgtagccttcagtatgatatgatgaaccatctagaatatttactctgaaaaagtgcaaaatgaaaaacgggtagggacctatgtaccagttacccgaagaaccactgaatcttcaagtgatgttggaaaggtagctttgggagatcttaattgactggcttagctttaagtacaattacactgattacagaaaattacagctatcttagtctaaaatgtgctattattaaaagaaattttggttaaatattatgtgagtctaacagaatgacagtcagcttagtataacagcaagtcagctacttaaaaatatcaaatatgtgtgtgcatatagatacacacatacaccactcttaaatattgtatgcattaaaaatcatggcttttttatttgttggtaattatagttgttgtcttaaccataaacatgtaactccagccacattgtttggaatagcctagctctacctgtgcatagacaagaatggtctaagagtaaagtttagcttggtgggtttaaacactaagacagctgctttctttatatgttgtaaaaaaact

SEQ ID NO: 26402 - DNA, 1107 bp, Homo sapiens
gctcaggttctggactctggatacctagattcaaatttctggctttgtaaaataccttagtctccttatttctaaatgggaataataaaagtgcttccctcactgagtaaatgtgttgttggattagtaccatggtctgacttgaaagtgttttcggtaagtgtgtcttacagaaagttgtggtattaaagttagatattaaactgttcctggtaaaatattttttaaaagctgacctaaaatgattgtaatacaactacagattgaaatagttttgtggaattcaaagttacctgctgactgattgagtgtgggaaatgtttgggatgggaagaaagttgtgagggaaagaggagagttagatgacaagataatcatggtacccagtaatgcaaataagaaaaattcatttggaaaaaaataaaatgtatgattatatgcatatcaaaaaacatcaatttcctctgctttggttttctttcccacacatacctaatgttatattaaactactaattttttagactttgtcctcaaatagaacgcaaacccctttatgacagcaacactatttatttgtattctctttatctccattgggtaggtgctcaaaaaatagtttttgaataatcaaatggaagaatgaactatctaaatgtgtattcaggagccagatatatatttatggagggatatcagaagaagaatgacaggtagtcaaataggaaagcaaagagggaaatcagattatagagcagctgtaaaagcctagagaactcaattaacctaagattttaaagggctatgtcacacagattttagtttttttaaataaaattctgtagcatgaaagcaaaaacaaatacaaaaaaaaaaaaaaacatttcagctgattattgacatgacaagctaccagaaaattgaaggaagttgctagaaagaagttctagcaagaatcaagaaactaggtcttaagtttaattcttactgcttatttcttaagtgtaatccctggaccaacagcctcagcatcacctgggaaaggataggaaccatcattttttagggaactcaccctagagctactgaatgagaaactccaaggcaa

SEQ ID NO: 26403 - DNA, 1035 bp, Homo sapiens
aaaatcccagaatttcagtagtttggcataaaaaaggtttatttatttattgtccagtcataatccagtgctggtcctggaggtctcagagttccaggagcttctattggttctacctttccctatgaccttggcattgtcctggatcctctgaagcagaccagggaagaagcaaaacagagcatctcccaggatgtgtttaagggccttttttagaggtgttatgcatcacgtccactcacaatccataggccagaagtcattcacatggccacacctaccaataggaaaagctgcgagatgcagtggagctttctgcccagaaagacataggaaatagtttgtgaacatctaaccagtctctgtcacatttctttatattttagagtttatttctgacattaaatctttaaaaaaaaaacataaaatatcccaaagtggttattttacttcaaggaattgatacaagttaaacacactaacaaaattatcaataagcaaacctataaacgactacagaccttctgaatgagctttttttctgttgaaaaacctagcatattttttttccattgaagtgtgtggactgctaccttctatagtagaattttgatttcatattatgtgactacacatgggaacaagcaaagacagtttgtttaaacagtggtaatcctaaatgtcaagcctccatgtacgtgtgtgttggctgtaccatgagcagctctaggagaccatttccatatactaccatgtaaatggcaccctcaagtatggccaggcccctgcattgtctccacaactgtgtgacctaagtacaacaatttccacgattaagatttacaccaaaaaggatccatctccatacaaagcttgatatttgaagtactgcagacagtggaaagagcctttgcctcagtgtaaaacacttggttttgaaccctactgtgccaattattagctgtgatattggccaagttagttaacctacaaaagctttactttttccaccagaaaagtgagtatgtacaagat

SEQ ID NO: 26404 - DNA, 1055 bp, Homo sapiens
cataaagcttagcattggtggccatgcgatagaagtgcttatttacttttactctgtaaagtaatttatccacaagaggaagaatccaacaatcctctatctctgtattttcatctttgtactcataaagaataaggaaaagttgccattacttatacctgatggaagatagaatgggttttagaccatcttaaatggaatcagtgtttcaataaatggctgttgcctgtgcatctgccactctttcaaatacttgctgtaaattgaatgggtaggcagagagcttcttcagagcagtggatgaaaccttttaaagacaattgggcagtcatgggaatcgtgaggcattataattaaaagaaggaagaaagactatgtcagcagaagggctaccacagacatagccaaacactgtaatacctcaaggagaacgcagtattggcacatactttcatgttaatgtaatctgataccatatagttcatatagtatttgacactcttattgccattgtcttttgtcttaactctgaatatgtccttatgtgatgtatatcaagctttcttcatacctttataaaagttgcaataaagctatattaggctgagtggatgtaagcaagatataagagtagtggaaagaaaagaaaaattcagacaaatatgatgtgtgcttttattttttaatctctgtgctagcagaaaacttcatgcattgcatataacaacatatggaaagtacaaggttttctgtgaaatgctttgttgaccatctgtcttctctggattgattgttcatgcacttagtactaacactttttgttagaaaaaaaggggcctttttttagtaatcaactttctttctggagttcttgaatatagtagcttcatacatttaatgaaaatgatctttaatcaaataacagttaaaatgcagttaaaattgtccaatgctttgagacatttagaaactattgatttaaacaaattattcccatcctaaagtatttctacattttagtagaaggggaattagtcagttaaattaaacatttt

SEQ ID NO: 26405 - DNA, 1104 bp, Homo sapiens
gagctagaagaatgtttataaatgggttgtatgtaaggctcaaatgtctatacgggtgaattaaacaattatgcttcaattacaactcaaagggctcctgtacattctgttaattttatttcttcccattacatttttcttttctcttaatctttacctcttctctgcaaatagtcttctgaagttagtaaataatatgttggactattcaatatgccattagattaccctgttatcctcaaattacaaaattgttcaggtccctgtttaagtggtcccaccatggagggatgttttcttacctttatccaaagttttctctgtctgttcttctctatatccacactctattcctttttttcatattacgtatagctatttatgaatatgtctgtttattcctcctcctctgtttgcctctagacccttagctccataatgggagaaaaacattctgtcttgtccactattatatccctatcacttagaatggttaccgacatacgcaagcagcataatgtatatttggtgaggcaaagacggaatgaatgatgttttctctcacacagtgagcttttctctatggctcactaactctaaagacaagatttgagttacttgtaaaattcactgatgtgaaacatagtgtttcttaaaagagattatgtaaaatgttccaaattttaaagagaagttgagcttaaaattcatactataactttttgcttaagtggtttcagagaaaaaaaaatggccacaatatctgaaatttgaattagagtgaggggctgcatactaattcagttcaacttaattgaatcaattttgattcaaaatattaaataaggtgcagtctatggtatacagtagatgaataagacagagttcactcactgtaggagcttccactctactgaaggaatccaacaattacttatatagaataatgtaatacaagccgaatttgactatgtgtcatcgtaaacatgtatatagagaaatgtggtcatctggctttgggtatgagaaaaagtaactaatgagatagaccttgtggagtacgaaatgcaggaaggaaggaagaacatagcatatatgaagatg

SEQ ID NO: 26406 - DNA, 1039 bp, Homo sapiens
cattaaatagttattaagtgccaagcccaaatcttaaactcgaattttctgacctcaaatctaatacagatgatagtatcaacagcatactgtacaattgatcaatgaaaagaaaaattattgtggtcgccaactgttaggaaagactaaattgaatatatttgacatgaaatgaggtttgaagaatagctaggctctctgaagcaagggaaggaggatatcttgggtaagaagtatagcataagcaaaggcaagaaaatgtctaaccatgaaatgatggataagactttttggttatcatgcagttttcccaaacagaggaggttgagaaaatgtacatttcaatcagtttgtagagagccccaagcaccagactaaaactgtaatgaatctgatgtatgcatatcgtgtggcagataagcacagcaagcgatagggaacaaagtgcagggtatgttttgattacatgttgtgaaaataaagaatgtttagcaggtgggaactctagcagaggagaaaaagtggtgtttcaggccacagtgaacattgtgtgcatttctgggtgattttccattcaaagtgttagtcaaagcagtagataattatgttatttaaatattcgagtaatacggttctgtaaaggggctttgggcaaacatattttagtttcaccattaaactaattcactttttctagaatctatgacctaccatcagcaacaaagcatttctgaggccttctgggcagatgtaatagactagagatcattgaagacaaattcctcgcagagaaagatttgtgaaatcctgcagcgaaccaaggaaactgtactcccaaactctctcccctgcagagaaggctttatcattgactgtctcttagcacttcaaaaaaactttgaatttgtgaataataacactgttaccttatatataaatccaaacagaaacttatgaaaatattgatggtggtcccatactatgaatggaggctctattcttactaatagacatttttgttcataaatataactttttt

SEQ ID NO: 26407 - DNA, 1041 bp, Homo sapiens
ataaaatacatatctaaatattatctgtttacacatacttacatgataaactctaagagccttttcagaggcattatgggatgtttattaagcacaataaaacattctgcattcctccaaaagaagatacctctttctgattcctgactttaacaactgcattatggaggctgcacattgaaggaccgataagtgagaagaagggaaattaattggaaataagctgaggaaaaatcaggaaagctggatatgaggaagggccaggaaaaccaatggactagtgccacaatgatcatagggttggaagtagtgagatgaagagagaagatggaactcaatgtttttctttagacacataaactccttggtcatttgtgcccccagaaacttcttgctggacatcttgttccttcgggctgtgtttaccattatgccgcatgggcctatgaacctctaccttgagccagttttctttacctcttgtagtttctctatcatttactgtcacctcatcaccccaaaatcttttctctgagaatctgtagattcttgttatttatctctacatagaaatttagaattccttgttaaaacactcttcttatcttgcagagataacaatcgtggggaagaacaagacatctcatgtcctcatcctggccacaaaaaaaagcccatccaaaagttttaaaagatggaatagtgtcttctcccatacatattagataagacaccctaaatatttttattttgggcatagatgatataattcccattattgcatattttaattttttaacaaaaccatgattttgattctttgcattttgtatttttcacaacctgactattctgtttaatataaggaaaagctgagagagaagtgattgagcttgtctggtgtcacaggcctgatgctcaggctcctgtgttcctcagcagctgctcttaacaactatactccaaggatacaattgttccggctgcgccacctgggacacgagtcagcagcactggccttctttcccagcaagaaatcag

SEQ ID NO: 26408 - DNA, 1069 bp, Homo sapiens
atattaataagtggcagagactcagagggagaaaactccctctgagttttgttcttataatttctctttggaggtccatactgaaatagcttgcctttttgttgtaattcatgtaaataatcctgaatattctatttacatcccctttgaaaattactgccaaagtaagacatgtcaagcctgcaaaatccttgatatatatgaagctcagatcaaataaagggtagtttactgaaaacaacataggaagattatttgaatactcttctccctcctagcctgacatttctttttctccaccccaaatccatgagaagacagtgtctgggataatgggaaaattattatacactctcataatcactgggggataacattccgaaaagtagaaacctaaaatagaaaactacaggggcttcatattactctctcattctttactatatttattgaaatgagatagttgttattagccaacaagggaactgacctttatcatcagctaacgagagatcaacactctcctgcaatgtgaaaaatcacagaaggacaaattaatcagattaggcaaaagggaagggcagagattggaaaaaaaaatacttcacagaggcagaaaagaaaatataaagtggagttaaggaatattgctttcgtgatgacaatgagatttttaattttcttacctaactctgatacagtattcagtcttttcaactactatctaggaagtaggattgacagataatatgtaggacactcagttaactttgaattttaaataaactacaaatacttttttaaaaatataaaattcaaatttatcggagagcctcgtattttcacttctcaagtccagcaaagctgctggagacaagttgtgttttttttttgtttgtttgtttgtttgtttgtttgtttttgagatggagtcttgctctgtcgccaggctggagagcagtggtgcgacttaggcccactgagacctctgcctcccgcctcccgggttcaaacgtttctcctgcctcagcctccacagtagctgggactacaggcgcccgccaccacg

SEQ ID NO: 26409 - DNA, 1050 bp, Homo sapiens
gaagtataattttcagcccttagttaccttccaaatttaaaaaaataaaagccaattttattttttattatatgagacatacagagaagtccagattcaaaggagtcactaacagcacctatcacatcacaaaatgatgatggagtattttccaatctcaatctcattgttttctttaaacacttcagctgcagcatgtaaatacttttgccaaagtctaaaaaatgagttcgtctctgaaaatagaagttgtagataaatatgaaatatttatacttcattttaaagatgagcagtcttcttattcagttttttgcttaaagaacaggtaattacagaagtttctctaattcaggcagattttatctacttagtgattaatcaaaaaatcattagtctctctcataaccaatgagagaaattttcaaagaaatccatatggaatttttggccttctgtacaaagttattgcaatcatatattttctttaaggaagaccagttgcagtagaacaaattattattttaaattaaaaattgtatttttaatgaattaacatttagcatatcctgatatttagcttctcatattagtgcattttgcacataactgaactgtaataatagcctggaaactatatatccacttaaaattctggaaaggtaaaatttttagaagatgaaatttcccctagaggctaagagtaagttaggaacaggaattccaggtggatagtactttgtattgctagttcatttttcattctgtcaacttgcatattcttgtttcatagtttcatatgattcatataaataattcacacacttagttcaaaatgtggaaataattggtgagagattatttggagtatttttgtttccagcgttgtatacatctgtaaattgaagtcttgaatattttttaaaacattgggttctcattatctttcctgtgtataattattttcatctctgtacccacaatgtttgtatgatttacagctgcaatataattgtgatagagaagagagagtattgcggttgagatgga

SEQ ID NO: 26410 - DNA, 2000 bp, Homo sapiens
aaatctccaaagcagacagtttccagtaatatctacttctaagtaatttctgaaactacagcacagacttagcaattcaaatatatatttttaatgcaacattacactttgaagtattgtaaacatttttgaatatttataaatgaatttattttatttaaaagcatcaacaaagatttaagattcagtaatgtctaaatgtatttggcactcttgataatgtcccccaaagcactggaaatttttgttgaaaacatattttctggatccaatctccagcaaatttctttcttccttcaccttttagcaggtaactgttagtgtggtgctgtgtggtagaggaatatgggctgaaaaataaccacacactcttcatttcctggcattattagaggtctgtaaaagacagctggattttctctagcttattcttgttcttcaaaacattaaaaagtgagagcatttatacaagaaagaatattagactttgatgcttcattttcagaggagacttgtaagaagcaaaagtgacatcatgtgatttattctcatgacacgattgtaaagggagccaagacctataaaaactcaatctgttgtcgatacattatttacatgtgtacaccatgtcttacttattctgaatgccatatttaaaaaaatgagtgcttcagaattggaatatagactctttatatcgagctagattcaactttaaacaagtaacttctaacttcttagtttgatggcaattacatggttttaaaatgtactttcttatttttgtggtagcatattttttcagtagatagctctgtgtatgctgacattaaatcattttgctgtccttcaaaatacatactagctcacttaagttttaaaatgtggagatctatttagctgtacatttcatgtctttcaattgaaaagcaccatatatgattttctaaataattttaaagtcaagtaatctaccttaaaattttaattgctaaaaaatttaattgctattccaaatagtacacaaaagtaaactgttgcttcttttttttgcacatgtattatatcataaaattaaatgcaatgctttctttataaatacaaatacatgtaatttcctttctcatatttgaaataggtcaagagcatttgactaaagaatcatggacctatattattttaaaagtaagaaagaaaggctttacaaggaaatccagttttcaacgattattgttttcaccatatatgtgtgaaggttttcttatgaaataggtaatttttgatgttatgcataaagaatcatccctcaaagtgcttacattctaatagaggagttgcaagtattaggaatcccagttgtgtaccaggcaaaataaatacagcaggactgttggtaaaccggggttttttttttgcaatgataattacagcaaactgtagactgtgatagtccagtggactgtctaaatatacaaatagacacttataaggatcagcgattataaagtcactccatcagattttggaactaaacattaagtactcatggtcatgaagatgtcaacaatagaaactggggacttctagaggggagaaagggagaggagaaagggttaaaaaactattaggtactatgctcagtacctgggtgatggggtcatgcataccccaaacttcatcattatgcaatataccaggtaacaaatgcacacatgcaccttctgaatttaaaatacaagtttaataaataaataaaatagaagtttacatctgctatcttccatgactttgtaaggcctctgtggaataggtaatgtagagctgacaaacttatgtgtaaatgagataatataaacatttagtttcatagccaataattagattgaattttgtattcaagatctttttgtctccatcatagtaggaggcctatggatcatttagtggaacaaatagattcaccataaaggtaaatgcctatagttataattaatatcaca

SEQ ID NO: 26411 - DNA, 1084 bp, Homo sapiens
caaaacaaaagacacattattgaatgcctatatgagacagactaagaacaactgtcttagcccattttatggtgttgaaacaaaaacgttgagactaggtgacttataaaaaacagataatttctggaggcttggatgtccaatattaaggtgtcagcatctggtggggcccttttgctgcgtcagcccatagcagaaggcagaggtgcaaaagaaaaaggacagaaggggaccaaactcatccttttatcagcaacccactcctgtgataactaactcattctcacaatagccacattaatccatcaacgagggcagaacccttatgacctaatcacctcttaaggttccacctctctacaacattgcattgggaattaagtttctaatatataaactttaggggacacatttaaaacatagcatcaacctttttgagcagtataattttattttaacccagaaactgttgtaataaatagaacttgtttttaaatgtcaatttttatattgtgaaatatatcaacattttttctcatctcacagaattaaacaactaagcagaactcactcataaaatgcacttataattaaggcaaaaaacatatgaattttatatatacatttttgtcttaaatatgaagctttatattaaatatgtataatgttataattatttttataacatatgcctttatgctcatgtatatttgtcccattaattattttagctaaatgagagctaacatgtgatcacataaaaatgtcattaattttttaaaaagcaggatacaataattgttgcatagcattgcctagatatgagacataatataaccttcaacttttaaaaattttgtattgttatcagatttttcaaggtcatcattattaccactgattattatactctagactttgtcttaacctcatattaaattgctccagcatttttgggtgaggtgtggggaggcaagaggatgtttgcagtgggcaatggcatattccaagtgacaaaaaaggaaatattttaaaatctgatatattttatatcttaatgacatagaatttataatggagtata

SEQ ID NO: 26412 - DNA, 1025 bp, Homo sapiens
ggagctcagtgaatatttattggacaaataagtaaaaataatgcaaactccctgctctcaagaaatttataatttttttttgagaagggaacacttatgtctacacataggcaacagagggtgaaacacaagataatataattatacattatctaagccacacaggtggtttcgagtgttaattgaagggctggtacttgaatagccagaaaagaaggattaagttattccaaaaggggaaacaacatgggcaaagcacaagaagccaacattttagaaaatgtgattaaatgagagaaaaacctcaatgatgagtgctgtgaggtcattaaacagaacaggacattctacatgcagacttagtaagtaagttggtatgtgcattacacaggtagggtagggcccaaatatggaggagcttgataaccaaagtagattgggtaaagataaggaatagggagcctagatcttgaacaggaaagaaatatgatgaaacctgtattttaggaagctgtgtctcgcaacgatatgtagacagaatcacagtaagaccctctggtagtaatcccagtgtgatcctgtaaggtgctggcagagagattagtgagagggctgtatgagagggatgttctcaaggaaagcacagaagagaatttgatagatgggtggctatacagaaggaaggaaagaaaagatcagctcatttgcaaagctcataagttcagttttgtttgtaccagccttgaggtgtttgtggatggattgagaaacgatgctggaggaaattccccccatcagaaggcttcttagctggtcttaccactgcgtactttcaggccaccactacaaagaagactcggtttttactcaaaagcctaagttctgggattacatctctcctctcccacacattgaccttgagttatttagagcaatatggagggttgaaaatagggtgtggagcagttaggggtccaagtacttagtgctcagtaattacaggtgagtaattattgctcactttg

SEQ ID NO: 26413 - DNA, 1045 bp, Homo sapiens
taattgaccatagagctacatttagaaaagctgaaataaagtttttttgatttctattatagcaataaattgtttatattaaacatgtctatgaaaatatgagtttcatgacacagaatcagaatagattgtgtgggatggtggatgtggttggttttgttttgtttttagtattattaatacatttgttcagcctaattcaagactagctttattgtaacaaagtagtacaaaagtgtttcagcttctgccttcattcttaccacagagtgtatgaaaactaaagtgtttttaactttccccaactaaaggatatatcctgttagatttggctaattgcctaaatacttcttttggtgacaatcactataatgaatagattataagaaaaatttgaaaagatactataaacaaggaaaccgtagcttgtaactaccttctttcaagtaccggattgttatctatattatttattggtagcttgtccagttctattattaaggtttcctagctgtagcatttccatagggaattgattccatgagctaataaattacaccgtcagggagtttttcttgaaattcagcttaaattttcccattcttaatttcatcccgttactcctggttatacccccttgtaccaagctaaataattattctttttccttagagactcttattatgtacccttctgtttgtcacttaaccaggctattcatagttagctcctttaatctgtcctcataaatcaattcttccattgccttaattattattattgctcttctaaacactctctaattttcaaacatatacagttctcaggtgccccagatgacatcagcatttgcacagggttctatcctgacagacttagtgtcttccttccctgtacaacaagatccagaactaaatggcatcagttcgctgaatcaaatcagctcttgctcatcttgtccaattcagcatggtctaaatggtgttttctatgtgccctacctccattcaaggtttattttgatttgtttcaattttgtgagatt

SEQ ID NO: 26414 - DNA, 1050 bp, Homo sapiens
ccttcttgtctccacttattagaattttctcatgtttgatttttatagataatgtccagtgtttttcgttgttacttagtgggagaaagagagacaagtacatctgtattatttccctcagttagattctgtagttggagctcttggtacttgtgtctcaaaatatagcagactttctagatattttgtgtcatttgttaaattgcttaactattttgaactggaaagctttgtgcaagaatcctagggattattcttttcaacctagtgcaatattataccaatgtaatactttctaggaataaagaaccaattaggttattcttcatttaaacataattgacaaatagtaagcttttcatgtgttgacctctttaagatggaaagtgtattaacaaacccgagtaaaatacttcactccttagtgatgaatatttgggtagtttagaagatatccatcatgattattttgcttattggtacttatcattttgaaaacatttcattgttttttaagcaggccgagcatctgaattccagtagaattaatagaaactatataagagcggttcctctgtccagtattatatagcagggatccaactgtataacatgctgagaactcttaatgttggaagagagtcaggagagagagcaagaaagagatttaaagataacaaatgctggcctgcccagagaatgtctggcagtctgaatcaccagcttccggagatgtagggaactcacatctgatcaggcactctgtctgaagctggacagatgcagttataaggcttccaagtgtcagtgttcagaccagtggagtctagcagagttcccataggtctgtgtcagaaggaaattcagtcctaggaaaggggtctcaaaagatccatatgtgaacatcagtgctatcactaccttacctatgttttagagcccaatttactgctatagttgtatttggaaatgagttggagccagagatccatggaaaaggcctgttgggtggaatggccccagaggtgtgaacccggtgaaataagggta

SEQ ID NO: 26415 - DNA, 1698 bp, Homo sapiens
tgcacagtctttggataaaaagggttataactaaataatactacaaaatgcaatttacacaatgtgctgactacacatttgtatacccagcatttattaatttgggaagcaaccaactactgtaacttctctttactttttcataagaaaatgacaatgaggaaggaagtgcagcagaaatcttgaacattaccactattatgcaaaaaaaaaaaaaatgctgttaactgttttcccctcagtgacttgatgtgctctcagatggaaaacttatgattcttgtgactcttggctacccgaaatcacatgagatgagcaaggaagaaagacacaaaagctatatttatatctagccctgaacttctcagaaataccttaatatgattccttgcagagactgataaaaatatcagatgagggagactttcaaatgatcaatgattacaattgacaatacaatattgctatatattaaacttctaaatgtttaatgtaaaatgtctctctgaaaatattttttaaataaaggaaaattccttgctcaggaatgaatttaagtggttgtacagcttaaacaaatatcattcaaattatctgattattatgaggagtgagattaaattagcatccaggtatatctgtgtattttaccttaagaggatcatgatttttcagttctgattccataaagagatttgctgcactgcttgtaaaatatattttattttatttttgctgtaacattttctagaacctgttctttcatgaaagtagattagaatatgataagcaaagaatgaccaggacagatttggaaattcgtagagtcctagttacaaagtttcccttgttttaagtaaaatgattatcacagagagatattcatcctggagcatatttggtctcattagtattgtcatagtaaaaataaaaatttttaaacttcacgtttaatttacttaagagatttttaactatcagctatcctgctctgtcctcctacgtcctctacaatctggtaggcagaaaatttgagagtgcccctatttttcaaattctcccttattttaaaatattgcagtttttgacaatgacctttaattgtttatgaatttttaacttcaacattatatatattcaccttcatcagaacactgagctgttgttatatatgtttccccagaaaatgattatgattacctacaggggcataaatcatgatgaggacaagacatttatggagtagttgggataggaataaggcaggtacgttttagaagtttgtatcaagcagtgaaacaggtattgttgttacttctgggatatttgttgtacaaactgggcattccaagttttgatatgtagaattaggttttcaaaaagtatgcttgcatagattagcaccattatagccaccccaaggggaaagaaaagcatgaaaacaaaatgtgaaattctgacttgccactaagcatccagagtttccagaggcatagcagccagcatgcctcttcatgagtgcaaatacttagttgcttttgactcttattgaaaaaataatatctttcccccatttgtcactagaactgccaccagaagaaaagcccttcatttgctccaaataagcacttctgtttttcacagcttgcagtaatgcttaaagtaaataagttcttgtgcagctagcactattggatt

SEQ ID NO: 26416 - DNA, 1054 bp, Homo sapiens
catcaataaaatagagacatggggggaaatctgtccatggtgtaggtggtacaaacagaatgactattaaccaatccaataaatacttgagattaaatttttaaagtttaagaaagaaacagaaaatttataataaggctgatatttttcttagaatcttgaaccgtaactttgttattccatctagaaacatctaaaaccagttaataaagttatcactagaaaaagcgtttacagaaattaactgtttttcaatgtcatctttcctttcaacaaagatgcaactttctacaaaacattatgctatcaacttactatatttcaagcgttctattggcaaatgagtggattctatagattagatactggttaaaaattatttctatttacgctgtatttttactattaaaccgctagacttttaaaatcttttaatggaagaaatttaactttcatgtgcttattctgaccctctgaacaatatgaatttaaaatattttaataatgaattgagaatatggggtttgagtatctggcttgataccactggagttaagagactttgtggggctttttaagcatcctcttctgtgtttggcattctgcaaaatgatctctccatataaagctcatcctaagaatatgcttatttaattgtggcagatcaatctgatgatcaaattctctcatgtaaaatattctacgtgttttttgctgtttcaggcagaaatcaataatttcacttcactctgaagttatgttttgtggtaatacggacattttcgggagaaaggtgaaaaataagaaatactgtatctctgggagtgtcatctttattcattcattcattcatttttagagacagggtctcactctgtggttcagactagagtgcagtggcaccatcctagctcacagcagctgagattcctgggctcaagggatctctgggagtatctttctatcctctgatttcaggcctagtttcgggccttccctcatgacccttcctgatcatttttaggacacaaatgaaaagtgcaatttagaggtg

SEQ ID NO: 26417 - DNA, 1085 bp, Homo sapiens
agaaaccaacccccgaaaacaaacaagcgaacgagcgccagcccagactcggaaaggaaacttctcgctcccctcgctctcagcccgatcacccggcgcggggccgcgtagacgctcccgaggcaggcgctgggacgcagcgcccacccggcctcccggcctccgcagccccagcccgcgcctcgcggggaccgcccgggcccacttggagcaactttcctctagagaagacaattgtgcgcgcccccggcctgccccagagctgcgcggcgcggggagggggcggctgggggcgcagtgtgaggtgctggaaggagcaaaacacaaagacgagagaattttgattagagacaaatgatgcttttctctctctctctctctctctctaggttttgtgtgtgtgtacgcgtgtgtgtgcgtgtgtgtgtcttttgcttgttgtggtggaggtgtcgagccatatgggggagtgatagaggaattttagtcagaaactgttcgttacgttatcctgcctttcccctttgtgctgtctttgatctatttgcttggcttagtattacagaaaaacaagtacaataatatattccgagctgcttccccaagattcagttcaggctgcttctttttaagtctctccctctctctttctccctctctctctctcttaatttaatttttttttcactctggtgtctggcattatttaaggtggtccttacacaggagacctccccttccccatctctgagtaatttagtagacactaaaattacacctaatgtccccctctcctctcttgtgtttcctctgttccttttattaaatgttggttattgattttctaaaatcaatgtctgttgtggggcttttttccccctcttacaagtatctaaagcacgttgctgatcaactggataacaaaagctttgtgtcaaggaggcttttttccctcttctgttaaacagtcattttttttttttgagagaaaaagagaatgagatttaaaacaaggctcccagaagtgttcttttgcagggaagactatttaaagtgtgcatttcttcttgccttcctccttccac

SEQ ID NO: 26418 - DNA, 1014 bp, Homo sapiens
tattggcctgtgagggcatacagagaaagtgttatttgggggctgagtcatgagttttacaacttcaggacttcatgtagattaccattgtccactacaaagataatgtgagccatgtaatgtagttttaaattttctagtacctgtaagaaaaataaaaaggtttaattttaattatatatttaatgcaacatatcaaaaatgtgtcattctataatcattatagaagaacagtaaggtattttacattcttttgaattaagtctttaacatttggtgtacattatatttaagcacatctcaatggcctaaatgtttactggaaattcttgctgtttagattccataaaatgtatagctgagaaagtaaatttacattttgaaattgttctaaacatgctcagaattttctaatagaactaaatatccatttttaagtttaaaaaaaaattgagtcacacattgaagtgctcagtagcctagcgtggacagtgcagctcttgaagattttaaggaaagaaacttttaaaacagtggattccccaagtccattggcatcccttataggccctagtaaccagaatttcatttcttgtagcaacaaaaatgagtacagagcattgccatttcttcaaagaaacaggaaaagtattttacaatactggagggtttttttcccctaatagtcttattttgtgagagctgtgaaaatggaaaggttacccaagtatttaaattttttttttttttttttttttgagatggagtctcctgtcgcctacgctggagtacagtggcgggcgcaatcttggctcactgcaacctctgcctcccaagttaagcgattctcctgcctcagcctcctgaatagctgggattacaggcgtgcaccactatgcccatctaatttttgtattcttagtagagacagtgtttcaccatgttggtcaggctggtctcaaactcctgacctcatgatccgcccacctcggcctcccaaagtgctgggattac

SEQ ID NO: 26419 - DNA, 1056 bp, Homo sapiens
aatcgccctaaaggaaatcacaaggcagttaaatctggaaaatgtagttggagataaagtttttgtaagtatcatttcagttattttattaaatagacttttaaggtaatgtctttataccatgtatatttttatatttctggaagggtagggagaggttcagaaattcttaattgaaatatatgagattctttcataaaaatgtgtaatgtataggatacatttagtcattaagtctacaatacttggatttttccatagtaggttatagtagctgtaaaatagctaagaaacccaagtttatgtagatattctgagtttatttcattttctgtaaggtgaatactttgattctgtatctctggagatagattaacacatttttaaaaataccatgctccagcagcctatttctacttttttgagacttgagtagcctgtgtatagtagaaaatgtgctaaatttgaggctgcaataggtgggtttcagtcatgccttacaaccctttgactgcctgataatcctgagctaacaagtatctctgaattcagattctttacatgttaattgggcgttattttattatccatacttcacaggattattttgaagaagaaagaaaacattacacatcatttaacttaaaaaataatttgctggatggtaatgtgctgtacaaatgtcagttattctgttttcagaaatttattcatacttcattatcatatcatcttatagtctcagggcagtgaacaacatcagtaaaagaaactgacttgaaatgttttgaaacttgtattaaacttttacctttcacctaatatatagggcctaaggaaaacatgataatttaattttgcacctacctgaattttcatgatgaaattacctagcctcatactgcttatgcagttggagtggattatacacattccaacttcattttctggttactggtgaccatgcggtggcatcgctctaatttctgaactgtgtgctttgtgctgcaatgacaccgccatagttgtgtaagactcctagcatttatgagtttc

SEQ ID NO: 26420 - DNA, 1024 bp, Homo sapiens
ctttaaataggtttttggcttttcttaattacattcattttcaaattctttaaaaaaaagaatgcattggtaatatgaagagatatgtatgatatcacagtacaagagcaatacaatgttatttaaaaaagtatgcttcatagaaacctttaattcaatgggcttttaactgattacaatgatatttagtagagtaattgtcagagagatgtgtaatgtactaactgagacatgaagtttataagggccatgtcacatgtttaatgtgacatgtagagaaatatttattttaaaacttggttgtttctaaatttgtattaaaagttcgggtaggtgattgagagaatattgtatcagtcctggctcttgtttcttaaaaagagtcagatatgagatgttctagttaaaccttttatctgtaaagaatttgaaaacttacttgttaaagaggtcaatttatttatattctgttcttactgcttgtagtttaaaaacgaatatggacttatttttatcttttacctattattatttcataaacttttcatatttagttaataaatcatgctttgaaagaactcatggaaatagaagaagtgagtgaaaatgtattacaagttcacttaaatggtaagtatgccattattttgccattggagattatgtaaactttgtggggtttttatatgacttgtatatttcaaatccattttaatagttagattttgaaaactagatccatgttttacttagcacaccatatgcagtatttttagaaattaaaataataataatgaaggagtcgcagaaggactctggtttttgtgggttttttggtttttttttttttaatcattctaatcccaaggaggattgttttttgattctaccgaatgtctttattgctaagttttaagaagaaagtgatatgaactcacaggctttgactgggaagatttacttaactggaaaacaacctgctgtatcaaatacatgtttaattttaattaaatacttttaaatg

SEQ ID NO: 26421 - DNA, 1039 bp, Homo sapiens
tcttcattctattttttttcttgtctgcctgtgttatttcaaacaatttgtcttcaatttaagaaatgcttatgcttgatgtagtctgttattgaaggtctcagttgtattttctatttcattcattaacttcttcagctgtaggatttctgtttgtttttttatggtatctctgttaatttcttattcgaatcacaagttgtttttctgattttgttcaattttctatctgtattcttttgaatttcactgagtgttgtcaagattattattttaaattcttctggcattttctgtatttctttatgattcttgtctgttactagaggaattattgttttcctttggaagtgtcatgttttcttgcttttttatgtttaatgtgtccctatgttgattgatacgcctcaggtagaaaagtaaaattgtcttttccaatcttacagaattgatctcgtaaggaagtactgatttgtgtcaatgtgtctcgaggtgtcagtttgatgtggttcattggccttggttctagttggatacagtagtgtggtctttgtgtagttttttcagctgtaatccacactagtgtcatttacaagtgtctcagtggcctaggctgagagttgtttgtggtggcagttgtacagctttgcaaggggtgggtttgctgggctggttctcagtttgggggcatatgcatgcatatggtgggtcaatcaccttgggatctgacacactggcagatggggctattaatgtggccaggagcatagtcatgtggttgcttagccagtcttggtgaatgtttgccaggaacaactcactggtttgtttctcaggcccaggagatgcctgggatccaggtgcaaggctgcttgatcccaacagaggtgtagggatacagttcctcgactggcttagggccgtatctgctgaggggttccacaggattgtttctcaggtttaggatgcaggcacaaggctattcagctggcttatgggcatgcccactagaggcgtcctgtgaggctgtttctcaggc

SEQ ID NO: 26422 - DNA, 1362 bp, Homo sapiens
atttgcatttccctgatgattgatgatgttaagcatttcttcatgtattcgttggctatatgtatgtcctttcagaaatgtctgttcagataatttgcctgttttttaagcaaattggttttttgcttttgagatactggagttccttgtgtaatctggatatgaatccctatgagatgaatactttgcagatattttcatttattctgtagattgtcttttcatgctgttgattgtttcccttgctatgcagaagcttttgagtttgatgttagcagatttgtctatttttttatgttgtctgtgatttgcagtttttattcataagatattttcctagactagtgtcctgaagtattacccctatgttttcttctagtagttttatagtttcaggtcttaacattgaggtctttgatctattatgaaatgatttttgtacaggatgagagatgggaatctagtttaattcttctgcatatccagttttctcagcaccatttattgaagaaattgccctttccctgatgagtgagtgttcttggcctttgtaaaaatcagttggctgttgataagcagattaatttctgggttctctattctgttctattggtctacatgtctgtttttatgccagtaccatgctgttttggttactacagctttgtagtatatttgaagtaaggcagtatgttgactccagccttattccttgtgctcaagattgctttagcgatttggcatcttttgttgtttcatatgaattttaggattttttttctatctctgtgaagaatatcattagtgttatgataggaatatcattgaaactgtagattgcttctggtaatatagtaattttaacaatattcattctttctatcatgtgagtatgggtgtcttttcatttgtgtgtatcctcctcaatttctttcttcagtgctttgtagttttccttgtacaaaactgtacctttcacctccttaattgaatttattcctcagtaattacgtttttttggtagctcttataaatgggattgccttcttgatttttttttttcgggtagtttgttgttagtatatacaaacagtactggttattgtatattgattttgtagccttcaactttactgaaattctaagagttttttggtagagtctctaggtttttctatatataagattatgtcatctgcaaaaaggaatgaattgacttcttcctttcccattgctttggcttgaacatctagtactatattgaataagaatggggagagtgaacatccttgtattgttccagttcttacaggagaaacttttagtttttccccatttggtgtgatgttggttttgggtttg

SEQ ID NO: 26423 - DNA, 1038 bp, Homo sapiens
aagacatgtaaaactttataaacttagggtggtatatttgagtgtagcagacctttttcccccttatttgtcctcctagtgaaaaattgtcaattgatgtttgttccaacatggtcttttgtccttaaagaagtagagatttccagtggaaaaagaaaatagcatgtattgagcatgtactatgtgtctttttattgtgttctctcatttattctttacatcaacactgcacggtagggtttttccctttgttataggttagggaactatcatatcatgcattctttttatttttcctacatcattactatttgtttaaccctaacttacacagtttttcagtgcatgctcacatcttatatcattcttgtctccttttgctctttatcatatttgcttagttacctcaaaaagatattcttacttatttccctttactcttttctttgatatcctttatgcaatataggagacaaattatgggtgttaacttttgaaagcaattaatttcaatgctaagtagtctgtgtaaaatctgttctcatgtattatatacaataaatttcaatttttgaccaatgtactttaaaaaaatggatgagaagcaaaattttttttaacatttaagcaatgtatattgaaattacattattaagatgagtacgttaggattttactgttatcacatctgaagtattgtttaatataaattgagaatttagatctaggtaatttctttcaatatttcacaaattgtcacatttatatataatcatatttgcagtaattttttagtttcaaatctatgtttaatttgttttagtcctcatactcagcttctataatcactatttcttcattcttgagttttttattatggtttttctttgcatttgaattcactgttattttgggtagttttcacaagagggctatgtgaaatgtttttaaatttcaaatttttaaatttttaaatttaagaaactttttattttaaccattctaataggtatatattggtgtctcattgtttgtact

SEQ ID NO: 26424 - DNA, 1032 bp, Homo sapiens
acatgcaggtttgtgacaccttaggcctgaagacctaagtcttgactgtaggccctgaagcaaccctgtagcttagttccagccccactcagctgtggactagggcagtactgcctgttaaggaatctactcagtgatccagtaggagccctcccaggttcccagagaaagccaaaccatccacacacctggtaacaggtcttttctctgcatatcttcatccactgtacagaccgaggtcctagaaaaagtccagtccgccaagggaccagatagggttcatatcctgctacagcccctggtaacaaggtcctatcgggaggacagggccctttccaagtctgaagcctggaccacagttggggaatctgtcacgtgaatgaagatctgccctccaattgacttttccaggtcttgggccccactggggtttcacagacgcctgcctgaatctcaacgctaacacaaagaccattttgtccgtgggtggctgtgaaattattgttgctatttggggacacaagctgaagggcctcctatttcatcttgctgctgtcattctcgcattattataatgttaatcattggtgatttgatgataagtcagctttttttgagttttatgagttctggcagtaaaaaagttccaaaatgtctttcactgagctaaattcagggtgttagcaaagctgtgttccttctggagattagatgagaccagaatacacttttttaaaaaagtggttaacttggttggatccaaatcctggctcttccatttatatactgtttgattttggtcaacatacctagcctatctgtgtcttctaaccttaaaagaggattataatagtagttattccacatgatagttttgaggattaaatgagttgataaatgcaaagcatttgtaacaattcctgatacctaaacactgcttaagctgttactgtctatctgttaaaatttattcctataggaaatcagtgctaagaaaattaggtcttttagtcaaaggtcttttagtcattt

SEQ ID NO: 26425 - DNA, 1053 bp, Homo sapiens
cttgtaatcccagctatttaggaggctgagtcaggaggattgcttgaggccaggagttcatgacttcagtgagctattatcgtgccactgccctagttgacagagggaagccccatctcttaaaccaaaaacaaaaaaaagttttcgttgattcaagtgtctgtcgcccttatactatttatccatccaattaaacacattagcttggattcacaagcttaaatcctgaaggtagcctacttccatgtgctcagagaacatagactactgttgatcactataatatttaagatgtagttatgtcagtgccagtaagatcatataatgcatttccaaagcttctaaaggatttctaaatacgttgcaaatttgtgttagttcttttgttagcctatataattcagaagtaaatgcattttaagacgtatactttaaagaagtcctccaactagtatttcttttttattcattcatcaacactactgcagaattgatactttgtatcatttacaaggtgtattccatggttaataatcaaaacaactgtagtaatgtctttttttcattttgtgagacggagtcttgctctgtcttgccctggttggagtgcagtggtgcaatctccgcttactgcagcctccgcctccccggttcaagcgattctcctgtctcagcttcccgagtatctgggattacaggtacgcaccacgacacctggctaattttgtatttttagtagagacggggtttcaccatgttgtctagtctggtctcaaactcctgaactcaggtgatccacccgcctcagcctcccaaagtgctgggattacaggtgtgagccaccatgcccggccaactgtagtaatttctaaatgtctttctttactgaacatatcatagtattaactctctgattatccttctgggggttgtttatttcataactatttacctcccatgttcttgaaaacaactttattggcttattcatgaatatcaaggctctaataggtactttataaagtaagtacacttattaaaagatatatatgt

SEQ ID NO: 26426 - DNA, 1047 bp, Homo sapiens
acattggcaagtgatttgggattttaaaattgcaaatgttcatttattcatatcattgaatacacgttgaacacatccacattgtataggatgtggtaattagcttgtaaccagggtatgatctgctattgttatttctcctctttattggaaaaaggcctcagttttaattattttcttcccaaaataaatcacacatttggttacaataatgtgtgttttcattacagtattttttaaataccattattgattcttaagtttctatattaatctttttaaaattctttttaatgcaattgagaattttggattcattgtagactttttcaaattttcttttatctttattgtctattaagtgttggggtaccagtctgagtattactttgaaataatttatgttcaggaaaagaagaagaaggataatacatctttaaacgcatatgagtcttgtccttatccctactaaaaaggtaattctctcttaactcctgagttgagacagacaaatagaactatgccttaactgacaaatttatttttcaattttagcaataggtggaaactgcagtactttacagaggtgcctcatttgagacagagcttgtttttacagcatcataaacttcatctttcatttttgaagcttttgcaaataggaataggcagatctaaggagtaaatgtaacttccacaaaatgaattgaaatagatttttttctgttttttcttctttgcatgaaatgcctgttttgaaaaggactacatggagataactttttaatcacaccttgttttaaaacccctagcttagttaacatgtcatttgataagaggtgttgcttacgatctagaactagaaagttttcatttattttgaaatgatgaagtgtagtgattgccacagcatttagaagaacatttattgaagtgtatatatatatatatatatgcacatcatatgtgctcaataaatttttatgtgtgtaaccagcacccagatcaaaacacagaatactcaaacacactcatcctgctcccttc

SEQ ID NO: 26427 - DNA, 1086 bp, Homo sapiens
tccctatagtaatatacttttaaaatatatcacagggagagggagatgagaaatatctgtaagttatcactgacagccaaacacaaactccctgcttacaagtttgtcttctttcttaaaacttcaaagtgaatacctctgggatatggggacaaaagttgtcctcaggaaccatgagtcatagtgactttaggaaatgatgatttgacaccagacagcagtaagtgaactatttcaagatgtctcagagtcttagtgttggaaggatcctggaggctgaagtcccctcagcgtttctactcaggggctgtgcattcatgttccataccctttgagccacagcagccactgccgtgccagacaggctgctgctttttcaggcagctctagttgttaggaagtctttctctgtattaacttccctggaactctcttaagcctcattctgccctgtggaggccctcagattctgtctcatctgtcctctgtatgacactaacatatgcctgtttccaagttccaactctaaggttgcctacttctgacctaaaataaaactgtgaggggtgttcgtgtgtgtcctctggtgcttgaacattgaacatgcatgtttatgcccacacttgctaagtgctagctgggctcattgatttttcttttcttttttgttttttagagatgggggtctcacctgccatgttgcccatgctggactccaactcctgggttcaagtgatcctcctgcgtcagcctcctgagtagctgggggaactatatgtgcaagtttgttcattttaaaggtggctttgcccagtaatctctagctgggagcatccactgaccctaggagctaatgcacaggggaggatgagaggtactcctgggagggtgagtgcctttgggttatctcagtccctggcaccttcacgggggggtgggcaggcagatgagctgtcattctagaaagtgccagctatgcctgcacactcctctcagcctcgaaggcacacaccctaagctctgaatcaaaggtagggctgctgccccaaagccgatgtggcttgttaagaacttgagagactgtag

SEQ ID NO: 26428 - DNA, 1032 bp, Homo sapiens
aacagaaaaccaaataccacatgttctgacttataagtgggagctaaacattgggtactcatgaacataaagatggcagcaatattggggactattagaggggtaagggaaagggggccaaaggttgaaaagctttattgtactatgctcagtgcctcggtgatgggatcatttatgccccatacctcagcttcatgcaatacactcaggtaacaacctgcacataaatcccctgaaattaaaataaaagttgaaattaaaaaacaacaacaacaacaacaacaaaaggtgattggtaaaaattcactgatgcaatgccatttgcaaccttcagtgcaagtctgattttgacagagttcttaccaattattgcagatgtaaagagattacctttttagcttatgccttgatattatgtgttttgctttagatggtttggtggttggttggtttgtgggataggttctttttggctgtgtagtaatgacatcaaatgcccgcagagaattagttgtaaatggtaatggtctttttaaatggtttaactgctgtactcaaaatactcttcaacctgatctggtgtcctaaaagtttagtacttctaataagatctaacatgtggttgcatttgttataaatgccaaagttatatttaaaaacacccaaaggggctgggtgtggtggctcacacctgtaatgtcagcactttgggaggcccaggcaggaggagaacctgagcccaagagtttgagaccagcctgggcaacatagtgagacccgcatctctacaaaaaacaaacaaaaaaaataggcatggtggcatgtgcctgttgtctcagctacttgggaggctgaggtgggaagatcacttgatcttgggaggttgaggctacagtgagccatgattgcaacatgcaacactgcattccagcccaggggaccatgagactatctcaaacaaacaaacaaacagacaaacaaaaacccactccaaatgtaaagtgaatagttcacatcaggtgtactggaggc

SEQ ID NO: 26429 - DNA, 1050 bp, Homo sapiens
tatatgtattttctatggtatcgtatggcttgtcttaactgatgacacagcctagaggatttctgtcacaatttgtgctttatttgaatacaaagtcttttttttttttttttttttttttttagacagagtctcactttgtcgtccaggctggagtgcagtggcgcgatctcggctcactgcaacctctgcctcctgggttcacgccggttgtcctgcctcagcctcacaagtagctgggactgcaggcgcctgccactacgcccggctaatgttttgtatttttagtagagatggggtttcaccgtgttagccaggatggtctcaatctcctgacctcgtaatctgcccgcctcaacctcctaaagtggtgggattacaggtgtgagccaccgcgcctggcctaaataaaaagtcttgaaatggaagatattcacctaaccctcaacaaaccatgatgtaatgaagcacgaatcacaccattttgtctctttcctaattcaaataggtccctggcattagttcatgccgagactagaaaactgaaccctagtactgttttttaaaacagttttaacagaaaattaaactgtatgtttgaaatcataagtaaaagtttgttgcttgcataagagtagcctcttgattctcatagtggtaattttgtgtcatatcatttagatgttgaaccatttcatttgtgcatgtgtatatgtgcccaaattcatcctctttgtttagaatctgcttacaaataaaactaatagaatctgaatacatttatcatatattcttccagggtttttcttaactgactatagagagtggctgtaagttctggggcaaagcttgattgtattttcagtgatgtatagttacattgtttcatgttaaaatcatcgtgcatggaaagtgaaatgtgcgtatgattttaaattattgtaatatgtactatacccttcccctaaacttctttcattgatgatacacagaattcctctatttttgcttgaaaatagtcctttagattggagtagccttttcttagat

SEQ ID NO: 26430 - DNA, 1024 bp, Homo sapiens
tactataactgttagtaagttacttactcaagctgtgtctatggggcagagaacagtcctcttctttaaaataatcatgatcaaaccagtcaagtcaatccaattagctgttagacagacaataaggataaccttctttttgacttaagcagtcaagttagtcaaaatagaaaaattggcttatatgggcacccagaactacagcattcaaaaattacttttaaaagtttcttcttttattaaaatggactttcttaaataaaatacatcctctgatagcagctatctctttttacttgtaatgattaattctaaatgcttcatgtaattgagggacattatgagaagactagaaagtatctcatcagataatcctaagggctgtaacttctacttgccataaacaaagtataattaagagtgagtagcaattggtttggggagtcgtagttatatatgaaactttcttttgtttctcatgatgtatgtaaaatgtttgcagaaggatggtagaaaatgttactaatgaatttagagtggtttgggagaatacactgatacttcctcatttgaaaattataaggagttacaaggggaactaagaaccagaagtggctggcctctagcttttcaatacctgataagtgttcttggttatgttttgaacacttaaatttctcaacaaatggctatgtctatatttatgtaggggccacccttgccctacttgcatgccactttgacttttaactgaaatcagtgtgaattctgtatgcataagggatgtaataaagaggcgggatcattaacgctatatcgttgcatactatttttcatatgccttacaatattttctgggatgttattaaaatgaaagcattttattgccaaaataaatctatgttgttacttataatctgcattagcagtagaaaaataatgtagcaaaaacatattgtacagtacaaaattataaaatatatattttgccaataatataaaaatagattgaggagaaagaagc

SEQ ID NO: 26431 - DNA, 1022 bp, Homo sapiens
cactgtggaattaaactcataaactatcaacactctggcatcttttcatgttgtgtcccaaataaataagaccagatattctaagcagatcattggtgcatcaggatgccttattaagtcagatatttagcatcttattgtacagatcctatgattttacatacatttacatgtttagatgaatgaagctgacattatttaatcaatgaactatctgatatttttagagtcagcgaatgaggcacagcaaccactccacagagaactctccaattgaaagacgaagtctaatgacctctgatgaaaattatcacaatgaaagggctcggaagagtaggaaccgcttgtcttccagttctcagcatagccgagatcattaccctcttgtggaagaagattaccctgactcataccaggacacttacaaaccccataggaaccgaggatcacctgggggatatagccatgactcccgacataggctttgagtctaatgaaacaaaaaatattcatctgttgacaatttgccatagcagtgctaggataaaccaatcatcttaacttggctaacatagcacagtatttactgtgctaatgggctgctgtcattttatgctaagtaaggggcaaaaaaaaaaattacattatgcccttgagtctagatggatattagatgcccgatcatatagatatttttaagtgcaacatttacatgataacagtacattttgttttcttcatagatttagacacatcaatttgtaatttagggtacttacaaggcacatataaaataatttcccatgctggaaattccaaatgaccagttccagttggaaccaatttataaaccaattcctgttggaatttgggtgaattgactagaaagtctacttgagcatgttgtaatcaactgaaaaatctggggggaaaaaaaaaaaactaataagaaaatcgaaataccaatagaagccaaatccagctttggtatttatttgctggaagctaaatttacacttaaa

SEQ ID NO: 26432 - DNA, 1044 bp, Homo sapiens
acccaggtcagagatttcaaacagctccatgactggaaagacagccttgccttaccattatctcagtaggataaacactttatctttttatataattggtaagataacctggaattttaaacaggcagtctggatggataaggttaccttgtacttagcattttctaaacactgtttactttattaaacatgttcaattgatactgcacagatgtagtaatgctgaggaggaatagtatcctctattttggcatgtgtgaagaaatctttggattataaaaaccagtagtaaccttaaaatgtgtctgcatttgcccctgctttacttcaagaccataattataattgtcatccaaagattggtgatcactgtgtcattttaattcctttaggagaatttgcgacttacttaattggccaccatatctccagtatgaaaagtcagcaaattacattggcagagtatcacattgctaagaaatgaaaggcaacagtttttggaaagggaagcctataggagctctgaaaaaagttaacgctgtagccagaattaatcctagatccagggactgttgaagcaaaaggggaccttaaagagcacccaatatagtatttcctagactatattatttataatatgggtcctatgtgatatcagtaagtgttatgggaaaataatcctgataccaaaaatgtttgagaaaacacttaggtgaacaaaggtagtctggtttctttactacagaaccctgaatatgccaatgtgtattttatatctccaataggacaaatagtgtgcacagcttcccctaaaattgtgactgcagatctgcttttccattgagcatcctatgggtccagtggaacatgtctagggaaagacttagtccaatctcctcattttacaaatgatggaactgagaccaagagaactggcttttcaaaggttgtatgcctgggccaaagtcagcttaagatctctttctcctagtctagcaagactagatgatgaatggcaacaggtcagttatatattctcctgga

SEQ ID NO: 26433 - DNA, 1556 bp, Homo sapiens
aattgcatttgtctaccttgttcccagcaacactgtgctgtgtccagcacgggaacaacccatggtgattggctggcccggaacttccagtgttgctctcaactcctgtacccaattcccacccagtgagaaatcaggatataaggtcatttgtaccagggaggaagctgtctgtttttcatacatcttcaaaattgacgtgtccagaatgaaatcataaggcaggttctccaaagtgggcgataggaaggtggtgaagataattacagggacaaatgggtacattcttccatcttttaaactcatgtactgtcatttgcagagtttacatattttgatatggctctcgttattgtcttttagcaaaacagaagcaaaaagtggtaagttgtgtttcctttttaaatctactgttaaggttcctatatatacatgcctgcaatgctccatttcagtgacccaagtggctataaaataagggaagagcctcctcggtggggactttgataatcatttgtcgttcaacctgagaattatgaaattatgaatgttgtggctgtggagaggcatgctcaacctcaccttgtcacgcgtgtcgaatcatctttttcagacggagcacattcctccttacgatgttgtaccgtcaatgcgtccggtggtgttagtggggccgtcactgaaaggttacgaggtacaaatatcatctgttactcttcagttcttgatcgagcacccaggagacagtcatgttgacgcttgctcctcaagggtctgtttccacgtgggtcctgatggaagccagtgctcagcatgggaaggcagggggtaccgtgtggggctcatgaggccctctgccctttctttcctctcttgcacacttctcatcttttatgtattacattgtttagaaatacctccctcaaaatattcacaatgggaagatctggtcaaagatttgctgtacattaaatgcaaagaaaaggactttatctgtcttgaccattctcattattattagaagtaatagagaatgaacagcacaagaggacaaacaatcaatcttccagcaaacccaaacctttaaagcccaaacagagttcaccctgctgggtttttaagatgatggcatatgccaccaaatccttctctgcttatttattttaaagggcacatgttttaaaagaccactaaaaacattagtgaactttggagattaaacaaaaccatgtgacaaggaaaagagtagagacttcgtttcagatgtttgttttgactttgtgctagcttggattaaaaaataggtagaacgtgacattaaactctgaaggtgagcagcctccagggcaccattcccatcgagctaggacaatgtgtggcacatagtaggcactcagtacacatttgctgaatgaattaatgaatcgctttcaggcagatctaagaatcctggctctatccccctctctttctctcttgtctttctcagagttggaaatgtcagagggatgagcaggagagtggtctacaaaaatccagccatgggcatggagaat

SEQ ID NO: 26434 - DNA, 1028 bp, Homo sapiens
tcagttcttaattctgatgcccacataatcatcttgtaagaagaaatggtttctccaggtctaactgcttgttttgagctgtgtttgacatctgactggcacattggtgcctggtgttaggttaacaagcagttcataagaccattcccgtcagtgatggttttgtctgatttccgcactgagtaactagaagagatgcttttgcagagtattccaggtctcggctagttctccacattctcttagaaatgaggtcaaagaaaacatttggatagattcttgaaattctttatagcagaatttggtgtgttttgaattatttaataggatgagggccaaagaaagctttgtactctcaagttctattttcaaagaatctggggagtgagtctttagttccttttctatatcctaggaaatcaagtggaaattcttcttcaagtcttggagaaatggtatctgggacattccgagcaactcccacatcaacaggtgagggttgtagttaaactctttttcatacactgtattccttttaaaaatatttgaacacacatgcaagtagttttgctaatttggaaacaatttgaaggcttaatttaaagattctctaattaatatttcatttctcatttgttttctatggtaatttgatttcatttaaaatggtattaaaaattcatgtcattagaatataattttgaaaaatcttatttacccctcagtgttaataactgtccattgtgtaaattgatattcaaaaaattcattattttacctaaggaacggacagagtttaagatggtgaaggccaataaaaaaaggaaaaaaatgatgcagactctcaagaaaatgctgttttcagtctccatgtggaatttcaggatgtattagtacagcccgagctggaagggttgaagcagagagtaaggcagggcccaaaggagggagggcctcgtttacatttggacagcagacagccaagccctggaattaatggtaatgaagagatattggtggcctaatag

SEQ ID NO: 26435 - DNA, 1050 bp, Homo sapiens
gcaggtgtcttacatgcctggagcaggaggaagagacggggaggtgccacacacttttaaacaatcagatctcactataactcactcattgtcacaggaacagcacaaggagatggtgccaaaccattcatgagggactgcccccgtggtccagtcacctctcaccagtccccacctccatcactggggattacatctcaacatgagatttgcgggggacacagatccaaaccatattatccctttttttctaaaattttgtcttccatgcccctttttagacacatggggagcatgtgttcctgtcttggggtctttgcatttgctgttttttcttactggaacctttttcttcacacttacacccggccactccatctgctttatatctttgttaggtatcaccctttcagtgacccctttcctgccaattgtatttaaaattgtacccactccccttccctgtacttcccatcccttccctgacttagttttctctgttgcacttattactctcagaaatattatatatttacctatctatcttgtttggtataagctgagcatccataatctgaaaagctgaaatccagaatgttccaaaatttgaaactttttgaggactgacatgatgctcaaaggagatgctcattagagcattttcgatttcagacatttggattagggatgttcaactaagtatatagtgcaaatttccgaaatctgaaaacagtggaaatccaaaacatttctgctcccaggcattttggataagggatattcaacctgtactgatatgtcctactagtatatgactcaataagggaaaggattttgtctccccaatgccgctgtcttatttctactttccaaaacagggatgtacaatccatatttgttgaataaaataactgaattattatcattttcaaagttttattgttattattatttcttaattgttacagtcatgggccatataacttttttgtcaaagacaaaaagtaggaaggtggcagctcccgacggcatttgtgggcttcagggaag

SEQ ID NO: 26436 - DNA, 1029 bp, Homo sapiens
aacatccctgttttcatcctcaaggttgtttttctgctcagtgttcttgttgaccacgtctgggctgctgcaggacaatgattgaagttttagtagtgaaagagttcaatagtgttgacattgaaactggaaaatcattttactaatgtaagatgatgctttactatattgaaatcttagacaaatagatgacccatagcccaaatacaggtaggatttatcttttgtaataagctgagtctctttttcctttagatgtatatgcaaaagagaagatggatgaaaactaacgtttcacaagtgatatgggcttaatatagcacaaaacaagaagaattggtgctgagtatcacataattttcattgcagtttacttcctagcacttaatctagtcaaaatatttttcttcacaacattgctactttccgaataactcagatgcttaactatattctgccatctaaatttatatctgcaataaggcatggagtgtgtgcatcaaattttaggcaaatgaaaaagaactcgccccaggatactgttatggatgtgacaatttaagaagctacacatcatctgaaactattctattttctttgccagggttcagcggattcctacacaagcaggccgtctgactccgatgtctctttggaagaggaccgggaagcaattcgacaggagagagaacagcaagcagctatccagcttgagagagcaaaggtgagtctctttccttctctttggctcaaaagtgggtcgttgctcagtggctaccagctgctcttcccttacctcacatttctggaataatcattttgtgattattctaacaaggctccagattgggaagctctctgatcctttcacctctaagtgaggttagtaacatctccaaagaggcatttcctcagaaccttcacctttttgtatttggtttggtggtgaattattggtcgtcttccaacttagcaatatcaaacctcccatgcccagtgttggcagacagccccccaggcaccagctgg

SEQ ID NO: 26437 - DNA, 1132 bp, Homo sapiens
agttcaagaccagcctgggcaacacagcaagactccatccctacaaaaaattataaaattagccagccaaggcagcacacgcctatagtcccagttacttaggatgcagaggtgagaagatcccttgagcccaggaggatgaggctgcaatgagctatgatcatgtcattgactctaacctaggcaatagagggagacccccatctcaaaaataaaataaataaaaaggtaaatttacttatcagttgaccttgagatggggagattgtacaggattatcccagtgagtcttatgtaatcacttgggttcttgtgagtggaagagggaggcagaagagagagaacaagagagatggcattgtgaggatgactcagtctgacattacttttttgaatattgtattagtccattctcacactgctataaagaactacctgagactgggtagtttatgaagaaaagaggtttgactcacagttctgaaggctgtacaggaagcatggctgggaggcctcaggaaacttagaatcatggcggaaggcgaaggggaaggggaggcaggcacatcttaaccgtggtggagcaggagagagagagaaaagggcgaagtgccacacacttttaaataaccagatctcgtgagaactcactatcacaagaacagcaagggaaaaatcagccccataatccaatcgccctccaccagaaccctcccccaacactgggaataacaattcaacatgaaatttgggtagggaaacagagccaaaccatatcaaatatggaggaaggggcctatgagccaagggaggtggctggctttagaagctggaaaaggccaggaaacagatcctcccttagagcctccagaaggaacacagtcctgctgacaccttgattttaggccagtgagatacattttggacttctgacatccagaactacaaaatattaaacttgtgttggcttaagccattaagtttgtggtcattcttacagcagcaataggtaagtaataaactcttagatgaagaaaggtcagtgaggcatgactagattagtgtggctcatctgctgtcgttcatgttgttttaaaccaagattcaccatttgatattcattatttggcat

SEQ ID NO: 26438 - DNA, 1032 bp, Homo sapiens
tgtggcatattcatagtggatgtgtgtgtttagtcataacatgaattaatcaacagttaatcaatgcatattattgaatttctgtatggaatgtggatcatagaaatggtaaataaggattttttcttttttttgagatggagtctcactctgttgccaggctggagtgcagtggtgcgatctcggcttactgcaacctccgcctcccgggttcaagcagttctcttgcctcagcctcccaagtagctgggactacaggtgtgcaccaccatgcccagctaatttgtgtatttttagtagagacggggtttcaccatgttggcaaggatggtctccatctcttgatctcgtgatccgcccacctcggcctcccaaagtgccgggattacaggcatgagccaccgtgcccagccgtaaataagaatttttaactgagtctcacgtctgtcattcttcagttctggactttagctgagttacttatgtctttgaacctttgtaaagtggaatgagatgaacgagacaatgctgttaagcacctagaacagtatctggtaggtgattggctgaaaaataaagcactctgccatactttgcccacttcacctgtgtatccaattggatgtgtatctgtcggtaggcatagcctcccctgaactctcactggcctctaaatctgaccaagcggcgacattcacttccttggacatttttacatttcccaagtttacaaagtttacatgacatagaaagagagcagaatagtcttggtttcacataggtaacactccctttcccttttgtcccctgtgatcacactggtggagacagtgacctcaagttcttattattcaacctagaaagcagctagctggtctttccctcagggccggaaaacttttctgtctgcattttgcaaactttatatagttcagctattccttccttctcaggcaccttataactctcttcagagtaggacaggagtgtcgtcagggtgttgtcctcctcaggcttctgattctatagcca

SEQ ID NO: 26439 - DNA, 1058 bp, Homo sapiens
gctgtttgaacttctgctccttgggaaattaaggtgggctttctggcactctgcgttatgcaaaagctgtttacatttctgtttcaaacagcacagaaaaatccatgaattgcactttacaactgaaatttgttatagactgagttgcttagttgaccaaatcttgggaatcttaaagttgatatagttttgtttgttagttttgtttttgacggctggtttaagacttccttcattcaccagcacctgaaaactaaatctatactagtttgggaatttgaaaactgggtagattcagttataaggaaaattataacaaaaggatttagtcttttggaaagcaatccagatctcctttgtctaggcattttatattccttgaagggaaagctttttgaaaagttgatacttcagttgaataaaagaacacatccgatcttgaagaatatctaatagccttatcaatgctatttcttcaaatgttatcagaagtctcatgtttatattgacattgcatgttttgataatttgtagtagaatgtaaacacagaataacttgaattttcttgagtgagttcagcatctgcattcaagtaaagtggatttctatccgcatatggatttgtctgtaactactgtaatgattgtttctaaaaatttagttatagtaacacagtgtgcttcgctaggttcagataaccaggttgtatttaggctgtttttgtgttaaaaataggaaagactacacaggctaaaaatcaaagcctaaatttcacatattcagagacaacatgataatttccatgaattcggcctcatgctaagggctttgatgcattgtctcacttttactcaagaaatcctttgtggtatataagtgtaataggagttgccttattacgaatgaagaaactgaggcttagaaaattagtcagatatccaaaggcaaagttaataagtagcagtcaaggatttaaatcaaggtctctgattccaaaacctgtcactcttcagtttaagaagcttccttccatctgcacaagaaagccttgtttgaa

SEQ ID NO: 26440 - DNA, 1035 bp, Homo sapiens
agcaattcgtaggtttaaatggctggttaggggagcccagtaaattcagggggcattatgattcgatagagctctggaccgactggttattactttcctatcttgtggtattgcacatttatttaaagctaatttgatattaaaagagtaacaagctattagaaataatttttttaaaactaatgtttttgaaaattatgatactattgcctttcttagtttaaaagagaatggatttctgaagtacacaagaccagagggtcaggtagtatttatagcttgctctcccacgcaaagttcagaaatccagtgactataggggtgccgtgagatacatggctgcgaaagatttatttggatcttgctattttaaatttttcaatctatcttaaaaatttgagagttcattttctgttatgaagaaaaatgcattactaaataacttgcaaagccctgtgtgtgtgtgtgtgtgtgtgtgtgtgtgtgtgtgtgaccaaagtttatggcttttttatacttttggacttacgagacatacctacaaatataagaggtccttgattttttttacattctcctctactttctatcagtaccaatgtacattatttttattatttggctccaaatttatactgttttctatgtagatgaatgttattttccttaaatatttgatgcaagaatcacttctgagaattggcatttagatcaagtaattcagtttgtttccatttgcgcctcttggggaaaggctttggacttagtgctccaactaattttccatccaatactgcaaaggaaatgaccaatcagactgagaactaagagaaattatatcaaaaatccaaatcttcatgaggaattacttatggacttggctaaaaggtggcggatatttttctctttgtaatgatctacttaagctcaaaaactcaatagagttgaagatttttctttgaattcatttgggctttgaaaaagctgtgtaaaattggcaatttatctgtgtatgtgtttttagctcacaaacat

SEQ ID NO: 26441 - DNA, 1042 bp, Homo sapiens
cgtctcaaaaaaaaaaaaaaattacgtagaattaccatatgatccagcaattccacttctgaatatatgcccataaggactgaaagcaggaatttgaacaggtatctgtacaactgtgttcacagcagcattcttcacaatagccaaaatgtggaagtaacccaagtgtccatccacagacggatggctaaagaaaatgtaggatacacatacaacagaatactatccagccttgaaaatgagggaaaagtttgactcgtgctgcaacataggtgaaccttgaagacattacgctaagtgaaataagccaggccccaaaggaagaatgttttatggttccacttatatgaaatatctagagtagtcaacttcagagacacaaattctaatagtggttgccagggtttgggggaggacagaatggagagttagtgttaaatgggtacagagtttctttttgaaaagttgaaatggaagatggaaaagttctagagatggatagtgatgatggttgcacatcaatttgaatgtagttaatatcactgaactgcacacttacggatggttaaaatgctacattttgttatgcatattttcccatgatttgaaaaatggttaaaaaaaaggcacatacacaaaaatacaataggtggtagagttgtcagcggagagggataaaatggtaacagtaaggccttattgacagaccaggtgtgacttgccggcacaaagtacttattaactcatctaacttattgctcatctccagcaaccctctgaaacaggtacttattagccctgctttatagatgacacaactgagaaagggaagattacttaaggctctactagtcaatgggaagtttctaaggtagccgtgtaattgaaggtggaccttggaggagaggcaggattggggtggaaagaggataggaggtattctagatagataggagctggctaaggaaagatccagaaactggtgggaacttaaatattcagctgccatgacgatggttggtatgtagggttcgtatgaatg

SEQ ID NO: 26442 - DNA, 1051 bp, Homo sapiens
tcccagcactttgggaagctgaggtgggtggatcatgaggtcaggagttcgagaccagcctggccaacatagtgaaaccccgtctctactaaaaatccaaaaattagctgggcatggtggcgggtgcctgtaatcccagctactcaggaggctgaggcaggagaatcacttgaaccctggaggcggaggttgcggtgagccgagatcgtgccactgcactccagcctgggcaacagagcgagactccatctcaaaaaaaaaaaattgttttagaggtgctggttgaggggagtaatggtggaatcacagaattttagagctggaggaaatggttcatgaaggttttggggcttacattcttttctttctagaattaggaagcttggtttcatggttttgacaaacgagcactttgtacaagagagcacattcagccttggtttacagcgccttgccttccatttgtttttgtccttttgattaacattcctttggataattaaattaagttaaacatttaaatttctaatagtggaacacagtgactgcataaatgttttcataattggttctctgaggcacaaaacttacaagaaatgaaaatggccaacaagacttttttttaagacagtttttccatattaatttaaaattatgattttttttttttttgagacagagttgcgctctgtcacccaggctggagtgcagtggtgcaatctcagctcactgcaacctccacttcctgggttcaagcgattctcctgcctcaccctcctgagtacctgggattataggtgcctgccaccacacccagctaatttttgtatttttagtagagatggggtttcaccatgttggccaggctggtctcgaactcctggcctcaagtgatgtgcccacctcagcctcccaaagtgctaggattacaggtgagagccaccatgtccagccaaaaattatgattctttagattctacgcaaattatctgtaagaagaaagctttagaaagaggcctgtactggaccaagaatgactcttttgtttttg

SEQ ID NO: 26443 - DNA, 1071 bp, Homo sapiens
taaaaggcaaaatagattctcctgtttgcagcagtcaagttgaaaccagccatagctgtaggcaagaaattatagagagattatcatcttagtgattgttctgtaaaattgctctaggccaaaggtgctgctttcacatttttgtaatttaacctctttttaccttcctgagccacagtgtgcatttgtgtttctaataagctgtctttttccaggaaggaattttggtgatgtttctgcctgtgctcacatatagaaaaggggtgctacgtgttctgggccattctagcctcccctgaatggacaatccatatgatataaaaatatactgttatataatcagagtttccaggtaaaataattgccacttccttcttaataactcatttttgttcttgtttatctaaaaagctaactaatgttgattttatttctatatgatcaatttatttttctcttattataatagaggttgttattaaagaaaaagttttccatccttccattgattctcagttactctaaggaccaagacttgttgatttccaatctgcctacattctagctcatttatcagaacttttcatcccctctatttcaagctatgttctaaaaaaatctttccaactgttcattacttgtgtttttttccttttcattgaatctgcaaatgtttaatgaatccctgctagctgcgagtcactgtatttagagctgcgggatgcacagctatgcctaaggtaccgtctgaactctcttggaactgtaggactgggaattccagtctgtgctcttggaggttgcgtgagggagagggagaagaggctacttataagactttgagggtgtactttgatccaccttttcattccttgtctttttttttttaaaatgtggtaaaatatccataacatttaccattttcaccatttttaagtatacattcaatggcactaagtacattagatgcagaatttttgctcctcctcccagctcctggtgaccactcttctactttctgtctccataaatttgactactgtaggtagctcatataaatggaatcacaca

SEQ ID NO: 26444 - DNA, 1046 bp, Homo sapiens
caaggctaccgcttatgaattcttccttctttatcctagaaattgcaattgattgttaccaatggcctggagcttgcatatttctcttaaaaacctagctcatgccctctcttgtgcacaccatacagtcacctgagagtattccagtgctttctttggttcttctgcctccatctgctctcttctttcttttaccctccccaacagttggtccctaaaatagtagtactttagatctagaagcaacctcagagaagggctaagatttggctctttcactttacagctgaagaaaaagaaatccagcaaaattaaatgatttgcccaaggtcctataaccagtggactgcaaggctggactagagggcagagtttccatcccatgggtgcaggccaggtcctgagggacacgcttctctctgtagagagctgtctctcctgctcacatcctgggtaaatccttattggcaaagaataaggtgggagagaaggtggccaacaaagtgctagctctgccaacttctctcatcgtcaggagacaagtgttgcaggtactttttattctctcccttttagtgtggggatgaagtggaggccagttggtttcctattggacagattctctttctcccttggattctgcctggccgtctgctgatggccccttctggatgtaacacatgttatctggaatagcgcaggtggggatgggtgaagagcattcagatagaagtttctgatggtagtgggcagcagggtggaatctcactttaacccacgggttctcagctggggtgattttgccccccagggaacttttggtaatgtctagaggcattttttgttgttacatctagggggtgctagtgagtagtacatctagtgagtagagaccagggatgctgtcagacattctccaatgcacagacagcccaccataacaaagagtcatctggtccacgatgtcagcagtgttacccaactgaacttgagtcctctcacccagcatgcacaaaaatccaaacactgatactaggatttgcagg

SEQ ID NO: 26445 - DNA, 1070 bp, Homo sapiens
gccaaaccatatcattctgcccctggcctctcccaaatttcatgtcctcacattgcaaaacacaaatcatgcctttccaacagtcccccaaagccttaattcatttcagtattaacccaaaagtccaaagtccagtctcatctgagacaatgcaagtcccttctgcctatgagcctgtaaaatcaaaagcaagttagttccttccaagatacaatgtggatacaggcgttggataaatgttgccatttcaaatgggagaaattggccaaaacaggggctacaagccccatgcaaatccaaaatcccacagggcagtcattaaatcttgaagctccaaaatgatctcctttgacttcatgtttcacatccaggtgatattattgcaagaggtgggctcccacagtcttgggcagctctacccctgtggctttgcagggtacagcccctgctcccaccctggctgctttcacggctgccgttgagggtctgcagcttttccaggcacacacacagtgcaggctgtcagtggatctgtcattctggggtctggagaatggtggtcctcttctcacagctccactatgcagtgccccagtgggggactctgtgtggggactccaaccccacatttcccttctgcactgtcctagcagaggttctccatgagggctccactcctgcagcacacaagtgcctggacatccaggcatttccacacatcctctgaaatccaggcagaagtttccaaacctcagttcctgtcttctgcacagccacaggacaaacaccacatggaagctgccaaggcttgggacttgcaccctctgaagcaatggcccaagctgtaccttcgccccttttagccacagctagagtgactgggacaaaaggcaccaagaggctacatacagcaggggggatcctgggcacagcccatgaaaccatttttccctcctaggcctctgggcctgtgatgggaggggccactgtgaaggtctctgacataccctggagacattttccacattctgttgatattaacactggactcctggttacttatgccaatt

SEQ ID NO: 26446 - DNA, 1025 bp, Homo sapiens
tttatttactttgctgtcagctgatcaggctgagctataaaagacccagtgtggagggtatgtgtgaaggaagaatttgattctactgaaaaaaaaaaaaaaaaaaggcgtgttctttatgtgcttgtgatgagattcagtgggaggttggttgggggtgagtatctggtgatgatgctcttatcactgccacttctgctgcaagatcaatttcctaggaggctttgaggtcttgacccacataaaaatactcctcccctgccctccaaactattgggctttgttttatcccatgtttctgtgatagcatgtatgcaggtatttatttgggaattgattccatggagtgggattggagcgggtgaagaactaatatcagaatatattaacaagttggccagtgctgggagcaattagtgattggtgataccatgcctctctgtgaagccccatgaaatgtggatcagaaatgtccaccctggacagcggtagggggaagcatttattcaccggcatctgttccccattgactgagagtagcctcacaggggttagctccctcatactacctagttgcacatgcgtgagtgccaagcatccggcacctctttgtggccagaaagccaaaggtcaccgcctcagtgtgaagctggtcaaagcctatgtgggcctgattattgccagtggctagaggggtagggcctagaggacatgacatggttcccaaagggaccaactgtgcatctcaaagatatcaacatctctttcatcagttcacttttttatagcctctgtgaaaggagaattctcctttctatccttccagaaaacataggtgtggattcttcggtctcatataataaatctatactaatgatcttaccaccctgacccttctaatcacctcctcagatccagcatctccacctcattaacaggaaaccatcttcctatccaggcttcttggagccattccatctgggtgttaggactggtttcaggtgtccttgtcaggagtttgaacc

SEQ ID NO: 26447 - DNA, 1144 bp, Homo sapiens
ttatagcaaaatatctgtacatttaaaaagatcatataactacacatccaaggaaaagggaccttcaccaaggggttcacataagcacaacataaaataggaacttcagcggttaaatactatacaataaactttacaattaatatattgatgtaccaagaagataagccagaagcagaatgtatattatgaaaagtacaaatttagcttcagtccagtttttgactttggaatggatcaagtgccctgccagagaggaaggaaaataacagtggcttagtgggccatctagtcccattacgtattatttaagcttaataccatgttaatacttttcagcaacttaaactgcaattctccataagtagtctgggaaatgcatgaaaaacttagcctcgatacacgatgccaagtgtatcttcttgaatttataaaaaataagaaaaaattgcgattgtcagaggagagtaaggccaggttcctaacactactctgctagcagatgtaaccttgaatgcttgttgatagagctagtaaacttccttgcaaggcaccaatttctgttctcagaattaataatggtcctcagaaatgctaatgctgattactgagatgttaattttaatgctaataaatacacttgcattatttaaaaagctgcctctagctgaagaacacagtactgcaaataagtcttatacactatatccccacattcatactagtgaatgcctctcacagagcatcgttctctagcgcagaagtagtagaatgtgaaactggaaacaaaggattgagtgacctttgtgccactgcagttgcatcctgtttgcactttgccagggcctggttatagacaaaaggagtttcatcatgtgactttccttcttccaaattgcaagtaaaatacaaagttgatggatatggctaaaacaaaattccttcgaagacatctcagcaaaggacccacagcagatgcattgatgttatttacaacatcaggaaaccaggtgggccatgatgggacaatcacaatggcaggtaatgagtttaataagaactttacattttggttaaaaataacatactggtgtaaaaagatacctaatcaaatcaaatcctattgctttgattaatctgaaca

SEQ ID NO: 26448 - DNA, 1050 bp, Homo sapiens
taacactgggttttaattatatcacaggaaaaaaaaagtgcatttaagtattgttatcgtggactttataaaagcaaaggaaattgaaagtaacttttgattctgtatcaagaatcatattttcatacagtcataactgtctttctgtgaccctttcacagggcactgtaggatggattaaaggtggcaatttactgataactgcagatgtctctactttgttctaaaatctaagtcatgaggtgatttgatttactttatagaagctggattttgaagatctaatgaaaaattttttgataatatagtagtacaaaaaaagcaccagcaactgataaaaattgcttttttgtgcgctacccaactggttaaagccaatgtgatcttttatggtgaaactcctaagaaacaggtggttttgctggaaacttggtagacccttaattatagtggtgctaatgagcactactgtaatataaagccaccattattttttatcaaacatctgaatacattttacaaaggctattgtgagggcattattttgagcatctattttgaggtgatgtttaaaaaaactttaacatcaaatcaaattgtaaattaatttaaatatattgccttaaggacctactaaagaatgtgccaccagactttaagtgatagttgcaatatccttgtctaaaaaaaaaaaaaaagttgacttaaacattttctttaacagttgtcttttttttctaaattcagtctttctcttgcttttttttccctgctattgaggaagtattttgccttccctactcactgagaagtattgacttcgtggtacacattctaaagcatttctgatttgaatatttttgtacatttttatcaattattaaaccttctcttctagtgtgtactagtatttatttctacttaaactgctcagctctaaagaaattgtatgatcactttaaaggtactaaatccctgaaattttgcttcatcttacccacaccgctagtttactttccttttttaatatttaagaatattataaatcag

SEQ ID NO: 26449 - DNA, 1725 bp, Homo sapiens
gaggctggcaactgcttgagtccagaagttcaagaccagcctgggtaacacgatgaaacccggtccctactaaaaatacaaaataataataataataattagccgggtgtggtggtgcatgcctgtagtcccagctactcaggaggctgaggtgggagaacctgagcccaggaggtcaaggctgcagtgagctgcgatggtgccactgcactctagactgtgcaaaagagcgagatcctgtctccaaaaaaaaaaattattcgcgctatgccaaaggttactgtgttaaacgtcacagccagtagaaagatttcagtccttattcaatgaaaacttaacatttactactcttgataggttcctttatcttagtgactttctagacttgatcatgttctacaacggttaaaaacacaaattgtttagccttacctgaagaatttgaattagtaagtctggggtggagtctgaaaatttcatttctaaatttccaggtgatattgatactgttggaccatagtttgagaaccagtgcgctagcatgttaaccttctctgcagagttaggggtatgctgcccccatttcacattttaacttggaaaaagtagaaagaacagttcttcttaaagctaatgatgtagaagttctgctcacctccttcatttgggttcagttgctgagaatttagtcacagggccacaactagctacacaaaggaggctagaaaacttagcttttagctaagcagccatgtgcccagaaagaaggggaggacagattcttaggagggctattatacactcttccacaacttaagctttaatgtctctgatgaaggttttgcagtggtttaaaataaggagacatatatgaaaaaataataatacagtgaaaataaggtctgggtcatagaaaatacgagactataatgtaaacaatattgaagatggagactgtgaggcaaaattttgatgtgaaggctgttacggttccttaaataagcttaaatgtggctttgaatcagattgctatgtgtctggcatagtttctgattactactaatataattggtgttaagtatgttgtattaatattctttcagatattcagcctggtaattttcctgttgtgctatttcaaaagatttatttaggactttagtgaaatgaattaaaagagaagattggcattagacaataaaagatcattaatggagagcttctcagtagttatgattatgatgatgactagctttttatttagtgttcatttgctaatcagaaaattcatcatgtctgtgacaaggaaactatgatcttgtttttcttatgtcttaaaactggtatttgaagtcagttttgtctggaaaggattgatctgaggctttcaaggagaaccagaggaatgtatagtgtctcagaagccaagagtttggaattttaagatagagcatgatccccaaatgcacagaatcagtatcacctgggaaattatgaaaatgcatattctcaaactccacgtcagacttacagaatcagattctggaaatgggacctaacaatatgatttttttaaacagtccttcaaatgagtctttgagaaacccctgaggtaaaggaatccacctaaagtaacatgttaagaaatttttatggaatgaggactgaaagaatactgttaagggtggcatttaaggtgttaagagtggcatttaaggtgtttag

SEQ ID NO: 26450 - DNA, 1021 bp, Homo sapiens
tttttttttttgagacagagttttgctcgttacccaagctggagtgcaatggtgcgatcttggctcactgcaacctctgcctcccgggttcaggtgattctcctgcctcagcctcctgagtagctggaattacaggcgtgtgccaccacgcctagctaattttttgtattttcagtagaaaacggggtttcaccatgttagccaggctggtcttgaactcctgacctcaggtgatttgcccatctcagcctcccaaagtgctgggattacaggtgtgagccaccatacctgaacggctttttaatattttccttatttagagtagtgaggggatttttctattcagtgtttggatttagccattttttctaagttttcataaattcagtttatacattgtacaaatgtgtgtgtatatgtgtttgtctccatgacacacagaaggttgagtttgagtatattgaatttctttaaaactgttgtgtcttgttgactagctttttctgactctgaagagcttattacttgtgatagttacatgtgtatgcttttttccttatgcccagttttctttgcatttcaaatgatttttctgtataaatttttgccactgtatcatttggcactgcattttagacattttctatcttattacaaataggataatcagtaatacgaatggaccataattgacctgttttcctatgggtgtacattgagttaactgtaatttttcaccattacacgtaatattataaataacgtccttgtacatgtttgcaacaatatgaatggaagttttcagagtgaaatttcaggttcaagcggtgatgtttgcatttttaatatttgtaagaactgctgaattgcctttatgctaatttcattcccaacagtaacacatgagagtgagaaaaagtaccctttttctcacacacctttcgcattgtatattaatggtctttgtcatttatctgatgagcaaaaagtttttattaatgtgtggttttttgattggcta

SEQ ID NO: 26451 - DNA, 1030 bp, Homo sapiens
caggagggaggatcttttgagcccagaagcttgaggctgcagtgagctgtgatcttgccactgcactcctgcctgggcaacagagtgagaccctttctcaaaaaaaaaaaaaagaaaaagttgttacattgtgagtacagtatttttcctatttttattttaacctggttatcgtctattcagattattttgtgtatttgtcttgtaaccaatgacattaccagatttccttatcaattcaaatagtattttaaaactgtaactagatttcactggaattttatatgtgtaaaaatagcagtaaaggcaagagaactttacttctccaaaatttacaccagtaatttcattttattgctgtggtatatttgctagaattttagtgattccaggcatgtttttgtgattttaatggaagtggctttagggtgataactgattgccttttaatcatttaggttttttatttcttaaattatttcatttgagcattttgcttttatttttttattttttgaatacttgtgaacttagttttctgggtgtgatttgatcatacaaagtttaatagtgggatcacgtgttttttttttttttcatttgattagatagtggaaataatttcttctgtagattttctaatattgaactactcttgcacttctacagtaaattctgcttggtcagagtgtgtatgttgttaaatttaaattcatgatgctcttctggtatcttttctgcttcttgttaattaatggagagcatttcatctttttttccccataatctgaaatcatgatgtaacattgcaattctgtgttctttaaaggttgtataacattctgctgtgaaaccatctggttttgtatctttctgttgtgtctgtgttgttgggatgttcaagtgtgatgtgctttttctggggtcaattttggttaagtgatttgcttggaaatcattttctctaggttttgattggttgtaaatctgtatctgtgattgtatttttcctcaattctgtttattattt

SEQ ID NO: 26452 - DNA, 1046 bp, Homo sapiens
acttagtagagaaggaggaataagaaagatagatacctattatagtagggaaaagagaaacaaaaggctaagttgaatacttatcaaactgcctccaagtgagtccaagtaagtttgtgcattgaaagttcaaactctgagcatgttttgcactatagatgtttattttgtgggaaagatagcaagcacttaggttatatgagacagtctcaaaatctttagagaggatgaggaggagtaagtactatgaatatatgaataaatattaaagctattatgaaggagagcatgatttatcatggtgtaaatattttgcctgttttttattttttaggtacagcatctggtgcagtaagtactcttttaacctttgtaatattttaattttactatactttaacctactttacagttattcttatttctgttctaaggattatctgctaaatctttacattaatccatagttttcccctttttttctatgacaaggattgaaaaattgatttattttaaaatctggttttggtgggacttaatgagagatgagaattacatgtatcaacttttaaaaggatttaaattcttcccatcacaattagaagggaagcagaacttgtaggtacacagtgcttaacctagtaattacaagttaagcattacattaggagataatcttttttttttttttttttttttttttttttttttttttgagacacagccttgctctgtcactaagactggagtgcagtgatgagatcttagctcactgcagtctccgcctcctgggttcaagtgattctcatgtctcagcctcccgagtagctgggctacaggcgcccgccagcatgcccgactaatttttatatttttagtagaggtggggttttgccatgttggccaggctggtcttgaactcctggcctcaagtgatctgaccgccttagcctcccaaagtgctgggattacaggcgtgagccacagtgcccgacagatgttagatgataattttacatatatatatatatgtatgtatgtatgta

SEQ ID NO: 26453 - DNA, 1036 bp, Homo sapiens
actctgtcacccaggctggagtaagtggtgcaatctcggctcactgcagcctccgcctcccaggttcaagcgattctcctacctcagcctcccaagtagctgggactacaggcacatgcctggctaatttttgtatttttagtagagacagggtttcaccatattggccaggctggtctcgaactcctgacctcgtgatccacccacctcggtctcccaaagtgctaggattacaggcatggcccaccacacccagcgataattgaattcttaggaaatttttacagttttaggtcaggagttctggacccaatttggtctgcagatatactttggcccacacaaagttcttcaattttgtaattatcgctaacatttatagtctgcagattttgagtttgaatttattttgaaaagttggatgatctgactattcaatacttaacagtagtcctgtcaacacagtaggtgctcagagaatatacgttaaatgaactctggttgagttgatatttgtactcagcaaacactagaatgacgtagtggctccattctttaggtgtttagtctgggctctccttggggttctagactacttcagagttacttttctgtcatctccttggcccttgtattaatagccattggagtaaatatcagttcccaataactggccattttgactagtgagattttaatatataatagtaatgcctccagtatcatgattacatagttttccacataaattgatattccagatgccgaactttatgacacaattatgacaatattttttttgttataaacagtattggtcgaaaggtgttgaaaatgtactgtgtgcctttctgtgggttcaaatgggactaaattgatttttttaagatgtttcacagatttcattatttaaaatgttcttaaatacctaatacaattattttcttttatttagatatccagagctgggtactgttaccctcagtaatcttggaaaattacataattttttttttttagttacttttaatacgct

SEQ ID NO: 26454 - DNA, 1027 bp, Homo sapiens
ggcctggtctactaaactcttaaatatttgtttttttgtggctttggttttaaagaagattttatctttatgtgtgtgataaagtcaggatatttcaatttgaatttatatttatttgtacagtctgctgctaccataagagaatttttttttttttttttttttttttgagacgaagtctctctgttgcccaggctggagtgcagtggcgcaatctcagctcactgcagcctccgcatcccaggttcaagtgattctcctgcctcagcctcccaagtagctgggactgcaggcgcgtgccaccatgcctgggtaattttttgtatttatagtagagacgggtttcaccgtgttagccaggaagatctcgatttcctgacctcatgatccgcctgccttggcctcccaaaatgttgggattacaggagtgagccaccacgcccggcgagagactgttctattgcattatgcagattttactctactttaaaaaatacctttaattcttccgagaagttactttgattagtttttctctctaagttttcagaccttgatctcaatttagcttagaattctagttttggttatgttactagcttttgattttatatgtaggttacttaaagtagcaggcagtttccctgttgcctgtcatgcatcttggttgctttcccacacaaccagttacctgattcagcgtattttacattggcctaaagcaaaattaattatgaggatatatctgttggcgggagatgtatgggctgggagtaagcctagttgtagttctttctcatttgattgttgtattttttctccttactttgtaaattatttatctgattctcttagtctggatgatggaggcttgccagtgcttcagttttcaaattctataccttagaaaaaaatacatattatttggaccatattccaagtcagccaccacattcttatagtcacaatttttgtcaaaaagttcttgtttaatgatgtttagacagtttattggttgtttttaacc

SEQ ID NO: 26455 - DNA, 1023 bp, Homo sapiens
tgggcttttatcattgacatattgaatcaaaagctgacacatcgcactctcatttgacctaaactttggccagaagattgagggtttgaggatgggtccctgagtccaaataaaacagtaattgctgctgcttatgtttagtcttctcattatctttccagtcttttaacatgagacctaggggactatcggggcaatatctttactgctacctttatcctttttactccttgtcttgcttagggtatttcccatgtcaggtcctagtattagagacttcttgcctattctctggaggcttgttaaggctcagtcccttgtattagagatttcttgcctatcctttaaccccgcctcctggaggatccttgcatccttcttttgctttgtccactctggctacttccctcgtgggaatttaggcccctcttggcattggcatgccggtatgaaacccacagcaggatccgccctaagctgtatgaagtgaccacagaactgcagataggacccactcactctgcacagcagtagtgcttggtaccattcacacaagcagcaccgcaagcagtagtgcttgtgatcattcacacacactttcatcctccagaatatcccaaccaccaaggaaatactttgtcacccctgcaacatttcttaccttggtctgtgcagagttacctggttgctgcagcatgtgagaatccttttgccaagctgctggcctgtatcttttcttgttgccgagagtctgggtttatttgttgcactggatgggttccaatctctcacactgaggccactgcaacaaggcgatgggatgcgcctccccacaagaagtgaccagagaccggttccccggaggagaatgggaatcctgggtgggcccccaaattgttggaagtaaatgcttggtgtcacaaagtgaaaatatactcaggcaaaagttttctcatcaaggcaatttacttctgtagaagggtgtgtctcgcggatggagcaatggcaagagcacactggaca

SEQ ID NO: 26456 - DNA, 1047 bp, Homo sapiens
attttaatcataacacaaacatcccctattttggctaatatatctagggccattctgttttctcaggccatctggctagtgggccccaattgttctgttaccctttgacagcatccgtggtgtaattataaaccactgctgattataataaatgtaatttatccaatctacgtttttattagttgtcactcacaaaaatattgactcaaatcctgcagctatttgatctcgagttttaaatttaagagcattcacatcttgatatcctgtctcagttgccaaagtttgttttaggtctttaacttctacaatagctaccttggtcttttcattagatggaggaggagcaatagttttgttgtgagaggttttggaagaaggcttaggggaaagtgtaggcagtaggggatcaatgcagcatatttcaaaggatccaataggttctgttcctgaaacctcagcccccatgccataaaactggcttaaagaagggaaccggcttatagaaggggaagaacttggagggtttgagataataacctgtattggacagtactggtttagctcacagctaggggaagctgtttctttagtaaagtgaatgtatggctttaggaaattacagctactggttggggcagtttatccgtgctctttagtggtctacagaacgtttacaactactggttggggcagtccatctgtgctctttattggtctacagaacattggaccaactgcagcataaaagctctgtcttggcggggtgtggggggcaatactcccagttgacattggggtctttattgaaacctttccagactaaatgatcccgattcactaatatccagtctgagcagagccaggaaggacagaggtacttttttggagtggagagctgcttcgacgtgtcaagtctccacagggtataacaaggcaagcatcaaatataatagtttgaggcgaaattgactcggttacattaataatgaggtgatcagcaatagagaggaaagaagaaggagtaatagaatagatgaaagagag

SEQ ID NO: 26457 - DNA, 1019 bp, Homo sapiens
ttctgagaaatttactgatgacctcaaaactaagaatttttttctttattatttaaaagtaaagtgtggatccaggcttttatttttaatgattattttttcaagaatgccaattgaagttgatggtctaagtaaatattatctgatacagcaacataactgattttggtagaccatgtaaataaatagaatctgaaaatagctattgttttggtttagagcgaattttattcctgaaatatcttcctctttgtgtgttggaggagggtgagggagggtggggagtttgtgctctataattctgattcttcataggacagtgccaataggtagttcattttccacttatactatttttttttaatgcttgttgcttctacactcctgcttatgagctgtcccttccatctctagcataaattgtaaatggacattttgtaggagtgatttggatcaaaaggttttaatgctgattcagtgatttcggtagaactgagtttctagagaagcatccaagaaaggtaacaggttcagttaccatgagtaattttgtgcttcatgttaagttctataatagatctttaggtggctgggttatttccatttgagtatttccataaatcatcaaaaatttaggctaacaaaatattttggaagccaatttcatgtgatcttttgctaattagtactgtttgataattgtttaagctttcatggttaaagttattggtgaaattgcagtgggaaaaggagcttgctatgtgtctgtctctttttacttaaccttaagagtagaagggcttaatgtccagtgattttcctctttttttttttaatttggaatattgcccttaattttgttaaaaaacaaaacaaaacctttattcaaaggcaccagccccaaaagattctgcttgcaggagttctttaaataaaagagccttttattctgttactctagaataacacaaattttaaaactctctaggtgatggagaaacaactttgattcctcttct

SEQ ID NO: 26458 - DNA, 1167 bp, Homo sapiens
tccctatgattttatctccgacccaactgatcagcactcttgactcactggccttcccccatctgttgtgggacttttccttagttcacctaaaaatgcggtccttgtcacacagccatgaaaatttaggctcacagacgatttgaagagtgagaaaaaatgggatttcttggttgaaaaggaaaaaaaaggaggaaacagagactcagagaatcgagagagtatgcttcatgcccatgggcttcctgcctcacagattgaatcccaggttccatacaggaagaagaggggccaggctcctcctcactgcaaatggtgcagacttctgtagctccaccccagtgtgcatttctcccagtgcacaggccagctggagcccttctcagctgtctgtcttacatacaccaaattatccttaaaatttctgatctctggatggctggggagactgatttgagtaatagtaaaactctggtctcctgcatggctggtgctgtgtgaattagcctttctctattgcaattcccctgtcttgataaattggctttgtctaggcagtgggcaaggtaaactcattgagtaattacatggggagggggaagaaaaaagaaacctattggtattttattagaattactttagaactatgaatctatcgtgggtggtgattggctatctaggcaatgttgttttctgattgagaaacagcccaagttggctttttccctgaatcttccttcacgtaccctacacttttgttgctaggattatcttagttaatatttttgttattgcaagggtgcaagtatagtattttattctaattttatgatagctttttgatctcataaagaaaaaacattgatttttaaagtacacttatgtattcctatatgtatacttgtcactattaagcattataattattataaaaacagtaatgtttctattaagcttaagcaccaaactggcaaaaatactattaataaaaataattaatttgaggcctaatatgagccaagcactttggtaaatatttttaaataaacacctcacataagcttcacaataacccatgaaattgattcttctatggcttatctttcatagatgaggaacttgaaggttgaagaggagactcagctctttagtggtcagcacagctga

SEQ ID NO: 26459 - DNA, 1035 bp, Homo sapiens
tccaatatttatactttttattttcttcgcctgtagcattaactaggacttccactatgatgttgaaaagtgatggtgagaaggaacatccttgctttattcctgatcttagtggaaactttaaatttcccaccactcagtatattagctgtttgtttttgcagaaattccttatcaagttgagggcttttctctctattcccagtttaatgagaatttttatcatgagtgagtgttggattttgtcaaatgttcttttgcatttattgatgcgatcatgtgatttttcttttttaacctgttactgtggtaaattatattaattgattttggatattaaagtagcctgcatacctgggataaatcctatttggtcatggtacataactccttaaatacatcgttaaattctattttctaatctttagttgaggatatttacatctatgttgatgggaattttggtctgtagttttcttttcttgtgatgcttttgtctggtgtgggtattaggataatgctggcttcatagaatgagttaggaagtattgcctcttcttctggaagagattgtagaggattagtatattttcttccttaaatgtgtcatggaattcgttaatgaacccacaagggcctcatgctgtttttttgggggaaggttactaattattaattcaatttcttaatataatcctattgagatggtttattttgagctaatttttatacatggtgtgaggtatggattaaagttcttttttgcatatgaatatttaactcttcccgctccatctattggagacacaattctctctttactaaattgcattctcatttttgtcaaaaaccagttgccgttatatatacatatagatctatttctagactttttattatatttcactgatttatttgtctatcttgatgccatatccacactttattatatatgtattatattctaattgaacatattatatacttttcttatttattttgtttgttgtctgtctttcttacaccctaaaatgc

SEQ ID NO: 26460 - DNA, 1044 bp, Homo sapiens
ctatgctcactacttgggtgatgggttcaattgtaccccaaacctcagtatcacacaatatacccttgtaacaaacctgcacatataaccctgaatctcagaaaaaagtttggaaaaaaattcttcaaaggttgcacagagaggactttattaggagaatgaatagacatgttcctaagaaaatgcaatgaatagaagggagctaagctaaagcgaagaaagtagtctttatcattcttaaaaagaatgatacttcttttcaatagtcttctgttctttaggtttgactactacttttaatcatattttggcatatagatttatctggtaatacatactttatcatgttttctctagaattattttttaagttcagccttacttgggtaaattctccatgttctttagttttctttttatcgtttaaattttgggagatcagaaccaaagtaaaaacattttaaaaagattctatgagtaagctatgaacaaaatattctgtactgtgctctgattgtaatcaaaatcaatcttctttcttttacttacaattttagctctgaagaaccagcggacgcaagtgaatcatttccttttcctccatttttaggcattatacaaatttccatattattcttgataaaacgacgataaaaacatatccattgaaccctttaatttatatatttatctcttgatcaatttttttcgtctttacatgctttatcattttaattttaaaacacttaaaaaaattccatggaaattcgaatctaatgttttccttaatacatgtggttgacattgataacttaacaatggaagatatttttggataaatataccccataagaatccttagtaaagatacttgtatagtatatatatatatacgtttcagtccctgttattcaatatactttttcttatttgaatgaagaaattccaggtattctttctcttctttttacttttttttttttttttgagagatggagtcttgccgtgttgcccaggctggagtgcagtggcatgatctcggct

SEQ ID NO: 26461 - DNA, 1050 bp, Homo sapiens
tttgaggaattgccacactgccttccacaatggccgaactaatttacactgccactaacagtgtgtaagcattccttttcctccataacctcaccagtatctgttattttttgactttttagtaatagccattctgactggtgttagatggtattgcattgtggttttgatttgcatttctctaatcagtgatgttgagctttttttcatatgattgttggctgcattgtactggtacaaaaacagatacatagaccaatggaacagaatagagaacccagaaataagaccacacacctacaactatctgatcttcagcaaatctgacaaaaactggcaattttgtgttccataaatggtgctgggataactggttagccgtatgcagaagtttgaaactggatcccttctttataccatatgcaaaaattaactcaaaatgaattaaagacttaaatataaaacccaaaactataaaaaccctggaagacaatgtagttaataccattcaggacatagacatgggcaaaggtttcatgacaaagacaccaaaagcaattgcagcaaaagcaaaaatggacaaatgggatataattaaactaaggagcttctgtaagcaaaagaaactatcaacagagtaaacagacaatctacagaatgggaaaaaattttacaaactatgcatccaacaaaggtctaatatccaacatctatgaggaacttgaacaaacgtacaggaaaaaaacaacaaccatatttgaaagtgggcaaaggacatgaacagacacttttcaaaagaagacatgcagacagccaatactctagctgtttcaatcatactgatctttttttgttcctttaacatgccatgtttccttttgcctctagtctcctgcatatgctgttccatttcctaaggacacttttcctcctgcttggcgacttgctaactctgatgaattctttctaagtttcagtttaaattttacttcttcagagaggtcttctttgaatctttagtagttgtatcctcttgtaatatgctttctc

SEQ ID NO: 26462 - DNA, 1050 bp, Homo sapiens
actaaatatatgtgtacctaacacagaagcagccagattcataaagcgagttcctagagacctatgaaataatagtgggagacttcccacacaataatagtgggagaattcaacaccctattgacagtgttagacagattattgaggcagaaaattaacaaagataattaggacctgtactcaacacttgatcaaatggacctaacagacctccacagaactattcatcctcaaacaatggaatttatattcttctcattgccacatggcacatgttttaaaatctaccacacaatcagacatagaactatcctcagcaaattcaaaaaatgaaatcatactaaccacactcttggaccatagagcaatacaaattgaaatcaagactaagaaaattgctcaaaaccacacaattatttagaaattagacaacctgctccggaatgacttttggataaataatgaaattaaggcagaaatcaagaagttcttttggagtaatgaggacaaagatacaatatatcataatctctgggacacagctaaggccattttaagagggaaatttatagtgctaaatgcctgtatcaaaaagttagaaagatctcaaattaacaacgtaacatcacaatgagaagagctagagaaggaagaacaaaccaactcccaaactagctgaagacaagaaataaccaaaatcagatctggagagagacatgaaaatccatagaaaaaatcaataaatccaggactttgtattttaaaaaacaattaacaagataactagactgctagctagactaataaatggaaaagagagatgacccaaataaacacaattagaaatgacaaagggggcgtgaccattgacctcacagaaatacacataaccatcagaggctactgtgaacccctctatgcacacaaactagaaaatctagaataagtggataaattcctgggatgcatacacccttccaagactgcaccaggaagaaactgaatccttgtaaagagcgataacaagctctgaaattgaatctgtaatca

SEQ ID NO: 26463 - DNA, 1031 bp, Homo sapiens
tatcattatggtatgcagctcttcatgttggaaagaggttcagaatcacttcctttaacatctttctattatatcttattctcagagagagtttttaacctatgcactgatgctattgaaaaatcagcccacagtttacaaatcattttagatagcatttaacagagttccgcatcagaagcaaatatctaaggtgcagagttgtgaaatagaacagaagttgacagcttagactgaaaactggctaagggcagaagttaagggtagaagtaaatggaaacatttcaagcaggacaaagaataccttggggaagaagattaaaacaaaatcactaaaacacatagtgtttgtttgatgtctggtgctgtttatttgatgcccaagatgatcctatgaagtaggtatttaactatctccattttgtacaaaagttaaatgagacaattaatgtgaccaagtcacacaactagtaagaggcaaagctgaaattcgagtctggacagcctgacttcagaatttatgctctttatctttaagctcaagtgatattgcaatatctgaaacatattttccaattctatgccctaaagggctcttaatctaaatacaatattattaatttaaaaccagcagaaaaatgtagaaaaaaatggatatttggctcaaaataacttgtgggcatttgttctctatgtgattgccatcctttgtatatttgggagaaattccagtgttacgagttgtgccctctgatgtgaaactcagaacccaaattcttaggctctgtcattgctggagagtaagcacatgatgtgcacgagtctttaatttggagaaaataaacatttcacggagtttctgtttggttggtatctggcactgactcccagatcaattttgtgatgcaggcatggcatcagtgcaggaggcagtaatgatggctgtaaagtaaatctgggcctggtacttggtggtagtaacagaagttgtgttggtacagtttcttacagttgtctggcatgatttgggc

SEQ ID NO: 26464 - DNA, 1052 bp, Homo sapiens
gctcagtccatagggatatgccgatgagggggccacaatcctgtcatcatggaacttagaggataatgaggagtcagggcagagaagtgaacaacgtatatgttgctcaaaactggaggcagaattcgtgctctcctgaactctagtccatggtcctgcatagctactttatttatttatttttttgaggcagaatcttgctttgttgcccaggctggagtacagtggcatgatctcagcttactgctacctccgcctcccaggttcaagtgattcttctgcctcagcctcaggagtagctgggattacaggcatgcaccactatgttggccaggctggtctcaaacttgtgacttcaggtgatccacccgccttggcctctccaagtgttggaattacaggtgtgagccaccgcacctggccaattgttatatttttgatatcaagatattttattggtactttttcactttctaaaacattctcattttttactcatattttgtatttctctttccttttaaaaatatattttatatacttatatcatttaattctagcatctaatgtttctatgggccaaaactactatttacaatggactcttgcttatggtaccttttttcctcatgtgtttgtgaattttcattatgagctcaggtttactgcaatgtttaaaggcatgggcttgttttttccttcaccaagagccaagacttaggcaatttccgttagaaggacttaggcaatttgccttagaaggtttcagggaaatagtcatccttaaattgagggctttctaagcctttttttttttttttttttggacagagtcttgcactgtcacccaggctagagtgcagtggtgtgatcatggcacactgcagccttgaacttccgggcctaagcaatcctctcacctcagcctcctgcatagctgggaccaccatgcctggctaagtttttaaaattttttgtagagacagggtctccctgtgttactcaggttggtcttgaactcctgggcttaagcaatcctctcacctcggcct

SEQ ID NO: 26465 - DNA, 1031 bp, Homo sapiens
atatttaggagctttttttttggaatagaataaaggtgataaacattatgttccagtaaaacattttattttgatgcagtaattgggatcttagagccaatcacgctgaaggttatatgaacaccacagggggagaagctcattttcagaagtctgtggacagatgatagccagtctttgtcctaatatgatctaaaagggtgcacagcttatataaatgaatcgctatgttgagaggcaattattatttgttggttggttaggtgacaaggtgacagaatgtggacctcatggttgatggtgatgcttagcttgactttctgttgatagaggtgtttggaatggtcattccctcaatgaaggtgaaactcatacggtaattcctcttttttttttttttccccttcctttctctcctttgcagatgagaagcccaaggtcaaccccaaactctacatgtgtgtgtgtgaaggtctctcctgcggtaatgaggaccactgtgaaggccagcagtgcttttcctcactgagcatcaacgatggcttccacgtctaccagaaaggctgcttccaggtttatgagcagggaaagatgacctgtaagaccccgccgtcccctggccaagccgtggagtgctgccaaggggactggtgtaacaggaacatcacggcccagctgcccactaaaggttcccatggacttttctatttctagatcaaggggttttgttagtgttgtcctgggtccgtgtgggttaaagatctaagtagctatgaggcattccacctacattttgaatcagaggcgaagagctacaaggaaggtcaccctgggtgaagaagagaaaggaacagccttttggcatctaaaagaaggatgggcattttggggaatgtaagcaaggtgatgtccatcttggggacagcttagctgaccagttagctttctcttggttgctgtgactcaggtgaacagctcccaatacctttttatgttactgacccatgatgtcattcataatttctgaaaca

SEQ ID NO: 26466 - DNA, 1049 bp, Homo sapiens
agcatgcattttctcattgttgcctccatgaccggcttgtctttgcttgctctgacttttcctcctgcctgtggggccctttcaggccttcccagcagcattcccctcaccatctgtattagcttcctagggctgccataagaaattaccacaaacaacagcaatgtaactgccaaagttgtggaggcctgaggtctgaaatcagggtgccagtagagttatgctctaactgatggctttaggggagactctttcctagctcctttcagcttctggtgtctccaggtgtttcctggtttgtggcagcatgactccaatgtgtaccttcatcttcacatgaccttctctctgtgcctctccatgcgtctctcataaagatgcttgtcattggagttaagtaccacctacagaatccaggatgatctcatctcaagattcttaagttatttacatttgcaaagacccttttcccaaataaggtcacactcacaggttccaaggttagaacgcagacaaattgattggcaggctactgttcaacccactacactacctcagtcagcagtcataacttatttctgtgacctcttgacatgactggcatgcctacacaacttattgggaccccatcatctctatcttactatttttggataattctcacctctttcactaaatcataagtccttgtcttagtccatttgtactgctgtaactaaatcccttagtctgggtaatttataaacaatagacacttattgcttacagttctggaggttcaaagataaaggtgtgggcaggatttggtgtctggtgagggctcactctgcttcaaagatggcaccttcttgctgtgttctcacatggtggaagggggggcccagggagctctttttttataagagcatgaatctccctaatgacttaatcacgcaccaaaggctccccccctcttaatactatctcattgggtattaggttccaatgtatgaattcttgtggggacaccaacattcagaccacagcagctcttgaggtcaaaagggttt

SEQ ID NO: 26467 - DNA, 1090 bp, Homo sapiens
tttagaccatataggataacttcctgacattgccgtggcatttgtaaactgtcatggcgctggtgggagcatagcagtgaggacgaccagaggtcactctcgtcaccatcttggttttggtgagttttggctggcttctttaccgcaacctgttttatcagtgaggtctttatgacccgcatcttgtgccgacctcctatttcatcctgtgacttagaatgcctaactgtctcggaatgcagcccagtaggtctcagccttattttactcagcccctattcaagatggagttgctctgattcaaatgcctctgacaatcacataacagaacaggaaggtgtggggaatgcagtaaggtgacaggctgtatttgagaggacttgggatgtccaagtagagctgtctggtgagttgtcggaagaaaaacagatggggcatgctggctcatgcttgtaattctagcacttagggaggccgaagcaggaggattgctttaggccaggagtaggaaatcagcctgggcaacatagtaagaccctgtctctattaaaaaaattaaaaataggccaggtgcagtggctcaggcctgtaatcccagcactttgggaggctgaggctggcggatcacctggggtcaggagttcaagaccagcctggccaacatggtgaaaccccgtctcgacaaaaatagaaaaattagcagggcgtaatggttatgtaatccataaccagtagtaatcccagctagttgggaggccgaggcaggagaatctcttgaaccctcaagatggaggttgcagtgagccaaggttgcgccactgcactccagcttgggtgacagagcaagactgtgtctcaaaaaataaaaataaaaagaagaaaaacaattaatatatttaatagcttagagaggaaagggctagatacagatgagagcctctgcttcctggtacaggaggcggtaaagttcaagtggggatcagaatttcctgagagaaaggggagagggtggatctgtcaccttggtccaagggatgagttcttggagaaggaccttgagagaagagtctgggaacagcctgagaggtag

SEQ ID NO: 26468 - DNA, 1026 bp, Homo sapiens
tatctacaatatttctccccatgtgattttcaaaattaagtttaggtaagagaagtaatttttaaattttcataggtaaaaattaagtgagaaggtattcagcttcatttaagatgagaatgtgtaaactactctcccatctcctcatattcatggtaacattaaagcagaaaggaaatggggagaaagtactattcttttaaaaatattaggaagcatgtagttatttctgagaatgaaatgaaatcaattatgttactatataaatacctgctaaataaatggcttgggttggatttgatgtggttatctccaaggtttcttccagtattaactaaagcaatatgactagagaagttgatatagagttgggatttaggatttaagtttgtagtcagtcagcctacagttaaatatgggctctgctacttaataattttgtgaccttagatgaatggcttaacccttaagtctttatttcttccatcataaaagaagttaactgcaatatctgaataaatgagataatgaacataaagtgcctactgcagtgactggcaacaaaacacatgctcaactttttaaagataaatataaaacatccaactacacagtgtactcttttaccaccataatttaaagtagcagttgtcaacttgaattccatccttagtttgttaattgtgactgctagacattgtaagattgacctgaaataggctagtgaatgcattcgttaaaatatatttactaaagagtatatatgaaaaaataagttcatatttcatttttaagtgaaatactgttgtttctgttatacttttattgaaaaagttttatagcttattctatttactaatggctggagactcattagatcccatcagtacttttaattcagctttatgatcctaaagtcttacagtagctacaacctgaatccacatggtctttgctactcattgaaaaagcattgagctccaaagtttccagcaatattaatgcaaatgaactggtcttaatatt

SEQ ID NO: 26469 - DNA, 1064 bp, Homo sapiens
aaatggaagtatgctggtagtttcagatttctctttctcatatttgacttactgtacttcataagccattggaatctgttcatttgaacagtcaatttaatcccctcttttactttagtttctctgttaaataaaaaattattttgatgccattaagcagaactcatcatgtgaatagtgtcacatgagaactgtttaaagtgttgagtaaaacttacacttaaaaaattgtttttgaagattgatagcctaaatacactgttctcaaatagcttataacatttactctgtaggaaaattgctcatttgagttctcattcacaggtgctggttcctgagctagtccatttagatacaaactgcaaattattggtgattatctagttataatatacaaatgcttcttttacttcccagaatcagatagtaattcagaatcagatacagaaggatcagaagaagaagatgatgatgataaagaccaagatgaatcagatagtgatactgaaggagagaaaacttcaatgaaactgaataaaacaacttcctctgtcaaaagcccttccatgagtctcacaggtcactcaacacctcgtaacctccacatagcaaaagccccaggctctgctcctgctgccttatgttctgaatcccagtcacctgcttttcttggtacatcttcttccacacttacttcaagcccacactctggtacctacactttatttttattattctaaagtagaagtcaaaccatagcaagaatttttattgataagagtgttctggagatgatctcactggaatcaagattaaagttagattttaggttggctaaggaaggtgagcctgtattttcaaaggatatgactcattacctggtcttttttttccccccgagtttccagtttaaggatctgattgatgatagttcctttggttttgaacctttctgcttttgtgttcagtttgtgcttctagaatatagaatttaattgacagttggacttttttgtacagttgacccttgaacaacgcaggatttaggggcactggccccacac

SEQ ID NO: 26470 - DNA, 1044 bp, Homo sapiens
cctgggttcacgccattcttgtgcctcagcctcccgagtagctgggaccgcaggtgcccaccaccacacctagccaattttttgtatttttagtagagacggggtttcaccgtgttagccaggatggtcttgatgtcctgacctcatgatccgccctcctcggcctcctaaagtgctgggattacaggcgtgagccaccgcgcccagccgcactatatattttttaaaaatcaatataacttctccaccttgtgtacagtcttcatcaagtaattaacaagtttgttcacatttcccttatacgcaaaatgatggctggactgtaagtgtccaagcctctgatgatatactgtgctcaaaaatagcgatgctatgattgactttttaccttagataaatttgtgtaaatgattgcacacaattgtacttgtgtagttatattttcctgtttttgtaattcttctttctcttacccttgttgtgagctttcagtgtattctaatctgctgtcttatttatttctgaattagtctttaacatacatagtattcctaaagaaatgtcttttcttatttgaaggcttcaatagcatccttgagtacagattctgagttttctgaacacttttttctcacttggttttctgaattagtgacattggaatttgcttgcagttctcatgagtcatatgttgggcactattttttgtttgttagtggatggttggaagctgcagaagggatggagtatgccgagttgctgaataacattagaaaccttgtctagaaagggatgcgtttttttaatcattatttgctactagtaaaaaagagtatagagtatttatattgagatgcttacattgaatgaaagtataattccatttatccagaaatgtgtcatttattaacacatatttttagtacctaaaacatgagtttttttcattttgtaggtaaaataatttttttttaactttcacagtgttgtagtccatgtttaaaataaagccttttacagcagccccagtcaggggcttacaga

SEQ ID NO: 26471 - DNA, 1051 bp, Homo sapiens
ttagacatgccagctgcttagggaaatgattaaccttgaaagctctacatgacgtgaagaaatttactttaaagagtaactgtttttaaggcactgttggattcagtcaggcctaagtagcagagctgaggttttttcactaacatgtctcatccattctgctttgtttgttgtaggaggcaagtggtcaacagcaggtggctgtcgagacgtctaatgaccattctccatatacctttcaacctaataagtaactgtgaggtatgagggaaaggtcttcataactggggggctcaaatcaagcacaatctatagggctttttttaaaatcagaatggtgattgggataactcggattttatcatactgctttaatcgtggccaaggcatctagtcttgttgaaatattaaaatcagtgattttatgaatttaagattaatcattttgtctaaagagaatgctttatactgaagccaaatgtatactctccccactaaaaagaaaaaaataaaaatctgtaacatcagagaacaccaagaaccaaaattgttctataatacaagtatcctatatcatattactttaatactcagaaactggaggacctatagcataagatgttgctcaatctagcattacaagtttagcaacatcttgattatgaatttagataaatgtcaatatccttagattgaaagattatattcccaactctcacttgaaccacaaatttcaaaacttttcactttaccatgcagactgtaataaaatagctgtgtagaacttagaataccctggtttctgcattgccctggtgatatagaataccttggtttctggattgccctggtgataacatgtatttttgatttcataaagtcactctttagagacccaaatgaatttggctctaaattagaaaagaaagtattttgcaagtcctggatgtgacaggcattgaaagtaaccatcagttccagagtctgcatttatcagtctaccatcagtgatgagcataacctttttcaaacacatatctctttaaaacaa

SEQ ID NO: 26472 - DNA, 1034 bp, Homo sapiens
tctgacagtggttttatacctatttttttcactggtgataagaaaatatctttttttcttagtactgctagaaaaggaaacaatgaagtttctttcataatcattcttttcaaagtttgctttttgagcagaacttccttgtaatattatatttagtttcaatttatcagggaatccaaatgaaaaataaggttttctttggtgtattttggaaggtagctttaagaaattttgttcataactctatagtgtttagaggattttgttattgtctaagactgctaatttctgttcttcagtttttccattccattgcattgccttcagagtcttaagttttaggaaggcttaaaacaattgaaagattcagtcttaggattaatcattgagagaattaatatgtagcacctattgcttgctggctgtcttcatcctaaccccattcctgcattggttaatgtatcttcaggaggagtggacggatgatggaagcttttccagttttacaacatgagaactcagatcaatttaggttcactttttaaatggatttaaaggagatttggatattttctgtgatttgtctctattttaaggatatgttctaattctcattttataccattttgataaacaaaatccctccttagaaagacaggaaagcaggccactcttctgaaagaatgcccaggctgccccagggccccatgcagcaccaggagaccccatgaactgctgcccactttgcttagtgtttgtgtcatacaaggagttaaatacttttagcatcacttctggactggcatattcatgttaaagagtacattcctacggtcggtaatatcgcagcccatctctgataactgtaaagacccagaacaaaagaggtcaagagccaaagctctagctaaaagtttttttaagaaggggcatacctgggagaaattcagtggttgagaaaaccctaaagaccggagaaggcttccaagatttggggaaaatttgtttatcaagtaattcaacaaatattattg

SEQ ID NO: 26473 - DNA, 1027 bp, Homo sapiens
atcaaaatttacatgtcaggtccttctatagattcaggagtcagaagacagagagatacttaatggagaaacagcataacaggcacttatactaaagagcacaggctcagagctttccacctggccccgcctcttgtttgagcaaatttctcaacctctctgtgccccagtttccttacctataaagtcgggataatcataatatctgcaacgtagggttcttgtagggactaagtgggttaatgtcaagtgctctgaacacttttggcatgtattaatgttactgctactgggaagcttttttaaagcttctaatggtcaatcccagttgagagcttgatttcgtctttttatgttataactgaaaaagctgaggctcagggaaggttaaatgacctttttggagtcacaaaactaggaaggggcaggcttgggaaaagagtccatatctcctgaaatatccactcttcttgatttgccactttacttttcacaagtgaatgttacacttaactctgctctttatcatgaggatgaaatatctgtacttcagtttcttgccaaagaacttaactttgtcctctccactgggcaggtcttgacacaagctcttcgaagaaataagatttatgaagaattgtatgaaggatttggagtttctttgttcatcacagagcttcccaacttggcagacagaggaaaggataatatttgtattatgttatattggcattgaattagattatgttggattgccacctatggatgaggctggtcattgctggaggtgacaggccccacccagtctccaagggttgacagaatcagcatctcctgacatgtttaagagaactagtccagcaagtgtagttttaaaaaaatgttcaacaaaactatatacaaaaatatttataagtggtatttttaattatatgctttataagtacaaatttacatttataaacttatcagggagaacagtgagacagttttgataaactcaaaaatgtggataacagttgcagaa

SEQ ID NO: 26474 - DNA, 1031 bp, Homo sapiens
ccttccagtctatgtccttgttggtcactcctcttcttactctacccacctttctttcagatttgccattccttttattgtttttgtttgtttgtttgtttttgtttttgagacaaggtctcgctctgttacccaggctggagtgcagtggcacaatcacagctcactgcagccttgacctgggctcaagtgatcctcttgtctcagccttttcagtagctgggactacaggcgtgtgccaccaaattttttttgtagagtcagggtcctgctatgttattcaggttggtctcaaccccctgggctcaagtgatcctcccaccttggcctcccaaagtgctgggattacagatatgagccaccaccccttttattcttaatgacatgtcatttgtattcagctcactcagccatccaccccctctgtgaagccttcctcaacctttttgtcccctgtcttttcatcctccctcctccctgatcttcccttggttgaactctatttttagaaactgtactgtactacaccattataagcaatgcaattaagggtagctaaggctgggaacccactcttaaaagcttttcctttctgatgaatgcattctctggcaaggaaattttgaaatcattgccttagtccccttactttctcttttggccctctagttttgtggtgattaatttaaatttaatgtcttcagtctggtatcttcatattcacacacccataccccttataaatgctgttacaaaaactagatggaacaaattgcacaaaaactcttgtgtgtttcctggcccagagttctcagtgggcaacttggcgagtcgctggagttcttagaagaacttttgaaggaaatagaacaattgggctgataagcattcaggagcacagaaccaacccttaaaagatacttgaatgataaggaatctaatgtcttgatgggatctggaaggaaatctcagtcagtcatgttgtattcaacaatgcaagtcttaactttaattcttttatctgaagcata

SEQ ID NO: 26475 - DNA, 1030 bp, Homo sapiens
tttccatgctactgcttttttctgtttacttcgctttgaggtcctggcgtagctgcaggccacacctagaatgctgttcctgtctgccctgtcctctgggcaggggtccaccatagtgtttctccatgtttgggctctagtctgtttttccctttcctgttctggaaagcccactggtggctttggcttaggtgggggtgggcagagagctgctccccgtcactagtcattgagtgtgaggctcctgaagccagtttccacttaggcatcattttcttcataaatgtgtttctctgtggtgagtgaggagagatggtgtcattttcttattttgtgcatttagaaaggctgagatttacaaaactcattttgggtactcgtcactaattagtttaatctgggataacaatggaaaatgaaagattgcatgtttgatcatgcacagcaaagaaaaaagatttataatgaaactaaatatcatgaaagaagagaaggatcagaaaactcaagtgtaggaactgagttctgtgttgcccactgatctccacacccagcccccaaacacacagaggtcctgggtctctgttctagaggccagaactttatgttgtccgaggttctttggaaaagaaattttctttgacattttcaataactagcaatgtgcacattttggtaaaagagatgaaatgatgctttatgattagctttagcaacagaaaagtaaaaaggtgcagagaaagactaatatcttcactttttttcttgttgagcaataacttcctactccaaatagaatattgtgaaataattttaaaacgaaaagaaaaaatgttgcatccgatttctgtaaacattgaaagcatttcccagatcctgcttaccacagaatgacgttctacttcaatttatctgcttcagaagagatgaagagaggaatgaggcttgccagcatttggtttggttagctcccagggcacctatgtattcccaggttgataccatcaccactaaagtgattagacaatag

SEQ ID NO: 26476 - DNA, 1109 bp, Homo sapiens
ttttataagattttgtgatgttaagcttcaaccttgcagttcatattagtttgttcattttgatgaaagaattggcagattttaggtatatgatgcagtttgattttagtctagaaatacataatcagctgttagagctgatctcagctaatttgccagaaaaaaaaaaaatggaatgtaaggaatactttacagtcacctttggaaaaaacaccgtaatggtttggaatcacacttgcattatacatacatagtagtagtagctaactttcattgagtacttcactacctgctgattgctgttctgaatgtttttggcagattaactcatttagtcatcttaaaagccctgtgaggcaggcaatatttgtatatccattttacaattaagaacactgaggcatagattaagcaaattgcccaaagtctattcaactcaaagtgcagagccaggatttgaaccctgacaatcactcccttccaagccaccacactacggctgcctgcctacatgtactgctcaatagcaacccatagagaacttatctgcatcatagcccatcacccttctaatctcagaagtccagtttagggattcctcccacctttttggggagggagaacttgtgagctaggaggtgaatgatgaagcaaatggatgatacagatggtaagtttgtgatgtttggaagcagcattgatataaaaatgtggctgtactgaatgattgtacaactcttaaagctttctacattttacatatacagtcatctctcagcatccgaggaagattggttccaggatggctcaaggtcctgatataaaattgcgtagtatttgtatataacctatgtacatcttctcgtattctttaatctctagattacttataatacctgatactatgtagatgctatgtaaataattgttatactgtattattttcaaattgttttattgctatttttattgcttttccctgaaatatttttaatccacagtaggcggatgcagaacctctttatacggagggtcgactgtgtaggagtgagctagtttcagttaaagcagcggtggttggtactcatctctcacctgcccccacgtag

SEQ ID NO: 26477 - DNA, 1069 bp, Homo sapiens
caaatgtgaatcatttacatcttttcctgtaactgggtcatcttaactgttgttattgcttttgattcactttgtaatttcatataaattttaaggactgtgataatcatttcagatatatgtctttttatctgatttacctgatctatgtaaaaattacttttccaatctgaagacccagaaagactaagaactggcactccaggtaccgtaaaagggtggaaatttgtgaggctcatcagttggaattgatgccgtgtgccggaacagtactgatgactgatctttggagtgtatgcgtgtctgtgtatatgcatgcatttgactaaaacttgccaaagaagtaacagtccagtattcatgttctcaaggtatgtttgcaactgacagtttaaagcagtaacagcaagaagtgtacagtggcaaagtctgataaatatctatagatttaggttcatctccctttcatctttcttattatataaatgcactgaaaaacacttgaagtagaatgacgtgattgtggagagagagctgaggagggaagcagacagctcagcttgttcctttgtgatggatgtctttgtgagattagggtgaagtttctcattctgatgcgtgcagactgtgcccactacttgtaagacacactgtcagatctccttggaaaaactgagcatatgagtcatttacttgtaaaaacttagtagctctgtgttcttaggaagattaaaaatgagtgtttgacaaatatttttctaaagccaaggttatgaatagaaaggacatggatatgcatttgcatgctgtgtattcatgtacttgtatgccatgctttatagattctaagactcaccttttttacatttcaacatctctgcagttgaaatgcaggttgtaagttatggtgtcttttaattactgtagtccacttttttcaaatgtcaattaacatctctgtaattttcaggcagctcacaatcagtggtatcttagattgcatgacatacagtttatgtctgaatatttataggacactgatacagagagatgagtgtgatacttctct

SEQ ID NO: 26478 - DNA, 1083 bp, Homo sapiens
tgcctaggaaaaccagagacctttgttcacttgtttatctgctgaccttccctccactattgtcctgtgaccctgccaaatccccctctgcgagaaacacccaagaatgatcaataaaaaaaaaaaaaaaaagaaagtattgagcctctgaagattgcctttcgtctgcataaacaatggactttttatataacttgattcccctatggagtctgctataatgatctcgaagaatattctttacttctgaatgctttcagtgctactgaaaagaaaaaggacttgagaagttagagagggtatcaacatcaaagtgacttcttcccttccagcaatggtaggaacaggaggaccctaaggcatttcttagtttttgtccaggtcctgtcaaaaatcttagctaatctccctgatcacaggagtaaaagtggatgaacaaggtgattctcctgccttttaagagtcaggctcttagaaactgttttagagaatttcacttgtgtatcattaatcccttaaatgaggtagtatcaatatggcgataattggaacttgactttagaaaaactgtgacatataactcaggtcccttgataatcagtgcctgtgatttttcctgaatgacagctatgtgtttagcacaggcaatatggaccattcctttgtatctgtagccctcagaatttgaacatctatgttatacattcttaagatgcaaaaatgttctgagacattgtccatcaaacccttgggaagtcgatccagacgaagtgtcgtattcacatactgcctttgttcatattgctacggatatttcaagattcatttgtcaggcacaaagttggtcatattttaacatctgttactccttcactgttactgatggaaagatgaagattctgtgtagtgaatacttgattggagtgttgacatttctgacagaactggcaatttttgaaattgagtgaggcattaggtagactgctttgtggattctatattactttcctatggtttatatactattcttgctaattgtgcaaaactgggagggacttcaagaaaaatgagaacaatctaggc

SEQ ID NO: 26479 - DNA, 1179 bp, Homo sapiens
gccactatacccagataattttttaaattttttatagagatgcagtcttgccatgttccccaggttggtcttgaactcctggcctcaagcagtgctcctgccttggcctcccaaagtgctgagattacaggtgtgagtcactgtgcccggcctcttaaaagttaaacatacgtttaatacatttacctggtatgacccagaaataccacccttaggtatttaccaacaagaaataaaaacataggttcacaaaaaagacttacataaagatgttttagcagccttatttttaaagccccaaactggaaacaatccaaatgtccattaacaggagaatgggtaaacaaattatcttaaaatgtcatactacttagcaataaaaaaagaacaagcaactgattcaggcaacaatattgatgactctcaaaaacactccaagtgaaagaagccagttgcaaaaaaacgactttatcctgtgatttcatctacatgaaatccagatactggcaaaactcctctatgatgacagacatcagacagtggttggagagggagttgacaggaaagggacatgagggaacactcgtggaagggaatgtctcatgtcttgttttcagtggtggttacacaactgtatacaattgtcaaaactcatgaactgaacacttaagatctatgtattttattctgttaattatatctcaatttttttaaaaagcaaaacaatctaccttcccctgctaaaatgattacacactgatgaataatccaagatggaaacctagaggatgtgagaagatgttgtaagtgagatttcttgggagaaggtgatagctgcctccaatgtgcacaaatacgtctgtgctataagaatccctagaaagaatgttacagagagtgacctcgagtcaacaacctactaaggaaatggaaatggaaagtactgtatatttccacttctgtgccagcagatctagggacatcaccggagaggccattttagagtgactagattttggtgagggtgggggagagatggggacaggctttgctagcagtaaatatggcgaccctcatgcctcatccagtggagaaggtggtacatggagatccttcctggggtatttgaggtgttcttcagcttgggagtcaaacgatggatgaaagatcagttggtaa

SEQ ID NO: 26480 - DNA, 1046 bp, Homo sapiens
tgatatttgtaatatcgtcaactttacctttgtcttctcaacaacaatttcgtttcatcatccaacaggtttttgacaaatgcagacatttataaaaagaaaaatttgccagaaaaatgtattttcaagtcactagctgaaatactcccacgactctctttgcctcctacaaagtacagctctgattaatttcattgtttctaaaatgacattcttttaaaaaggtgcctaatctcagcctctttttaggtttcattccatatgatcatttgtatacttctatttaaaaaacaataaacacagaaagaattacctatcagagaactggctactagatgatgtttttctcatgctctatgtgatttgttcaaaaattgggtataccttaacttataagtgagttgcatttccaacaattttattccaaacagttcgcttgtcatttggttatttaaaacttgaaattcatttcataaataaatagttatccttaatgatatggtccccagcgaacctgtaagagtctgtaaaagtaacccactttataattcacgtatagttctctactaacactgccattgaaccaaatcaccacatcagatgtttcttggagagaggggtgagttttcagagttagatttccaggaactcgtctttgctttctttgggtgagtgggaagacagggttcttctacaatctttcaacaaggctttgcccttttatggcaggggaggggtttcaagaagatgggaggtgcagcttgtgaagtcacagggatcagggagtttgtgctggagcttcctctgggggtcccctgagagccctcttcacttctagacccactcacctgttttcttgtgctggcctcagagataaactcgttcccttttccccctaattaaaataaaatcttttccttttaagagccgagggttcctagtactgcttctcatgctgagcttaccactactagattactacagcctcacagcttttctttactctccttcagccctgaatcaagcaaacatctcttgaggctggc

SEQ ID NO: 26481 - DNA, 1066 bp, Homo sapiens
aagaaggcactgaagttggtaatgtatgtattttaaggattgtcatcagcactgttgaacattcacaaatggagacattaccaatgatgcaaatctaggtagacagggtatacagaacacaaggtatacaaagtatctgtacaggttagtaggcacttaacaaatgtcagttcctttatattcctttggtcttggcagtctcatgacacctctctgtcttttgccacagcacattccaatatatttttttctgtttgggtatgtgtagtaaaatgcaaccaacttctttggttcattttgttatatacctactgcctctctttatacctctcttcataccatcctttcttattggattattataacagcctttaaactgcttccttgcctctgaatttgtctcatatccaatctgttctcttcactgcaacttcccctccatcccttcattctcagagtagtttttctaaaatactaatctgaccaagttaccttcctaataaaatcttttgatggctctacaagcccctcagatctcagaaaaggcttattagactgttcatgactggcccctggtcatctctccatgctcatctttcactccatactctggctataatgaactttgtatagttctccaaaatagctacactctcttgtctttgcacctttgcacctgctgtgcagactgcctgaagtgtcccctcccattactctttgcccaactcttatttgtccttcatatcttggcttggacataagtttctctggatgactctcccatgactcttggatgccctgagaactgaaacacactgttatatagttatgtgtcacttaacgacggaacattttgagaaatgcagtcttaggcaattttgtcattgtgcaaacatcatagagtgtacttacagaaagctagacagtatagtctactacacacctacattatatggtatagcctattgttcttaggctacaaacctatacaacatgttactgtactgaatactgcaggtaacacaatggtatgtgtgtatttaaacactgaaaaggtacagtaaaa

SEQ ID NO: 26482 - DNA, 1030 bp, Homo sapiens
tctgtaaatacaccgttaaaacagtcatgcaaatttgtgaggtctgtatactgagaggaaattacactaagcctgtataaaccaagttattggaagataaataatttggtgagatacataacaacatgggattgaactaaatttgtttgagctctgtagattcacagctttagagagacattgcttctacagaattggttaatgaagcaaaggctggtgaatagttaataaattgcttaattttgatgctgatggaacatctgaatctccacgtttacatgaataaatataaagttaaaatttgttttgctgttagataggttgctattttaacagattcagacacaagggaattttccaaatgccagctaatactgtagcatcaagaagtctgtatatgccaagggcagaggcctgcttagtggttttccaaagagtggaaagcagaaagcattaacatttacttacacaaaatcctttatgtaactcttctaagatttttcaacttaaaaactttaaaacgttctgtatgattttagtagatctgaagtttgcattcagctattctattggtatgcctgggcatattctaaaaggaaaaatgattcactctgcacttgtgtagtttttcacatgactaggatcaatgaggatggtataaaaataccaaaatttactcattttaatttcatttttgtgtacttttatcatgaaatattacaaagcagaataatataaatgaaacctttgtgtatatatgactgagctttagcaaaccttattttaaattgattttttaaaaaggaacaatggtgtgtataaagttatgcaaaggtaggggtcagcagaagaaacaattacactgcacaggtttttagttactctggaggtccatctatggcttacggggaaggaagttttatgatgtttataagggtagtttatgtaaacccgtaacagtaaaaatattttaatggtaggaataaaagtgccttttaagtgcaacaatcagcttttacggtcaaaaagt

SEQ ID NO: 26483 - DNA, 1050 bp, Homo sapiens
catttcttggggccaagttaaacttattcagggttttggttgatagatcataatgactatgagagtggtttggatcttttgtttcatccagctactgcaaaacctttgtcatggcaacattcaaagattattcaggcattcatgagtcagggcgagcacagacaagccctcagatatattcagacaatgaagccaacagtgtccagtggtagcgatgttatccttcacctcactgttttgctttttagtaggtgcatggttgaagcctggaattttttgcggcaacattgcaataggttgaatatagaggagttactgaagcacatgtatgaagtctgtcaggaaatgggcttgatggaagatttactgaagttaccatttacagacactgagcaggaatgtttagtgaaatttttgcagtccagtgccagcattcagagtcatgaattccttttagtgcaccatttgcagcatgccaattatgtgcctcccttgaagctgaaccaaactctgaagattaatgttatgaatgatcgtgatcctcgtttgcgggagagatcactggctcgaaattctatattagaccagtatggaaaaatccttcctagagtccatcgaaaattagccattgaacgagctaagccttatcatctgtcaacatcatcagtttttcgattagtttctagacccaaaccattatcagcagttccaaagcaagttgtaacaggaactgtgttgacaagatctgttttcatcaacaatgtgttatctaaaattggagaagtttgggcaagcaaagaacctataaatagcaccacacctttcaatagttctaaaatagaagaaccatctcctatagtgtattcgctcccagctccagagctgcctgaggcattttttggaacaccaatttcaaaagcatcacaaaaaatttctagactgctagatttggttgttcagcctgtcccccggccttctcagtgttcggagtttattcagcaaagctccatgaaatctcctttgtacctagtatcccgttcactgccctca

SEQ ID NO: 26484 - DNA, 1047 bp, Homo sapiens
agaatatatgaatcagtcctatagaatgttaaatatttataaaatggttctgtagtacaccaaggttgggagcacattcattccttcttgttgtcttatgatacaaaaaaaaaaaaaaaaaaagcaaaagtttatttctgggcttaaaactctccctctaatatctctctctcttttacccccattccccaaccattcttctctccatccctctcctctcctcttcctctctcttctctctctctctctctctctctgtctctaactctcgctctctcttgtatgtgggtgtgtgtgtgtatgagtttccactgtggattatatacacttgctagagaatattcatttcttttttttcttttttcatctgatgtatattcaaacattgttctttataaccatttctacctcattgctacatattgtacatgtagtatttatttgttgtctttttttgaatgtcatgcatttcgtaagaaaaagacttgtccttgaacttgaacagtctacctcagaaagactgtctttacactgaacagtattagcaacctaaatgataagacgcattagtgaagtgtggcagggtagataatgcacgagtacttgggatactgatggacttttaattgtattcataacacaagactgcttaaaagaacttaaaagaaattatgcactgtgtaggtcttcatcgaggtcccatttgggacattatatacagaatagagctttattcctatgtgcccatctctgagaaatgtgttagcattcccaagtattttacactggcaatctggctacttaagacaaacaaattcaaacaacatttttatattttgactgacaccctcagctcctaaatttaagagaaataatggtacttaactattttcaactatagtcttcagtgattgaaaatgccttcattttaattctgtgactcctgatataaattaagaaaaacaatgcagttgcaagggcctgcacaacactgaaaataaaccaaaaattaaaaatggcacttcccaaaggaattaacaaacgtgg

SEQ ID NO: 26485 - DNA, 1133 bp, Homo sapiens
ctctgaaattttatgatgcttgatctttactcccctttttttattttttatgttgctaaaaactgagcaattgaaccagaatttaatttactgtgacattctgtcaattaaagctgtgcttaaatataaatattccatattaaaaagcagtgcctttcattaaggatacaaaaaataatacttaaatacgccctctgcttttcgcaagtgaataaatgctacaatcgtgttctgggtctaccctgtgcatcccttgtaaggaaattctaatatccacattaacttgtaggttcatattgatctcactgacaagtttacttttgcacagtgctgacctattttctgacttttagacattatatttcatttccgccaacatgctgtgttcacttgaaagcgtctggcaagttttgacaaacccagtcttatttagacaactttggaaaatccaatattgacccacatttttttgtggctagtaagatttaatgccaaatatatgactgcactattgtgttttacactcatttataaaactgaaaataaattgaagtcatacatcttggcttttagctttaagtgacttaaaaattagaactctgagtgacttaaaaattaatttgagatgcaagtggtcaaaaatccatgtatttagacagaagctgaagtcgtatgtgattttcatttagcctcacaaaatccaagatttgatctcttaggaaattgggcatgttgaagaaatgaagatctgttggaggagatatggctgacctttgagtagatagtgctctcctgtgattctttgattctgcatggcagcattatgagctcttctataaactagcttaataatgagctctattctgaccatctattctggaacttggagtgggggtggggtaccacatcctcagaagtgaatgtgtacagtcggtgatagtacaactgagtaatggggcttcatacccttggcctctttttgactgctaagaatttggagaaggctattaatgaaggtaaggtaatgagccagtccaaatccctcactgtctggctaagagattgagccattccactttacagcccctaattcccttcttcccaactgcagcaacatttccaacagggacaaa

SEQ ID NO: 26486 - DNA, 1031 bp, Homo sapiens
cgcccaggctagagtgcagtggcatgatcttggctcactacccactccatctcccaggttcaagcgattctcttgtctcagcctcctgagtagctagaactacaagtgcatgctgccacacccagctaatttttgtatatttagtagagatggggtttcaccatgttggccaggctagtctcaaactcctgacctcaagttatccacctgccttggcctcccaaaatgctgggattacaagcatcagctaccacccctgtacatttgtatattgtgtaaagtggagtccaacttcgttcttttgtatgttgctacctacttgtcctatcaccatttgttgaaaagactgtttttgctcgattgaagtcttcatgttctggtagaaaatcagttgcccataaacatgcatttatttctagactctcagttctattccattgatctataggtctgtccttatgccagcatcaccctgacttgatcactgttgctttgtagtaagttttgaaattgagaactgtgactcctcctgctttttttaaataagattgtttttactattttgggccctggcaatttcgtatgaattttagaatcagtgtatcaatttctacaaataagtaatttgggattctgatagggattgcactgaatctacacattaatttgaagattattgccatcttaacaatattgagtctttcaatccaggagcatgagatattttttccatttattttgatctttaatttctttcaataacattttgtagttttcagagtatatgttttttactgaattttttaagatttattcttcagcattttattatttttgatgctgttatacatgaaattattctcttaattttattttctgattttatccaacatacaattaatgaggacctaccatggaccaagaactgtcttagctgctggtgatacaaacatgaattatcttcagcacctgcccttgaaaacttggagttttggtaggatccataatgaagagtctgccatacattatta

SEQ ID NO: 26487 - DNA, 1081 bp, Homo sapiens
ttgggcttaatagaaatagttcagcatgttatattgtgtgatctgtccctaaatagataaaagatttctgtgttttgaaggaaacatttatattggttaatttgctgcattgcctgcaggaatgttagtctgtaggaggaaaacaactgtttcctgacaaaattttccctaactctgctaaaaactcatgttttaacagtaaaataggaataatccataaacaattaaagagtaatatcttcaagaatgtttactatccctcagaacatctaagattgtgagacacaaaggtgtcctttcttacatgaagaatggctcttccttaattccctcttaagccgcaaggctatggatggagtgagcatgcaaatgtgagcctaggcatttactccctggatatatagtccctgcctgctctttgagagccactagtctaacgacaatagaaagagaatgtgcactttcctttaagaaattaaacagcactgtccacaatgtgcaaaagactgtgaaattgaaaatgtgtccctggagtggataaaaaaataataataagtggcaactcacaaacagactcttggcaaataatcaattatcttctgaattactatacaaaactatagttcatttcaccagcccattggggaaacagtttccacacaggagacagtcagcttagattggggagttgtttacaatttacttccagggtatcttcatgtaaatatcaacagaccatagtactggtgtgacgcaatgttagaacccacgttattggtttgttgaactaactacgaaatagcaaattcatttgaaggaaatctgttgcttgttgcatttttgtggctagagtgttgactcacatagcttaatttttaaatctggagtaacagttaaactttcctgaagattaaagataggtttagtagatttttgctagggcagcgctgtttcatgaacctgagttgaatctctggcctacgagtagatttagagctggtttaaatataggagaacaggaaaagaaatgatgctttactactggctgcccttataaataaaatcagtagaattaagactg

SEQ ID NO: 26488 - DNA, 1111 bp, Homo sapiens
tggatagataatgggaatcaccgtgttatatagtagttccagttccagactgatcttgatgctatggttggttaaatattattgatgagctaattatgctcctaaaacaaaccaacagtattctttaaaaaggactctccaaaaataaacagaaatacagacaacagtcttgtcgtaaaggctaatgtctttttttctctttgccaaatttgttttatgtattgtgcatatatatcaaaagaactgctttagatcaggtgtttaatgtattttgaggaagatattaaattgctgagaatacttcattcattacaaaataaatatacattgtggatgaatttaaaagctagacttttaataagttggtgaggtgacaagtatgttaactagcctgattaaatctttctacaatatatacatcgaccaagacatgatgtcatactgcataaatatacataatttttatttgtcaactaaaattttttaaaaagcagacttttataagtaagctatcgataagctaaacactggaaaagatgacatgtagaataattagaatttgaatgtgaggctgtttaaataaacatagacagatctggactcagaaatctatgttcatatagcactacatgctgtttagttgatgacttcattgcactatatacttaccactaactccagtgggtagctattttgcactgttaaggtacttgtttctttgttgtggggggtttgtttttttacttctaagtgaccaacactcatttaaaaaacctctctcactctattattctaactcaaagttgccagccacattgtgtgctgtagtattaacacagcatcactttagtatttgacataatgctttgtggcagctaaaatttaaaaaggatcacatttattctaatatcattatagttattgtgatgtacccaagcagatcactctagttttgctaaagctgagcttgctgtccatcagaattaccttcttgcacatctttttctatataataaaaaacataaatcttgtaatattaattcttgttttttatttagatacttcattgatgtaaaaatgtttaaatatcttttggtccttggaagagtgg

SEQ ID NO: 26489 - DNA, 1011 bp, Homo sapiens
ttgtatgtatcttaacaattgagggggactgacataactggaagaaaagtgcacatattttaatgttggcatcacccaaaacaaggacatctttagctgctagattgaaattatttacaattttgcacttactttatggtaccaagtacaagtattctagttacacttgtggttttagagagtatttgctgctcatttggagtctcaaatgcaaaatataaccctgtagctattatgtgggtttgcgacactcccatggggaccttgggctcataaaccagcgaatggattatataatgctgcataaatgctgtatttttcatctgacagacataatcttgatcctatatttttatgttgcctaactgcttcagaataccacttttgaagcaacccatcaaaatggaaattgcttctaaaacatgtagcaataaatattggtcaaggctctgtgtaattcagattgactcaatacttgaacactactcgattgaaattctctactgtttttaaataaaaggttgataatttccattttatggtattgtttgatccttttctttgttaggcatatatttactttgttaaaattaaaattttattttctgattgtctaaggcatgcctgatagtcaatcaagcatttcagtaggtatagataaaatattgagaacttacattgaaagttaaaccacatatggatcaagacatatatgtgatatagatcaacaaatatatgtggtacctatgaaaccagatgagcatcactttcaaacttgcagtatagagctctgtgtctaacatgttatctgaaagacttgatgccagagctatgattttgctccagcctctcataatctcactctctctctgtgtgtgtttctgtgtgtgtgtgtgtgtgtgtgttcatttttgtttttgagataaggtctcaatccatcatccaggctggagtgcagtggtacaatcatggctcactgcagcctcgatctcctaggcttaagtgttgcac

SEQ ID NO: 26490 - DNA, 1066 bp, Homo sapiens
aagttgcagtgagtcaaaatcctgccactgtactccagcctgtacaatagtgagaacccgtctcaaaaaaaaaaaaaaaagaaagaaaagaaaagaaaaaaaattatgacacaatgtgcttagtgctgtgtcagggaaagcatagccctttaataagcgcttaaattctgttaatcctctgtatctatatcctagtctccaaaatggggatcatggctgggcgctgtggctcatacctggaatattagcactttagggaaccaaggtgtggggattgcttgagcccaggagttcgagaccagcctgggcaacatagtgagaccttgtctcttaaaaaaaaaaaaaaaaaattagccagacacggtggtgtgcaaatgtagtcctagctacttgggaggctgagatgggaagattgatgtagccagggagattgaggctgcagtgagctgagactggaccacaggactccagcctgggcaacagagctagactttttcttaaaaaaacaaaacaaaacaaaacaagacaacacaaaaacaataaaacaaaatgaggatcataacactatctcacaggattataagaaggaataagtgacacagtgtatgtgaactttcctggcactctctcaaaattaatgttgaatctccacaaagtgctctgagaatatgaaagaggaggcaaataactcctggatacttgcagcgatatttcatccaagaaagtgacattaaagttgggccttaagtgataagtaaacgattgtgaggtgggaaaacaggtagaataggttgctaatttctaagtcatttacttttttctagtctgtttcatggggtaccaggaaacactctgaggttcagaagcacctcaccagatttactcctagttttgttgaaatatatgattgtgttataccacctaacatctgctcttattaagaattttttcctacctaggaaactattgttaccattaacagtcttcttctttttagatcactgtttcttttcatgtctttattcagcttcttcatccaaaaacactgttttttttgttttgtttt

SEQ ID NO: 26491 - DNA, 1327 bp, Homo sapiens
aggccacaaatgaagtgacagaataaaatccattgaagatggaggtatatgtcctttaaggcttcttttggaaactaatgtgtttactgccattatggaagttgaaatcattgaatactttgaattggttttagaaaaatttgatgttaaattttgtatcaactcagtaaatgcttgctataacttcctgaccaaactaaagccccaaacaagcaaaataaataaataaataataaaaaaacttttgcctaagccctacaccagatcagttagatgagattttaaactcctcagatgattctaatgtaaaccaaacatttatatatatcaagagatcttaaaatttttaccttttaaaaaaatgtcattcttcctggtttgaagttagaaaaatgaagatatctattcagaactgaatatactaatgacatgtacagatagctcatcatccggctgaagttcaacaacctatctagacttttgaaaacatttctgtcagtcttgcaagaacatctcaggaaagtaacgatgatgaaggacagtgtcagcagaagcccacagtcgaagatcattttgttaccttgggtaagccattcaacctcactgagccttagtttttagtttacttttttataaaagaagagatgattgaggtgatccgatgatgactaagatttcttgcagttttgtatactccatgactgctttgtcatggaccagtgaactcaagtaacttggaccttgctagtcgtctaaaagatgcaaaatatttttgtttctcttaagaaagctccaaaaattatcttggaaacaatgtagaaagctcaaggaccatttattactttgttaagcccatcagaagagatgataagcattcattaaatatgcttactaattggttgcatgcaaaagtgtcagcaattctaatatcttaagagttgatgggtattagttagctaatgcttttctcttgtaagagatttcaatagagtggcaatcagattaacttaagcagtggagttagaaacctcaaatccttaaaatatttagtatgaaaggtggacttttatcaaactgaaagcaatacttttttcctgtactttatcagcaactagtctttgtccaccttctttttgcttcctggcatgttcttcttcgcttgttgaaatcctactaggactttggtatccaggtcagttgttgcatcatccatgaagccttctttgaggcaccctaattaggattgatttcgacgtctacttaattgtcccttagaacatttgaaatgtctcctttagatcacttaccatcatctttctcctactat

SEQ ID NO: 26492 - DNA, 1067 bp, Homo sapiens
tttaatgtcaccatgcttttttttcttttgctatcacttgtttgtatattgcagttttgattaatatattacttgaatccacttttatcggttttagctgtcatccagaagttgcacgttactagtaatgcactatatatatataactgctgaagtcaaatagtatgtaaattagttaaactcagtgtgggttttttttttttttttttttgaaggagggaggctgggcaaaggggagagggcaggagtgttgggaaagattactaactaatgaaagtgtatctatatatatgtacacacacaggaacaggactggatgaaaattttatttttctcaatctattaatgcagtttgactatctgctcttgatgtttgcactttgtggagtaatcagttcttctgagtgtggtttttttttggggggggcgggtaagtgaagaggtgtcttttacatgaaaataaaaattatattttgattgtccaaagtccttgatgtcttttaaagagtagggataggtttttcttccccctttccattcactcgtctgcctgtcagcgctttttacttttaacttgtgacagaattaaataatcaggcactgaaattgacttcgtttgaaatcgctctttcctttctttacaaaaaaaaaaagtcagttaaatggagtgagaggggattttcaatagctcttgtggcagtgccctgtgtacactttgtaatattcaattaagacagagggaacaacaacaacaaaaagatgttaaagtattttgcataaccaaaggatatgtccactttagactgttttttttttttttttttttggttgttgctatgtttaccccatgaccgttaattcctcctgaaaagagagaaagaaggaaagagagaatatgaaaaaagaaataacagtggggcaaagctgccaggggtctgtagtgtggccgtggtcactgctctctcctaacacaaatgtgaatacgaagagaggaactacaagacccgttgcgcgacatacacgtctggttggactctggtgactattgagctaaatacacaccacac

SEQ ID NO: 26493 - DNA, 1049 bp, Homo sapiens
aatctataaggatactaatagtgaaatccttgtttttttctctttgccttcccccttttcagtttcttaccaggcaatatcaagaaggaagccaaagattttgaaacttgaaatactaaccttccttatcacttcttcgagaccatctgggaatagtttttagattctgtgattcttttgttcccatttttttgtaggaaggattttacttgttcctaaaaaatgaggaacaaaacatcaaataaacattacaattatactaactattggccatctcctctaactgacctttatgacaacattgcgagaaagatttttaaagcaatattcataaatgcatactttagttttaaatgaaagctgtatattttttggtgacaaagtatatgaaagcattcatgaaatgctaataaaataataactgaaaaagaattatttattgaatttttaaagatttaacttacttttagctaatgcaagcctaattgctaaaacactgaaacttagaacattaatctgatgttataaaatactggtctggtttccgcaaaggcttggaaggcacacaggacttctaagtagaacagcatgagtaaacacacttgcctttttcaacctctcagaatggccctgagtatttctgatttaattttgatttttaaaaagactttgtgttttgaatttgaatacattttctcaggttgtacccagtttaaacagacaatatcagaaaatgtactatcttgaataccaaactcttacaaattggccaatttgtgcttatctttgtttgtgtctctaacttcataatctaagtgtattattgaggggctcagattttgtatgtaattgcttaatttgatcttaaagtatgagtgaagaaacattattgaggaaaggttgacaaagggaaatcattattttcttgtttccttctgaaaatgggtcttgggtgtgtgtgtatgtgtgtgtgtgtgtgtgtgtctgtgtgtaaatctaatatgacatgaaatctgagaatttcagacacattcacggttactacagta

SEQ ID NO: 26494 - DNA, 1062 bp, Homo sapiens
attttagagtatggtgttaggtaaaaaaatctatattttgtttactcgggtatagttagtctttttagaaagtcttattctttattgattttcagtggcatctgttgcatgcatgcacacacgaacacacgagtctgtcagcacctttttaaaaattggctaactacagttttattatatattagtgtattagtccattctcacactgctataaagaactaccaaagactgtgtaatttataaagaaaagaggtttgattgactcacagttcaactggctgtacaggaggcatggctgaggaggcttcaggaaacttaaaatcacggcagaagggtgaaggggaagcaagcatgtcttcacatgatggcaggagagagagagttgaaggggaagtgctacacactttcaaacaaccagatctcatgagaactcactatcacaagaacagcaagggggaaattcgccctgttcataccagatccctccccaaccattgggtattacaattcaacatgagaattgggtggggacatagagccaaaccgtatcaattaggtacaccaggtatgtgaagatccccctcattgatcttgtttgtctgcctttcttggctacaattgtacattttcttaactttgaaatagtttggctagcactgaaatgatctgttccttaaaggttatatagaatttttttgtaaatcaaaccgtctaggatttggccacaatttttagcagtatctctttgacaactgtctttcttctatagcaattaatttctttgaattttatggagtcaatttgtataaattatattgtccagagaataatctatttcattatgtttttttgcataaaattgggggaagtagtctcttatgattcttatcatttctctggtattatttcttattttgtatattttggtaccttctccctttttccccctagatttgtttcagtatttatctgttttattgttttccccaaagaccagattcagaacttattagttttatcattttacctttttttttcaagttttaatttctacttttatat

SEQ ID NO: 26495 - DNA, 1024 bp, Homo sapiens
cttccaatgtggaaagataggaaagggtagttgggaagtcctgaaggaatgcagtcctttagaaccacatgtttatttcagaaattatcatggcaaacactgcctttgaaaagatccttccagtgctcacctccttttaatgtggaccacagtgacgccatttcaccccgtctttcatgtgatgttttacttctgtgagaaaagctttatgtccagtgcacttttctttcccgttggttttgatatcaagaatgacaaaattcttggggagataatcctaaatgtcagttttcgattagtaagcctagcagatcttgcattggaaaaaataaaaatgggtgaagatctttgccttaaattctttattggagtttaaagtaattgatggcctgactccctccttccttcctttccttattggcagtaatattatttgttagtatgtagtatgaaaattggtagatataagcaatatgacattattaaagacaattcctacattaaagaagacaatgactgtagagacatgggggttcagcatgtttaggggctacattgttccaataaactgcattttaaaacaaattattaactgaaagacaacttccttaggcagaggaactatcttgaacaaagtaattcaccttagataatgaacatccagcacagtgcctgagacataaaggatgttgattactgaggggctctgtatttaaggatgtcttcacttgacccctactcttgcttaatcacttgcttgtgtatagaattctaaagtcaactttgaagacattgatccattgtcatctgtcatccagttttgcaaatgaaagtttttttgccagtctgatttcttgttatttaaataagacttttttgttttgattcgttgttggtttttaactttctctctggaaactgtgcagtttttctcttattgttgctattatgatagttcattaaaatatgttaaaaaattgtctttaaaaaataactatttctgctctgtacttaataggctcat

SEQ ID NO: 26496 - DNA, 1048 bp, Homo sapiens
tgggccttagagagtgggaagagaaaatgtatctaaacttatatctcagtaacagcttgataggacattgtcactagcagtgccaccactaggtcctcaccattgctgctggcatgaacagctaccactactatgactacttgacctagtcaagttttactgcctcctccagaacaacctctaactatcccaatatgtcacttactacagatccaacattcctgcattgaatatcctgttggtttactaagagacatgcctatatcttagttcatggggtgagaagagaggttaaatgttctttcccattccctagagggaagtggggtttttgccccaccacatttacacaacaaaattgctcccaagtagaaaaggggcttagattatatgtagacaaaaataaagcaaatacccactgaacatattaatctcattattcaataattaaaatgattgaatgggtgaattaagagtgaattagttcatataattgctttaactcttttcatttataaaataagggtttgacctatgatctctgatttttattataactttaaattcttttttaaaaattattgtcagccggacatggtggctcatacctaaaatcccagcattttggaaggctgaagtgagaggatcacttgagaccaggagttcgagaccaacctgggcaacagggagacactgttcctacaataaataaataaataaatatttaaaaattagccaggcatggtggtgcatgcctgcggtcctagctactcaggaggctgaggtgggaggatcacttgagcttgggctgtcaaggctgcagtgagccattactgggccattgcactccatcctgggcaacagagcaagactctgtcttaaaaaaaagaaaaaaaaatattgtcagtattatttgcagagtctcatccacatggtggagccatatgcccaggacttggcagtacccactgcacgaatatcatgaaactcctaatgaaccaagtgggctaacattttgatgttccaatgacttgttttgtgtgtgtgt

SEQ ID NO: 26497 - DNA, 1028 bp, Homo sapiens
aaatggcacattgaagtgtgattctcatgaaaatacctatgacatctacattaatacacactggaaagatagtaatcagtgaacttctgtgatttccacatgaatcaacagtggaacattgcttaatccaccactaaattacatcatgtttaatttatgtggaaatgtttggaaatgcttaaaatgtcagtggtaaatcattttacagtcttaattaaacacttttctatgataaattgctctataaacaaagtaaaatactattcttacataactatcaatttattgtgaaagacttcaaccccaaatcattatagtttcttctttgtatgagccaaagcttgtatccttcaaggattcattttcctgtcatgtggcaaataattttaatataaaatgcttatttccatcccatagctggttatcatttttttaaactcacagtatttatttcttaatatataaatatcataatgagttatagagtctccaaaaatgattaattcttaaactttgacactctttcccccaataataaggtactgaatgtaatatactaaagagtaatgttctcctcccaaactccattacttttattataaagaatatttaagaaaggagttcaatttcacggtagaaactagttgaaatgtaatttttatgtttggcacatgaaagattttatgttaagctgagacataaatgttttgaatcagaaaaatactatctaaaatcaataacttcacaggtacagtctctataactataaaatccaggaaatgagagtcccattagggtttaaatcactatttgattaaatgtttcaatcaaacccattttgtaatgttttatatgcacacttacctaaaatgtagtattattcaagagctatgattgctgtatgtaatgtaatttagttaaaatggatgcaaattcatatgattccagttacatatgaacttaaaattagatgtctgctgctttttgtatcattttccagaaaaatgagtcaacaaccaattaggaaa

SEQ ID NO: 26498 - DNA, 1070 bp, Homo sapiens
cttggttgcaatagcagaagaaaattacgcatgaatgtttaaagagatgttagaactatgttatattattcatgctataccttcttttagcacttaacataattgtagtgtaaaagctgtttacccaatttttcccatgagggtagactccatatctatcttgtttgccctctatccccaatccataacacatcataacaacaggagcttttgcccttaccatatcttcatctaaatgcttcattgatgttaatcatttaataaaaaataacagtaggtattattattacctctgtcttataaatgaggaagctgaggaacaagttatccaagattacatatctagtaaacagaaagccagaacatgaacccaggcattttgactctagagtcctcattcttctatattgcctgtcatattaggcatgcaataaatgtttgttgaaagaatgcatgaataagacagtaaattttggctgggcgcagtggttcacgcctgtaatgccagcactttgggaggtcgaggtgggcagatcacgaggtcaagagatcgaggccatcctggccaacacggtgaaaccctatctcaactaaaaatacaaaaattagctgggtctggtggtgcgtgcctatagttccagctactcgggaggctgaagcaggagaatcacttgaatctgggaggtggaggttgcaatgagccaagattacgccactgcactccagactggcgacagaacaagcctctgtctgaaaacaaacaacaacaacaaaaaacaaaaagatagtaaattttatattttagcttgactaaatgaggcatagaccattagaaataccaattctaccttcctacaaatcttataatagaggtactcaatagtatttatagcataataatatgacaatagccagcttcattcttgatgtaattgtagaattctctcaagtttctaaagagatattttttaaaaatttggttaggtttaatttgcccaaagttgttttcgtttccatttaaacatattctgccataaacaatacacaaatatataagcacagaactcttt

SEQ ID NO: 26499 - DNA, 1079 bp, Homo sapiens
ataaaaatagtaggctttgtgggctatgcctatatagtaggtgtggtcaccctactccattctgctgttgtaactaacacaaaagcagcctgagacgttatataaacaaacgggcatgactattttctaatacaactgtatttacaaaaacagactgtgggcccattttgacctgcacattgtggtttgctgacacttggtttagttcatccagtagagtgttagatctatgagaacagatatactataatacttgtactgtgattccagtgcctagagaatattcataacctttggatgattaaagaatttgtactacaccttttaggattttgtggacttcctatgcagatatttacagtctgttttctaaagccaaaaagtggtggtggtggttccaaatgcttcattcttatgagaactttgtaaccaattcataagctaaagactgccaatgttatattacaaataatgtgttgtgaaggactgctcttgggtaaggaaaggactcctcctcctgaaatttataatttggaaacaatttggtaaaaacataaaagtagttgttgaactgacactaggatctatgctctcttgactatcccaggactttttaactattacaattttgtctgtttaaatatcttgtagttcaatttttttggagattatttttgttgttgttgttgttgttgtttttattgttattattattatgacagggtcttgctctgttgcccaggctggagtgcagtggcgcgatctcggctcattgcaacctcaacttccagagctcgtgttgttctctggcctccacctcctgagtaggtgggactacaggcacacacccaccacagcaggctattgttttttttttttattttttgtagatacagggtcttgccatgttgcccaggctggtctccaactcctgggctcaagcagtcctcctgccttggcctgtagcttgacctgtagttcaatatttaagctgcttttccaaaaactatcttgtagacttgtttatctattgaagacaagcattctaagaaaatcctcaaaacaataacgggtaatga

SEQ ID NO: 26500 - DNA, 1121 bp, Homo sapiens
cccagaacagttcctaaaggaagcctgtactcataaagcagtccctccccattccctttcttcctcagcccctggcatctactaatctgctttttctttttttaatgtgaataatatgatgtcaccgattgcaaaataatggaaagaaactggtttgatctttcttgctcagttgatataaaataatgcttttctattcggtttgttagactaatttttcagttaggtgatttaaaaaacataattaacagttaatttagggatgaggagctctactgaagaattttttattaaaacattagtaattttattaaaggagcaagtgaaactcacaaaattaagaagaagtagtaataaaggccaggcattttcttaaactttcataatactgagaattaactgcaagaatgaagccagccatcaagatttttctcacttttgtaatttgtgggaatataaaattgcaaacataaaagtaaaagacaattcaaagtaatgagaattagaagtgttggctggataaaaaatgtcctaagttatgagggtaaaagttccattttttttttaactggatagccttctctgaggctaaagaaaaaacacttaaaagaaaggatagctttattccattttaaaaaattcaacaacacattgataatgtttttagggaagcatgtttacaatttctctaaaaagcagtaatgaggtttgaataccttgttatacttttgagatttgttgaaaatagatctactttattggttttctctgtgtatgtggtttctttatgctttgttttgtcttgagcaccttcacagataaagcctttgaaataaagtcaggatctatgttttaatttagggcacaatttcaaattaaatttgacttttagttcagtggaaaagaatgtagctctatagtcagactgcctaggttcaagtcctgcctccaaggtgtactactgccttgactaattcgctaaatagttcttacccttatcagtgaagtatcttgtaaagtatccataaagatatgtgtctgtggattgtgagaaaggggaaagagcacctcagcagcactttacaaagtgtctggtctgcagtaagtgtacagtgaacatg

SEQ ID NO: 26501 - DNA, 1049 bp, Homo sapiens
tttttcagtttgcctccctccccttccttcctccctctctttccctcctttaagcatgagttttagtttaaaatgttattcccaacttgtaaatctaatgggatgttgttcagggaattttatagactttcaaaaatagttatgtatcaaaatactgatacttcaaggactaaaaactctcagtattaaaataaactatctcagacttttaatttgttacagattttctatatctaaaacctgaacatatgtatgttctaactttatcagatcacccaatggaccttatttggaaagtcaacactgtctactgagtgaggcaatggaagctgtgccacaatcttctcttgatttcagcaaaatccctctctcacttcaatcctgtgctttttcctgctgtattgggccaagtaaactcagtttttccatatttccatcatctcttgccttcagatatattactggcaaatacacatacacatttggatgtatgaattgttcaatcttagcctacattatagaggtgcaggtttgatctgtggacttttctgtttaaagctattatcagaggacccattctgaaattatgatcgatgcttaccatgtgccagatattgtgccaaatgttgtgaggtttacaaagtggaaacattttactttttgtttcagtttcttaacaattttaatttctctacaaatacacttttcttttgtcactagcaattatttatgaatcttaatctgctatctaatttgagagttgactaaataacaaatataaaacatgctaagtattttacaactgttttgcttaaattttgttttaatttttaaactctaggttctaagctaaaatgaaatttcatatttacttcaaatgcagctacaaagaatcagaaaatacattttctttttctccttttgaatgcttaagcaataggacatgggattcaaatgactggttctgtccgtaggagcttcactgtagcccagtcttctttcagcttctggatgccattattctgccagaaatatacagcatatccaca

SEQ ID NO: 26502 - DNA, 1035 bp, Homo sapiens
agaaaaaatgactgatataattaagaagatatttagaaacgaatgtgcctaggaggaaatggaccaaaggtagaaggagttcttatccagttttttgagtctaaaagtcaaaatgtctttataatttccagcaagtatttttattgttgttgttcaagatactcatatactcaagcttttggtgttctaatattagtatgatagttgttatgagacttttttttatgactttgctgtgctaaattttttcccccatctgctacagtaaaaacaaactaaaagtatgagagaaagaagtttcccatgactatttataaaaggccaaacgtcttcagttttgaatacaaacttcatatctgaggaatgaatcctttggaaaagattctcaaagattggctagtctttagaaaaatgatagagtgagcatgggtaatttatttcatttaatttaagttcactatactgtttataaatttaaatattttaaaactgtttactttagatgtaagaaatctgtggagttgaattttggagcattttggcgaagtgctttaattggaattgtcggcctggcgcggtggcttacgcctgtaatcccagcactttgggaggccgaggtggttggatcttgaggtcaggagatcgagaccatcctggctaacactgtgaaaccccgtctctactaaaaatacaaaaaattagccgggcgtggtggcgggcgcctgtaatcccagctactcgggaggctgaggcaggagaatggcgtgaacccgggaggcggagcttgcagtgagccgggataacgccactgcagtccggcctgggcgaaagagtgagactccgtctcaggaaaaaaaaaaaaaaaatgtaaaggcaggagaaatggcctattaagctcaactcatagaaagttgaacacttagttctatttgtagcttgtagctatttatttatttatttttgagacagggtcttgctctgtggcccaggctggagtgcagtggcacaatctcggctcattgcaacctctgcctt

SEQ ID NO: 26503 - DNA, 1046 bp, Homo sapiens
aacctacccaattaagtaagatgattgctctcagagtcttatatttacaccctataccatacattgaatatgtacacactgtttgctttatagcaattgcctctgaggtaattgataaagaacacacatattctatataaagagaatctaaaagtcattcatttgtgtacttgcttatacatgatgttgctgagtaagaggtagcagtgagtgagctcttatgtcttcctcatcaatcattacttaaaaatcgtaaagcatggttaggagaagacatttaagtttactccaatgggagaggacacgaagtactccccccgaccccaaaaatcttgactttgaagatagcatttctagtttttattaatctgaataaaagctttgaaaatgtgatatggctttaattttttaacttcagttcttaaaatatgctgttttatcttgtttagtttttataacaaaatttgacaatggattatttttcagaacacccacttttgcaggaggacttttttccatatcaaaagaatattttgagtatattggaagctatgatgaagaaatggaaatctggggaggtgaaaatatagaaatgtctttcagagtaagtttatggaaattaaatatagcagatatattaaacaatgaaatatattgtgttctaatcggctggtacatatgattacagatgtgtgcactctactttttgtgctttctgaaacttaattgctggaaattttggaataagaatattttcttttaatatgtaacttaatatatttattcattgtcgccagtgtaacaagaggaatcagttaaactcctgtgtccaggcagtaacaccaattaatgcacttgtagctactgaattccagccaagataaatataattaaatctagtgcttcaggaaatgagttgatcatcaagggagttagaatggaaaaacatttatgaataattttaaaggacattggacttaactgtttggaatgaatgagcttgattttttctatacatattataagttaatataaaaaaaggcttt

SEQ ID NO: 26504 - DNA, 1091 bp, Homo sapiens
ccaggctgatcttgaactcctgggctccaacagtcctcccatctcagcctcccagttctcggattaccctcatgagccactgtgcctggtctcacctgggttttcatctcataggagctctgagagcttgggcaagttcctcaccttctgtgaacttcagttttcacctctcttctctggggaggtcttagaggaaagagactcagagactcacctgcaggatactcttaggaataatgctggtaagggagggagaaaagcaggattggactgcaatgaagtcacaaggaaggcttcagctgatccccaagggactgtgttgatgggatggcctcccatggcctccctttaaggcaaaggagacagacattggtttcccctgagtcaatctgccaggattgggactacataagaagagtgagatgcttgccttgaggacaaaatttagagggcgtcaaaaagctcagtagccaagataaataatattttaatgtattattattttttaaacctaaattaatgcaaaagtcagcctttatttaaaaatttcagtattttgttcagggtgaacttttgcattggttagtattttttaaataatgctttaaaatagagagtgttttggggagccatattggagcctcaagcaaagagaaaaatcagtcatattgattatatctttatttaaaattgtgatattttgataattacagaacctttgcattttttatttttaaaatattacattaaaatattgtttgattactgagtttttggctcctgcttaaatttagcactcaaggccagtttttcaccctagtcctggtcctgcattgtacacaggctgccccactctctcttcaggaggaaatatagtcttaatccaaggccagtgcttggagaggggtttagctatgagccattagcagccaatactcctggcatctggggaaatgagtgccttgattttgaataggggcatggtgcctaccatagtatccactgtgatactgtgatgtcgacatataataagattgttttgtcatatagtcattcactcattgggatagtaagattgtcatgaaggacat

SEQ ID NO: 26505 - DNA, 1024 bp, Homo sapiens
caatagaagtcataatgggtaaggaccatcatctgcaggtaaattattgttactcgtctttgacaggtgaaagaactaaggagcctaaatgttaaatctgaaatacaaactgctcaataaggattttactgaaatagagttttattttttctgtttctatacaaaactaaaacatgactgtttgaatcccattaaagataaagtctcactaattcttggaattgtgtgcatatggcatctgaatagttgtcattatcttcaattatcttgaccacacagtgcttgaccaagttttcttcatagtagcttgagggtacttgatgtgttaaataatgacctgtaatcacagttatctgtaatggagctagaaatagaatccacaaactagttcttatgtagcattttctgctttctgtatgtttttggggcatttatgtttatgcatcttatggtctaaaattttgttttcttatagaaggagcatatcccagcgctcttgggaatggcaacggcttatatgatcttgaaacagactccacgagccagaaaccagctgaagcgtattgcgaaaatgaattggaatgctattgatgctgaagagtttgagaagagttggctgctacttgctgatatttacattcaatcagcaaaatatgacatggcagaagacctgttaaaacggtgcctgcgtcataatagagtaggtgattgaagagtaaaaaataattattgacctttgttgcataagctttccatatagatattgttgagtgttagtccatttccaaggattcctgtgtgatttttgaaaattaaatgtttattcttaccacaatcaggaaacaagcattaataataagaaaaaagccatttgtcctttaaagtttaaaaaaaagaaagatttatgcaatttcaagtttcagctgtagtgatgccctacttaacggaaagtgtttttggaatgtcaaacgattgcctgtgattatccatctcatcccagaactaatgaaaattgcagaagaac

SEQ ID NO: 26506 - DNA, 1016 bp, Homo sapiens
aatgaagacaatgtgtttcagaggaagaggaaaatgtgaacaaagtcagggaggcagaaaaacatagggtatgttcacaatcctatttgtcattcagagggaccaaaaaagaggtatgtgacaagaaatcatggaagaaatgctggaagatacattaagcccaagctgaagtgtttccacttgctttcattgcatcaccttgaaccataaagatgagatgtttataataacagctgtattgtccacatccaagtcttgtcctttgcaatctaaagttactgcaatttagagttattgagagacagagaagttggctgtaggtcttaggatgtctgcaccagaaaaaaagacctaatgcagggattagaactcaggtttgcttttagaaactgttcttcagttcactcaggagtaatcaagttgtgaagaaccgatacgttctaatcaaactcaaagtgtaagagaggttatttttaattgtgtagtgtagagggaatgtgggaccttttcataggaccctcctcctcttaggctgtgctaggacctggctgacaaatacatagcaggcctctatcttctctcctctcctggcccacctgaggtgggctgaggtggggagagggtgaggctcagtaattggtaacatcccacacttcttcataacctacaaccagttggttggatttgacactcaaaccattttgccaccccttacctagaggaacagattatatcttggaagcttattgatagatacagaatttgaggcaaggaagtttttatatttctaaaagctgtttttataaaaccctgatgtattgcccttctctattccagagttatttcttacttccaaagatcagttggacattgaacattttaccactctccttttgcagtattccttatgagttacccaaatttgctatcttatagtatacttttattatagtaatggtatcaccgttcctcagtcacaatttcttaccctttgtttttgtttttattttgagaca

SEQ ID NO: 26507 - DNA, 1031 bp, Homo sapiens
ggatgcaggacttcccatgctaacagaaagtcacaggcaaactgggatgagttggtaaccctaatcctcggttactttgtccatacgtctttattacttatagtattttactaaaaatatttatgtgcatatttgtgttctttattacactgtagactcctcgagttcagggatcacaccatattcccaatatcagacaaaatgccacacacatggatgtggcaacatagatgtttattggttgaatggatcagtgaatgactgtaaaacaccaagtcaattaaaaacacagcaggagaatcgcttgaacctgggaggtggaggttgccgtgagccaagatcacaccactgcactccagcctcggtgacagagtgagacttggtctcaaaaacaaccacaaaattttaagtaaatttttattgtctatgtgatatttttaatcttaagagtttttaatcttgtgttgtatgctttattcttactagtaccttacatacttatccacagatctattttgttggaattactctaaaacatgcatctccgttcattttatgtgtacattattggttatcctcagtaactcatcttgtactttagattaaggctctattttagcttatttcagaaatgtaccatacaaatttgacctaatttaagtagttgaaaaattcctcttctagatctaattactgctctcacgacagattgccccttttctctctcagaatctccagatcgccttgagctttccccttccttcatactaattggttaacatgtctcctcagctctgtttgcttgatagctagctaacacatccagtctgtcgtatcctaacccactgctctaatgaagacccttatcacctctcatctgaactagtgcagattcccaactcatcttccagcttctaggttctggctgctccaggtcatcataggactagcatatcagttctaaaaatcaaaacctaccctttgcttaaaatttaagttagtgcttcaggataaagtctaaaatcatagca

SEQ ID NO: 26508 - DNA, 1048 bp, Homo sapiens
aatgaacattttatatttaaattctgatatcacattactaaattgtgattggatgaccattggataaaagttggttgggtagacagccattataagaagaagaaacagtgaaaagaataaagtagtgttctagtatcactttaattatcatactcattattaattgaaaggaaaactttgagggtctaaaacatgccgggatgaagagtggggaatgtaaaggtatgagacatttagtttagcatagtgagtgttctaccttctgtttaccactgggggaaatctgaattctttaaaaaactggtttacaatactctaggggataatgaaagtaattgaattgagcaaatcacaaggcaaatctagaattcgaacacttactgccttgactctgtcagttctagcaagaaactgtacctctcagttatctttcctttaacagatatatttctctgataaaacttttgaatagataatacccacttgatatgttatccatttagaattgtataatagtttcataattattttgctgaacaagagccattatttgcattgtctgttcatagatcccagggaaataaattagtattagttaagtcataataaaggtattacaaaataagttaaatcaaagaaattttagaaaaatgtatatagcttggttagttatactaaaattaatatatgtttattttaggtaaatattatttttacacttataaaatgatctgctgatttgttttgtttagcctgcaagtcctgggcaacctctttgtccacttctcaggcgttgcatctcagtcctggagactgtagtaagaactgttccaggtcttctgcaaacagtcttcctaatagcaaaagtgaaatatttgtcaggtagagtataccttaaaaacttttaacctttttattctgatgttgataaaaacaagcgtaaataaattaagcactgtgtatatatagagaatagtcacataaaatgtacattttatatatgcatagataagtaattttaatccaaaatagaattgcataacttact

SEQ ID NO: 26509 - DNA, 1066 bp, Homo sapiens
gttaaaaaaaaaaaaaagaaaggaccatttactggtcctccttctgctccctagattgacatagggcaagtccagttgcttagagcaaggatcattcctcattcattaaacagaccttcagatattggcaattagttttcacattccactaaacaactccaggtttccagccatttatgttttatatgaaatagttttgagaattctgtgtgtgaatctgatgatattctttattttgtctgtgcctctcattaagtttactattccaaacgtggatttgacctgcaagaactagagtagaccttttcctcccttattctggaagtccatccaactttctttttataaatcacattacattaatgacctctgttgaattaacagttaattaaagactttcagtctcttacttgttgtacttttggactcaaatgtaggactctacatttattcctgtgaaattttatcttttcagattcatctcataattccatgttatcatattccttgtggatcatgattgtcacctattttagatggatctttattgtcatctgtcatctgctttatctagctctgagataactattactataatgttcttttccaagcattaacagttttgagtataattgaagatgaaaccctatgttgtactaccagagatttctttccaaattgatgtggatttattagtcagcactcttattacagatagtaagcagatacagacatcctaactttattatattcagctcacattcagcacagggatatcagagcaggcactatcaagcgttccattgctgaaagcaaacttcttagcattgtccctgatctatagcttcagtaactgtgttaacatgggaaataaggaaaatgaccttcccttagggaacccatacagactttttgattatcatgtccttttttaggctttcattactatttattttttaaacttaaaccctcatagaattgtaccaggggttgacctcagactccccagtcataatccattttcccttgcttggaagttggaatacatttttttcagtattaatct

SEQ ID NO: 26510 - DNA, 1032 bp, Homo sapiens
tttatctttcgaaaaaaccaattcttagttttgttgactttttctattgcttttttattctctatttcacttacttagctctaatacttattatttccttccttttgctgatgttgggcttagtttgttctttttctagttcctagacatgtaaatctatattgtttatatgagatatttctttttataatgtagacatgtatctcaataagatttgcttttattactgcttttgctgcatctcataaattttggaaattgtgctttcatttttgtttgtttcaagatacttttaaattttcctattgattttttttctttgacccattgctttttcaagagagtgttgtttaatttccacatatttgtgaatttttcagttttccttctattactgacttccagtttccttccattgtggtcataaaagatatctggtatgatttcaacttcttaacagttgtcaaaacaaacttcatgacctgatatgtgatctatcctgagaatattctgtgcgcacttgaaaagatggtatattaagatgctgttgggtagcatattctgtgtgtttgtgatccatttggtctatagcgttgttcaaatccacagtttgtttatagattccatatctggctgttctgttcattattgcaagtcgggtattgatgtatcctactgttatggtgttgctgcatgtttatcccttcagatctgtcaatgattgctttacgtatttacatgctttgatgatggattcacatatatttataattgttatatcttcttgatgaattaactcttttatcttattttatgacctactttgtctcttgtgacagttttttatttaaaatctattttggctgatataattacagggtgtcctctgtgtctgtgggttttacatctgtagattcagccaatgctgattgaaaacactgtattcatggaatgtgaaatccacagatacagagggtcaaatttttttatccacaggtcctgcaagactgactgtgggacttaagcatcctc

SEQ ID NO: 26511 - DNA, 1034 bp, Homo sapiens
caaagatctttagcacaatagaaaatagtcacaattgttttgttctacctgtttctcacaggtaataaagagtaatgatagatgaatgctaggagagttttttgggttcataaaagagaacttgattaaggcactactgctacagaaatgaacttagaaatgatgtaatgataatggtgagggatcattctctctgctccccatggtaattcttcctgggtatggctgaccctctgctgctgagtctgcaggggctagtctagggatacagtgatgaggagtctaccctcgcctctgtctctctcatgtggtcttatccgtgtgtgaaaaggtgcagaaatcttcgttgctggtttgtattgtggcctatattcggaaaagtgtacttattttattttattttttatatttcctgtctccctatttctctaccccctctccccaccctgatataggtcctaaacctatttctggccttattattgagctcatttagttcagacaatcttacagcaattgaagaagaccctgatgcaaacaacctccagattgcagtgactagaattaaaaagggaataaattatgtgaaacaaaccttacgtgaatttattctaaaagcattttccaaaaagccaaagatttccagggagataagacaagcagaagatctgaatactaagaaggaaaactatatttctaaccatacacttgctgaaatgagcaaaggtcacaatttcctcaaggaaaaagataaaatcagtggttttggaagcagcgtggacaaacacttgatggaagacagtgatggtcaatcatttattcacaatcccagcctcacagtgacagtgccaattgcacctggggaatccgatttggaaaatatgaatgctgaggaacttagcagtgattcggatagtgaatacagcaaagtggtaagaatgcttcatatactttgtgtttcatattaacaattagtatgaaatgaatgaaaatttcatatttctattgtcataagttcttcttaacattgcatg

SEQ ID NO: 26512 - DNA, 1026 bp, Homo sapiens
gaaaatggaagctatatgaaagctagtcattgataggcaaatactaaatttttcaaaaagactatctcccactcagaggtatgtgacatcattgagattgatcatcttcctccatgctcagcacttggatggatagtctatgcagtgccaattaggtttacactttttccaagttcttgtttaaaaatgaataaaacctataagaagcacacaaaaaactcaggcctttaaatacaagtacagtgctctttatattaccctgtattattcaattattttatatttttgtattaaaatataaaagtatatatttgtaaaagagctgtcactgcttactaagcctaagattaatgcattgtatacacattatatatacactcagtttattttcaaggaaaatattacattacagtataattttaatttattcataattgttactcttttcccaaatgtatttatcagaaaaatggatttttacaatctcatatctagatattctattttccgttaatgactttgaattatcaaagtaatccaggttcactggagccacctagacaatacagaagggtcttaagattcctaatatccgattccttcatccctgcctaacctcttttccatcaggctccctccttttgaggtcacatatgatggggcagttccatctgctacctgctgctaagaaaacattgtgcaaagaagactgcctcttctcataggtctcctttttttcctattggtacaattcaaatactacaaaattcacaattttaaagtatacaattcagtgtttttcagtatattgacaaacttgcgcaacatcaccactacctaattagagaagtttaacaaccccaaatagaaactctgtactcattagcagtcacttcaatttccttctctccctggccccttggaaaccactcatctatgttttatctctatggatttgtctatttggatttttttatgaatggaaatatcaaacagtatgcagccttttgtgtctgacacttagca

SEQ ID NO: 26513 - DNA, 1033 bp, Homo sapiens
tggggatttgcctattctggacatttcataagatggaatcatatcgtatgtggccttttggctctgtgttctttcacggggttttcatcacatccatgttgtaacatgtacctatacttcatttgtttttattgctaaatactaattcagtgtttgaatatcccacattcctttatccatttattcattggtgagtaatgaggttgtgtttactttttggctagtatgaataatgctgctgaacattcatgtaaacgttcttgtgtggacatatgttttaaattcccttgagtctgtaccaagtagtggaattgccgagtcataacttactctttacctttcagaatcatcctacttttgaatgtgtatatgaaatatcccttatttttcactacattctttaaaaacctttatcctaactttggtttccatcaaaatacaggcatacttcattttatggggctttactttattgcacttcaagatactgcattctttacaagttgaaggtttgtggcaaccctgcattaagcaagtctgtcagcgtaattttttcaacagcatgtgctcacttcatgcatctgtgtcacactttggcaattctcacaatatttcaactttgtaattgccattatttaattattactgtatgtgttatggtgatctatgatcagtgatctttgttgttactgtggtaattgttttggggtgctatgaaccacatccacataagacagcaaacaatcattaaatgtgacgtgttctgtttcagcatccctatctctctccctttcctcaggcttccctgttccctgacacacaacgatgttaaaattaggccaattagtaacccattcccacccctaatgttcaagtaaaggaagaattgcgcatttctcactttaaatcagaagctagaaatgattaagcttagtgaggaaggcatgttgaaagccaagataggccaaaatctaggcctcttgcactaagtacttagccaagttgtgaatgcaaaggaaacattcttgaagga

SEQ ID NO: 26514 - DNA, 1050 bp, Homo sapiens
atcgctttgttggatgttcaaagatttggcaatttgtccttaaatatatgtttcaaataaaatatctacaattttaaggtgcttaagtactggtgaacatgtcaaaatgtgcctaatgtatttttaagttctgctgtgaacttaaaaactttgggatttgtgtaatcccaaattagagaattttaaactttagttggtgtccaccatattgtcccccttttcatccatctgaccaaacttttaaccttcctgtttatggctggggaaaaaaaaagctactttaattaaacctaagcagatagtgttgtttttaaattgtatttcgatgtcactaaaatggggaaacaggttgtaatagcagaatccttatattttttgcacatatcagcctccataaaaggatggaaattgctttgtttttcaatgttttaatttttttaatgaggagaaaaagagcaattgagagtgccataaattaaagatagcgtttctgatgtaaaatcaatgatagttatggattattgtaaatgtttgaagatgctcttggaacactgaaaaatcttagaaaattttgttaaataataattaaaattgtcttaaattagtgtgacatctatgttaaaggcaatataattagatagcgtgcttcttcaagtgcttgggttaggagaagtatttcaccatcttcattcatcaagcatttaacaattttatatgatgtgccagatatcatgttataccttggtgataatacatgcctaagacaaatttcctgtctatgaagtttggaatctagttgaaggagacaggcgtgatgaaagaaataaagcactgtagaagtaggataaaaatccgcatttaggggactgctggcagctcaaagcagactggagatatgggagaaagagaagctgatgaagggttgaatttatatttgagggaaggaaggaggcgaagtcagatcttttcatacaagaggtattgagccaaatattacaaagcaagtaatcaggtgatcaggatagttgaaactgttcagataaagggaac

SEQ ID NO: 26515 - DNA, 1030 bp, Homo sapiens
gggcagcagcagaggcggcggcggcgcccgcgcgagctcgcccagctgcactagccgagcagccgcggcggcagccgaagcacccgagcccggctgcgcttccccggcgatggctctggcctcggcgactgacaacgcccggcagccaatcgctgcctcgccccgctcggcggggggagaccaatcagagcggaaggcccaaggttttcctccgcctttgctcagcgggcttgtttccgggagaggcagcgacgctgctggggtttgggatgggggaggcgcgggaggggcgcaggatgggggactcgtggccccggagccttaggtgaggagggaaagccgggcccgcaggggtgggcctggggcgctttctgaccgccaggagcccgcggcttggcaggaaagggcgccgcggggtgactttgtccccagagcctcgtccctgcggttcagcgtcttggcatcgctggggcgaggggggagcggggaggggtcgcgggacccgagtacgaacggcgcggctggagagcgaatcccaggaggtggtcgccgccttgaaggaatcacgcgaacagtcaccagacagcgcccccgtccttctccctttggcagctgaaaagagtactacttcttaggcttcgaaccactcctcatagtaatcagccacgaagtgtccccagctagcaaagaggcacacggagaaatgtcggagttgtaggcagagtggaccttccccgtcttccctccaaataaacgcccctcacctccccaccccaaacgcaacaaacaaacaaacaaaaaaccttgagaatggggaaagataatttaagcagccaccctaattggttggcttcctttttttcctttttctttggataatcaagtctgaatgttctaatagttttttttaatgtgtgtttgactcaaacactagcgaagtaatgttatttagcaataaaagaaaaagaaaacaaaagccacaaaatgtttttctgcaccactctcccctaaattgtaatgatcttccctt

SEQ ID NO: 26516 - DNA, 1049 bp, Homo sapiens
aggagggtttctttgttggtatcagctgccagccggtttgagatccacttggcagagctaatttgaactggtttttggcctgatcttgcataggacactaacatcccaataaactgcagagattcaaatgtatttaccttcattcatcaacttggttattttattcaggaataaaagatcaaagtatttcagcagcgtttttcctcgtaagctgctgctgcgcatggtccctttatctctcagctttttatcattattttcatctcagtgcctttcattactttttaaaggaaaacgtcaggggcctgaaaattgtctaaagaacagcagtgtcatgatactgtggttctttacctccctgcacagtggtttcactcaggggagcactgggacactttaaaaaattaatgcctagggccgcaggggtgcgcctccaggaatgaatggttgttgagagcatgggctttgagtctagaccaggggtgagtctgcagcctccactgtgtgatcctgggcaaattaaccccagagagcctggggttcccaagatgtgaaatgggtcctgttttaggacctaatgtctggtcttacgacagatattcttatttaactgctcttggtgcagcctgggctttgggaatgttaaaaggacttcatggtggttccagtgttcagcaaaccctgagaagcattccacagggaagataataagtaggatttccattgttggtatggccaggggctgggagatcagattcttctcttcacttttaacaaagtggttcaggcatagagggcatttcagctcaactattatgtgctttgagtttgatgtatttttttttagtagtgttttattgttgtaaaccttgagacaggtctttatttttaagccatttttgaatggactacttggcagttttgtaagtaggtgaatcttcctgctttcaatgtggaatttttgaaattgcattagaaaaaacatgaaataagatacacttaatttgcctttgaagatagaatacaaattttgagaacatgtaattaac

SEQ ID NO: 26517 - DNA, 1011 bp, Homo sapiens
gggttgtgaattagtgtaggctagagctctgcttttgactgaacattagagagcagactggaaatagatgacccagaacaaggcagtaaatcatccacattaactgagaaactaatgaaaggactgaaatttatacgaagaatttatggccactcatgaaatcagcccaaatcagaggaactattagaacacttttatgttttaagaaaatgggtactgtgttcatttgctgtaatttgcatgtagtcagagtgccctgacatgataaatactggctttggtggacaggattttacagcagagctttgcactccatgagccaatgtttcttgcataaatgacttgatgattttagtgtctaaaatatgttcagaaaactgttgaaaggccacaggaagctttgcgatgataactattctggaattggtgccctggggtgtacccgatatgtgtgtgcttgcttatgtgggcaaaagaaagaggagaaaaagaggaggcagatgggaggagtgttggtaaaaatgaaactgcagatcactcagaatggaagtattaaaagggcaacaaatgaagataaaatgatgcttgcaattatggtttataaagagaaataggccatattgagtacataatttttcttttttctcctctgcagctgatggattaaatgaaataaactaatctgcagaaaatccatgtatctaggttgttgtcagtcgaccttagagaaaattaaaacttgcgcagatttcttactactttctacttaaatttttctacttgaaacacttttctcaaaatacttgtatgtgtactattttatcttaaaatttttttatcttaaaaaattcaggtaacttcaatacctaactactgaagcagcagataattttactcataaaaaaataaaaatgacaaacacgacattctcccataatttcttcagcagtaacttctccttccctaagcaatagcccttatttgactttcaggactttatacttcaggtgt

SEQ ID NO: 26518 - DNA, 1105 bp, Homo sapiens
gctcacgcctgtaatcccagcactttgggaggccgaggcaggtgcatcacgaggtcaagagatcgagaccatcctagcccacatggtgaaaccccgtctctactaaaaatacaaaaattagctgggtgtggtgtcgtgtgcctgtagtcccagctactcagcaggctgaggcaggagaatcgcttgaacccgggaggcagaggttgcagtgagacaagattgcaccactgcactccagcctgggtgacagagcgagactctgtctcaaaaacaaaaaacaaaacaaaagaaaaatatatatataatatatatattttaaatgttttaatgatgaaatcaaatatatagaaaagtgtaaaatactgtagacttcatgtagtcatcattgagatttcattgttgcttaatacctctcccatcatctttgcaactcctcttaaaatatttttccatctggcttctacttacccaatttactgttattctgtatttatatagttgatttttgtgacctgaaggatttaactttgttggggcccatccagagtctctgtagctgtactggagacttctctccagggagccctaaaactaaaaccaactctttctggcataatttttaagtttattaaaattctatgaaatgaacctcgaaagcattatgctaagtgtaagaagccagacacaaaaggtcacgtattatatgattccatttacatgaaatatccacaatggttaaatccatagagatagaaagtagatttgtggttgctgggagctgggaggaggtgggaatgggggagtgactgcttactgggtacacagttttccttttaggtgatgaaaatcttttagaactgactagaggtagtggttgcacaacattttgaatatgctaaatgccactaaattgttcacttaaaagagttgattttatgctatatgagtttcacctccacacacacacaaaaaacaaattctatgaaataatatttaaatgtttgcattgtagcattgtatatacatattaaaatcagtagtattgattttttttctttttcactggtaactacatcatgagtattattttctgtatactcagttt

SEQ ID NO: 26519 - DNA, 1042 bp, Homo sapiens
gctgtttgctctgcagagtgctgggaaaccaggcccaaatgaatgtgcagtgagagcacacgtgcacacacacacgaacacaaacgtaagcacagacagagcacacagattcagcattagtttgatcacacacctaagggttacatatattttttgaagttatttaagaacaatttatttaagaaagacagactaaagtaaaatgcatagaattcttgctttgacagaatatcattttttaaatctgataaaagcacaagagagtgcccatactcctctgcgccaaactcagaggaattaagcggaggaaagaattcctagaaaaaaaagaattcctagaaaactaaatcagaagcttaagctgtgatgtccattcataggattgaatcctctgccagcccagccactccctgtgcttatctgtctgcagattctaacatagaatgaccagctctccagggaaatgttggtagacctgtcatttgtaaagaacttccgatttggggatggggaaaaggagtgtttgaaaaccacctttcaaaatgtgggcaaatgttatttccaagaagttctagcataaaataacatctgtaatttccccaaagacgttctcagtttctgtgtcacatgattatgactcattgcagcagtaaaccacactgtaagccctgattttctaattaactttgttactttgtatttagttaggagttgtatatcctctttaaaaccattagtacagagatagaatccaattaagacctgtacttaacttcacttgggtgaaacaagagcttgccagtggattagttgtagatatctactaagtcagtagagtcttgcttttttcaattactttagattgccttgttttaatttatgttaatctgtcctttaactccagaatcaaatatgcttgcagattacactcagtctcgccacactttctgatcagtccctacttaagacaaaaatatatttctagtggaagtaaagtaggcttactttggtgcaggaaacctagtctttgtgatgacttaca

SEQ ID NO: 26520 - DNA, 1046 bp, Homo sapiens
ggctggtatctatgccaagtgattgatttcattttatttactttatttggaaccgttgaagggatgatgtcttcccaaaccattgtaataatgagtggtataagttagtgttccagaggccgagaacaaatttagtttttaccaaagggacaaatgttgacttttaaatatttgtcagaatcagatagtatattagtttgctagggctgccttaacaaagaaccacaaactgggtcgcttaaacaataggagtttattttctcattgttctggcgcctagaagtctacgatgaagctgcccaaaggtttagcttctcctgaagtctctctctatggcttgtagaagaccttcttgctgttcttatgtgatctttcctctgtgcgggcacatgtctgtgtcctaatctcttcttataacgacacctgtcctgttggattagggcccaccctaatgatctcacttaactttaattacctctttgaagaccctgtccccaaatacggtcacattctgaggtactggctgttaggctttcaacatgaatctgaactgtgtgttcagcccataagaaatgagaagggaaaaggcttcatgtggtggccacttctcagggccactctgtgttaataagagttgtgtgggcagaacagcagtggggcttaagaaggggcatccctgggaagcagataaggctgagcttcagatttcccttctcttacttgagggaatcttcagatttaaaaagaaaatagattttgtaaaaaactgacctggaaacagtgtcaggtatttgtcgtctctttaaatactgtcatgcaaatcataccccttctggtacccttgcccttctgggagatgtcaccctaaaaggggctttccaagctctgctctcagctttcaggcacccactccgctcttctccagggcaggccagaggagtttcagtcctgtgagtgttagtcattggagaaccatgtaaccccaacctccaaaaacaagcagatgcattttttctttctttttgccttgagagaatctttggatt

SEQ ID NO: 26521 - DNA, 1047 bp, Homo sapiens
aagtaaaatgaagctaaaatgagattttaaaaatatcttgagagtggaaagagaattgggcagggaacccagagtgatataattacaatcactgagaagaaaatttagccttcagcttgttagcaaccaggaaattatagttgtctatttagtcctcctctcttgacaaaagtagacctataggattaaaagattatatagcgaggcaagcttttgcttgataccaaattcaagtggaatttatctcttggttctttctataaagaaccttggataacatggcagagagcttgacctactgttgcaaaaaatgttcttgagttattttttcttagattgacactccttagaagtcaagggcttatcttcattgaattacagcatacaacataaagtaatttcttcagagcctaaaccaagttcaggtctgttttctttccactgatcaactctgagagaagatcttgagcttaaagttaaggaaatgtttttagcagggaaagaatagcagttagtccaagttaggagttctgaccaccatctaaagtacccatttgctgtatgttgactgaagggaattcttaggtttacagatcagatgagtaactagcagcattaccattctcattggaaaattcaaaaatctgatgtcacttagacagacgagcctccacttgcagacatactgtagagaaggaactttggggatagatcatgcatttttttttttaaagagccaataattctttccccaaatatacagtggacagcatacttgtaaaccatacagtataggagaagtgatattagcctgggcaaattacttttcaagtaggtgtgatcaatggcttcctttcccataaaccttgtgtatcctttggaacttttattattttaaataatataataatattttataataataaatagaataatattattaatacctctccaagagttggactttaggagttggaaggattgcatattttttaattatagcaaatatttctcaccagcaataatattagttttagcatattaatg

SEQ ID NO: 26522 - DNA, 1026 bp, Homo sapiens
attaaaaaaaggatgagttcatgtcctttgtagggacatggatgaagctggaaaccatcattctgagcaaactatcgcaaggacagagaaccaaacaccgcatgttctcacttataggtgggaattgaacaatgagaacacttggacacaggatggggaacatcacacactggggcctgtcatggagttgggggaggggggagggatagcattaggagatatacctaatgtaaatgacgagttaatgggtgcagcaaaccaacatggcacatgtatacctatgtaacaaacctgcacgttgtgcacatgtaccctagaacttaaagtataattaaaaaaaaaaaaaagaaatatcgaagtattagtcacccactagtaattaataatttataacaagtagatagctcatccttgtttcatttgtttatcatcatattctacttggttgatggaagccagtgaagactaaatgttattattaataatattaattaaacagatgtttaatctgtgcctgatttccacttggaactgtgttaggcactgtgggaatttcataaaagtaaagacagctcgctagctggatgcttttcatctctttgggggtcggggaaggggtggtatttgcaaggacagtttccttaggtagtgtttcctagcttatatagcgtcttaggttatataaaacttttcaactgttatcccattattgatcttcttttgaccagtggttttggaatctctttttgtcaaaaataataagtacatgttttatgactttctgtcaattttgcattatatcctaattttctacataaaaagtgaaattgactttatctttaaatttatagtttcatttgggttcatttaactgaggagggcatttgctaaggcttctattaaagtaacactcttttttatagtagcatctcagttaggtgacatgaaaataaacagttcacaaccctggctggaaacctttaaaaatgcagtgtctagactcaacccacagattctgatttggta

SEQ ID NO: 26523 - DNA, 1043 bp, Homo sapiens
gttctgtccagttttgctgttttctaaggctcttggctcccctctcaagttctgttctttaagccatccttctttttccacaagaaagagtcagtgtttgcagctaaggagccttctcagactgcttcctgccagcaaaagtttaggatctgaaggcctctttttattttgtattctgtttctttttgtctaacttggcagtattttgtagtacgatatcaaaaaaggtagtgggttttctgtgaatcttgttgggttcactccattagtgaagatccatgaccacaagatgctttgtctaccatgggttccctgtgagacagctaaggggcagtgccctgtgattcttggaatccctgttatttaatgcagaggttctgcaacacaaactattaagatcctcagaaggtgttaggtacgtttgaaggtgtctacaaggcaccaccttagacctttctgaattcttaaaaggttgtgcagtttcaccctgggtttgatttttgctctgaaaccatttcttggctcaagaattgtttgatgtgtggagagattgggaatgagaaacaggtttatatttaacagtttattctttagctcatctctctctgctcacatcttataggcagtgagcagaacccaggtgtcactttaagtggctgcctggaaatctctttagatagatcattgagttcattaggtgcatttccgcttcccactttactgtagatgtcagtgttgctaaactctctgtcactgcacaacagggtcctcctttcctctagcttccaggaacatttccctcacttttctttaagccctcactgacaaccttcttaaaacaacagtcatttcattatctcgcactgttgctatgtgtcaggcattcagaaagggcttgtcctgactcggggtctctcgtgcttgctgtcagccatcttggaagcaagtctgattgtcatagggctaattgttgctttaagtcactcagttttagggtgattagttacatgtcagtagtgactggagtgattaacatgctgatt

SEQ ID NO: 26524 - DNA, 1014 bp, Homo sapiens
ggcagagctattgaattttgcatgagcttcctgttagttgcagaacaagttgttggtgctgtttaaaagattatcagtaaagaagattaaggagattttttaccttaaaaagattaatcatgtaaacagaagcaaatggctttaaattaacattagtgtttcctatttattcttgggttattgccctgcactgtagtgtgtctgttttctgagttccttttcttccttcttaatttctgtgactttgaaatatcctggttagtgatcatggagcccactgttctttgtcacctagaggagattgttaattatgtgaatggccttgcctgggtaaggtccctttgtgggttcttggttgtatgtggtgttatcctagcatagaccaggagaggcctctgagaagttcctatctatcctaatccacctgaggatccaatttgatccttatattttaaaacataataactgacttctcttctgaaactttctttttcagggaaggactctgctgttagaaatgattcctttattttgatcttaaatttttatgaaacttgttaagcctttacacagtaacttacagtttgagtaggcaagccttctctagtttaaacacagtttccataattgtacccattctttgtagctgctcacttcattcctttacatttgctgaatttgccttgaatcttttccatatcaatcacttttctcatggagccaggaatgaagactgctattagccatcttgaattatttattgtaaaagggatgattattttgtcatacctgtgtactatttctatgtaaacatctcatttgttatttatatttgattcatagggcttgttttccttccaaaattttttaatctttcattgagattatttcttcaacctccatttgggtgaaatgctcttagattctaattttgttttccaacatttgcttatcttccccttgaatttggtgtcatctccagtaaaattttttgacatcttcaagaaaacagaa

SEQ ID NO: 26525 - DNA, 1892 bp, Homo sapiens
taacgagagagggaacaacagctgttaattgaatcaggtacaaattcccttacctggtgctcagactctgtggttggttgggcccctcaacaatctcacccagtacttccctgcttttaaaaataatggcctctgtggaaaagaagctgcttgtaggaaagaactctcagggtcccctgaagctatgggggctcctattgctccagactcccacccagccacttaggcatcagtgtctcttttaactcattgtagctacattttaggaagctctgaactctcaaacattgatcccgttactctctgatcaaagagagtcaatgttgttcatgcacaactcaggttccttttcaaagagaatagcagatactgtagaagtttgaggtaggtgaggcttgggtactcacccacagcttcccttacaggttttagagaaatcaactttcagaccaaattttgcccttcattagcaagcaagcccctaaacagttctcacaatttgttctgtaagctcaaggaaatcccagttctttttcctcataggtgaatgaaaaattcattagaggcagacatgccaagattccagatgcagtttttgctttatccttatgcttgctactaggaatccaaccatccacagaactggctagggtatagtctacagttggactggactggattgttttattctgttcatgcaagagtaaggagtatatctaaaatattttagccactctctggtgctaagaacctttattttcagcagtgaaagcccatttctaacatgtatcatacctctcaacaggtcactgttttccctaataataacccctttggacaatcagtcacctggcttatgctcatctatatttagatttggataatagaaatacttccagcagctgcctctggcatcctgagtcgagtgctatcagaacccccccagcactggacattcttggttagaatgccagctgaccacctaggttgtggtatcacaaacataatatcacatggcatatgttgaagtattttaggtacattttagacatcataaccacacagttggcagactttagttttgcggactaaattaggcaggagaaatcgcttttctatttttttaaaaatgaatttgttgccaactacagtaagaaagggagctttttcataaagattccaatgtttggcttttttgggaaaactgggatatccagcaatcctgggtctacatttctctatggcaactttcttctggtgccaagcagcaggggcctgccttggaccttggtgggagggtgctgacagtgggctccagggcttcacacagggcccagcactcctaaagtctcccgtcacagagactgagcatcaagggcccttgtcactgagactgtagctgttgtttttcaggaccctcttttctccattgtattcctgcctggctgctgtaggtgttttgagtttttgacccttgcagctgtcagtttttcttcttggctccacacttgtgctttgctcatgccgtttctttgtctggaatttgtttcctgttggacttgctcatccaagtcttcacctcatcttgaaggctggctccaagacccactttggagatagtcttctatgaccattatggttatagctcctctgcttctacacagacaatatagtatttgattttatacatcttatcctacttaggtgggaatattcttttttttttttttctgagacgggctcactctgttgcctagactggagtgcagtggcatgatcatggcttactgcgtcctcgacctcctgggctcaagcgattctcccatttcatcctcctgagtagctgaaattacagttgcatgccaccgcacccacctaatgaactatcatgc

SEQ ID NO: 26526 - DNA, 1033 bp, Homo sapiens
aagttactgcatgtatcatatgttgattacagatttttaggacatttaaatagtgttaacctgtgtttacattctgtggaatatgatttaacacttgattgtatgtagtacacttgaggacacagtagccagtctaggcccccagtggtcattaacttactgtccttaccctttgctggccatagtttgtatcacctgtaaaatgatgtgcttaggctctcaaatttccttgcaactctaacaagtggataactttaatagagaactctatgacccctgtgctcctgaactgtgcttctcacagtctttcccagttcttttagtgggagaaccattcttctattgaatgggccagaaatcttgatattcctcgatccttgtcgttctcttggaccctacatcctatccaatatgttagtaaatcctatggttgaccatatttcatcagctccctgctgtcatcctggtccacagacccatcagttcttgtttggattattatggtggtctcctaaaaggacctcttcttctgcctttgcccctctgtggtctgttctctacacggcatctggattaatgctgttaaactaagttgacttgtattatgcctttcctcaaaaccctccaaccccttgccatttcagagtgaaagtcaaaatccttaaggtggctcgtgaggccttacaagatctggcccctcattatgtcattgatttcaactcttacatcttcctcttcagtcaaatcggcctccttaccttgcatgctgctgccccgggatctttgcatgggccgttccttctttctggaatactcttttccttacctccttcagatcttggctcaagtgtcacatcagtgagacttccaggcctcatattgtaacccccccccaccccatattttgtattccctgccctgctctgttttctttattgtacacatcagcgtactctctatcagtggctctctcaaggtgtgctcctagagcagcagcagcagcataaacttgataaaaatgcaaactcttgtg

SEQ ID NO: 26527 - DNA, 1857 bp, Homo sapiens
atgttgaaccctaattaccaatgtgatggtgttaggaggtggggcctttgggaggtaataagatcatgaggcctaaaccctcatgagtagggccagtgcctttataaagaggccccagagagctgccgtgcccttctaccatgtgaggacacgaacagaaggcaccatctataaacaagaaggcgggtccttactagatagtgaatctgccgatgccataatcttggacttcccagcctgcagaactgtgataaataagattttgttgtttttaagtcacccagtctaaggtattttgttatagtaggcccaatacacaaagacagtgcttatgtgtgtgaatgtgaatttcccttccctggttttacataacagaaataaaaactggtactgagcgaaagcagcctggaactctagaaagttaccatcaaaatgcctcacgtatgtgcatccattcaaatcaagcttatgccctgggtttttcactgtccaaggtacattggtagaactttgggtagcatctcttatttactgggagggagataatatccttatcagccttgaatacatcttcattttaaatctgcatcttgaacactgaaaaccccatgactaaaagtgctaggaaaacatgcaatgaaacttaacttgcttctgtcacttaggcgttatccattaaggagctagaggaagatgggcaaggtggttgagtttttacacccatagctgctaggttctttcattttccttctgtggcctttggccctcataaagtgcactttgatggggagggtaggggtttaagagttattttttgtgttgtagggaagagaggctgctgctttgagcaaggcacccgagcagcgctggagtcagcttctgattagtgtgggaaagcgctgaaagccccggaggcatccaatcaggaaatgatgtcatcacatttatgagcaccttggcccagagcatgggctctgacaccagacagccatagttcagtcctggcattgctccttctagctgtgtaaccaagttatagctttagcttctctgtgcctcattttgcacgtttgtgtaatgagaatatactgcggcattaaaggagttaaaacacattttattttagaatttgctaactcattgctttcgtattgaaattgggatggtgtcctctaattacttagggtgtggtaagctcacggtggctagggaggtgcgaggccttaggcactccatctgacctcctgccgtgttattttgctcttttctttttcccatcagtttcctcaatatcaccagagtgaagaatctgcagtgtagatctgactgtatcttcctcttgcataaagtttataagcattgttgatggaataaagcattgttgatggaataaagctccagcttcctactaatggcagatgagggacctgcctgtttttctggtcatgtctgcaagtgctttctgctgtgacttgaaatgcttatagcttcttgttcagggttcccctttcttacctgagtaacttcttttcatgacttattcatgaagaattctttccttgagaaacctttcatgatcatttcctccaccatgcccacctgcaccaggttaagcccctcaccctggtggtttgcaagggttctggccatactctagctagcctatgacacagcactgacattgggcctttactttcccatcttcccttcagactggatacttcccagagggagaaactgtgttgttcatcgcagcattcccagatggtacctgatacatggcaggtgttcctgaactttgggtcagtgcactctgcctagaggcacgggagacaccctgtctcagcagcaggttat

SEQ ID NO: 26528 - DNA, 1052 bp, Homo sapiens
ggctattcttgacaaagctggtaggctggggatgcaatgaatgtcttttacatgaacacacaatatcaggtgagcacctttcgtgttcaaagcctctattttgttattggccctagagtaaccttaaaggcctgggataagatgtagccacgcccatattaactcttgctttacccatgtcgttgaaagtctgtctcagcaatccttttagctttcatggtttcttgggggagtgttcttggcattttttggctagacagtcattccctctactggagtgaccctgtcattgcagagacgcgtaagatgagcccacttgtacccatcacctagtttcaataattatcaatctttggcaattcttgattcatctgctgccccccacccccaccccccgactctggtgcctctcctcatcgtggaggctggattttgttgttgagccatctgagttagtgctttgtgtgtgcatatcttgtcctcatgagtggaccttatcccataggctaaggacagtttgaaaaagtacttcagttaaacaagtaacagctaagagacatctgtgggcaaagatttcaaactgtccagccccaagcagtctagttgttcagagtgcaggctctggtgtcagctgacttgatcgaaattctgaggccaccacttagtagctgtaccaccttgggcaagttaccaaaccttcttaagactcagtttccttaaagaagggtaaaaatataaactacttcatcttctttcatgaaatcaaggtccagtgatcttaacagtggccaacacataataggcaagcagtaaatatcaataactgctgttctaccatggctgctgctgctactgctgttgctactattactactattacttctgttactacgactaacaggatcacagtgatactcccttgcactgactggagatcatgtgaccctcaaattgtcctgcaagagcttcagctctgaggagagtttatgacttatcaaaaggtaatacttattaattatggaatttggaagctaacttgccattaatcttgc

SEQ ID NO: 26529 - DNA, 1047 bp, Homo sapiens
caaaagtgaattgagatagagtgacttaaaagagtgaactgaaaagatttaaagccgtgcccacttaacttgtgcatatgtgcatacaggccataatcctattgaatgatttattgcacttgaaataggagtcaggaataaaatgagaaattcataaaatgttaagaactcttattccaaaaggggtgcatgatacttcattgaaaatatgctactaatgttaatgagtcatgtgtcagtatcatatattgttcaaaataaatacaaggtgctgttcagcatagtaattgctcttattttatttcatgttgctaacacttgtccagttcctgtatttacaagccccacattttttagcttcctcttaaactaatcagcaaagtgcataaaaacccttaaagcaagacagtgttggtattatttctaaatgtcctttagaattatgcagttaggtcacctcctttcctttcaaagcatggatttactctaatcctgggaatcctaatctagtactagcagactccaaacttttgatcatcacttacagtaaaacatgtcatactaaagcttgggcgtaagtgaaacaaaagtttcataaagcagtttttacccttattacattctgatgcttcccttaaacaatgctggcctccacccagttagttgattttgtgaccagtggatcctcactggcaatttgaaaaaacaccaacctggtgcacagaatggtagataaggaataagtatgcctagggtcctaatcctgtgctttccaattgctgcaggaaacacatccctatccttcacaggaccctgttttctcattcataaagtgagggggtgggttggacttgatgctctctaaggtgcctttccacctttaactttgttcttggtctcttctatagttgaagggaaatctttggatttagagtagaatctcccaaactgtttaatgaatggttaaatccatccatgttgtgacaatgatctcaggtcacaaagcttcataattctgtctagagatgagaagtagccagtcgttcc

SEQ ID NO: 26530 - DNA, 1049 bp, Homo sapiens
gcttttccatgcttcaggcctcctttccagttccttccatgggggcctaaactcgattcccttattaggaggtgggtacctggccccttcggggataatttagggaagttatgccacctctgtggtagcaactgaaaatgtggcccatggaccagcagcatcacatcacctgggagcttgagaaatgtagaactcacccctgtcccatactaactaaataagcagcaacgttttcacagcacacccaggtgaccccttatgttgtctccacatctttcaatacaacacagtcctaacaccttagcccccagccccaagactaaaggagggaacattctcctgatgtcctgccaggctccgactcatggtattgtgggatctgcaggtggcctcacttaggagaaactctgggctggggctgctggaggcagagactgcagcatgctgctgcttccaccggggcttagcaggtgttccgtgcccttcatgagggtgtgtcttaattttccttctcactcaatgatgttctcagggccccctggggttgccaagacactacttttcactgcactggacatttgtgttcctgcagttcatatcctcttcccttgtggctcttattttctgccatcatttcagactatggcatcatgcccctgcttctgggtgagagtgtgtgaagaggggggggaagaaagacttctaccatgcagagggtgacctgacttcctgtattgcggttgtaacttaggggagggcctcaggttgtcagaggagacaggaaaagcaggagttgggttataagtgcaatcagatcagatggagaggtggcattaaagtgaatggattttcttttcctgtgtctgtgagtaggagaaatgttttagttacttgctgcatcatggatgtggtagccagggctgtttaattacctgagaagtggggctaattgtatcttgaacagtgagtcactttcctggcataattttctctgtgcccaatcattaccatataaaagttgtcagtgctggccctcaggagtgggattt

SEQ ID NO: 26531 - DNA, 1033 bp, Homo sapiens
tctgatatttggcacttcgttgattggtagaaaaatcgttttggccaggcgcggtggctcacgcctgtaatcccagcactttgggaggctgaggagggcggatcattaggtcaggagatcaagaccatcctggctaacacggtgaaaccccatctctactaaaaatacaaaaaattagccgagagtggtggtgggtgcctgtagtctcagctactcgggaggctgaggcaggagaatggcgtgaacctgggaggtggagcttgcagtgagctgagattgtgccactgcactgtgagactccgtctcaaaaaaataaataaataaaaaagaaaaattgttttacaaaaagttctggcacagagagaagttaagagtcagtaactttcttactgtttgtggatgtgtttgaacagagtagtgacttttggatttcatagtgacttcgtatgaaacctagagctggcagcatgaggattttctagatgaattaaatatgtggtatctttttgtagaactagctgtgtgatttcatgcggatgtgggagaaatgaataggaatttaatttgatgatatgaatgttgaattttgtggtccgctaaattttaaggattttatagtatttagaacaaaaggacaaaatagcttttggcatgactagtctttattttaaatgttttttaagttacaaatgtataatatttatgaatcaagtagatgaaaataactcccaactttcattgcccagagatggcctgtatggccagtttggtgtgtatccttgcagatgtttttctatgtatacatctacataaagatttttccaaaatgtaataattttacatgtaatgtggaaactatacgtattgttctgcaatctgtaaattttacttcttcaaagtaatatatatatattacttgggtattttacttctgtatattttctgtaaatatttttagtaaagtatacacattataaatattcacagctgtcattccaggctatttctcagagatccacctcctttaaaaatg

SEQ ID NO: 26532 - DNA, 1092 bp, Homo sapiens
agcaaaagaaaccaccatcagagtgaacaggcaacctacagaatgggagaaaatttttgcaatctactcatctgacaaagggctaatatccagaatctacaatgaactccaacaaatttacaagaaaaaaacaaccccatcaaaaagtgggcgaaggatatgaacagacacttctcaaaagaagacatttatgcagccaaaagacacatgaaaaaatgctcatcatcgctggctatcagagaaatgcaaatgaaaaccacaatgagataccatctcacaccagttagaatggtgatcattaaaaagtcaggaaacaacaggtgctggagaggatgtggagaaataggaacacttttacactgttggtgggactgtaaactagttcaaccattgtggaagtcagtgtggcgattcctcagggatctagaactagaaataccatttgacccagccattccattactgggtatatacccaaaggattataaatcattctgctataaagacacatgcacacgtatgtttattgtggcactattcacagtagcaaagacttggaaccaacccagatgtccaacaatgatagactggattaagaaaatgtggcacatatacaccatggaatactatgcagtcataaaaaaggatgagttcatgtcctttgtagggacatggatgaagctggaaaccatcattctcagcaaactattgcagggacaaaaaatcaaacaccgcatgttctcactcataggtgggaattgaacaatgagaacacatggacacaggaaggggaacatcacactctggggcctgttgtggggtggggggaggggggagggatagcattaggagaaatacctaatacctaatgttaaatgacgagttactgggcgcagcacaccaacatggcacatgtatacatatgtaacctgcacattgtacacatgtaccctaaaacttaaagtataataataattaaaaaaaaaaaaatcccaggctcgtgattctgccctaattcagtattttcttccacttatatcacattgtttccttgttggtggaaaggcagatgttagaaatattattgactcg

SEQ ID NO: 26533 - DNA, 1019 bp, Homo sapiens
tggtaccttcgctggcgctagggtaagggagccggagcactgagtgtgttctgatctcccagacctttataccaggctgccttgctgctgcagtgggttctttgatcttgattagtttgtttgttgttgtttttaaaatactaaatgatgtctgaaatgctttgtctcaagacagggctttgattttcatttcatttcactttcttttttaataaatagaaaaatgtatatagaaatgttcttttgtattttgtatttttttttttttgataaagggtctcactctgtcacccaggctagagtgcagtggtgcaatcatacctcactgcagcctcgaactcttgggctcaagtgatcttcccacatcagcctcctgagtagctgggtctataggtgcaaaccatcatgcctgcctaattttttttttctttttttatttttaagaaatgggggtctcactatgttgcccaagctgctcttgaactcctccgctcagcgatgctccggccttggcttcccaatgtgttgggattacaggcgtgagccactgtgcctggcctctttatatatatatatatatatatatatatatatatatatttttttttttttttgtaagagtcttgctctgttgcctgggctagattgcagtggcgccatctcagttcactgcagcctctgcctcctaggtccaagcagttctcctgcctcagcctcccgagtagctagtattacaggcctggctaatttttgtattttttgatagaaacagggtttcaccatgttggccaggctggtcacaaactcctggtctgaagtaacccgcctgcctcagcctcccaagttgctgggattacagcgtgagtcactgtgcccggcctcttttgtattatttttattgtggtaaaatatacacaacaaaaattgtaccattttaaccgttcttaaagtgtgcaattcagtagcattaattatatttacaagataaatactcttttaaatgtgctgtcatggggctg

SEQ ID NO: 26534 - DNA, 1054 bp, Homo sapiens
gtcggccggcgcgtcctcctgctctcctccgcagcatcatggcggagccgagcggctcgcccgtgcacgtccagcttccccagcaggcggccccggtgacagcggcggcggcggcggccccggcggccgcgacagcagcgccggccccggcagctcccgcggccccggccccggccccggccccggcggcacaggctgtcggctggcccatctgcagggacgcgtacgagctgcaggaggttatcggtcagtgcggcgggcgcggcggggccggcacaggccgggcgccgaggccgggcgggagggggcgcgggatgctgggctagcctgcatgcacgccctggaggcagagaggccggcttcggggcctactggcttcaacagttttttttttttttttttttttttttttaatttttaatgtatttgttcgttctatgagcgttggtgctgcaggaggcggcgcggcggatgtgactcgcactgcagacgagccgcatgctgcaaacttttatctcagggatcgccggggcggtggagcggaggaccaggcggcgccgccgcatcttcctccccccgcgtgccgggaccgcagcccgtggccggtggccacgcggacaggcagccgcgggtggggtgtggttgcgggggccccgccctgggtttccagggccccgggggccgcgtcctgggggactctgcgggcgcagccgctcctctgcctcccgtcgtgaccctctcgtcgtgggtaacggggccacgtagaagccgcggaggccccagtgcttttctgaggccggggaggatgctggcctctcttcctgacagccgccactccacgcccgccttgcagcccggctctccgcgccactcggcgcgcccgggtacccgcctccctccgtgccagggtgcgccgcctgccgcccagtccggctccccggggaaagcgggtgccctggcctcctgccctgcaccgggccgatgcttccctctgtttcaggccgagctgcaagagtgaaatccgaggctgccggtgatctgctctctgcctttc

SEQ ID NO: 26535 - DNA, 1032 bp, Homo sapiens
tgccaggagtgtgtggatggaggtgtgaggagaacggaggtttagatcagcttctggtgggaatcaagactgctgagcaggaaaccaggaagaatttgctgagcagcacagagcatcagctcaggtgatcatgagcgcttctatgtgagatgagaaaatgaatgccccccgcttgggtgttcagcttcaggattaacaaaagctgccagattaagcagtgaagatggcatgggtgtatgacagagtaacagccaaggttatggttaccagctggaggagaggagagagcactgtggatctttacttcccagggaagctgctgatgggggtaggaagaggaaattcaccacttagctgccatgcttttttctttattattgcatgacatcaataaagaatagcttctaatgagcactcagaatgcctaggcaggtcctggcactgagtattttaacagactgggttcgcctcttcggaagctgcctcattattcaatacttgttatgatcatttccaactgtgaagactgacatggaaagaaataagagtcttgtaaaatcttgctaacaatgaatttaagttattcaatggatatttcttcagatgaaagagctactggtgatgacaattttctcttcctttgtaaggggtttgcagtggtgctggttgcatttccttagtggagactcatcttttgtagaagatatcgactatttcaaaggttttcaatctgggacacataccacaagaggggtgcaagataatctattggggtgtaagcagaaaatgttcattttgttcctgtaccccaatattattcgtgttcattttgcctgaaaacacagttgtcaagcttactcttatttaatatatgagtctacactggtgctcacacatggacagttgtggattctgatatggcctgggggaagggtggggattctgcaacctgaaaagctgccctaggccctcactgtgttttcccttccagcatctgggacatgtggccattgacatatacctgggccatgt

SEQ ID NO: 26536 - DNA, 2964 bp, Homo sapiens
tttccttctcctgcctgattgccctggccagaacttctaacactatgttgaataggagtggtgagaggacattcctgtcttgtgccagttttcaaagggaatgcttccagtttttgtccattcagtatgatattggctgtgggtttgtcagagatatcctaccatcccctaatttgggttgatctcattggtgtcttgattgcctgtctctcttcttggaattgatctgtgttcctcatctcccaggctctgcttgaccccctcataggcctgctgtgttctgttgccacccaaatccagaggaaaaagacatctaagtcccactgctgttgtctaccagataactctgacttcaggcaagcagctgaacccaccttggactccgtctgtttctgtgacaccaggggttatactggatcatctctagggtctcctagaatttggaaactcctctaggaaccaaggagcctcttccttgtctgtctccacccatccatcttttttctgactgtttcaagctaataatcatgaatgcaaagtgctgtgacatgcaggtagaactccatccatttcaaaagaaaaacatgtaaaggtaagagcactttattcttatttgaaccacactgtattgttgattaccgagtgtgaaggtagtatgttcagagtcttgttttatgcctttgtagctgtgttgccagcatttgaaggtaactcctccacataagcggcaggaaaatggccttttttcccattcaaagatccaaaccaccatcctccttcttttttctcgtgtataatcacaatgtcacctgtgaaaatacagttagacaaatgggtctctgtgatgtgaacacatgcctcagcccgattgataagagttttaaggaggttctgcttcaaggatttacttggtagtgtcattttctgcacttgattcagatgaagccaaatgtatcgaacacctgtgtataaagcaggcataatccagaggatactaaaaagagtaagataatgaacaactgagatatatcataaaataattgcttaaagacaggattggctgggcgtggtgggtgacgcctgtaatcccagcactttgggaggccaaggtgggtggatcacaaggtcaggagtttcgagaccagcctgaccaacatggtgaaaccccttctctgctaaaaatacaaaaattagctgggtgtggtggcgcacgcctgtaataccagctactcaggaggctgaggcaggagaatccttgaacccgggaggcagaggttgcagtgagctgagatcatgccactgcactctagcctgggcaacagcaacagggcaagactctgtctcagaaaaaaaaaaacaggatcacagccaggcacggtggctgacagctgtaatcccagcacgttgggaggccgcgatgggcagattaggcagattacttgaggtcaagaggttgagaccagcctggccaacatggtgaaaccccgtctctactaaaaatacaaaaattagccaggcatggtggcacacgcctgtagtcccagctatttgggagactgaggcaggagaatcacttgaatccaggagacggaggttgcagtgagcttgggagactgaggcaggagaatcacttgaatccaggagacggaggttgcagtgagctaagatcacaccactgtactgcagcctgggtgacagagcaagactctgcctcaaaaaaaaaaataaaaaaagatcacgttggatcatatatccttatgctgcctggctcactttctatttctatgtagctgatggattgtcaccaaactctttcttggtgtccgtactttgagggtttcacatgctggtgtttttgattgtttggcgtgttggctgctataagtatgtctcaccaacagtcttttcttaagatcaagacaatgtctctgcattatccctgatttcacaggccaaaagtttaactcactcacagctttgcacagaaatgtaactccccattcaaaatgtaactccccattcaacaacttagacaactttaatacaacatcaatttggagacaatattttttaaagcaatgattcaaataaagagaattccatagagaattggacaagaaacatggctcttgtcataaaagtagaaagatctgcccccttcaggatcatctgcccccgtcaggatccaagagctactttttatttggcatcattctgaggtgatttttcagtcttcctttcactcttttcctcagcaactttctttctaagacaaaggaaattattaactccttttctatcttttctacattttcttagtcataaatcactattcttaaaggacattattctcggtctctaagttctccctcgtcagtaaattgacataatctattaacaagaattcaaacaaataatgatttcaaattgtattgccagcttccctaaggctccaacgtcgtgtttcatttaaagaaactgcttagaatataaagtataagtaggctttgcaaccaacagagaactgaaaacaagataatcaatttattgtgaatgatgtaacttaaatgctgcatccatgggttctaggtggcatctgggaagtatgtctgtcttttattcacataggaagaaaagtaattgcctggagagatatgactggcaaatgctgcaaaggaaacacccaataaatagcaaatgtgtggtgtccctgtcgtttggctacaaaatgtatcttgattttccattggctctgggagccatgtccttgtcgtggataatattctttctcccataacgttactctttctcactaacccttccgtttccagatctctgcattagcgctaacattcaaacatggtttctaactggacacataaagaaggttgaggctggagactttcttctttaataatgttgtggtttacattataaagccactacgtaatacctttccatgtt

SEQ ID NO: 26537 - DNA, 1077 bp, Homo sapiens
tataaaaataatgaaaacatcatttttagcttatgaaagttgtgtaatgattaatcatttcatactttgtcttaatatgtgatatatcttatacatatatcttaacccaaaacttagattcaaaagttttccttttctcagagaggaattttaaaaccccactcttgatggggatcaggataaagattaaattatttttgaaaaaggaacttttattatctattaaggagataagtgaactgatagtttaagatattatgggaatgtttaaattacaatgtgtagacagttttgagaactttggaagatactgtttacttattcacttatacattcatccattaatgcagtcatatggtcatccatttagttatcaaacatttattgggcaactattttatgccaggctctgagtaccaggccctgggacacaataatgagcaaatcagacacagtcattgacctttgggagttaaaatcttatagggaagagagacactagtcaagtaacaactgataggattatacattggatttatttattaaagtctcaataaatactaggcaacactttgtagtgttgttttatttttggaacattcttaaaactagtaagctgcctttcacaagaatagtctcaatgatttttttcactttttttttttcaaaactcaactctcctttccctgagatcagtgtgagtgaggtttgtctgtgtgtagaagtggaagaacttcctgtctgtgaggtttagcaaacatgggtggtttattagtgtaagtaaggacttaatgaagagtaagataaataccaacctgccttgaaaaagtccagacagcgttgtatgtggggttggaggtcttgtggtccagcagcccactgaaaccctgggaaaggcccatgcttgtctgatgaagtacattatatttattgctgcaatgctgcaatgtcattttagcccatatgatggtaacaggctattgccttccattactctaaatgtctgggaatagtgggatatgattttgactgatattcttctattttcacagatgatcaacctttcttaataactgt

SEQ ID NO: 26538 - DNA, 1075 bp, Homo sapiens
tagagatggggtcttgccatgttgcccaggctggtcttgaaacatgggcctcaagcaatccttctatgttggcctcccaaagtgctaggaccacaggcatgaaccactgtgcctggctggctgaatatgaacttttagactgccatattagtgcatcataatagttgctatttggaactgttgatgctcctgactgacccccacagtctctttaaaaaaaaaaaacaacttaatttccctgttgttttatactgtggttctctaatcagctggataaaatttccattgatccaaacacactgttaaaaaaaattcccaggttaacttgtaaaataccagattctttcatcttctgtttttcttttgtagttatttatttttctcagattgggagagcctttctggggaacctaagctggaaagggcattcatggatggcagcaaccgtaaagacttggtgaaaacaaagctgggatggcctgctggggtaactctggatatgatatcgaagcgtgtttactgggttgactctcggtttgattacattgaaactgtaacttatgatggaattcaaaggtaagaagtattttttatggcttatggctttataagttgcagggaaagtgcataaaatggctgcagagaaatatcaaaggaccagaattaaaatattgctttgttggtggacatgatagctttaatgacctttgtactgacatttgcatgaagtgacctgctctattttgttaacttttcttgtgtcccataacacaagaggtaaacgctcattaaatataacctccagcatttgttctttgatttctcctctccaactcttcccctagtcccacatgatgcacattattttcattcactcctgagttcatttgtgctttgtttctcaagatcactttcccttttaattttctaaccttcccccaataaatacatgttttattaggtatttgatgttgcctactgggaattaattggattttactctgctcttatatatttcaaatttcaaggagaaattctttgtattgtatttttacctggtatacaaagatactta

SEQ ID NO: 26539 - DNA, 1055 bp, Homo sapiens
ccatgcccggctgaaatcatttattttgtcaggaaattcttaaagttgaatttaagaatgaaagtattttatcagaaatatggcaatcctacccacattttaatctcactagaaggggggtgatacatgctagcatgtacttccacactggtttaattttgatgtggggaagggtgtggagaatactttttgttgcaagaaacagaaaacccaactcaaaatggcctacacaataaagggtatttcttggcttatgtgagtaaaaaatactgaggcagagtggggttcaggcgaggtgcagtcagggctccagttctctttctttgtgttttccttgaccctactcccccctaagtttcacctttgtgtgcggtctggcttcccatatgattctgatatggctgccagggcaaatggggctacgtgtttccttgatcctatccagggggaatccaactttgagaaggttttagttatgttctcaaaagtattatttcatcacaataacttacagattgttagaatttctaaggaccctagacaaagtcagctagctccccaaacttgacatatcatcaaaatcacctgaggaacttaaaaaagtatagagattcttaaatcaaaactcacccttactaaagcaggggtatgaaaatctgtgttttttaaaaattttattttattttactttcagttctgggatacatatgcagaatgtgcaggtttgttacataggtatacatgtgccatggtggtttgctgtacctatcaacctttcatctaggttttaaggctcacatgcattaggtatttgtcctaatgctctcccttcccttggcccccaccccctgacaggccccggtgtgtgatgttcccctctctgtgtgtgatgttcccccccctgtgaccatgtgttctcattgttcatctcccacttatgagtgagaacatgcggtgtttggttttctgttcctatgttagtttgctgagaatgatggcttccagcgtcattcatgtccctgcaaatgacatgaactcattcctttttatggctg

SEQ ID NO: 26540 - DNA, 1051 bp, Homo sapiens
ctactcgggaggctgaggcaggagaactgcttgaacacaggaggcagggattgcagtgagctgagattgtgccactgcactccagcctgggtgacagagcaagaatctgtctcaaaaataaaataaaataaaataaaataaaataaaataaaataaaataaaataaaataaaaataaataaaaaagaaaaaaaaaagaaaagaaagtagaaggtgcttatgaaagagtgttgaatggataggaaaggggttctcaaggttgactgcacgaatctagagcaactaaaaaaatactaattgtgaagccctattctagcatggaaaaaataagcttgatggaacctttggtataaatcaaatggttctatcgtatcctattaactttatagtcttgagtaattaaaaatttttaccactattgtgtattctgtgaatgtttattttattttttccatgaatatttattaaatatcaacagtgtgctgatgagtcaatagtatcaatactacagaaacattaaggaagatgagaactgaaaagaggtgtctacatatctcgcaattaaaatggactgcagttttgcatttaagattctgaaatagtcattgactcattcctaataaccctgcccaggatctcaccagcattagaaagattggagatgtttcagcatccgagttctgggatgcttcttgataatgatcagctagtagttgttttgaaatgtcaagagcatttctgtggttcttcacatgttcctaatgcaaatgtttccgaagtaatttcttgacagttacagtgttttgagatgaagtgggaagggcttgtgattttgaagttggaggatcttggtttgattcctacctctgccatttattatctgggaaatccagtaccacacatgctgggtgctctggggcagttttcttatctgtaaaatggacatatatctacctcacggggtggttatgcaaaggcaatgaatgtgaaatgtttaataaactgtgaagtctcatatagatttccattcatcattattacccaatacgaga

SEQ ID NO: 26541 - DNA, 1029 bp, Homo sapiens
gctaggataacaggtgtgagctaccacgcctggcctaaggtcccactattattattaacacattgatgattatgtttcaacagatgaattttgggggacacatttagatcatagcagtttataactttatatgttgtgaatatttttctatgccaacagatatgcttatacaacatcttttttagttactgcatatttcattgagtatgctatgatttaatcaatctgtaagatttttttgctggtatgtccatctgtcaaacaatgctgcaatttcatataacaacaataataggtttatttttatatattgcttattatgtgttagacaccattttaagtacttcgtaagtacttgtgtgtgtgtatgcatatagtaaacttatatccctatgaagtatgtaaattatttgcagatgaggagactaaagtccacaaacattattgattgcccaaggttatatacctggcaaatgacagagccaggatttgagcttggcattctggctctagaattcattctcttaatgaattctatatatttcatctttcataattaatttaaagatggttcagtgcctgagtttttcaccagagttccatctgattcttttcaaatcacagacatcatttcaggaagtatatttaaaagataagaatgacttaaaaaacataacaacaatatcatctttatcatcctataaccattaataataatttcttaatatcttttaagaaatgttcagcaatatgggaaatttaacgtaagtagacagatgggaaattttagataaaatttaacattttattgaaatgttagatttggcatactataatgaactcaatgatcaaggattgaaggtagtagaattatgggaaatgtcacataagtagagagatatgggaaattttagataaaattgaacatttatgggaattatgggaaatgtaacataagtagggagatatgggaaattttagataaaatttaacattttatcgaaatgttagatttggcctactataatg

SEQ ID NO: 26542 - DNA, 1075 bp, Homo sapiens
cacctgtaatctcagcactttgggaggccaatgctggcagatcacttgaagtcgggagtttgagaccagcctggccaacatggtgaaaccccgactctactaaaaatacaaaaaaaaagggccgggtgtggtggctcatgcctgttatcccagcaccttgggaggctgaggcggttggatcacttgaggtcaggagttcgagaccagcctggccaacatggtgaaaccccgtttctagtaaaaatataaaaaattagccgggcgtggtggtgggcacctgtaatctcagctacttgggaggctgaggcaggagaatcgcttgaacctgggagactgaggttgcagtgagccaggattgcgccattgcactccagcctgggcaacaggagcgaaactctgtctcaaaaaacaaacaaaaaaatacaaaaaataattagccgggagtgatggcaggtgcaatggtgggcatctctaatcccagctactctggaggctgaggcaggagaatcgcttgaacctgggaggcggaggttgcagtgagctatcatgctcctgcactccagcctgggcaacagagtgagactccatctcaaaacagacgaagaaacacacacacgaacaaactttattggaaccgttttttgtcaccaagtactgttaaaatctcagtgctaaagcaataaaacagttgggtttaactgagtctgtcttcaaggaatttatattgcaattgagaggatagatataattgaaatatgtaaatactgtaacaacatagtttatgaagaaacaataaaattagtgatatggatagtgctgtgagcagacagaagtgagagaaaaatatagactgaagtggttgggaaaagtttgtggagaaactgggtttgaaacctttgaaaaggttggtggaaaggatggcatggagttatccatgtgaatagacaattagtttatcctatcagatgtcacgtttcgagcttgctttctaaatgattctaaaaaatacacgtatcatggtacttaacattactgcactactttggatagttcaaatgacaactaatcatagtca

SEQ ID NO: 26543 - DNA, 1208 bp, Homo sapiens
ttgtttgtgtaatgaagctgttcaagtggaaagaactgagttgtagtccctgcttcactagtactagaaggattttttaaacctttttgaacctattttgccttatctgtaaaatggaaataatatcaacctggaaggttagctgagagaatttaatgagataatgtgtttcaaacgttctttgtaaatggtaacatgttgcagaaatattagattatatgactttagtccctgcttttctaaccattacttctcaattataaatgtaaacatttatagcatatttttaaaacaaattattcttttttcataattatctttagttcttttattgtttcagcatgacttgaaacattacttaatttcttagtatttcttgattggtgctttaattgtgtcgttcattggttaaaacctatccaaggccagtaatgattaaattatatgacttcttttatttatttattttctaaagaaaggaattatttgagctctttaagggcacaagaaaaaggggcaagaaattatcctgaaagcaaataaacctgagaccatacttctgaaaaattaaaaaaaaaaagtatatatatatgtatgtataaatatatatggctctgaattaatgcctacactttttagaaactttgaaggtgattatttattttaaacaattttcctctttttcgaaaagacagctctgagtttgtgggctttttttttccttttatggtaaatttgaaaactttatgtaaatgtcagatttaaaacacttttaaaatggggtgcagaaagaagcccctttttctggacatttattttttgatcaaattctgctatctggtttagactaagaaaaagtctttagttaatgcagaaaaaatgtattactttaatttgaattttggaatcattttgatattaatgatgtaagcataaccatgttaaaccaattcttttatagaagctgtacattggaatgcgtttacagtcattgtaatggaagcaaaatacatgaaggaaaaactgttatttgtatccctgcttattgcacctgacgactagttgcagatggttttgtttacctaagaaaacttgtgatataaatgaaaaaaacacctgttttcctagagtcattggttacaaatatgcttcgtctaagagctatttgtccattctcctggagagtgtttcaatttcgacccatcagt

SEQ ID NO: 26544 - DNA, 1013 bp, Homo sapiens
tttttcagctccatttataattttatgggactaccaaaatatatgcagtccctagataaccccaaatggcattatgtggtgcatgagtagctttctatcacttggatttattgtgtgatttggttcagattgttaaatgtattgaaattgatttattattttcagaatactatccattcaattgaaatttttataagggtctagattctaatgaaattttaagcttaaaaactcaatctcaagtattagtaaaaagcaattttaaaaaatcattatttaaaaatcagctcataacaacatattatttatgttcagcatgttcaaaagaaagctgcagaatggaaaatcaagatagatattatagcaggtaagacaaatctcaatcctaatatccaaaagggccaacatgtattcgcccaaccaaaattttcatgcaggtgctgagaagataaactatgctttacagtgtggcaaaatgtgcatgattggtaatagattggaaatggagtaaaagcagaatgaacacttagcctgagactgtcctaatttatgcgatttactgaaaatttctaatagcactcaggtatttggtcactccagactcaggcagaacactgtatagcagcacaatggctaaaaacatgggctgggggccaggtgtggtggctcacgcctgtaatcctagcactttgggaggccaaggtgggcagatcacctgaggtttggagctcaagaccagcctggccaacatggtgaaaccccatctctactaaaaatataaaaaattagccaggcatggtggcgcacacgtgtaatctcagctacttgggagactgaggcgggagaatcgcttgagtcccagaggcagaggttgcagtgagccgagatcgcaccactgttcttcagcctggatgacagaggagactcagtctcaaaaaaacaaaaacaaacaaatgaaaaaaaaaagtgggccgggcgcggtagctcacgcctgtaatcccagcactttggga

SEQ ID NO: 26545 - DNA, 1100 bp, Homo sapiens
tagtgttttgcagctgagctaagagaagagtaagggactttggttttatgaacacatgccaaaaaaggagaatttgtgggatttttctggtttaggaatatctggtcataagtggttgaaaggggggaggtccgttatttaccttgagattggagacatatatatacatggaaaaagcagctgagtgccctgcagaacacacacttaaaggtgctgagtaaattcagtgcttgtattaatatgggtacttggactttaatagatatgtatcttttactctgttttcctcacttattttccaaatggttgagttaaaaacaacaactatatttcctaatttaaattgttccttagtgctagatactacaattaaacattagtgtcttttctcaagttataattaactctactatgatgtctgtgctggctggtatatttttatctcaaaaatcacagtacagtaaagattgctaaatggagctttttgttcaaattccaagcaactgtatctttgacctgtattcctcttggctcttccaaatctcagtgacccaacatggacagtctgtgaagctaaccatgacctgcaagcagggagcatgaacatcgttttagtttttcaatcagtttaatcttttatgcttttttaccaccagaggcttcacttgtcacatttgctctttaaaatttgtcactgttgttttaaattagccaagaaaacaggaatccttaattaatagaaacttttctgaatatagttaagtattctgagtcacagcattaaacagctttagaatacatatgggtcactatataattttaaatgcccttcaggttttctggctgagagcagtttaagaaaaacagactaccttaaacttcagtaatttacgttctatcttgatatcaaatggattttctcattttaagcaatactacccttttacctaaattcattttttggaatctacttttctatgaacttaaaaagtgagtggctattttctgaatatttccacagtgatggacacccatgtaattcttatatagttgtttttaaattattataagatatttgttttgttattttcctttggata

SEQ ID NO: 26546 - DNA, 1051 bp, Homo sapiens
tgtgtgtgtgtgtgtgtttgtactccaaatgctgtaaggcgtaggaagaatcattctgcttttttctttcttcctcttttaactattataaaatattttcattttatttgttttctactagtaaattattccttcttaaattaaaatttgcatggactagaaatggctcattttatgttatgtcagttttcaactacctttcagtatatacattataaaaatagatttcttgtagtacagaataaaacccagcatctcattaggtatagattttcatgtggaggatggtttcttcaaataggtttttgccttatctctttccatcttttcggcattgaaaagagcactttggtcttttaactcggtggtactttataatatactattcttcccatcactgtaaaacattgatgcatgggtaaaaatatcttttttatatcgcaaataaattgagcttgttatagtcccctctcttcattttcaggaagaggcagaaatccaggcagaacttgaacgtttggaaagagtcagaaatcttcacatacgtgagctgaaaagaataaacaatgaagataattcacagtaagtcattatttgcatttcacagtttcatattattaaaactacccccgccccccatagagcataaacacaatatttccttcttgggttgtctcatcgtacttagaaaagatccaaagtccttcccatggcttggaaggccttttatgatttggtccctggccaccttactgtcctcacttctcttaaacatgtcaagagcattcccttctcagtgggcttttgtgcttaccatttcctctgcctggatgttcctcctctaaacacctaattggcttaattacttatctcactccaaatgttctttagaaaggccattcttagatcatcctatttaaaatagtagtccctagccaggcccagtggtgctcacctatagttccagctactcaagaggctcaggtaggaggattgctttggccaggagttcaaaaccagccttgtcaacatagtgagacccccatttctt

SEQ ID NO: 26547 - DNA, 1033 bp, Homo sapiens
cggagtttcactcttgttgcccaggctggagtacaatggcacgaccttggctcactgtaacctccgcctcctgggttcaagtgattctcctgcctcagcctcccgagtagctgggactacagccatgcgccactatgcctggctaattttgtatttttagtagagatggggtttctccatgttggtcaggctggtcttgaactcccgacctcaggtgatctgcccacctcagcctcccaaagtgcttggattacaagcgtgagccaacgtgccaggcccatcatgcttcttaataccctatttcttcttcctggcctcctgctgttgcttctttttaatttagttcagatattaccttttctgtgactttgactagtttcctgcagatagaatgtattttttttctttgctctgtgtattcatagctgtattataaaaagtaattatcttaaaatcagctgatgagcaaccttgatcccatttaaatctagccttttttaaagactaggatatggcattttgggaaaaccattattctgtttactgacccccaaagattcacatcctttccacatgcagagtacattcaccctatctcaacatccccattacagtgtcagcacaaagtctgacatcacatctaaatcccataagctcaaagttcaattctcatcaaataaatgagatatgagtgagacttggggtataatccaccctgagacacagtttttcttcatctgtgaaactgaaactcgagaagcaagttacctcctcccacagtacgatggaggaaccaggtatctgatgacagtttagagacatttctgttcaaaacaaaaagcagtggaagcaaattcctgcagaatttcaaaatccattcaaactccatttggattcaaggtctgggaataatcttttatgatgatcttctgtgcttctgccttttgggcacaggtttctgtcctctaggttatcctttctttttgatgaagtttagcctgctaacaatctgtttaaactttttagaaattat

SEQ ID NO: 26548 - DNA, 1027 bp, Homo sapiens
gtcatttataagttcagtggagaaaatattttgttagttataagagatagaggaaaacccacatttaatttgttaattataagagatagaggaaaactcacatttatttttaagtgatagacactttatataccatattttagttatttttaacaaagtgaggtagattgtgttgcttctatttagaaataagaaagctgaactaaagttcttataacttagccaaagttaaccttagagtatggatttgaatgtatggatatggatacaaatttccctgtatgtactttccactacacacttaagtaacatttaacagtattatctcatggttaagtaggctttttttttttctcgtatcatactcagatatttaatattattagtcctatctgtatataatttatttagaacattaaaactatttctaagcttttcatattccccagtctagacctcttgcattttctacttatgtcataggctaactgtgatctcagacggcaaatagatgaacaacaaaaattacttgaaaaatacaaagaacgattaaataagtgcatatcaatgagcaagaaacttcttattgaaaaggtaggctaaaagttgagtaaattttcgctttcccttcattagccccttttgctttgtatgcttttataaattaatgaatacaattgagtgatgattttttttctccttttcagagtacacaagaaaagctgtcaagcagagagaagagtatgcaagatcgattacgcctcgggcactttacaacagttagacatggcgcttcatttactgaacaatggacagatggttttgcatttcagaatcttgtgaagttagtcattcttaacatttaaaagtttttagtattcgtttgggttttcattactttaaaagattatagatttgtaattatgctctccagttcctcgctactctgaaatcatagaatttagtacctttgaaagggatatgaaaccaagagtattacagttttagcttagtaatttcttgatta

SEQ ID NO: 26549 - DNA, 1051 bp, Homo sapiens
tatctggggcataatctgtgaattggctataacggttggataataattgccaggcatttacgtggatggtcctttttagtagggattgtgtatatcagggtttgtgttctgccccttttttctcatccaagtttacttttatacactaagtatgtttgagtagtaggaaactaaggaaaaacttaataggaaaaaactcataggaaacactaaggtgatttttttccccctcatccagttaagcatttgaaggtcatcttttaaaggctaattattctaggatttttcatccacttcatgtcaaattctgtaactgaatatcagataatatgtacaaggtcttctctacttggaattttaaaatgtatacaataggaaattttatcttttaaataaattgtgtgtaaataacagtatattaacatctcttgagcactactgaatgctatttttttggtctcgaaacatggttttatgttgactgtgataattttgtatattaaaactgtcatttaaaaatctgttatcttgttttctgtagacaccggagaagaaacaatcggaatcatccaggggaagaaagagaaaagcagaaaaccagaatgaaagtagtcagggtaagcacataacatcttccttcagagcctagtggacacttaaaattaattgttttaatttttaaccaattaatactctaattgtaaaataatatgaagttgtaaattttggtgtgtgcacaggtagttagtgtataatgattgcttttaggcttttcaatgttgcccttattgttttcatttgggtcctagaaagacaagtatcatgtccaaatctggcaagcattaacttatgacttttcatttttcattctttatatgtattgtattgaaatggcttgtttttgaattaaaaacttcaatctcactttaacagaactactcaaacttttcccatttatttaaaaaaaaggctatcaaaataattatgagagactctagttaaagtattatctgtttttctttccatcctttcttgcatacctactttttgt

SEQ ID NO: 26550 - DNA, 1036 bp, Homo sapiens
actgtataagtcttgcatttgttttgttaagtttattcctaagtattttatttttttgatagtattgtaaatgaagttttcttaatttgtttttcacattgctctttgctgttttatagatatacatttggtttttgtgtgttagtcttgtgtcttgcaacctttctgaacttattagctttaatagttttgctgttattactgtatttacctttagtatttaccttttatttttttcttgcctaattttcattgactagaacatccaatacaatgttgaactgaagtggtgagagcacatatattgtcatcttagagaggaaagctgtgagtgcttcataaatgtcctttctcaggttgaggaagtttccttttatttctagattgctgagtggctcttttttgttccttttaaatcagaaacagggtgttgggttttggcagacattttttctatgtctgttcatgatcagtggttattttttgttctgttaatatagctggtgtatgttgaactaaccttgcattcctggaatgaatactgtttgctcaaagtgtataatcctttttatatgttgctggatttggtttgctagtattttgttgaggatttttgcatccatatttgtaagggatattgatctgtaattttcttgtgatgtttttatctggtttcactatcaggtaatattgtttttccagaatgagttggtaagtgttccttctgttctttggaagagtttgtgaagaattagtattagttctgctttacatatttggtggaatttaccagtgaaaccatctaggcctgggcttttcttcgagggtagatatttattcgttttcttgttttaattatactgctactatttctttacttgtaaggactattcagattatttatttctacctttctaccccagctttattgaggtatgattgacaaatagaaattatatatatgtgaggtgtatatgtgatgttttgatatacatatatattgtgacatgattaacactattaagataattaacat

SEQ ID NO: 26551 - DNA, 1083 bp, Homo sapiens
cagtctttggttttcagacacaagacatttctggcttccctcgtccttttctgcattgaatatgaacagacattctccaaggattcctggttcattttaatgaagaatggtgcttaggaaccaacatctaggtgctagttatgcttgttgttataatacataatagtctcttagaagaatgccagctaatgtagaatcagaacactcaccatttgacatccccaatataattattgattaaggcaaggatcatatgttttccattggacatttacatttagtaaaatgttttcaagagcagtatacttacagagtcctaatgttttaccccatagattagttattacaaaagagaaatgtgtctaaaatggacaccatttctcaccaccataataagcaagatcagacttttcattggcatattatctcagagaatctgacattgtatgtgcctcctaaggtggtgcagtaggagttacacaaatcacctctgtttttaatgctggaaatatttgatttgaatttagtcatgagacaatactcctgggacactgctagacaactggcctggactcatcaaagtattcagtgtcttgaagaacaaagagaggtaaatggaattgttgtagattggatgaggctaaagagacaagacatagcaatcagatgtaatgtgtgaatctgaatcctgatttgcacctggactggaggaaaacagttataaaggacgtttttgtgacaatagggaaaattcaagtacaggtatatgttggatgaagatactgaattaatgttggttttactcttttgtcttttaagttgtaattttaaaatataggtgaagctacagaatgtatgacagttgtgaccaatgactcctgtaatgtttagagtgatgatgataatgtgcttgtgagatgcagtattaataggtaggcaaattttaatgatagtagcatcaagagtttgtaatttggaagtaaaaacattctaaggatcaaattgctggtagcaacggtgctctagcagagagggtcgggtagaaaggtaaatacattatctaggagtattgatttatttcta

SEQ ID NO: 26552 - DNA, 1029 bp, Homo sapiens
tgtctcaaaaaaaccaaaaacaaacaaaaaaccctaccatttattggatttaatacatgattaattatttaggatttttacatatatgctttaagagaaatgaatgtgccaactggaagaatgtagttcagtgagttttgacaaatgtatatacactcatgtaatctacattcctcttaagatacagaacattttcattaccctaccatatctgttttataattcactatcacattagcctcacaaaatgaactgggcccctttcactatttttagttttttcagcatcctgtatatgataggaaatgttcatgagaatatgagtagacacgtaaaactgtcttggcctggcctggagcttatttagaatggtggcttttttttttttttttgaatacaggatctcactttgtcgcccaggctggagtgcaggggtgtgatctcggctcactgcaacctatgcctcccaggctcaagcagtccctctatctcagcctcccaagtagctgggactataggcgcttgcaccatgacattcggctagttttttgttgttgctggactttttttgtggagaccaggttttaccatgtacccagactggtctcaaactcttgactcaagtgatccacctgtcttggcctcccaaagtgatggaattacaggtgtgagccactgtgctcagccggggagatcttttactgtgattttaatttctttaatatttagttcattagttcatttcatgtaagcttttaaacttactagtatatagttacaatactttaaaaacctcctttgttattttctttcttcatattctccttttctgttcattcttgccagagctttgtttaatgaatatttcaaataaacaaatttttgttttaatttttttcactgtttttttcttctcccttttccgcagtgatttctgccttcataatttacttgttattttggatttgcttctgtggctcttcttccagctattgagttgaatgtttagtttatttacttgtatataga

SEQ ID NO: 26553 - DNA, 1035 bp, Homo sapiens
tttagtccttcataaaatttaagcatctctatattcttgatagcatttgggaattcttctattatagctttttttgtgtctttttccttaaaatattcaaatgtaattttaattttgaatgcattcaatttgtagattagggactactagcatctttgtaagattaggttatcctatttaagtacatgaaatgtctccctgtttattcagttctccccatggacttcttaggaattttcggctgttagatcctttaaagtttgttgctgatctttttttaattatattttctagttgatttttgctggcttaggatgcttttaatttttatagtttggtcttgtatctggcagtcttgctgttctcttttattggttgtaatggtttgttggttctgtagatttatttaagggaaataattatcttccaaaaatgatagtttaatctcttataccttaaatacatattttttccttatcttggtcatgaccttgaatgctgtgtcttgttcttgctctaaaagaggaattgtctgaaggttctttattaagtgtaatgtttgctgtaggtttggagtatataactgcccaaattaaagaagagcctttctattcctggttagttaaggagattttgttggttttaaaaattataaatagttttgaacttatgaaagtcttttttcagtgttgattaaaagactcagatttttctcctttggattattaatacaataatttaatagattcttaaaatgttgaaccttgtttgtatttctgggataaaccatacttgatatgatatactatttaaaaaacatttatcaggccaggcgtggtggctcacacctgtaatcccagcactttgggaggccaaagtgggcggatcacgaggtaaggagtttgagaacagcctggccaatatggtgaaaccctgtctctagtaaaaatacaaaaattagctgggcatggtggcgtttgcctatagtcccagctacttgggaggctgaggcaggagaattgcttgaactcggca

SEQ ID NO: 26554 - DNA, 1050 bp, Homo sapiens
aataccactacgctgtattattagagtactaacattaatatgcagtgaacttatacaaatacgtaagtttataatttatctgaaactcgtgttggggggggtaagtaactttatgagtttctggatatatgactactgttgatatggtttagctgtgtcgccatccaaatctcatcttgaattgtagttcccataatctccatgtgtcctggaagggactcggtgggaagtgactggatcatgggggcgctttcccacatgctgggtctcctcccgatagtgagttctcacaagatgtaatggttttgtaagtgtttggcatttctcctgcttgcactcattcttctgctgctctgtgaagaggtgcctttggccatgattgtaagtttcctgaggcttcctcagccatgaagaactgtgagtcaattaaacctcttttctttataattacccagtctcaggtatttcttcatagcagtgtgagaacggacgaatacaatggtaaagaaaaacaaacccaaactgagaattggatggatggagattttatgtaagatctttcatttagcagtacgtcagctagtgataaatatatcatgtgatgaactttcaggattttgtacacattttcataattgtaaatgtaaaagtgtctttgaatgccaggggctaccactgtataaaatgtaatctcaattgttggaaaaaaaaaaagtatgtggaaaaaaagactggaagaaaataagccattgttgacattggttatctttgggtggtaggactatgagtgggatttttttggctttaattttttgcatttttccatttttctttaccatgcgttcatgattacgggtaaaaagggaaagaagtgaaattgcttctttcctgacagttttttaggaaaatatccttttgttcataaggcaaataaattgtcttggggaagaaatatgaagaaatatgaagtcagaaatataataattgaaagaagtcttggtataagtcagtatttttaagtgactgtttgctggaaaactatggtgttaa

SEQ ID NO: 26555 - DNA, 1045 bp, Homo sapiens
atgcagctgctgctgggtgtggtggctcatgcctgtaatagcagcacttggggaggccgaggtgggcggatcatgaggtcaggagatcaagaccatccaggctaacacggtgaaaccccatctcaagtaaaaatacaaaaaattagccgggcgtggtggcacacgcctgaaatcccagctactcgggaggctgaggcaggagaatcgcttgaacctgggaggcggatgttgcagtgagccgagattgcaccattgcactccagcctgggagacagagtgagactctgtctcaaaaaaaaaaaaggaatgactgcataccaatacaaagtataaacactgctaatccaaatctagtgcttgatgcttaaatggtataactgcgtctcatacatgtgatcaattctaaagccacagaaaattacaggcactaagatgatgaaagcagcaatttaggatatcatttgaaatctacatctgtgagctacagttcttcaacaggctggagaaacagaccatctaagtcaagcatgctgtggctataaggaacatttattcagatagtatttggtccctattctttgccacataaacagagaggaaaacatttaaattctaaagtatcattatatccacacataatagtgatagttaaaacataagccaggtgcagtggagcatgcctgtagtcccagctacttgggaggctgaggcaggaggatcatttgagcccagaagttgaaaggctgtactgtgctatgatcacaactgtgaattactttttgttttttacatttcaaagatttggcttactgggcaaagggggcgagtatttttatgtcgtttaatctctgttgtcactgttgttttcttagtggaataactgggattttagtctattgttctctgagatgaatcagttgtcagagctatagagttttatagaaaacttattggcatagtttgttcattcagcaagtatttttggacctgaagcctagtaatgaggaaacaaagataaatatgatgaagttagtccttgctttct

SEQ ID NO: 26556 - DNA, 1057 bp, Homo sapiens
aaggggaggcctgaataatccaccccttgtgtagcatataatcaagaaataaccttaaaaatgggcaaccagtagcccttggggctgctctgcctatggagtagccattctttatgttttactttttttttttttttttttttgagatggagtcttgctctggcacccaggctggagtgcagtggcgtgatctcagctcactgccagctccacctcccgggttcacgccattctcttgcttcagcctcctgagtagctgggactacaagcacccaccaccatgcccagctaattttttttttttttgtatttttagtagagacggggtttcaccatgttagccaggatggtctcaatctcctgaccttgtgatccgcccgcctcggcctcccaaagtgctgggattacaggtgtgagccaccgcgcccagcctattctttacttaaacttgttttcactttgctgtatggactcaattctttcttgcacaagatccaagaatcctctcttggcgtctggatccagaccctttctggtatcagtggtaagctctgtttaagacaactgtcatacccaagagaattcttaaattgtggcagttaaaaatgtatttatcccctcgagggccgggcgcagtcgctcaagcccgtaatcccagcactttgggaggccgaggaggcggatcatgaggtcaggagttcaagaccagcctgaccaacactgtgaaaccctgtctctactaaaaatacaaaaaaaattagccaggcgtggtggtgggcacctgtaatcccagctactcgggaggctgaggcaggagaatcacttgaacccgggaggcagaggttgcagtgagccgagatgacaccactgccctccagcctgggtgacagttgttagactgcgtatcaaaaaaaaaaaaaaaaatttatttactcccttgcttcaaaaaggacataagttggcttgcaaatcacattttgtagaaatgaagtttttaagattagtctcatactcattacataatatttattgactacttacatattgagtgctaaat

SEQ ID NO: 26557 - DNA, 1048 bp, Homo sapiens
gtagaataaacagtaaaggagaaaagcaaaggctccctgctgttgaactagggcttggaatgtgaataaaatttaaataggcagacagtaaggaggagagaattctttgaggaaaaaccatgtgagcaaaggcagaggctgctcagggccaagcatgacagtttggctaggggagctgcttcagattggaaagctgttggtaagattaattggggtcagtagtaggagatcttaagagctcaactaagaaattgaaattttatcctatggattaaaatcatgaaagtttttgagcaaggagatgatttgacaaaattatcattttaagcagaattattcatcgataacatgcaggaaggattgacagggagaataatacagcgtgttaggaagcagatttgtttccaggcctaaggagataggggttggtactaagggagtacaaatgggaaacaaaaaagacaggaaatatcaaagatgtcattaaaaataaaaattaaagaggacatagaattttatggccacatggagaggacagtggaagaaaaataatttctctttcatgaggtaaatggtggtacctccgaactaaataaagaaaaggagaatgagctcgttttggaggaaagatattccctctttagatatgtacaacttgggatggctttggcatattttttatcttgcaaggaaaatgaagcacactccattgttgtctatctcagaactaccttaattttctgtaagtaccaggaaacatctgtggttttgaagtttagctttgacatcatacgtcaagctctgtgaagttaccactctgatcatttgggtgatttcttgatactctaggacttttgaatctagtcatttagcaagttggttttggttttttcttctttacaaaatatttttatttttgttacccttatgtttatggtttagatttctttggccttatcaagcttttcttattttgtcttcaacaaagttaaatccagcatataaaacaagatttctacaaactgggtatctttttaatactttgttt

SEQ ID NO: 26558 - DNA, 1065 bp, Homo sapiens
ttgtaacctcccactccaacaatgagaaacctggcttctgccaagtatcacctacttcctaattgttcaattctgatttccttgtatactgatttcagaattgttaaccctttatcaactagagtacagtgcttattaccattcctattgccttcagttttataggcaccattcatatccagaattatttaggtcagcacctttttctatattatttttattctctgaatattccatgttttcacacctgtttaatctttatttgtgctaatcctcctgcctgaaattccctggcttttacccttctctccgtggaatgttactcattcttctatacccagcacaaatattgcctctaccagaaagcttctcagagccaccactagtagacttaatctttcattcctctgtgctccaatagcattttgtacttacctttactatatatcatgtcaggattctttgtttgcatctctttcttcttcacttaatggtaattcttgagagcagaaaccaaatggatttgtctctgaaatcccaggacttaacaataatacatattacgtaacagaaaacctaatagtggctaaaatacaaaaggatttacttttttcacctagcaagaagtcagagatagactatcattggtttacctgttcaatgatgccatcaagaatccaggcttttttccttcttccgtacatagaagtctaaatgtgaaatgccaggtaaataagttaaaaccaatttcattctggcccagtataatgtgtttggagacaacgtccagagaaataagaatagttcagatattttggattgagatggctttgagatgagcttacattaaatcccttagagaaataacttctgagtcccagttgcctctttttgtgtgagtgagtgtatcatgtagccaccattcagggcagtcatggagaacaaacgctaagcatgaaattcccattttgaagctgcagagttactgacgtcatagtgtgatcaaaatgctctgcaaatacttactgtaattattgttgttgttctgttcttgctaataacctt

SEQ ID NO: 26559 - DNA, 1058 bp, Homo sapiens
tcccatgttttcattatcttgcccacattttcagcctcatctctttggccatccctcatgtttgcttttgtggttctgacatgtttgctgactttctcaagccaatgtgcctttatatttgagattttctttatctgaagcttcctttcctctcctcttatcagttgatctcaagactcatcccaggtatcacagctccactgagacccttcccctaactcctccagcttggttagtagccttttctgtgcttccatgttactgtgtatactgttgtggcactatactagaattgtcatttgtctgtcttctcaactaacctgggcagaaactgagtagtaatataattctccctgctttacactacctaaaatgtggttaatgcatatgtatgttgaataaatgaatgggctataaaaaacaatatgtttgtatagaatctattatcaacagctaagtactttttttttttttaactttatttgcttgagaagaaatctcaaaggctggtgctgaactcctgggctcaagcgatcatcccgcctcagcctcctgagtagctggcatgtatagtgggattacaggcatataccacaatacttggcaatagcagctacttttagcttagatgcagatttagtctccacttattccttaaatcagtaggaagtcacaatattaataactttcaaaaaaacttaaatccttaagacttctacctatgaagtagatattttccatttgttgaaggtaaaatggcataaatagatacagttttatgattggaaaatgatttctcttagttttgggcatagaacaaatattagttcttctttttttctattctttgtctgtgttatgtttacagaatacttaaccatcctagccatgatattttaaagacaagaaagaagaaatattaattcaaaagttaataaaatgctttttgttcatatactttgtttaaagaaacatagtataactgaataaatgtataaaatactcaggttattaaacttgaacatttattcagagacaaattttaactaagctatagg

SEQ ID NO: 26560 - DNA, 1051 bp, Homo sapiens
attgattgtgtcaaaataaatctagatgacactattcaactttatagtgactttcttgcctctttccttccttcctttaataagtgtatgaatatgacatatttacatatttggttttttaggtataattaacatttttaaaaggaacagattttagatattcagctcaatgagttttgacagttgtatacacccatgtaatcaccacctaagataatgaacatttcaccccagaaaagtcgttcatgcgtctttccattcagtcccttctcccttaccccatgcaaccacacttctgatttctgtctgaagttttgttgttcttggatttcatgtaaatggagtgcacgagatgcattctttcatggctggcttcttttgtttaacatgttttcagagagtcatccttgtgtgggtatcaggtttgtgtttgttttaaattttgctgagtagtatttcatcgtacgaatttaccacaatttgtttatccatttttctcttgatggatgtttgggtttttgtctgttacaaataaggttgctgtaaacattcttgtacaaatctttttgtcaaccaatattttcatttttcttgggtatctaagaatagaatagagtcgatgtatattcaatttaaaataaactgccagttagttcttagaagtggatggatcattttatagtctcctaagcagtgtacaagtattccagttgttccacatcttcactaatgtttgatatctgtagtgtttttgatagtaatcattgtaggtatgtgaaatagtatcttattgtggtttaaatttgcattcttctgattcctaaagatgttgattatcttttcatgtgtttattggctattcgtatatgtgtgtgtgtgtgtgtgtgtgtgtgaagtatctgttcaagtcttttgcgtacattttattaggtttcatattttttactaattgtaaaagttgtttatacatcatggatacagccctttgtcaaacagatgtgttgtggatatttttttgccagtttgtgacttgtttattacttttattaat

SEQ ID NO: 26561 - DNA, 1051 bp, Homo sapiens
agaagtagtatataacctttgggaatagtagtataaacagattgtgcattttcagatttttatttttatttttattttttcgagacagagtctcgcactgtcgcccaggctggagtgcagtagcgtgatcttggctcactgcaagctccgcttcccgggttcacgccattctcctgcctcagcctcccgagtagttgggactacaggcacccgccaccaggcctggctaattttttgtatttttagtagagacggggtttcaccgtgttagccaggatggtctcgatcttctgacctcgtgatccacccacttcagcctcccaaagtgctgggattacaggtgtgagccacagtgcctggcccattttcagatttttaaatctcattgtgaacattaaccaaacttgtgttttgtatctatatcaaaatcttctcaaacaaacttactcattcagaatttatgataacttggatgtgctatcccaacatgttttttgtttatttgtttgtagtatctataaattgaactctaggttaaattgcctgaccttggctaggtgtggtggctcatgactgtaacctccacactttggaaggctgaggtgggaagatggcttgagcctaggagttcaaggccagcttgtgcaacatagtgggaccccccatctctacaaataataataattttttaaaattgcttgacccttttttaggtggagatggggtaagattgtatgtgtgtgtatacagttgctcagtaaatatctcttatgaatgttgagtgttgtatgagtattaaatatgtaacagtaggttttaaataatttttcctgttattctcataggtaaaccattcttatcagaccatatgtttatttttctattagaaaatttctgtctttctgtacacacacacacacacacacacacacacacacacacacacacagatccagatattcctcgacttccaatgaggttacattgtaataaacctatcatgagttggaaatttttaggtcaacagtgcacttaatacacctaaccttct

SEQ ID NO: 26562 - DNA, 1050 bp, Homo sapiens
atcgttggaaaaaaaaaaaaagtctccctcatacccttgttcctttccttcgaggcaaccagtatttatcagatttatgtgtatccttcccagatactttgcgcctgtcctttagataggtatccttggggacacatttagtgggtagggacagtcaatctctatacttttgcttctggcaataattatttgattttaatatctatcactggagtcttaccaaattcatgcactccacattatttctctggagtcttttgctttttgttgatgaaaacagagttaaaaggtttttatttcactaaaatgatctgtgtaaatagggaagtaatgattttaaactatagttcactgttttttgtttttttttttgagaaaagatgattttggcgtgaggagtttgtcagtgtctaacaattctttcctatatttttcctgaaggcgcttgactttggcagatattgagagaatagccccattggctgagggggccttaccttacaacctggcagaacttcagagacaggtatgagtaatctcataaatatgatcaccttaaaaaaatgctgaactagtagactaaataggagctgacagcttctgaatgctgtaaaaattaaaaattactttccagagaaagactttacttagcttaaagattacctttatagaactactgttacccccacttttatagaatatatatatattttttgagatggagtctggctgtgttgcccaggctggagtgcaatggcgtgatctcggcttactgcaacctctgccttctgggttcaagagattctcctgcctcagcctccccgagtaattgggattacaggcgtgcaccaccacaactggctaatttttgtatttttagtagagacaaggttttgccatgttgggcaggctggtcttgaactcgtgacctcaggtgatccacctgcctcggcctcccaaagtgctgggattacaggcatgagccaccacacccagcctatagaatatttttatgagataactagatttatatttgtgttttgttttttg

SEQ ID NO: 26563 - DNA, 1056 bp, Homo sapiens
attttggggccatacaatattatggttaaaaaaaatcagatgttttctccttagattgtcagggtcaaattgattccagtggttgagaatgcagccaagtggggaatcaggtggaatggatggagagttgcccatagaggtctggaagaaagaagagaacctagcttatttggtgactcaaattttacctggggcatccccctggaaaaactctgggccttgattggggtcctcaggggtgtccccctttagggccccatcttagtctgtcagatgtctctgaccttagatgggtgatggtaccactttgggaaggttctctccaccactgatgacccactgtgagctttccttttgtccctggatgaaggccttgtcttctagcatccatataatttgataaggccatggtttcctgttccactggagtgatagccatgaactttaataataggaactagaggttggatggatttcttttgtcatgtggattacaggtaatctcaaggggggaaaggtagattttgggcatgaaaaatgaaataatagtgttggctattccactcaggccctcgacaagagagggaatgtttaaaaatccaccaccatgacagtggaccctgtgtaagggcaggccattctataaaaataatctggtgatgacaaaagaaacaagatgtagaatgtattctaaagattgtgggccccaaaagtcctcagcaagttgaatagattgagtaggataagggaagtcaaaacatctaagagatatcctttgccattacaagctaactctttaggagaatttgacataagaaaagagggcttaagttgactgaaacatctgtgagtttgttctggaagagctgccactgccaatttcgtcacatgtagggattagggactttaactaggaaagatagaaaagagtacttccccattctgggcagggcagctatccccattcacttcttggccttcaggtaacaccagagagtggctctggctagttgccctcaattaccaaggatctactaggaaacagcctctgaaaga

SEQ ID NO: 26564 - DNA, 1023 bp, Homo sapiens
aagaaagggaaggaaaggggagggaagagaaggcgggagtgaggtgagataggaataaggggttgagatgcatgagagagtgaaatgggagaagaaagcaatctgacagagaagagaagggttgtgatagggttcataaagtgggaaagaggctgggcccagtggctcacgcctgtaatcccagcactttgggaggccaaggtgggtagatcatctgaggtcaaaagtttgagaccagcctggcctgtgaccagtcggagactgaagtgaaggctccctgtgtccagaccctgtgtttctttcttctcctctgttacatctgcttgtctttttctcttggaatttatattctaaactattcaaatagactgttcttctgcctcatttccccctgagagacgtgatcttcataaatctttatgggaggcagagggaccaatagtctttcttctgtaactacttcatgctgattggggcacagtccctacctattggggaccatggaactctagcactgctctgtctagtggagatagggtgacttcttgatggccagggcaggcatcatcatctggaactggaagccctgctgcatgatcatttgaagcttaatcgtctctaggtgagaagaaataatctggtaaaaagatgaacaaacatggtccaaaaagtcaatgcaagtataattattaacaatgggctggccaagggaaggagccatgaagcccagcttggtgcccttgaccaggagccctatgatgtggacagctgttgttatattttagaagtcctgtcagctaattttcgagtggcatccctactaatcctgattggttgatataaaaacaacattcttataggaaaagacataagccatctttttgagcagttaggagatccagtctccttctattttgtacagtgactgctgccaaggagtctgtttgattttgtaaggtgacaatactttgggcagtgtcttccaagctgtctggaagatccttggatgagcattggtaatag

SEQ ID NO: 26565 - DNA, 1056 bp, Homo sapiens
ttgtgaattgacttttatagtaagtatagaactctgtaagaatgtaaataacgttgttagtgcatgaagacaagctgccagagggttttggttgtatgttacacagtgtgactagttcctatctaaaaattagtgtactgtatttagctctttatttaaaagtgaaacactaatttaacttatcttaaaatattttaatagttcagactaataatcatggattttatggggattttgaagctttgtgtcaagaccatatttttaacaatatcagaagcttttaataaggtgcttgctgctgagctaatgatatgcttttgatagtttttcttatacctatcttcaatagacatattcaggctagtgtgaatgtaataatcaagcctcaatcaaaccatacttagtatgacaaatattgcattatactgtaatttaggtattcatgcttctgataaagggtttaattcgactccttgagaaactgggaaaacactattgattttatacgggatgtaaaatagcagccatttatgatgtaagatagaaatcactttctaattaaaattaaataaagagaaattaagaatctcatggccttatatgcaatggtacatattcttaagtgtaaaattatattttttgtatcagttgtgttcctgcgcatggtttctgggcacacaaaaaaattgcagttattttaatagaagcagatgatattgacttttaaaacttctcttaatttttttctgtaggaacattgcagtggtttaaactacttattccagatataattgatttatttttgttttcccttttaagaaaatgtcaaagaaatttttggacagactattattcatcatcatatcccttttaactgggattgtgaatttatccgactgcattttgggcataaccggaagaagcatcttaactacacagaattcacgcagtttctccaggtgagcttagttttcataacaggtatcaatatatactattcttctgtgtccttcgctttgtatttattaagtttattacaaaaatagaagttctcca

SEQ ID NO: 26566 - DNA, 1160 bp, Homo sapiens
aagtgctgggattataggcgtgagccaccacgcccaaccgatagtctttaaatatgaactcatctttcctgagaaatggacctttacatatatttgacagcaggactactctattgactgtgcagtagtcccttctagaggtaggtaaagggctaatagaaatactttctctcagagaaacaggaggtcattcaggaaactaatgaccatctgagaggagaacccagaagtctgggactgagtctacatgccatgttggttgggacttcctctacaagttcctgttgttggtctttttgttgttgttgtttgttttcctttgttttcttttttggcttcccagttgttcctcctctttcctcccaatttttccttcactgaaaaactcttcacttctacaagtctcaccattgtttttgttcagctatgtacaaggatattcaccattcatggtgggagtcctaaaaacctctctgacttcactttaagaactgtgcaggtgaaattcagctactgaggaacttttccccctgacaataagaatgtttggtctcaagcctataagttggttgtagtggctcctgctgggctggaatccttggaataaggatgtcgttgggctgatggtaggtgggctgtgtcacagggctgatggcttgtatacctacaggaggagttctctggccacaccgttggtacagcagctccttccaggctcattcatggaacaggcatggtggcagtcttggagaagagtgccagccccggtcagaggtaattttgtactgcagaaaggtgaacaagaccagtaggaagtgcccataagaaccaggggagggatgagggtggatgagatggggagacacagtatgggtttctggggaaattaaaacctctgttaagacatatttacataatatatatgatttaatgtgtatttcatctagtccaatcatcataagtgactgatacagctaaactgactaatgttacacatctgtgaacatttttacttaatcacagttgtcaccgttacctgctctcctgacaaatcattgtgctcctctcctttgagcaaagagaacataatgacaggctacttttgtatttagccccagttcccttttcaatggaagtataaaccatccctttcataagcc

SEQ ID NO: 26567 - DNA, 1057 bp, Homo sapiens
gcggttacaaaatgggagagttcccttgtagcaggacgagccacaaataaaactcctcagacaccgagttaaagaaggaaggggtttattcggccgggggcatcggcaagactcctgtctcaagaaccgagctccccgagtgagcaattcctgccccttttaaggtctcacaactctaagggggtgtgggtgagagggtcgtgatcgattgagcaagcagggggtacgtgactgggggctgcatgcaccggtaagtagatcggaacaaaacaggatagggattttcacagagcttttctatacaatgtctggaatctatagttaacataaccgattaggtcaggggtcaatcttaactaccaggcccagggtgtggcgccgggctgtctgcttgtggatttcatttctgccttttagtttttactttttctttctttggaggcagaaattgggcataagacaatatgaggggtggtatcctcccttaccctgatcccctcacaggacttgtgacaggggtgtggcttatttgcttggctgccacacacactcaaaccccttacaggatggggggcatgcagacaggcaggtgcaggagccagggcaagcacttttgggctccggccccatggtagcgtctagagctatgttacaattaatgcttttttagcagttactatccacagatgactgttaaaccagctcaatggagagtcagagtgacagccttttacatcctgccaccttggtatctggggccttgtccagtgtccaggaaaaatcaggtcactcggacttgaaggatggtgaatgcaaggattttactgagtgatggaggtggctttcagtgggatggatggggatctggaaagagaatggagtgggaagatgatcttcccctggagttcagctgtccccccaccaatctcttctccaactgtccccagccaaactcctcttgacattcagatgctctttctcttcttctcttctctgctacgctgctctgccactcttctggtcttctgtacctgcttgtggagcttgggatttatat

SEQ ID NO: 26568 - DNA, 1835 bp, Homo sapiens
gagcagtttcatcctacaaccatccccaccccccgacccccatccatgaaaaaattgtcttcctcaaaactagtccctggtgccaaaaagtttggggaccgccgtcctaggaaataccaacaaaaagtcacgtttattgcctgccaagtgagtcaggtttagacaaggcagaacttagtatatagcttggatgaatcagaaagggtgggccttgaaagactggtagaatgtgtccaagaaaactgattaaaagccttagaagtccctctacagtttcaggacgccctcttaacagatggctgtatctttatctgtggttggtcttgtggaatactgactttctgccagcattagcctgtgtttctatgtcacaccaagtcacgtatattttcattgtgtgttaggactcagaataggtttgggtctttcttttaattatgtatacccaattacttagtcctcctcacaccctgatcctttaaaaattcttaagttgtgttaattgcatttttctcaattctactcctagtaactctgtgtgtttttttccatctttattcatttagtaaagttgaaacctttcatagcataatatagtgattaagtgcataggtttgggacttagacacacatgggcttgcttgtctcccagttctgccgcttaccacctatgtgacctttcactctttacctttccactcttagcctgttctctaactataaaatgagaatgatgctagcgtcatcttcatagagtgattatggagataaataagttaatgcatgtaaaccactttccataatgcctggcacatattatattatgtattagtaaatgtaagcactggaagaatcagtagtcttcctacacttgaaaatagttgtcttcaactattgttgtattaatgagttaattcaccttgttaagtcaccttgatccacctaattgtcagccaacatttattaacgaaactgctagtattcgtattgtgccttttttattatgaaacatttcaagaatacagaaaaatgcagaaaacaatgtaacaaatacctaagtatctatcacccaacttttatagtcttatttttacctatatattttttcttttagaaaggaatgatcacagttgtgcctgaaatctgtatagccctgtctcatttcatttgtctccctttacccacataagtaattgcagctctgaatttgatgtttatcagaatgataccatgagtggttttatatccttattatatgtatgcatacctaggattgtttttctgattttgaaacttcatataaatggtatcattctgtacaaaaccttctgggacttgttttaccactcatgtttttgagatgtatccacactaccatctttctctaaatcattcatttaaatgctgtagttcattgaataagtttatcacaatgtatccattttcttcttgatgagcatctcagttatttccaatttttgacttataaacaatgctgcaatgaaataattgacatatttccttgtgtacatgtgagcatttcttgagatatgtatctagaacttgaatcactggccaacaggatattcttaatcttcagtttcaccagatacttccaaattgatctccataacatgcataccaaattatattcctaccagccatttataggagttcacattttttccataccctcccaatcctgccttggcagatatgttttttccaatgaataacaatgaaattttgttttgggatttgacaaaatgattctagattcatctggaagaaaagcaagtataagtaagaaatttaaaagggacctgaaaaactaa

SEQ ID NO: 26569 - DNA, 1029 bp, Homo sapiens
ctatctctgacgttgcttcacatatcctactttggccttcagtattgtataaaattacctatgaagtctgtagtagtatacagatgctctaatagttttagttcctgtctctcattgggtaggtagacagatgagattaacctacatgaaactgcaacagacaattaagaaagtagataaggctgcagggcgtgctggcccatgcctgtaatcccggcactttgggaggccaaggaaggcagattgcttgagcctcaggagtttgagaccagcctgggcaacatggtgaaaccgtgtctctcctagaaagacaaagaatagccgggcggatggtgtgtacctgtagtcccagctgctcaggaggctgaggtgggaggattgcttgagcccatggggcggcggttgcagtgagccaaggtcatgccactgtactgcagcctgggtgacaaagtgagatcctgtctcaaaaaaaaaaaaaaaaaaaaaaaggtagataaaagattttgcgttgcagtctgctgttgaaaaggctcagaaacagagataattactgcttgggatagtaaagtatgggataatagatcttatgatggccctgttaacagaattttcctcagtaggattttatcagcaggttgtaaaaaggaataatgtaaaagggagaaaaaggtcaatgatcaaataagtgtaggaaatagtgggccaaagagggtataagtaccttcaaggcagtacctcttaggacctttaaattaaatgctagattgacagcttgcatctataagttagtgatgtaatgtgtgtgtagcatttcctaaccttgtgccgtttgccatggagtacctctcaggactaatgttacaagagaaactgggaaatactttagtagaaaaatggtggtatgttaatagaagaagtgagagacctttttttgtagcggtgaatgaggatgagattttacataacatttctgttaagtaggattgaggcacactttaaaggtccttgtaaattaggcagtggagcatc

SEQ ID NO: 26570 - DNA, 1029 bp, Homo sapiens
tggcctcccaaagtactgggatgagcgactgtgcctgaccagtagttgcttcttacctccaatcagtaggagacacaactgaaaaggcttttgagtagataattaaaattcatccttttggtaggatccagtcagggttatgaccatcacttccattgttaaaatgtctgaaaggattaaggtaattcagagtaaaggccaacttgagagggaattgcttttcagttgggttagggaaaagagactaaaggtatggaacccctgctaaagccaggtaaactcaaggtacccatagttagagagaaatagacacactgtctcatggggcaagaaagcaaagaaaagtagtaaatctaagaggcatatcttagaaaaaagctttggttctggacattggcgcttggaattggatagaatcaaatagataagccttctaattttttcagggagaggcatagacaaaagtctgaataaagtataactgcttgatacataatgatcttgctctctgccccatacctccctgacctatctgcctgctgagaattctgctctgctaaggagtcacactctctgatgctcacttcacttgtagcgttagaagataacagaccaggaaaaaccttccagaaggcagaacctagaggcacagagaacagcagacttagaaactcctcccaagggtcagtcagagcattccccaccttccaggacagagagcccttgcacaatctgttcagcctggcttatgaattgctatgaactactgactgttgtcttcttttcttcttttgaactggagcattttttatattctgtcagtgtgtattgtgtgtgtgaagggaagtagataacttgttttaataaataggtctctgtgaagaggggctgcatctggacttgatatagaggtgatttccccatcagcgcagatcctgtcctttgatcttgatgctgagactggatgggatatttgggttaccttctgaatggagggacaggtgtattttttcatgtgggaagaataaa

SEQ ID NO: 26571 - DNA, 1056 bp, Homo sapiens
gaattacatcctatttaattagctattaatatagataaaagtaccctacatgcagaaaaacccagagttagattcattgctgaaaacaagagcctggagtagggctcttttttgttaaaggggagctacaaaaagttgttgctgtttgttatcctgaggtatgacttaaatgaagatttacggagatgagacgatgatgcaggaaaataggaggacatcagcacagtcttacgaccaccacatctgaaccaatctgaaccattgaactgttagctgagtgtttggatttgtgatatagccagtattactgcttacaagagttatatatgagttttggggcttgcagaaatgccagacccaaaattgtaatactgagaaagaaagaaaaaaattgtattcaagatgatcctgcaaacctaaattccaaaatacatgaagacaaaatctgtgaaagatagctgataaaatcaacaattaggagatgaattcatgtcagattaaagaaaacaaaacattctgttgaagactttgaaaatcagtatgcttgcaattgtcagtgagataaaagaagcaatagcatctatagaaaagaagtgaaacaaaaacaataaatacggaaaaacaatcaaatcctgtacatgagaaacccatttcattgattctaagacaattttttgaaatcggagtgcatcttgctattcaaggcatgtcagtgtttctctctctttttttttaaactggtagtgctttttcttagatgaaacataaaagtttttcggggagaaaaaagacaacctttagaatggattgagcaaatagtaatatgcttaggaatttacccagaataccacacagagataatgaacgagcagttaagacatggaggatagattgagaaccaccagtgtaggaatttcagaagaaaagaataaagtgaatggcaagagaagcaatgtttgatgaaataatggctaagaattttcttgtgttgaagaagtacaatctacagatcaagttttatttcaagtatgttgataagtagaaataagttcatct

SEQ ID NO: 26572 - DNA, 1025 bp, Homo sapiens
ttttaatggatgtttttcaaatctattctcataatcttagcactcacaatgatcttgggattgcacagtgctcaatagtttataaaatttaatatttttcttctgattcttatgcccctgcaaggtaatgtttttccggttgttgacatgagaaaattgagttgctgtaactcacacaattccacagtgtagccagaactagaactcagttctgagcttttttttttttcttgtgtaatatattgtcgagtgtagttttggcataaatcatctagtagttttctgattcaatgtgttttttccattccatttagaaaatagggtattcagcaaatttttttaaaactgcaaatttattaaattaaaaaagttccttttcttgcttgattcttttccttaaattacctgttgctttttttttttttcccccatcgttgtgcttcacaggtattttaataatgcttttcatttcaggcttattcagaaaagttcggaatacatcactttgctctaggtttagagattttccttcaattaatggcctgaattgctgagaaaaatggcactacagtttatttttatctagcttctggagaggggatgacttgggcaatatttactcagatttgtcatttgcgttagctgtatttattttcaaggaatttcttgactagaaagctgttcagtgatggttgaatatctgcctttattactattttgtaaaaaaaaaaaaaaaacactttaggtgctgtaaatttgactttgttttttttaaagaaaggaaaagggacaaaatgccagtatcataaaattaatttgtgtctgagttactatattctttgataaaagttcaatacctgtaaattttatgctggtcagaaaaaatttcagtggatcctccaggtgagcaataaccttaagaagataaaggttagattttagacacactttagtgtagattttagtatatagatttaaatatttgtagtttacttaaaatgccaagagaccgaaatgaaacattt

SEQ ID NO: 26573 - DNA, 1138 bp, Homo sapiens
gtggatcataggaattgatttgtggagtgatactttcaatagtcactgaagacagaagtttggtatttggtatagtctacaacaaatgcttagtatgtccaggtattttttttttttaagttaaaccaatgttaagctattactggtaaataatttgtaattttagtgcttcgttataggggatgtgaatagttttaatgtcttgttttttcataagcagattaacatgtaaaaatgtaaaattatattaggctttgttatttttaaatacatttatggattggtacgccttctgttcacctcatttcagcttcgctgagagttggtagatttttttatgaactgtatccctctagttccaaagtgccaaaacaaattgactgtatcttaaaaaactactgcataagtaaaattaaaaagcagattgcttctcctgatcttttttgtatttcaaatggaacaaaacttttcttgtaactgtaatttgtaaagtttagatatcagtttacagatgggggaggggagaaggaaggaaatatgggtgaataatatgtgtatgtacatacatatgtgagtctgaggcccaaggatagaatactgtctccaaccttagccagctgtggccatatacttgtagggaagtttccatgcttcttcagctgcttttctgaattaccaaatcactcctgacaacacatattctgccacatgaagacgaactagaatcaatctgataaatctgagatttatcaatcaaatacatcataatttgccaatcatagtaaaatgaaaatagttttgcctaaaaaaaaaaaaaaaaaaaaaaaaacccaaaccatatatttatgatgtctggtacctgcacccaagatttttcactttgagtaaaattggtaagactggcttgtgtgtatttgccttagcaaatagaaaatttgctaaaaatttatttttccagtgcaaatatgaacttaagacatcttttcagcacatcttagaaaaggaaattcacatgagttcatgggcttagataatcttttattactcaaatgactgggaattatgagaggttatagctgtgtttttaaataattgtattttggaataattttaaatttatagaaaagttggaaataca

SEQ ID NO: 26574 - DNA, 1055 bp, Homo sapiens
caaaaaaaaagaaaaaaaaaaaacttactataaagctacagtaatccaagaaagtgtggtgctggtgaaaaaatagattaaaaaaaaaatcaatagaacaaaatggagagcccagaaaaagacccacataaatgtagtcaactgatttttgacaaaggagcaaaggcaataaaatggagcagagatagccttttcaacaaatagtgctggaacaactggacattcacatgcaaaaaactaaatcttgacatacagaccttactctttttacaaaaattaactcaaaatgaatcatagacctaaaggtaaaacccaaaactataaaactcctagaagataacacaggagaaaacctagatgagcttgggtttggcgatgactttttctagatacaacaccaaagacatgatccacaaaagaaagaattgataagctggcctgcattagaattaaaaacttctctgtgaaaaactgtcaagagaatgagaagacaagctacagactgggagaaaatatttgcaaaggacatatctgataaagaacatttctggactgttatccaaaatatgcaaagaacttaaaactcaaaaataagaaaacgaacaacccaattcaatgtcttgaggataggttggagatggccattaaacactcttgggtagatatcagactgggtagataccaagaccaattgttgtgtctcaattggaagctcagaggaaagtttgaggaagcaggtatataaatttagaatcattactatatggatattacttaaaacctgagggccagaatagctcaccttagacaggtgagaacagaaagaggagaaggcccagaaatgagcctgatgcaaaaggtctctggaaagaggaggggccagcaaatcgcagcaaaaaaactgccgaggccgggcgcggtggcccatgcctgtaatcccagcactttgggaggctgaggcaggcagatcacttgaggccaggagttcaagaccagcctggccaacatggtgaaaccccatttctactaaaagtacaaaaattagccaggcgtgc

SEQ ID NO: 26575 - DNA, 1029 bp, Homo sapiens
atcgaaattttttgagagtttcacaattatttgctgaatgtagatttccaatatgatttgttggaaatgcctttaaaatgtccctttgtatattgatttttatatgttctttagatgagctgaaattttgagagctttttatctttttaaaacctttgataattcagcttgaaagttacttaaaaatctatttttttccactgtgaagaatagaaaatcgaaatgaaacctacaccaaaaccagaccactgcttctaaatcaataaaacagtggatgactgttaggaaaaacaaagccacgcttctttaatatctactgatctatgctaaatctgctgcacagatactacccagtgttgaaaatgtactaattatatacctgacatcttaacagatattaaactaagttctagttgagcccaactgcagatcagagaaaagaaactctgtgcttacaatcagtcatcttaaatgcaattagttttctctggtctttcttttcaaagaaagggactaaggctcctcaggctgcaggaaagattcacacagattttgaaaagggattcattatggctgaagtaatgaaatacgaagattttaaagaggaaggttctgaaaatgcagtcaaggtaaagaattgtttttatttttgtatttcacaatgtttccactgatgcgaagttagtcatgataaaaatgaatgataattatcttttaaactgagtgtagtctaaaataaagtaataagatgatcagcgtttagtgttactatcaactgacttaagagctatagatgtttacatacttttagatcattttaaaaatgtgtgaattgtcagtagttttgtggaggtttttttctataattgaaaataaaataaattaggtttaagtaattgtaaataatttcgaagaatttgttcactcatggccaatgaaaaattgtacttattacatttgaatagctgaagtataatatatatgcttataattacttcaagaatagagatagaaagttagttaaataaa

SEQ ID NO: 26576 - DNA, 1032 bp, Homo sapiens
tcatagggaacaacttgtggtaatgtatctttcacttgatataaatttagatttcacagtcctctgtgctggaatcacttcttatattctgaatctagactccaaagctaacttactacagatgtttccccaggtattgaggttattaggataagaaaagcataattatgtcctttttttttttttttttttgagacagggtctcgccctgtcgcaaaggctagagtgcggtagcatgatctcgactccctgcaaccttctcctcctgggctgaagcgatcctcccacctcagccttccaagtagttgggactacaggcatgggctaccatgcctggataatttttgtattttttgtagaaacgtcgtttcaccatgttgcccaggctggtctcgaactcatgagctcaagcaatccccccgcctcggcctcccaaagtcctgggattacaggcatgagccactgcacccagccaataattatgtcttataaagtaagacactgttgaccatagtaatgtgaatctgagacttctttgacattgcagaggattcagagcaaacattttccttatacttcctgaaattttggtgacattttccttttctggttttgaacctgggaaatataagcaggaattttcctatccttactgttctccactatcagcagtataggtagtcaatatctgcctctagtttatcagttggtctgcatagttatctcagacatttttgtactttcagttcatgtgcgtttattttcaaagtcctttagttcagtgcttctgaaagtttaacatgcatatgaatcacccagggagcttgttaaagtgcagattctgatctgaggtggggttcaagattctgcatttccttttattcttttttcttttctttttgatgaggtctcactcatttggccaggcaggatcatagctcactgtagcctccaactcctgggctcaagggatcctcctgcctcagcctcccaagtagctaggactacatgtgtgaaccaccatgaccagct

SEQ ID NO: 26577 - DNA, 1956 bp, Homo sapiens
attctggatactggacctctgtcatatgtatgacttccaaatattttatcccattctgtggactgccttttcactttcttgatagtatcttttgttacataaactttttactttttaactcttacatttagatctttggtccattttaatttttgtatgtggatatccagttgtctaagcaccatttgttgactcttctttacccattgaattgttttggtacctttgtcaaaaatcaattaaccacaaataaactttacaacaaacaacccatccagttaaaaacaagagcggaggacttgagtagacatttctccaaagaagatatacaagtggccaacaagcatgaaaagatgcacaacgtcagtaatcataagagaaatgcaaatcaaaaccacaatgagacatcatcccacacccattgggaagccactataaaaacaacaacaacaacaaaaaaaaaaaaaaaaaaaaaaaacaggaaataacaagtgctggcaaagatgtggagaaattagaacccttgtgcagtactggtaggaatgtaaaaggtgatgcagccactatggaaaacagtttgatggttcctcaaaaagctaagcatagaattactatgtgatccagcaagcccacttctgggtaaatatcctaaagaattgaaggcaggggcttgaagagatatttgcacacccatgttcattacagcattatttacaacagctagcgatagaagcaacccaaatatccatcaataagtgaatggataaagaaaatgtagtatagacatacaaacaatagaatatttttcagctttaaaattaaggaaatcatgtcacatgctaaaacatgaatgaaccttgaggacattatgctaactgaaataagccagtcacaaaaagacaaatactatatgattccacttatgtgcagtttctaaagtagtcaaactcataaaaacagaaatagaatagtggttgtcaggggaacaggaaggtgttattcaatggctatagagttttagatctacaagatgaaaaagttctgtagagccgttgcacaacaatgtaaatagagttagcactgttgaactgtatacttggtaaatttacaagtgttaagatagtaaatgcaagtgttctttaccccaattttttaaaaaatcagttgaccataagtgtatggatttatttctggactcccaattctcttccacggatctttacgtctagtctcgtgccagtgctgccgagtcttgagtactgtagttatatagtcagttttaaaagaggggaggttaagccctgcgactttgttctttttcaggattgttttggctattcttggcccttgcattttcatatgaattttaggattgacttgtcagtttctgggggaaaaaatccgggattttgaaaagaattgcattgaatctgtagatctgtttgaggaacgttgccatgttaagattaagtctttcagtttactcacatggatgtctttccatttacttagctctctaatctctttcagtgatgctttgtctttttccatgtaagagtcttacacttcttttgttaaatatatttctgtctcagtttagtttgtgtcatttgtagaccctgcagtttcagccagtctcagaaagactctactgacgtttttgtcttctttaaggtagtgtttcttccttatgtaccactgggccacacatgctgtgatgcaggccctctctagtctcagcatcctctcctcatctatcccggtatatcagagggattcttttgactttcttccatcttcataaatagtttggatatggaagttccatctctgatcacattctaagaaaatgatatgtagtggtagttaaatcaagatttgtggctctccctataaacttatattttgattataaactacatcagcctattgttgttgtcctctttgaacaaaaat

SEQ ID NO: 26578 - DNA, 1051 bp, Homo sapiens
gtctttgttagtattggcaccctgtgagtcatttaggcttgggctcttcaaatcattttaacatatcttcttttatatatgatattcagttaatcaagtttcatgtttttttcttctaaatctcacctttattcatctcttcctcttcagttacactgcttgtcaagcaagactaaaactgcatcacttcattttgaaattaggtaactgcctcctaacttactgtccttgactctgttgcttcttttcctatgcagggcattctgattagcttcaaacacttccactctgccattttctcatgtcagaatccttcactgaaacatagaagaatatcttcacaacccaggataggcaaagatctcttggataagtcacaaaaagcactaaccataaaaggaaaaataaatggacctcattatgttgaaaaacttctgttcatcaaaaaacaccattaagtagagtagccaccagctacaaaaatatattcacaacacaaatatctggcaaaggacttgttttcagaatgtatatttttaaattttctgcaaatgaacaatataaagaccaatgacccagcttttaaaatcagcaagacttgaacatatactttataaaagaagataaatgaataaacatggaaaagtactcagcatctttaagcgatcatggaaaggcagattataaccataattgaatatgatttcatacttaatagaatggctaaaatgaaaataacaccaccaagtgtggataaggaaggggaacaaaaggaactgtcatgcattgctggtgggaatataaagtggtacaactgctttggaaaattggcgttttcatttaagttaagcatgtatctacactgtgatccagtaattccaactttcagtatttactcaaaagaaatagaaacatgttcatatcttatacatgcatttactacacagagtagcagccttattcatgatagttcaaaactggaaacagctcacatgtccatcaataggaaaatggataagttgtggtctatttttgctgtggaaatcataca

SEQ ID NO: 26579 - DNA, 1050 bp, Homo sapiens
attcacaataagatgcattagaacattcagcagggactctttttagatgagcacagaaattctggagggtgattagttgatgcaccagtgcatagcatcacactaaaataagaatagcttaacaataatcctgtctgtggacaccaaagattatggccacaatgcagcattattattgacttcttttcttgatatttatgtaatctactaggctccaatcactttctcttcacaaacggctgaacttcttgctgaaaacagtttggttatgatttttaatacgaaagcacaacagcaatttctcaaactttaatactaaattgcatttcaaaagacttgtttgtggccaggtgctctgcttttgttagctgcttagattgtgatcagtgaggtaaactcatttatctatttgcatgcaattgagtaatttaccatgaaaagaatgatcgggttttggataaaggtactgcacctgtagcttaagttttataattgttggtttgactattatttgcaatgatcgtagtttcatactgctttagaaaacgacaatacaaaatatatttacttatttatatatgagatgttttgtttttagttaatgaatttggtttaagtttaccagattgggatgaattagtatgaattagattgtctgaacttcaggtgtgtatttctttttaaaaacaatttgcttgtcctatttttaaaaagcaaattaattttgtttgtgtaaaacactataactactagattaggaatagtgatattactttcatatgtcctcaaatgatttttagaaattaccattttaatagctgaaagataaagataattttcaacaagtattggttaagcagttgacagccaacaaaaagagatactgagatatttgattcattcttgtatagttgtgtgtgtatgtacctagcttaattgttgccgtttacggaaaatattgaaatgctcagaaagttagagaagatactcgttaagtctttttggctaggttcgtactcatttttgcttcaagaatattataacgtactt

SEQ ID NO: 26580 - DNA, 1818 bp, Homo sapiens
tgtgatggcctgcacctgtagtcccagctatgtgggaggctgaggtggaaggattgcttgagcccaggaattcgaggctgcagtaagctttgattgtgccagtgtactccagcctgggtgacagagtgacaccctgtctcaaaaaaaaattggccgggcacggtgtctcacatctgtaataccagcattttgggaggccgaggtgggcacatcacttgagaccaggaattcaagaccagcctgggcaacatgttgaaaactcgtctctactaaaaatacaaaaaaaaaaaaaaaaaaaaatccaagcatggtggcacatgcctgtaatcccagctacttgggaggctgaaacataagagaatcatttgaactcgggaggtggaggttgcagtgagcggagatcgaacccaaaaggcagagattgcagtgagccaagatcatgccgcaccactgcactccagactgggcgacagaacaagactttgtctcaaaaaaaaaaaaaaaaaaaaaatccttagcaaactaacacagggatagaaaactgaataccagaggttctcacttataagcgggagctaaatgatgagaacttatgaacacaaagaaggaaacagtagacactggggtctacttgaggaaagagggtgggaagagagagaggagcagaaaggataactattggttactgagcttaatacctgggtgataggtacaaaaaaagcctgtgatgtgttcatgtaacgaaccttcacatgtagccccaaacccaaaataaaaattttgttaactctcatcatgttttaggactggaagagaaaaatgggtgataatgcttttattatttaaaagtgtttttttttcctgagtcttattttgaaaaattatacagaatagtttgcatggcatattccttgcatcatagaacttgctctgcttcaggccaaattgaaatagagacagaaaagaaagagaccaagaaagaggatatggagaatatcagccatttgtttcctttcccgtattcaaagacaaacatctcagttgcctggatctcttgaaattagtacttgtaaaagcttttaagtgttactggaatacattgttaaagccatatctggttgaaattttctgattaagcacaattaaataattgtttcagcaattacacagttcatgattatggtatgtgatgggacattatttttttaaaatctattattaagtaaaatatgtattggtggccaagtataagttttagtacaacttgctatatcttggacattttgcatatatagcttaaagaccagtggggtagactgggaagttttgtcagcttcataattttggaaaacagaaaaaaagaaaaaacaatgctgattaaacattcttagccataagaagatatgtgagtgtggcttagctaataatacctactttcttactatgtatcacttaatagactttttttgctatgaaatattcaatagttacacatttgctattttatagttatttccctgccctgttaacatcaagggttactaattgttgcattagtagttcctgacaaatagaaattatttgatactctaagccatttctgatggaagatacaaagttttgacaaacacgtgtggcacagcaagtgtcccattctaaagagcaaaataaatgcaaaccaccattatggtgaacacaaacagcctgaaagcaagttatcagtaagcaaataattgttgaactgttatgaatggaataggatgttgaaatagggcatgattggctgatgttacatatgtccttgattaccttccttgt

SEQ ID NO: 26581 - DNA, 1059 bp, Homo sapiens
ggctagaattttatgattttaatgaagtgtaatgaattcataaagaaaagatacccatgcaaatatctaggtttgccatagtaacttttcctaattgcgtacagagcattcctgaggttgcagcccaatttaagagcaacttttctgggctgggttacagataagacctgatcttttttcctactctcattccctcttccatatctcagggccttgaaaataagccttttctgcatctcaccatgtttcttcccatcttttatcttagtgggcagctgttgctttggctagaataagagcaaagtgaattggcatatctatatttgagatcagtaacattacttaaactattatattcctttattctaaattgacctagaaagcatgtcccatcaaaaacattagaatgtgagactcaccctcaaaagcctatttaattcacaatgtagtagaaatagaacaatttgagaaatatttttgtatctgtgaccatttttacgaccagttttaaaattctgctttttaaaaatgtgttttaaaataaccgacttatgaactttgcatatactcctgtttatataaggctgggactgcacattgctgtgcaatctgtatttttaatgctttacatcaagaaaagcaaaacttggtaaaaaaaactgtcattataaatgcaaatttcaaatttatgttccttttgaagactgtgagctcattgaggaggtgggtactgttttctttttcctttttaagcaaataattattaagaattattaagcccttctgtgtgtcatgtattatcttaggtggtgaacagaaaaagccctttctcctggaagacttacagtctcatggagtaatagacatccaacaaacagacatttaatataatgcagggaatgattaggaccgtgaataaaaacaaagcagagtaagaggaaactgttttagttagggcggctggggaagaccttatgaaataaggatacatgccatgagagaatccatggaaagctcagttcagggagaggaaactgcaagtacaaaggctctgaggta

SEQ ID NO: 26582 - DNA, 1053 bp, Homo sapiens
ttttacatgtaataatatttgtgaattcctatttggttttcattaaatgggttttgaatattctttcgacaatttcatattcttatcgagagataacaatacagtagtgcacttctggtttcttatgaaagagataattatatacgaaagcactttttttatatgaacataatgctactgaccctatgcatattaggaatttcccttggcctgtttgtattttttgcaatactatttatagccaatgatttctatttgccagatggttcactgaattcaagaaagtgatacatttgggagtgcccgttgtaatcttcattagcaccatctgctgacttactgatttgtgagtgatgtaatttatcaaatatgtcaggactttcatctttttcaaactagctgaagaatttcactccacataaacaggaaaagttatataaaattttttctagcttccacagattaaaaggtttataagtactttttaaaaaattaagtgttccttaggattctgtcatgtgaaattaaaatatatattctctatacatgtacacacatctatgttctaggaaatgaaatataaagtttggtttatagctatccagtgttcttcaaattacaaatgattcatctacacaaagaatttctttgcttccctaccctactcactttgttgaataattcaaaaacaatccccttaaaaatctgcactagagattaaggatctctgagtcatattttgttaccaaaacactgagttgggatgagctacacttttacaaccggagttgatatggtttggatttttgtctctgcccgaatctcatgttgaattataattcccagtgttggaggaggggcctggtatgagacgattggaccgcaggggtggatttccttcttgctgttctcgtgataatgagtgagttctcatgagatctggttgtttaaaagtgtgtagcacctacacctttgctctcttcctccttctccggctgtgcctgcttcctgtttacctttgccatgattggaagtttcctgaggcctccccag

SEQ ID NO: 26583 - DNA, 1022 bp, Homo sapiens
agtaatcaagatgttgtaagtgaatccacaaaccattttttattattacaaattgctgtttcttgaatgagtaaaactatatagaagtttttgttgtttttggtgagcacaagcatttttgaacacttgaggttttcattttctaaacacgatcagctgttacttataactaagattatactatagacggtattaattttcatttgagattgcttactgagtcatggtgtcaagcaggtacaggacattagaactgtcaaactactgcttaattaggggtttaaatttcaatctttgcacccttgctgctctgttagtagaatatgccatccaattatgaaatcagtagaataaactaattttacatattttttacacctaccagccatcaattatgtttcatttttgtgatcctacctttcttgaaactgttaataaaggataattatattttattatttattatactacatatttatgttcaactggaaaatataactaaacttttagatacgcagactgtgtgtgtgtgtgtgtgtgtgtttgtgtgtgtgtgtgttatacacacattttcatatgccctggtgggcttgtagtcatttaacattaccttttgggtaatattatatgagtcaattaatctgagtgatgaaattgattcaagataggtagacaaatacttggaaagtcttttaagttgtttaataatgaagggcaatgtgtcaagttcactaaatgcattttaaatagaaaaatgttttattattcttattataccatgattcagttccttcccctttcccatctttatgtgttcattagttttccacataatttgtacataacaactaaaaatagtttggggatactacacattatgtgcttggtttggggggaatcatggaataaatatattttcttgatttcttgagctgcctataaaaattacagctactatatctcagtaagtgtatatgtaggtggaagtgtgtatatttttgacacacaattttctatttctg

SEQ ID NO: 26584 - DNA, 1064 bp, Homo sapiens
aaatttattacttgacctcagttaataaatcttctcattgtggtatgaatggtaaggtttcctgaggctctgtgaaacaatacagacatcaaagtttacatgaaaagggatgagtcagtttccttgcccaaagggacttctcacacctgtatttggatgattacaggtagaactccctggctctaattgtatagtaaataccatttcccagaccctaatggtagacagactgcttaggagacgccagtctgtgatttagctgtcgccagacaccccatgttttttgtgagaccagttgtgatgatgacatggttatagccaattgaaagtaaacccttgtctaaatagcaaattttaatttataataatgtagaggtatgaatgatcctattttataaaaccaaatcttaataggttttatgtataactaatgatctggcttggggttggtgtgtgtatgtcttggggggagggttgggagggatccagatcttgtggaagttagtgtaattgtagctgaaagatcaaagactgggtaactgaatgatgttccagaagagaatttaccacatagccattttctgtacagtttctgccgcctgctgttcctattttccctcaagctagccattgactaccccctgtgcatccctgctcgtaaaaaatgattgaggaagtatttgtcatatatttatgagtgggaaatattgtgtgatagggaatggcatctactggagccagaaagattgccattttcctttcattcagccactctgctacagctttaaatcctctctgtttatgcaacatagcctttgtattaaagtgcagaataaatttttattatgagggatatgaacactaggttttcatcatttataacactgaaagcagatgtaaatagttaaaatccattttaactactaaatccttttaattgtgttagcatcttgttttttggtaatgtttacatctaagctccatttgcattattagttgcttctttagcaaaagaaaaagtttttgttttttaagattaacatgtaatgttactatagcaaata

SEQ ID NO: 26585 - DNA, 1037 bp, Homo sapiens
aggaaacaaaaatttgtgtgacttgctttatagcgatactcactttattgcacttacttttacttgctttatagcgatactcactttattggaactaaacctgcagtatctctgaggtatggttgtactgtaaaaatatattcttcctccttttatcttcacatttacctctttcttctctttagactgttgtgtgtcctttcaggtctattcatatatgacttaaagagatcatttctaaaagaacgtgatactaatttttggtaaggctgaactctcagtcctcataatctctagttagtggaaccaaattgtttaacagaaaagctgtatctgtgactccttcctcttttgcaccatctacatctcatcctgttgattttatctcttgaatattccccatacctctttcttcctcctgcttttattactacttctttggtttgagcctcacttatgcttaatttatttttgcagtttaactgatctttttgtctgtagcttgctcttgttttccacaaatacaaaatgaagaactaatcatgttattcccttgattaaattacctatttcctatgggatagtgccaacataaaggccatggctcacaaagttctttgtgatttgggtttgcctggcttaccattacttttttctcaactctcctgacagtgaacgtaggactttaaacgtactgattttacatgaggtcatttaccagaactttacctgtttggtgctcttccattcccatttctttttttttttttttttttggaggcggagtcttgctctgtcgcccaggctggagtgcagtggcacgatcttggctcactgctaactctacctcccgggttcatgccagtctcctgcctcagcctcctgagtagctgggactacaggcgcccgccaccatgcctggctaatttttgtatttttagtagagtaggggtttcaccatgttagccaggatggtctccatctcctgaccttgtgatccgccggcctcagcctcccaaagggctgggattacaggc

SEQ ID NO: 26586 - DNA, 1055 bp, Homo sapiens
taataaatgttccaaaatgtattttgaagcttttagtttacatatgattgaattgtctttaacatttaagaaacggtgccctggccaggcgtggtggctcacgcctataatcccagcactttgggaagctgaggcgggtggatcacctgagatcagaagttcaagaccagcctagccaacatggcgaaaccctgtccctactaaaaatacaaaaattagctgggtgtggtggtaggtgcttgtaatcccagctacttgggaggctgaggcaggagaattgcttgaacccgggaggcggaggttgcagtgagccaagatcgtgccattgcactccagcctggtgatagagtgagactctgtctcaaataaataaataaataaaatatttttaaaaataaaataaaatgaaactagtaagagaaagtaaccaacacacagtatgtaaatgagcaggttacccccattggcaagagtaaagaagctggggtaattatcaaccaatttatatcagttactggctatgggctactcctaggagtgttaactccttggtgcctgatgtctttgtggtttgagcatagaatttagtcagactaacagatgcttaccttaagccatcaccatgtactagacccatgatggcaaaggggattttgggcagggtaatcctgtaattccagcactttgggaggccaaggcaggtggatcgcctgagatcaggagattgagaccagcatggctaacattgtgaaaccccatctcgactaaaaatacaaaaattagccaggcgtggtggtgcacgcctgtaatctcacctactgaggaggctgaggcaggagaatcactggaacctgggaggtggaggctgcagtgagcccagatcatgccactgcactccaggctgggcgacagagtgagactcggtctcaattaaaaaaaaaaaagaaagaaaaagaaaagaaaagggataactatatgattatgatatcaactagttactgtagggaagtttcttttagaaatatatttcttaagttctctagcaaatggtctaa

SEQ ID NO: 26587 - DNA, 1049 bp, Homo sapiens
acagggtttcactatgttggccaggctggtctcgaactcctgaccttaggtgatctgcccacctaggcctcccaaagtgctgggattacaggcgtgagccactgcactgggccctactttctaacttaaggaaagtaattaaaactacacatcttacttaatgcaaagatacatattacaagctttaggttaaattagattatggttttgctcaaattgctcaaattgcttttgttgccaagatggtaaggagctttagctagattaagactagagttttaaagtgtttctgtaaaccagggcttaaactatattttcaaatcagagcttttggagtgtgcaataactagttttatacctcgtccctcgtcccgttcacatccccactcgcaccccaatgcaataaagaatttttgtcatgtcatttatggaaaataaataggagtttgtattttccagtgtttattaataaaactatagatattaaatgaattgccaatgcatgtttagctctctcccttctcttgaaatattaatgagctagagaactataagggagttgggaaccagagttctgacataaggtaatactttgttttgaagaatggattggaaatttgaaaacataaagttttttttttagcagtatattcttgtcttgatttctaacattgtatttaataattgatcttctattggtttaggaatctggcccctaacctctgaatgattgtggtgggactctggattagaatataaatactcaaaacatttactgttaacgcgtaggacaaactggaaagcaatgtaaaataatgtagcatatagtttgttttggtgctgtgatttgatatgaccatatatttgtgtaataattttatttctctttttctgaagtttgcattttagaagagtggttatctggttgacatcgttttcttgagttaatttgcactgttcatcctgttttcatgtgtcccatcagaattctaatgccgttcttctgatcgtatgtagagaacagcgattcccttttagctggttcttta

SEQ ID NO: 26588 - DNA, 1040 bp, Homo sapiens
cttgtagactgactaggacgttataagattgcagtagaaattctagaaagatctcagggagatcatacccattttgttgggccagttgaggtgggttacatcagaaaagtattgaggatgcagtggcctcccttacacagtctgctcccaaaggatgtggttgcttgcttgtccttcatctccctaggtcttatcctttcttacatgtttctactctcattttagaactgtgtgttaatgcatttaatggtgtattttgtgaggtatattatctggtttcagggcatctaccatcacagtacttttcatttggacccaagaatgtgatctctattgtgtaatgtggatttaatcagaccatcatcttcctattataacactaggtgttcttggtgagtcatccctcttacatttctgtatttccccttctatatcttagaaaaattagatagaagtcaaaatccattgacattatgaataaaggttataaaatagtttttttaaacagccaggcatttacttgactgattaatacctgtcccatgtttacattttccaagcatttaaacactagtttcaaattccagcagagacagtattttctctcttctcacagcatcaaaatacacttaaatatgggattaaaaatagtttatactttcatcaaaacctgtacatgactcttagtataacttttaaatggcatctacataacaccagtgctcaaatttgaaaccttgaaggctgtctttttccatcaacttgtgtgaatactgactccttccctgttccccttcatcttgggtttactttcttgtttttattatatgctgatctgtctcccctgttaggctgtaatcacttttgaaagcagaaactagttgtgttccgctttttcttatctcagaaatttgccttccagctcctggcaccattctctttgtgattaacatccagtaaacatttgttaaatatgtctcttaaaatatgtatctttttaactatttatacacctccaagtggatgacatgccacatttt

SEQ ID NO: 26589 - DNA, 1035 bp, Homo sapiens
catgtgacctctgcctcccgggttcaagcgattctcctgcctcagcctcccaagtagctggggactacaggcacatgccaccatgtccggctactttttttgtattttttggtggagatggggtttcaccatgttgcccagactggtctcaaactcctgacctcaagtgatcagcctgcctcagcctctcagagtgttgggattacaggcgtgagccactgcgcccagcctgacatttgagttatgaatggtaaatcatttgctagacaatgaatagaggaacggcattctcattcttataaagtgtgtttctttttgtctctgttactgaaattatttaatttgataagctaatccggtcctttgataggtgatactcttgcatatgataagcgcttaaacattatttaaacaaattattttacatttaaggaagaaaactttaactggaaagactttggttagatgaaagggaacaagaatttctttggcgtggactctccagcaaaggcaggaataggatcaacattcgttctataccatctttgtgtcagaaatttcgcttcacagtgtttttcagtacatattatcagtgtttggaaacgaagaaacctttgaaaaagattgttgttagctatatgaccttgggcaagttaatggcagaactcacaatttctgaagacaggactgttgttggcctgaacataccctttctttcacctcttatgtcagttggatgtattttccttaaacatatttgttttctgaatataccttatgcattccacccttgtttttgctgtatcccattttaaatatgggacagtagatactcattattacaatgttttatttaggtaggaagcgtaatatatgagttgtaatactttcagttacagtagaattccagttcaaaatggcttagaaaataaagatagtctatatattggcttgcagttactgagaagataagatacatggtttcatgcaatacatgatcagtgcactgactcagaactttccctaaggtcttaa

SEQ ID NO: 26590 - DNA, 1051 bp, Homo sapiens
atgattaattgaaactttttttgcttctttcaagaattgctctttaccttcgacatttgtgtcatacctctgctattgtatgtcttagcattgcacttcaatttgtaaattgctttcaataaattgtgtaaatttttattcattaatgcttcaagtttttttttctccccatctctttcccctctccttttaggactttaattatatgcatgttggggctgggtgcagtggctcatgcctacaatcccagcactttgggaggccaaggcaggcagatcatgaggtcaggagttcgagaccagcctggccaacatggcgaaaccccatctctactaaagatacaaaaaattagctgggcgtggtggtgtgtgcctgtaatcccagctacttgggagaatcgcttgaacctgggaggctgaggttgcagtgagctgagattgcgccattgcactccagcctgggcaacagggcgagactccgtctcaaaacagaagaaaaattatatgcatgttgaaccattttatattatctagtaggtccctgaggctctgttcgtttttattctgtcttctgtgtgttcagattagtttctgttgatttatctttgacatattcttttcctcagtcatcttaatttggctgttatgtccatatatctagatagatagatagatagatagatagatagatagatagatagatagatatacatattgtgtttatcagttctaaatttgtctcccttcctccctgccctcctttcttcttctcttcttccttctctcccaccatttctatttctctgctgggagtgcctgtctcccagttcattgtgtgcataatttacttttatttattgaaggtagttttaatagacacttaaaatttttttcagctactttcagcatctggataatctcaaattcaatctcacttgttttctgatagcattatgcttgatttttttaggtaattttagattgtatcctggacattatgaatgttacattatggcgattctaggttccagtttttctctcatatgtgtagc

SEQ ID NO: 26591 - DNA, 1027 bp, Homo sapiens
ttaggtcatttcagatttttagttcttcagatatttaactctttcttccctctttcagttccttattttattgagaaaacagaagcagtcagaaaagaattacctccctcttttcccacaatttattcactcaaggatatgatagtgaacaaatgaaacaaaaatctgtgccctcaaagtgcttatatactaaaggagggagatagacaataaacaaggtgtttcaaaagtaaagtatgttgtatattagatggcaataaatactgaggagaaaaagtagggaaggagcatagtatagtaagtgttggggtggagtttgcggttttaaaggcaaggagagagactcactgaagttgacagttgagtaaataactgaaggaggtaagggaaaaaatcacgtaaatatttgtaaacagaggcaacagcaaatgcgagtgccgtgaagctgagtgaggcctgctctttctgagttctgtcaccctacatccacttgcatcatatactctacctttccctctgatcataacaagtgagttgtccctgcccaggccaaccccatccacttgcacgtgaaatctgcttccctctgtcatataggactatgatcctgctgtcatgccctctcttacgtatttcacattttctctctagttggttcccctgagcttgcaaacatgcagtaatatcacccatctttaaaaaatgaacataaaagaaaaacaccaaaacaacagagtcccttggccctcattccctcctctccccagctactgtttcatttctttgtttgccttcacaacaaagctaaaaagaggtcatctccacttcttcacattcgattccttttaaaaacctactccagtgaagttttgctcccaaaagagcattttaaaatgcccccttgtttatgtcaccagtgacctctatgttgccagatgctccttttccatagttttctctgattaagtattagcaaatcatgtttttttttattatttgttttgccatactagaatgtaagatccaa

SEQ ID NO: 26592 - DNA, 1050 bp, Homo sapiens
attagataataaatattataggctttgagggtcatatggtttttgaaactactcaactttgcagttgtcgtgtgaaatatgaatgaatgaatgagcacgtaccaaatatgaagtggtgtgtaggctgagtatctctaatctaaaaattcaaaattaaaatgcttcaaaatctgaaactttttgagggctgacatgacgctcaaaggaaatgcttgtaggagcattttagattttggatttttagattatggatgcttaactgataagtataatgcacatattccaaaatccaaaataaatccaaaatctgaaacacttctggtctcaggcattttggataagggatacttataatatcacttaaaggtggactcagattaatgaaaaatgtatattgtaaacctttggacaactactgaaagttttgaaatagagtcataataataaatctatagaagagacaaaatggaattataaaaaaatccttagcacaagtcagagaaagaggaagaaagaaagaatagctggagtaagtagaaaattgctagcaagatggtagattttagtccagtcatatcaataatattaaatgtgaatattctaaatcagggattggcaaactgctgccggctagtttcatttgtttgtacatatgtgctgtgatcgagagaattcctggacttagagtgcatctagaatttagacagccataaacatgtgcatgaggaagaatttagataatgcacggtgtgatccaccagtttactggtaatttttttttcaagaaacaatttttggttggatgtggtggctcatgcctataatcccaacactgttggaggccaagctgagaggattgcttgaggtcaggagtttgagaccagcctgggcaacacagtgagaccccatatctacacaaattttaaaaaataataaattagctgagtatggtgacgggtgcctctagtcccagctactcagtgggctgaggcgggaagatcacttcagcccagtagttcaaggctgcagtgagctgtgatttcacctctg

SEQ ID NO: 26593 - DNA, 1070 bp, Homo sapiens
atagcctccaaagtaatggttctcaaaattttttatctcgagactctaaaacttttaaaattattaagggctctcaaaaccttgtgcttttgtaggtaaatgtcaatcagtatttaccgtattaaaaattaaaactaagatttttaaaatgacttaataattcattttaaaaccacagtaaacccattatatgtgtacataatatattttttgagaaatgattacattttctaaaacaaaaatatttaatgagaccaagagggattgcttttttttttaaataaatttctttaatgtccagcataagagaggacagctggattcttatatctgcttgtacatttaatctaacactgtatgttgttttggctgaggtatataaagaaaacctggcctcagatatgtggttagaaaagggaagagtattttaataacctttcagataattgtgaatattcttctttgatactacatcaaaacttgacaaataatagtatcttaaaagttaatcggaatgtggaatctgcaactataacaatgaacattctgtactcatattaaagtcccttagtctatcttgtactttgagtgactcttttacccatttggttgtttggaaaatgctgattcttggtgagtgatacagatattccaaatcttgagaccttatgtgatacagtatcaaaaaaatcaaatctgttgatatcaccacagatctcatcagaaaaatctttaaatattgggaagttgtcagggttacagtggcaaatgcacattttcaaaaattataatttttacttgaaagtctgaatcctgccacctcccaaccccccactatcttgccaggtcttattaacacttgacaaggaatggagcattggctgtgtttgagcagctgccccctgctagtgtgtaattcagggaattgggaacatgggaatgtttttgggtggtgtggtctgtgtctgccccatcctgagctttcccccggtggctgagagcctgaattttataatttacaagaaaatggctgccagatacaaaagattaaataaccatagtttgaatgt

SEQ ID NO: 26594 - DNA, 1033 bp, Homo sapiens
caactcatgtctgtagttgggaatagtactcaataaggcaagtctgactctaaaaacagcactgtttgcctttgtaccagtgctgaccaatggaaatataataaaagccataaatgtgagctacatatgtaatttaaaatttttctgatagccacattaaaaaagttaaaaagaaacaggtgaaatcaattttaataatatttaatgtaaccaaaaatattatttcaatatgtcagtatgtcagtatggactagccatatttcaagtacttcttaataacttaatggtacttaatatcttgtggctatttgctacagtattggacagccaagccctgtactataagcatagaaaaaaatttgaaaaagatacattatactattgatagatttctgaaaaatagaactggggtggagggagaaatgggtgatttttatttttcattttagaccctttgcttttaaaaaagcgaatatgtattattctgatttttaaatatgaggaatttttcattttaaataccagttttggatatgatatgtacaaatgattcaaatataattttctagagttctgcattaaaacaatgataggatgattttggcttagaatgatgtgatgtatggagttatcaataatgtatttctaaaatgtttgttttttaagctgggctaatcatggtggttctaccaggatgatttaggtaaggggtttaccctcagataatgaacttagtgggttctgttgttagagaacttacttcctcgattgttctcatagtgttatgtttgtacactctgttctaccataaagtgatattctaagaaactttagtgtagtgagagaaagagagagagagagagagtgtgtgtgtgtgtgtgtgtgtgtgttgtggggaggaggaagggaggctaagggaagggacggctgcccttacctctttgtcctaataacaaatgaatttctttgcacgcaactgacttttccctattctgtgtattcttggtgagggaatattatctagcttcctcct

SEQ ID NO: 26595 - DNA, 1119 bp, Homo sapiens
aactcctggactcaagcagtcctccgccttggcctgccaaagtgctgggattacagtcatgagccaccgtgtccggccagtaatgtgtaaagcttctttcacacacaacatgtatttgcccaggtgtggtggctcatgcctataatcctagcactttgggagacctacgcagatcacttgagcttaggagttcaagattggcccgggaagcacagggagaccacattgctacaaaaaaaaaaaaaaaaaattagccggccttggtggcctgtgccttgtagttccagctacttgcgaggctgaggcaggagaatcacttgagctcaagagttcgaggctgcaatgacctgtgattgcaccactgtactccagcttggatgacaacaagatcctctctctaaaaaaataaaaaagattaaaagaatcaatacatgttacttagtttgtttacccccaaataatgtcccctcccacccctggggtttgctgcctaatgtaaaggtatttcagatccttacccccattagtcatttagagttttcgctgaagttttattttcagtaggtttgtttgcaaagtgtactaatgaggacatgcaagatagtagaaataatgaaagattattttcttgtttgaatatgtgcagatctggagttactgtagttttttaaagtatatttttgaagttactgtatgctaactcgtaactatggattcagctatataaacgggagtttatctttcactaaacaagtgctgctgaggtgaaagttaggtcttattttgacacttaataaacataacaactgtcagaatttgcatgaggaattacaagagctcatcttttaattctggtggtttttttttcatcaggaaagctttgtgagaagtgtttttacagtacaaatgaatgtctgcttattaaatttaatttgaaaacagaatcagtcttcatttatcggagggtcacttatttttcttgccctagtttaaatccttggaatacttttccaaaaaaatattggttcttcattgatagtaaggagctgaaaaaaaaaattcaaagccagttgcagtggcacatgctggtaatcctagctactcagaaggctgaggccc

SEQ ID NO: 26596 - DNA, 1034 bp, Homo sapiens
tagataacattttctttatccattcatctgttgatggacatttggttctacctcttggctattatgaataatgcatcaatgaacatgggtttgtaaatatctctttgagatcctgctttcaactcttttggatatatacccagaagtgagattgctggatcgtatggtaattctatttttacttttttgaggaacctcaaactgttttccgtagcgtctataccactttacattcctaccagcagtgcacggagttctaatttctctgtactcttgccaacacttatcatcttgtttttttgatagtggccatcctaataattgtaaggttatatctcattgtggttttgatttgcatttctctagtgattagtggttgagcatcttttcatatttttttagccatttgtgtctctttggagaaataatctgttgagaacagacatttctctaggtgtgatcattgctgctgaagtgttgctgtttttaggccttcttctccgatggaagtagaaaatatgtaattatactcacccatgtatacatggattggcatttatttctgtcatcttacgtatttgtgtatctatcagatagatgcttttaacagtttagttatatctaattgaaaacattttgaaagaactttctacttcttttcccatgttttggatggatattatatataaatagttaattcagaatgctgtgggaatttgcactggtatccctacttcccattacatgctgcaattttgtgtaaagttttacataaaacatctattcagtcagattgacttaacagagtaaaatagtaatttccaaaataaagtatgtaggtcctaagtctagggggcatacatttagtctagtcactgtgttttttttcttttaatgctatctatcattgctgaaataagttatgtaaacccattcttgcatgagagaaattcctacaactttgaatctttctcctgcttttaagctttaatattaacctcaagggatctaggggtgcgtgtgtgtgtgtttaa

SEQ ID NO: 26597 - DNA, 1016 bp, Homo sapiens
gacagagtcttgctccattgcccaggctggagtgtagttgcctgatcatagcttactgcagcctagagctcctgggctcaagcaatcctcctgcctcagccacctgagtatagctgtgactacaggcacacgccaccccacctgagtaattaaaaagatatatttttgtagagatggggacttcctgtgttgcctaggctggtcttgaactcctggcttcaagcgatctctttgcctcagtctctttgtgctgggattacaggcattagcctccatgcccagcctatactgtaatttttatggttactttagagtgtactctttctacttataaaaaaaaaaagtaactgtaaaacagccgttggcagttccttcaggaggtattccagaaggaagcattgttatcataggagatgacagctccatgtgtgttattgcccctgaaaaccttcctgtgggacaaaatgtgtaggtggaagacagtgatattcatgatcagactccatgtaggcctgggttaatgtatgtgtttatgtctcggtgtttaacaaaaaagtttttaaaaaaagcacacattttaaagatataaaaaagcatatggaataaggatataaagaaaaaatatttttgtacagctatacagtgtatttgtattttaagctaagtgttattacaaaagagtcagtaagttaaaattaaagttgataaagtaaaaagtattggtaagctaaggctaatttattgaagaaagaaaaatattaaaaaataattttagtgtatcctgaatgtacaatgttcataaagtctacagtagtgtgcagtaatgtcctaggccctcacattcactcaccatcactcattgactcacccagagcaccttccaggcctgcaagctccactcatggtaagcgtcctatttcacttttatatgtatttttactgttccttttctatgtttagatatatagtacctgccattgtgttacatttgtctacagtgttcagtacagtaacat

SEQ ID NO: 26598 - DNA, 1049 bp, Homo sapiens
gcataatgaaattaatgtacgtggaagtaacctaaaaatattttattattcagaataagtgtgtgtgctgtttacacttttaaataaaatgctttcccctcccagtgtcattgaggtatacttcacaaatagtaaaattcactcattttaaaggtacagtttaatgagtttcggcaattgtatttggttgtaaacactactttttgtagaatgatcttacttcacacaactgtatcaggtaggattctttgtaagcaacacaattctggctgttttcagcaggaaaaagaggtttattggaataagtgaattacaatctgaacagccaggcctcaagagggataagagccaagtggtgctggcagaaatgggtccatgtggagctcagccatgtgaatccctggatttctgggtgtttctcatttcctgtctctcctgtaattccaattcctgagtaaggaaatccgaccggacttgtgtgcttctgtatagatctacaagatatagattgtgggagggagacggttctctaaaggatggcctgctgatcaaaagtaaggacattcagtacaaaaccatctagagaatctcttggtttttagctgggtgaataggaaggcttactttttagtctgcataaggctgatgacccagaaacttagaggtaatatttatagctaatcagatattgaacatttactatatgccaatcgctattttgagtactttatatatattatctaatttaataagtggtttgacattcccctccattgcaatttaaattctgtgaaggtaggaaggtaccgattgtctcgttcttgcttattggtatatttctagtgcctagactggtgttagaaacatagtagatatttagtaattatttgttaacgggacacgatggtgttaggaacatagtagatatttagtaattatttgttaatgggatacatatttcccctttgacggctggatgtagatttagtgataaggagacatgtttttgttttttgaacaagattttattctcttgcccaggctggagt

SEQ ID NO: 26599 - DNA, 1034 bp, Homo sapiens
gctgccatccatgaaagatgtgacttgctcctccttgccttccatcatgattgtgaggcttccccagccacatggaactgtaagtccagttaaacctctttcttttgtaaattgtaagtttggggtatagctttatcagcatgtgaaaatggactaatatagtaaattggtaccaatagagtgaggtgttgctgaaaagataactgaaaatgtggaagcaactttggaactgggtaacagcagaggttggaacagtttggagggctcagaagaggacaggaaaatgtaggaaagtttggaacttcctagagacttgttgaatagctttgacaaaaatattgatagcaatatgaacaataaggtccaggctgaggtgatctcagatggagatgaggaacttgggaactgagcaaaggtgactcttgtgttttagcaaagagactggcagcattttgctcctgccctagagatttgtggaagtttgaacttgagagagatgatttaggatatctggcggaagaaatttctaagcagcagagcattcaggagttgacgtgggtgctattaaaaacattcagttttttaagggaagcagagcatgaaagtttggaaaatttgcagcctgacaatatgataaaaaagaaaatcccaatttctgaggagaaattcaagccggctacagaaatttgcatgagtaacaaggaaccgaatgttaatccccaagacagtggggaaagtatctccagagcatgtcagaagtcttcatggcagcccctcccattacaggcccagaggcctaggaggaaaaagtggttttgtgtgccaggcccagggttctgtgctgtgtgcagcccagggacctggtgccctgtgtcccagccactccagctgtggctgaaagaggccaatgtagatcttgggacatggcttcagagggtgcaagccccaagccttggcagcttccatgtggtgttgagcctgtaagtgtgcagaagtcaagaattgagatttgggaacctccacctagatttcag

SEQ ID NO: 26600 - DNA, 1050 bp, Homo sapiens
ggattgttgtgtcttcctgggtaattgacccctttataatttatgtgatgtctctctttatccttgatgattttccttgctctgaaatctacttgtctgacattaatatagttactccagccttatcaattagtgttagcatggtatatctttttctgtccttttaatttatctgtgtctttatttctaaagtaggtttcttgtggacagcaataacatatagttgggtagttgggtcttttttttttttttatctactcaaatagtcttttttttttttttttttttaagagacagcatctctctctctcttgcccaggctggagtgcagtggcgaggtcatagctcactgtggtctcaaactcctaggcttaagctatcttcccaccttagcctcctaagtaactaggatgacaggcatgcacaatcatgcccaccaaatatttttttggtgggggacagagtctcggtctgttgcccagctggagtgcagtggcatgatctcggcttactgcaacctccgcctccagggttcaaacgattctcctgcctcagcctcacaagtagctgggactacaggcgccccccaccacacccggctaatttttttgtagttttagtagagacggggtttcactgtgttagccaggatggtctcgatctcttgacctcgtgatccgtctgcctcggcctcccaaagtgctgggaatacaggcgttagccaccgcgcccaatgcccagctaattttttaaaaactttttggagagacaggctctcattatgttgcacaggctggtcttcaactcctggcctcctgtcttggcctcccaaaacactgggattacaggtgtgagccaccacacccagcctctgtcttttaattggtgtgttaagaccattcttatcaaaagcaatgattgaaatagttggattaatatctactatatttgtaattgttttctattcattaccctaattttttgtttcctttttttgtctcttagtttctgttttctctggtgttaattgagcatttgataggaatccat

SEQ ID NO: 26601 - DNA, 1052 bp, Homo sapiens
tcccagtactttgggaggccgagtcaggtggatcacctgaggtcaggagttcaagaccagcctggccaacatggcgaaaccccgtctctactataaaatacaaaaaattagttgggtgtggtggcgggtgcctgtaatcccagctactcaggaggctgaggcaggagaatcgcttgaatctgggaggcagaggttgctgtgagccgagatcgtgccactgcactccagcctgagcaacagagcaagactctatctcaaaaataaaataaaataaaataaaataattaataaaatggtgtagtatttgcatataacctatgcacattctcccatatagtttaatcatctttagatacttataatgcctaatacaatgtaaatgctatgtaaatagttgttgttatactgtattgtttagggaataacaataagaaaaacagtctgtacatgttcactacagatgcaaccattgttaagcctgactacatctttttatctgcggttgattgaatctatggatgtggaacctgtgcatatggagggtcaactgtactataaataatacgaatatgccaacattatataatcattgctttctgcaactgtttactataatttcaaaattaatatcctattaactgttcctataaattatcaaatttggcaagtgtattactagcaggagatggaccttaaattatgacaactttatattttttgatagcatctcttgaaaaagaattttaatgattctaataagaggttctttttcttttttccatttccttgacaaatagtactcatttaaaaactagagggctaggcttagtggctcacgcctgtaatctcagcactttgggaggctgaggcgggcagatcgcttgaggtcaggagttcaagaccagcccgggcaacgtggtgaaacccggtctgtactaaaaaaaaaaaaaaagaaaaagaaaaagaaaaaagaatacccaggtgtggtagtgcatgcctgtagtcccagctactttggagactgaggtgggagtaccccttgagcctgggag

SEQ ID NO: 26602 - DNA, 1050 bp, Homo sapiens
attttaatttcaagatactaataaaagctgattagctttagagttatccagacctcatgttcattgtgttcctggcagcaagagggggtctgataattattgtactattcgtgttttgaatttgttccatgctttagcattttctgaacctctttagaacattttacaaaacattttgtattttttaacatttcatgaacacctttagacatattttgtgttcttggttctgttgctgtagtggaaaacttataatactttatcattcagaaaacaaaaaaaaattctgtctgtaaactaaatagtgcctgaaagagaacattgatccatgaaagggtaaaaggtttaagtataagtaattatagttattcattaaaaaaaatttttttttctgtctcgtgtatgccaggtactgtcctagatgttaaggacacaacattgagcaaaaacatgcatagtccctgcttccgtgacacttgagtgaactgaatgtgcaaagtccctgtggcacaaagtccctggggccagtgtgtgtggcgggtgtagaaggagctaaaggtatattggtgggaggtcgtcatttttttctctctctcatgttctaccaaaagttatatttaacttccgttaagtaattactctgttccagatgtgattataaagacttcagtggaataatcgcaagttcccatgtggtaggtattactattattgccattttacaggtgaagaaggtgagacacagaaaagttaaagttaattcgttcaggtcgggcacagtggctcatgcctgtaatcccagcactgtgggatgctgaggcaggcagatcacctgaggtcaggagttcaaaaccagcctaagcaacatgtcgctacaaaaatacaaaaattagccgggcgtggtggcacacgaatcgcttgaacccaggagacagaggttgcactgagctgagattgcaccactgcactccagcctgggagacagagcaagaccctgtctttagaaaaaaaagttattggtttaaagttgattagtagtgctctactata

SEQ ID NO: 26603 - DNA, 1032 bp, Homo sapiens
acccccaacagctacctgagttgaaaattactcatctagcccagttccatcactttacaggtaaggcaatgttagacaacatacgttcttttcatgcctctggcctctgatcctagcagaatcaggacccaacattcagattttacaatgaagctagtttctgaaatatgcctctcttttaaattctttgactgttactgttttctcagagttatatactatgtgttgcatatgtaagtctgaacctttaagatgggttaagaaaaaattatgagcattttcagatcgttctatacataactcaaggttttgataaaatgttttctacatgtattccattgccatccacctcttgagttctttaataatgagaaatctgactttcttccttccaccctctttatctctatgcttttgtcaagcatcttctaggagagttactgttatcccattaagtgtgggggacagaaacatttggcatagaaagctatggatctgcagctgacttaagctgtatattattaccctgacttgggcaccaaaatcacgtttcaaaactcatttgctgccaagtatggtagctcaagcctgtaatcccagcaatctgggaagctaagatggaaggatcactttgaagctaggagtgcaagaccaggctgggcaacaaagcaagatcccatctctaccaaatataaaaataaaataaattagccaggtgcagtggcatatgcctgtagtctcagctactcaggaggctgaggctggaggattgctcgaacccaggaggtcagggccacagggagctatgattacgccactgcactccagcctaagtgacagcaagactgtctctctaaaaaaaaagaaataaataaaacaaaaccaaaaaaagaacctcatttgccttcatacacctgacctgctctctttacctgcatttgtaactttctccccacacacttgaatgccctgtaaatgagaagaagcccttagcctaatgaagcgataaggtaaggtaggtaagagcttttc

SEQ ID NO: 26604 - DNA, 1028 bp, Homo sapiens
gtatcacccgaacctgaaatgaggctaaagacattaatggcgctggacagtggagtggagcccaggctttggccactgctctgctgctgccagctgtgtgacatgagcaggatgcctaacttctctggacccctgtttcttcctctgtaagtggtgatgtagactttgatctctgcaagtctcctgcagccttaaagttcttttctttttaaagaacgtggctgctggaaaagctgacactgagctgagaactccgcttcactgcggaaggccagacagcactgttacatccagcacctgtgggtcatccactgcagaggtggcttccaaagcctctgaggtcagcagtgtggttgtagctctcctctacccaccacatgatctctccccatctccagcttttcttgccttattttctttatctttttatttcccccccttcctttctgattgttctatttgttttcaattttcttaatccatttttctcttcacattgcccaatggtgtaagccacctgcactgcataagactctgcctgcactgccaggcccactgatgggccaagggttttacctgctgaccttttctctggaaaatttccctttaacagcttctcccaagaaggcttaagtctagtcttggcatttgttatttaccatttcagggggaacagtcttaagcttttaaaggaacattatgctgggcagcgtggtggttcacacctataatcccagcactttgggaggctgaggtggacagatcacttgaggccaggagttggagaccagcctggccaacatggcgaaaccccgtctctactaaaaatacaaaaaaaaaattagccaggcgtggtggtgcacgactgtagtcccagctagggaggccaagacatgagaatcgcttgaacctgggaagtgaagattgcaatgaaccaaggtcatgccactgcactccagcctgggtgacagagtacgactctgtctcaaaaaaaaaaaaaaaaaaaaaaaaaaaaaaggaacattatg

SEQ ID NO: 26605 - DNA, 1049 bp, Homo sapiens
tttggtaacaaaatgtgaagctccttcacaggatcagaggtgagtagctgtggtggtctccactgcccaggctggatgagcagaatcgtctgattggcctttcatgactttaaacggagctcaggcacatgtagacatcccaggaccaccagaagcagtggctcccagccccgactgaccccgtgcccacttgtaataacagtattttctaatgccctcttcaaaatcttcagtgaaccttcacaaataaaataatctgacttcacacacaatttccctccaaatcaatgtagtcttaatttaaaagagaaatgaaagtaatttattataaaataacttcagtttgtaagtgatcaggtacaactcatcagaaaacaaaagtacatggtcaggtgtttgcgtgtatgcgtaggatcacggtgggtgtgacagctgccattgcaggctctcttgagttaaagacttcagtaacaccattgacattgtccttgggctcatgattttccaaaggggcaactaactcttggtaaatatctgaacaaaacaaagtatttcatttgtatgacatttgcattaccggaaaatacagggaatgaatacaacagtgcaataactattttgagtttatgtataaattggagttaaggtctaggctcagataactagaaatagttttttcaaccacatcaatatgtaacaggacctttgaaggtcctgtgggacaattctttactgagtgagacagtgtggtacattgcagatcatctgaatcccaggaaggccccccattcttatggcactcacaaatgcccaccatttactgtccacctgcagagtagttgggtctgcctctcccaggcagctgcactagccaggcctggcttatatgcagtcagagggcccctaggggagtcttaggtcactgagcccttcccacagtgttcagatgggtggtgtcaggcccagaggtgcagagctatttacccttgttcctgagaatccaagggaggggcctttagtgtccatatagttctgtcctccagcaggtg

SEQ ID NO: 26606 - DNA, 1066 bp, Homo sapiens
tttcagtctctctctaacttctctactgcctagtctcccactgatgttaacatttaaacgttaattttgtaaagtggaggtatttttcctagaaatgaaatctgagtaattaggaatctgtaaatattttaccaacacttgttaaaggtgttgcattcatgtcctcatatagacccaggatattccttctgaatactttctggaaaaatctctcaagacagtaggctgatggatgccaaaagactcttagcagggaccacattctttatttgttttgcttctgggttctcctgtgtagaagcttctggtccaagcagccctcttattccctttggagagagcatgtttatgactctggtttgagtcatctgggttgctgccgtgacgggctggaaatcaaacatgacatgaagatagaaacacttactagaaactcacgtgtctggccaccctatttcagggggctcagattagctctacttggttggacatagttgtaattctgtacatagtaaactaaactgtgtatatgactaggactgggactctgctagattctcttcagcactaaccaaaggtccagctgacctgtatcctgtcctctagaggctaacagtctagaccaccaatccagggaaagagttacgaattcaggcctcaccgatgtatggggaacagttgaccctctacatccgcagtccagccaagcgaggatagaaaatgtcgttatgcctatgatggttgcctgtactgaacatgtatggacattctatagtcattattccctaaacagtacagtataacaaccgttttcatagcatttacattaggtattataagtaatctagcgatgctttaaaatatactgaaggatatgcataggttttatgcaaatactgtaccatttcatataagggacttgaacacccaaggattttgatatctgcaggggtcctggaaccaaccccacatatgtatggagggatgactctgtcaacttggggcaagggtaggtgctctgcaaccatggagatacagtcttctgctctcccaagagggtgaagga

SEQ ID NO: 26607 - DNA, 1048 bp, Homo sapiens
acaagtttaaattatctcttgacataatttactttaaggaaagtcagtactttgaaattacagagaaataacctagtggaagagttgataagcggacgcaaacttttattgtgaatcttgttgttttagtgttcaagcacaatgaagaacatatggcttacacaaagtcatttattcctgtacttgcatttttcagagtgaccctccacgaaaaggagaatcttatgaatgcagagaaccttggaatcgtctttggacccacccttatgagatctccagaactagacgccatggctgcattgaatgatatacggtatcagagactggtggtggagctgcttatcaaaaacgaagacattttattttaaatttttaatttgaggggaaaagaaatgttttacagatgaaggaatgttttatagtaatttaatttgctcctgtagctgcattatttcttgattagaggtttgggcatataaccagattaaagtgaaggaactttctgttgtttttgtagcaccgctcagctgtcttgtaaaacagtgaacacacgctttctggttctagtaatcctgggtgtttatcacgttcagagaaactcaagctattgcatgattagccccctatctggcaaggaaaccccatacagaagaaacaacaaacctgcgcctgcaccgcctctgcgtcctgggtagtctgtgcttgtaatccagcatgtttcacagagtaagcctgttgtgactttgcttttggggtctatgtcattggtttctgatgcttgtacaaacacgcacacacaaatggataaaacagcacctctggctgttacattaccataaaccatatcacatgcctacattttacaaatgatttctggtttctcttagttcttctctaacatagtactttctttccagcaaaagcaaaatgtgttttcagatttgttactttaataaaggttatccataccaataaaaagtgtacaacacagcattttctgttaaattattattggttttcagttgtaatttggtattttttctggcat

SEQ ID NO: 26608 - DNA, 1091 bp, Homo sapiens
ctttgacttccaccctacctgcaatacctctccctcccacccagtgccacagagaatgtggagcagagtcctgccatttgggtaatatacaagtggggcaggcacaatagcactgcagtagcatttaaaaaaaactttgtaaactaggttgacatttggatcacagtctacaaaagagcattctaaatctaaacaaattgactacaggttacaattttaaagatttagtaggaaccagagtcaaataatactcaaatatcaaagataccattcagaattactcatcaaaagttactctggaaataaccaggaaaaaaataaaaaaggacaattggcagacaccaacagcaacgtcaagatgacacagatgttgtaattatcagacaagaaaagcagctatcataaaaatgcccccaacaagcaattatgaacactcttgaaacaaatgaaaaaaaaaaaaaaaggaaatatccgaaaagaaatagatattaggaagaaccaaatggaaattttagaactgaaaaatataataactaaaaggaactcaccggattatgggcttaatagcagaatagacatgacagagtgaagatgaacttgaagtgaagataagtagaaattatccaagttaaacaacaaagagaaaatatgtattttttaatttatttttttttagagacagggtctcgctgtgtcattcaggctggggtgcagtggtgtgatcatagctcactgcagccttgaccacctgggctcaggcaatcctcccaccacaagcccgctgagtagctggaactacaggcgcacaccaccacaaccaccaatttttaaaaatttttgtagaggcagggtctcactatgttgcctaggcttgtctcaaactcctggccttaagcaattctcccactttagcctttcaaagtgctgggattataggtgtgagccactatgcttggcttagaaaatagattttaaaaagtgaactgagcctcagagaccagtgggaccataacaaaggttttagcatttgtgttgttggaatcccaaaagaagataaagaatgagaggctgaaaaaatatttgaaaaaaaa

SEQ ID NO: 26609 - DNA, 1009 bp, Homo sapiens
atttagaaaagaaaagagaaagagacaaaattagctgggtgtggtggcacatgcctgtggttcccactgcgtaagaggctgaggtgagaggatcacttgagtccaggagtgtgaggctgcagtgagctatgattgtgccactgcactccaacctgggtgacagagtgagaccctgtcaaaaaaaaaaaaaaaagatgtgtatgttctagaccttagaataaaactaaaattgacatagttaaactaacagtggagataaatggagtcataagaaatatgcagttaattcagagtataaaacataaaaaaaggaataaaggacaaatggaatgcatagaaaacaggttgatagttacattaaatgaaaatgactcaaacacaccattaaaaggcagagattgtcaggttggacaaaaaagcaagatccagtgatatgctgtgtacaggaaacccacattaaatataaagggcacagagagaagtgaaagaaaaagcaaaattctcatcagaaattatgcaagacagtggagcgacatcttcaaagaactgaaggaaaagaaacattaacctagaattctatatctagcaaataatatgtatatgtagacaataattcaaagaaaattggagtgactgtacttttttaaacacaatttttgaacaaggaatattattgggaatgaagaatgtaaaattaatcaagaagatataacagtttaaaatttatatgtacctaataacaggtgcaaaatacataaagcagcaactgaggtgagggtgaaatagacagaatatacagaaaattagtaagagtatagaagacttgaagaacagtatcaaccaatttgacctaactgatatttatagagtactccactcaacaacagcaggatacacatacttttcaagtgaactggaagattcaccaagatacataatattctggaccataagacaaatataaccatgtgtcatataactgtttcagtcaacaactgaccacagttat

SEQ ID NO: 26610 - DNA, 1031 bp, Homo sapiens
ctaactaatgaatatgaaaatgcttttttttggaagcagtgttactgcaaggggatgggttttttctgtgttttatttttaaaaatcatacagacattgattataaatgtttttaatattacatcacttttgattttatacaaaaatattttaaacttttaagctcatttatttttctttagaaaaaggtacttaaacagtaatggatctttaatgttttatctggtgttaagattcctaaaagaatttctatagtcctatatgctaagtgtttggtcatagcttggagtgatccacagtatctggttctttttctgctattcttttcctcccttaatttcttaactttttgagatttgttttacataaagatccacatttactctttaaatagaaacacttcaaaagcagctttatcacatgttatgtcctgtttatccagcaattccctcacacacagaaaaataaccaactttttaatggggcatctactttgaagaagagatctggatcctagtctgtcactttagctaatgatttttgctttgagcatgtcttaataacctctctgggcctcaatagtaaaatgaaggactcagcttcatagatgaccacaaggtcccttctagctgccataattttctacccatatgttctttttgttaacctttaagaggtttttccgattaaagattctgtacttctgacaacttattccaagaggtagaataggctgaacacatacaggtttaagtatagacgtgaatacttaaatctgctactgactaggattataaatctttgagccaatcaaaccattccctttggccttagaacattgaaagtctgttctagctccctactatacatttctaaggattgtaaagcttagaattataacagaaataactaacatttattgagcatggtgtttcagaagctgtgcgaagtacttcaccaggttatctcctttaatctttaatgcagtcttttagggataggtattaacatggagatctttgggggtgata

SEQ ID NO: 26611 - DNA, 1022 bp, Homo sapiens
gtaggtttgctgatggcttcgtttacattcttaaattttacatcttatccagtgtaaacattttagttaataatatctacattacttcatcttatacttatttactaacagtgtttagtgaaaggtcatctttactgtaaaatttccctccaaaaacaggggcttttatgcaagctgcagattgtttagcaccttcttaagagattttacacccctgttcctttcacccactaaacaggaagggatctctgttctgggtatagtttgcttattaactttagaatggctttgggctgctgcctaagttcatagtgagaaaaaagctgtagtcctcatcccttgagaaagttctgtttttatttataatgtggaaactctacaaatgagcccatgtctccatgtttccaagaatttttaaaaagataactttttaaggtataatttacatacagtaaaatgtgcacagttccatgtacagtttgatgagttttgacaactgtatgcacctgtataaccaaccctacaatcaatatatagaaactccagaaaattctctcatgccctcttgtagaaaatcttacccccacccagaccccaggatttctattaggacaagaaaaattttaaattgttgacctaacaggtgacatcttatttttagtttcttatatttgaagtactcctttctttgtttttcctctttttatttattataagcatatcatctaattatctttaatatctaccttccttaactccaattttggaatgtaaactttctcaggtcatttttcttagggaaatatgagcagcaaaggaattagaggtgtatagtagtgattacaaggcagtgtaacttgttgaagttcagtcgtatcattagggagtcttcaccttttaatcagtaataaatgcttcagtaaatttgagtacacaacaagggaggattcctgggtgcagggagaagagcctctgctctgttgggatcttggacctgagccagattcactcagccagccctc

SEQ ID NO: 26612 - DNA, 1021 bp, Homo sapiens
gtcatctcacctgtctggacttcagtttcttcatatgagataaggcattttctacaaaacaataattatacaggattttaataaatactgcagaaagggttctatgctcaaataggtttgatgaaaatttaagtttttttaaaagtttgatcctggccgggcatggtggctcacgcctgtaatcccagcacattgggaggccaaggtggggcggatcacctgaggtcaggcattcaagacctgcctggccaacatggtgaaacctcgtctctactaaaaatacaaaaattagccgggcgtggtggcacttgcttgaaatcccagctactaggaaggctgaggcaggagaatcacctgaacccaggaggcggaggttgcaatgagcagaagtcgtgccactgcacaccagcctgggcaacaagagtgaaacttcgtctcaaaaaaaaaaaaaaaaaagaataaataaaaaataaataaaagtctgatcctttctataggccttctctgcgttattcatgacttaatatgattatgactctataagagtgctctcatacttatttgatcaccctgccattattaagaacatttttgaaaaataatgtttcatgaaacccacttcgggaaattttgaaccagataatttcctaaggtctttctttgttttaaaatagaaagatgagaattccaagtgtttttatttttttgttgcagtcctaaaggtgtaagttgtgcatctgagctttcgggaaaggcttggcaggatggtttcatggccatgaaggtttttaccatgaggagtgaatcctgaagattcttacttgtccctaggatctggtgtgaaaaatattttttttccaagtgatagctatgtcatttttctcattaactatttcagttgcttcctcagcctgaaatatcaattggaaaacactgaaatagataaaaatatttaatcatgaaattgcagcatcttgagaagccagactttcttcccttctaaaatggcttaagttagcag

SEQ ID NO: 26613 - DNA, 1078 bp, Homo sapiens
gcaagcgtaaaatgctccatcagcacttggcacatgtagacactcaatgtagtttggtggtaatgttattatatagcagccatctgacctcaaggcagcatcctcaaataacttcccattaccttagagtatttgggtacagaatggaaataagaaagtttgtgtccagctcaaattttagtttttggcagatcttacattggcattttgttgctacggagaaaacaacatttaaaaggataagctgtagaaaatgtataaaaattgtttttttatatattcatattgttaggaaccacaaatcttgtttggaagtagccagaacttaaaatccttaatacctgctgtatttaatattcttttcatggtctagttcccattttctgactattggttgattttccatttatggcattttttagtaatgcttgtatttgaataatactgacattatattctttgcagatttgctagaacattctaagtcagcatttgtgaaatgtttaaaaatgtgtacatgtgagtctttcaaaattgatcagcctagtgaaaacctttgttaatgcattctgaacgtgctttccaacaccaagggactttagctaaagacacttagctgtttaacattaggcaagtcatttgacttcaccaggccttggttgtcccccagtcaaagtggaactgatattcacagagatagtaagctgaggtagatacctagaacacccttgtagctccaggagtcatgattccctgtgtattctagcaactttctgtactgaattccctggtcttgttttgtgctggtggacagcgatagctactgagagtgaaattgctggcactgggaagtatctctctgcggcagtacataattaagaatcatttttaaaattactctttgctttaaaccgcatgcatcttaaatctagctggcttaaaatctactcactcaaaaatagatttattttatttacaggtgtcatccaacaggacagggttgatgacctgttcaacagcttgaaacgttgattccctgtcacaatggatgacatttgtaagtaaagacaatcatgtt

SEQ ID NO: 26614 - DNA, 1049 bp, Homo sapiens
tcctattaaaatacatgactgctgaggtctaaagtacattgaatattcttattgatcaacttgaagaaaaaatgttagtatagaaatgtcatctattatggagttggccaattgaatattgactatgttttaatgtggtgtgaggtttattttctcccattttttccacaggtataataaagtggtttaaaaagataaataaaaaaaattatttctatggtaggcatgcttttgactagttgtccctaattattgcaagctcattctttgtgttcaaaggtttaattttatatattccagacgattcagagagattagccacagcttatttaaacaaagaagacacacacaaaacaaagcgatagtttttttttgtttttgtttttttttcagaaagaattcagttgcttacttttcttaaaaacatctttcccatttcattgaggcagatttggaagtcaaaccagaaacttcaggctctactacgatggcaagcactttgttggggagaaacgctttgagtccatccacgatctggtgactgatggcttgattactctctatattgaaaccaaggcagcagaatacattgccaagatgacgataaacccaatttatgagcacgtaggatacacaaccttaaacagagagccagcatacaaaaaacatatgccagtcctgaaagagacacatgatgagagagattctacaggccaggatggggtgtcagagaaaagggtaagctactatgaaaccacactttatctttttctgtttggggttcttttaagaaagccattattgccagaagagattgatttatccacagtgctttggaaagtatattcatttttcttaatgtctagtttctgtgatgctgagctttgcatataactaattcttgttctattaaaatatgttaggtaaatttttatattcctggttgttttctgttttatcagtttcacaattttaaaactatgttggaaaaatggcccctaataaaaaatagttcaggggattggtcagaagcataactcctggtcaag

SEQ ID NO: 26615 - DNA, 1046 bp, Homo sapiens
tgctagcatcataaaatgagtttggaaatattccttcctgtcttagtctgtttgtgctgctgtaacaaaatacagcagactgggtaatatatagacaattgatgtttatttctcatactactggcatctggtaaatccaagaccacggtgttagcacatttagtgtctggtgagggcccagactgtgcttccaagatggcagtctgaacactgtgttctcacattgtgaaaggaacagaagggaaaaagggccaaaccctgggtgaagcctcttttataaaggctttaattccatttacaaagtgattgtttcataaaggccccacctcttaataccactgcattggagattaagtttcaacattaattttgcaggggacacaaacattcaaataataacacttcctcttcaaatttttagaagagtttgagaaggaatggcaattattcttttttaaatgtttggtagagtttttcactgaagccatctggtcctgtccttttctttattgggaagctgttgactgctgattcgatgtccttgctagttacaggtctgttcagattttctgtttctttataattcagtcttggtaggttatatgtttatgtgaattaattcatttttaggttatccagtttgttgacatataattattcatagtaatttcttttactttttatttttgtggcatcagttgtaatatttcttgtttcacttctgattttagtctttgctatatttttcttaatggcttgtcaattttgttgatctttttaaaaaactaactcatagttggttttttttcctctgttgtttttctagtgtctattttgtttatttcagctctaatcactgctattaccttccttttgctaactttgagttttattggtcctttttttcccctagttccttgaggtgcaaaattatttgattgagatctttcttttttcatgtaggtatttaccactataaactgcctcttagttctgctcttgctgcatcccaaaagtacgttgtgtttttcttttcttttttttct

SEQ ID NO: 26616 - DNA, 1203 bp, Homo sapiens
ttaattcaggaataatcatcttttcagtctttaaaatcagtacatttcagaaactggaacatccattttgaataagaaagagcataaggttgcaaatggttatccagcattttatacccaaattttgccagaacacacagagaatacaccaattttagaatttgccagaatctatcaatagaaggtgggaggggaaatccctttcttcctttgcttccctcctctctgtgctctttcacatttaattataagctatttcactaaatttatatatatgatttgagtgttgatatatttacagtataggtaaaaaggtaatttatatcattagataatagatgtatattatatacatatggtggtgatattcattaaccaacaaatacaaattttgaggatttgttgataaacagaattaagtacagtggtgttggaaacaggaaaactagaagcaccaacacccataaccattgaaggttaaatgttaaatgtagtcattaactgaatttactcatttactttgcagattaagaggatgaatatgatatatacaaaatgtgggcttctgtgtagtgctgtctgtgtgtctttctaaaaattgtgtaaaagcatgatgtgacaaactgagttggactgacatcatgattttcagcacaaatacatgtattggttactaaaatactttcattgaaagatatatattaagttcatatagttatctacccaattaaactgtcctctctatcccagccaaatgtcaccatatgctttttagaaaaccgtgatttaattgtgtttagattttaagaaattagcaaagctcaggaagcagtgacaggctggtaacatgccttgaaaacagtatgagataaaataggaacttgattaagaagagggaggagaatacagataaagatgtgaagcaaagaggtttgtgttttctcttttataagtgtaatctttagcatatctaatacatagagaagttaatgcgttatgtagcagtattcagttctacctcaggaatacaaaccaggctctttatactatactggggcttataatgaacatatgtagatcttatatataaaggagttttttttttaattttagatttggcctttgtgacttctcattttccaactcctataatttaaaaaaattgaagcccaaaattattaagaactttataaatgtcatata

SEQ ID NO: 26617 - DNA, 1050 bp, Homo sapiens
agtttgctatttgaattaattcttcgtaaggttaagtttcacctcccctttttaaaaattctgattttcacttacatttacttatttaaatgtaggtctatcagtaactttgtttttattaccacgtgtactatatataaaatgcagaaaagtaggaaaaggaaaatattacctataatctcatggccctcaaagacaaacattattttttggcatttattaaatgtatttttgttgttctccctgttgctttgtttttagaaaattgcaatatccttctaggtgctggagatacaaggaaaaacaaaacagtcaagatccctggccttatggagcttaacagtttattaggtagagagaggattagactttaatgaattgtcccacaaatgccaagctaaaaactgaggcaaatgctgtggaaggaaagcaagggagatacgagtgcataaaggaggatctgatctaaacccagagtctcactctaaatctaaattgcaatcagggaaggcttttctgagaaaggaaagtctgatttgagaactgaagcgttgtgagagtgatctaaggaaagagagtgagtgagagggcaaagagaaagaacctagaagcccgaccagcatgtccatgcaagggctgcagtgcacatctctgaactgaaagaagagggtggccgggagcacagtgagttggagagggaagaagtgaggctgcacatctgcttcttgtaggcccggttaagaattttgctctttattctaagagctgggctgtgacataacccaagcttgaatttccttttggtttctgaagaataaacagctgaagtagatcaatagtggatgcacacaagaaagttacttgttaccttttctcttagtaacctcttcatgtccattgccctatatattttgtgtatagtatttatgcaaccatttattatatttaccatgcaagctttctctatttttgttggtctttgacataatttaatttttcctggttacacttcagtgaatctttttctaagtgaaaattttattttataaa

SEQ ID NO: 26618 - DNA, 1063 bp, Homo sapiens
tttgtttgtttatgtggtaaaacattttataggcaccttttattttcagttagaaatcatttttcttctcttcacttctcatttttcctacccattttatggtatcaatgaaaaaatgttaactactaaatacagaaaattggagaaagcaaagcatgtaattcaatacaagtactcattttaaaacatatcttagtcacattgagttcaaccagttttaatctgtaaacagtttcctattattattaatttataaaacttagaaagaagcatataaatgtttgtgtaagcataaagatgtttttcctatagcatgtaacacttgaagttcctcatttgatgtatttgcaagtaaactaatttggggttattaataatcatttttatattacaaattccttaattatccaagtactgttatattgtctctgagtttgaaaagatgattccaaatcaccactgaagtaatcataccttagatctcagcaaaacatctaaatgctattgtagaggaagaaaaacttctctaccctattagattcagtagctgggatttttggactatactgacaaaaggcagattaacaggagaaagggtttatttcacatgcacatggagagggggatctcacagaaaagaagtgaaaacaccaaggaggcagttagacttgggggttatataccattttaacaaagggtgatagagataagagactacacaaagaaaaagggatttgggcttggcagggtggtaagttgtgggaaggaaatatgtgataaataagaatttttagtaagatttgttatgcagactcaggtcatctcaggagataagaattgtctctgcagttggtttcctcttcctagtatggtagaagagtacatctttacatatggaaattttctttacaaatgtaaatttcttttacaaaagggaatttatgctatgtttttagacagaaaggaggagtacagaaagtgtctatgtttgatgtttctaaattgccttcagtttaaaataattcttatgccaatgtagcatgttttagggtagtatattgtg

SEQ ID NO: 26619 - DNA, 1057 bp, Homo sapiens
tttatagggtattaaaaaacaactttgtaaatattctttattgaattagtaaaatttgatcgtagatagtgagctaacttatttggcatgctgaaggttaatggttttctttgggaaaatgtaaaacaatggaaaacaagctgcatttctagtactggtaactagaatgctgtagcactgggtaggaaggcaggtatctgaaagtttatcttactacaaatggagtaatagaagtaaaacaatctgtgtaagtttcataacatatctgattctcattttcctgatttttttccctgtaagtcacttccaactctatgtaggtcttttataagtattcctccactttgctggtactcagtttttttcttgaagattttgtaagtttaaactttattgatttgttgaagcttagctattaccatattgatattttctatggcttaaagtgcagtgagaaaaataatttagaaaacatagtgaaaatatgtgtttcaatggaaaactgccttgtctacatgcagcacattttctcaggttatctgattctagcctttccttggctttggcctattttaaactctgtaacttgtagataactggtagtaatgcatttatagacatgtatattttgccttgtccagcgaaggttcagtcatatacctctcccatgcataccattgtggaaaaactcattttgcccttatttgcacatacatttcaaaatttctaatctataaatgtgtctgttcttcagattatcttttgaagtggttatatcatctgcctgatcccctcattgattaatgcttacaattaaacttttaacgtgtttatttttatatctgtatgagtcatgattttcatttgtgaattatctttaaacaacggttagatcccttactttgattttttcacttaaatgtaactgtatcttaatatgatgaataatttataagaaacttgtaaagtttgttattcaattctaattttgacttaaaatatgatagcagtgtatatatagaattactatgattattttcctaagccacgaggcagt
